United States Patent Application Publication US 2006/0123505 A1 - sequence listing, part 14

SEQ ID NO: 22802 - DNA, 1648 bp, Oryza sativa
  ref <308>: DATABASE ACCESSION NUMBER: AK072961
  ref <309>: DATABASE ENTRY DATE: 2001-12-06
ggcttcgctgcaaaaaaactctcctctcatttcagaggaataaatcctcgttgatcgattgcttgccttctatgcgatcttgttcgttgcttgcggctttaattcatccatcaatcgattgatctctgaactttctgagaagcagagaggaggtagcttgacagcagctgcttctcgcatgtacaagaagaagaagctgaggttcttagccaccgtcgtcatcgctgctgcatcacatgggcggcgtgatcggagcgttattccgcggtggtggtcaccgtcgtgagatgcacagagcgccgatgaaccagccgggatacggcggcggcggcgagaaccaccggagggcgatgctgaccaagaagtactcgtacatacctgacaactaccagtctctcgatcaggtgacagcggctctgcgagatcaagggctcgagtcgtcgaacctgatacttggcatagacttcaccaagagcaacgaatggacagggaagcgttcgttcagtgggcagagcctgcacaagataggcagcacaccaaatccatatgagcaagccatcagcatcatcggcaagacattggcacctttcgacgatgataatctcatcccatgctttggcttcggcgacgcaaccacacatgactacaatgtgttcagcttccatcctgacaactcaccctgccatggattcgaggaggtcctatcatgctacaagaagattgtgccacacctcaggctatctgggcctacctctttcgcgccgatcgtcgaggcggccgtcgacattgttgacaggagtggaggacagtatcatgttcttgtcatcgttgctgatggacaggtgactaggagtgttgatacaagcgataatgatctgagcccccaggagaggaggacagtggactccgttgtcatggcaagctcctaccctctatccattgttcttgttggagttggagatggcccatgggaagacatgcagaagttcgacgacaagatcccggctcgccagttcgacaactttcagtttgtgaacttcacgtcgatcatgtcgaggagcacgacgcagcagcagaaagagtcggcgttcgccttggcggctctcatggaggtgcccatccaatacaaggccaccatggagctcggcatcctaggccggtcgacggggaaggctaagaggatcatgcctgctccgccgccgctgccgtcggcggcggggaggcagccatcgctgaggagggaagacagcgccgccgccaccgctgccgccgccccaccgtcaccaagagaggatcaagtgtgcccaatctgcctgaccaatgccaaggacttggcatttgggtgtggccacatgtgctgcagggaatgtggggagagcctgaccaaatgcccaatttgtcgacagacgattcggtccaagctgaggctgtactcaggatgatcaaatgcttatggactgatggaatggagcttaaatctgttcttaatgtacagaatgcatgaacatatcgtttgtgagaaatactcaaatcaaatgcatgcattggatttgtgctgcgagataggggaccaaacgaatgattagatttgtttttggttttgttcatgttgatttgtaacaaaagaatcaagaatgtggtgtggggt

SEQ ID NO: 22803 - DNA, 1352 bp, Oryza sativa
  ref <308>: DATABASE ACCESSION NUMBER: AK072962
  ref <309>: DATABASE ENTRY DATE: 2001-12-06
gtttcgtcctccctccgcctctctcgccatccgccgcggcgccaaccgagtcgatcccccctcccgcccccgccgccatgggcctcctctcgaacaggattgggaaggagaccctgaaggcgggggatcacatctattcgtggagggccgcgtgggtctacgcgcatcacggaatatatgtgggcgatgataaggtgatccattttactagaggaaggggccaggaggtcggaacaggaactttcattgacctcctccttatgagctctggtcctaatacaaacactccatgttcaatatgcaacaatgaaggtgccaccaccaatacggagacaaatggtgtggtatcctcttgcctcaactgcttcctgtcagggggcgccctctaccgtttcgagtatgctgtcaacccagcacttttccttgccaaagcgcgaggagggacgtgcacgcttgccccaactgatccagatgaggttgttgtgcgccgtgccaatcacttgctcagcaatggtttcaggtgctacaacctgttcaagggcaactgtgaggacttcgcgatatactgcaagacaggcctccttgtggcagagcaaggtgtcgtcgggcagagtgggcaggccatctccatcatcggtggacctcttgctgcggtgatttcaaccccattccgcctagtaaccacgaatatctatggaatggcggtgatggcagttggggtgtattgcgccagcaggtacgcagctgacattggcaaccggcgagatgtgctgaaagtggaagtggaggacctgactgctgggctggcgagtggcaggattcgtgccgtggagaacatcagtcagttggttgctccggcagaagcccaaggtctggccgtaaccgcacctgttgctgcttaaagtgcaccactgagatctatacattactccagaccttctgctgctaaatttatggatgtttcgttgtcaaatatcagctgaaattgtgtaccagagtgagcctcccattcagcaatagctgtacaaacaatgaaaaaacttatacgcccgtttctgccatcaactgttatgtgtggcttatctactgttgtataaattatgaacatggaagtgtggtgcttgtcgatttgcaactcaagattgtgacagctctcttattttaggcagtaattccacttcattaggagacgtttgcttgtaagtgggaaatataattcacctgacctgagccaacttgggatgtagaggttaactttcattcatggcctcattgggagttgttgggacacggaaaaactgcaattttgtttgagaattcatataacagcaaagctcataagccattttttc

SEQ ID NO: 22804 - DNA, 1516 bp, Oryza sativa
  ref <308>: DATABASE ACCESSION NUMBER: AK072963
  ref <309>: DATABASE ENTRY DATE: 2001-12-06
gagtgagccaccgcgtcgtcgcgacgccacgccgcgcaccggctcagggactagggcacgcgccgcgggggagttggccggcaatcccaacccaccccaaaacggaggtgaaatttagccggagcggtcgagccgccgcggcctcgtcggcgtggagagacgaggacaccgcgcgcggcgcgttgggttaggatttggatccgcgggttcctctgcgcataaatttcgcgcggcgcggcgggttaggatttggatccgcgcctcgcctgccacgagacaatcggttgcatctgctactgcatcctgtttcttgcaaccagggtgcagcccgtcggtgcaattgcaggcgaatcgcaggccgtcgccatatgtgcattgccctccgcttgctacgcatttggggcaatcacctgatgcccccgcccaatccaggagaaaaccactcatgctggcaacgtaaccatctctactcccattgggatgctcaaggatcggcaccatctctactctacgtttgatatgacaaatcacatcatataatagaagtggggtttgtgtggatatgaaggaataaatggccatcttaagagaatttggaacgatagagggcatggaaaacctgctacctgaagatgtgctcagcaacatcatccaccgtcttgcaccacgctaccttgccatatcccgctgcgtctgcaagacctggtgtaccatcatcgaggcccacaacctgctgcatgtggacctcctcccacggccgttgtgtggaatcttcattaactttaatgagttaagcatgtcagagttcttctcccgcccctcaaaaggcccaacggtatctggcaactttgactatttgccttgcagctcctgcattatagaccactgcaatgggcttctcttgtttcacaagtatgtggttaacccagccacacgacagtcggcgccactgcccccatgcccatatatggtcgtagagcacattttccacagggagtaccttgtcttcgaccccacgttgtcaccgcattttgaggtattcatgatccctgagatccgacgatccaatgtgtggtataacatgttgaattcagatgacaagttagaccctgcaatagaggaattagaatggccaccgtcgccttgcatcctgcatgtgttctcatcaaggacaaaggtgtgggaggagaggtcatttgttcgagaaggggaggctgcagggaatgtttctgacatgcggttggatcacccatatgttccagacacttctgtttatgttccagacacttctgtttattgccggggagtactttatgtatattgccaaaacaagtatgttatgaggtaaatactcacttcattggcattatcattcatctttgtacctagtaatgaaacgaaaattcaattgtcgtttattaatatttctcaaatatttgattcttgtagaatatcattatccaatgggaaatatcaagtaatcaagccaccttcagattgtgaggggatggcatac

SEQ ID NO: 22805 - DNA, 2719 bp, Oryza sativa
  ref <308>: DATABASE ACCESSION NUMBER: AK072964
  ref <309>: DATABASE ENTRY DATE: 2001-12-06
gtgataggtgataagaggaatgcatttctagtttggttctagcttcccaatgttgagggatagcattggcacctaatttcaattcaagggagagagaatgctttttaactgttcagtagatattgcttgtttcatcgtgttgatgagaacaatcatattaaattagggcagactgtacaatgcattgtaagtaagatgcaatataattctgcactgtcttctcttctctgctttaatgctagataagaacatattataattcaggagatgataggtttgcatagtattttgattacatactgaagacaaatgttatagttggatgtaaaccattggtggttattatattaatacggcttggaatatggataaaaaaacaaaagcataaaggggaaattggaaaatatatcaagctttaactacttgtgggtcaatgtttggaacctaggttcttgttccctgcattgggaggactcctttttggttatgacattggcgcaacctctggagcatgcatatctctgcaagttagtccctattttggttggctatgcaatctgttatagttgtcatgtattgattcactctaatggtgtttattcctccagtctgctgaactcagtggaaccacttggttcagcctgtcatctatacagctagggctcgtggcaagcggttcactctatggtgctcttggtggttcgcttcttgcatatcgcgttgccgattttctaggaagaagaatagaactggtcacagctgcagctttatatatttctggtgctctggtcactggatttgcacctgattttgtacttctgatcataggccgtctcctctatggtatcggtattggtttggtgagtaactctgaggcaaccttttttctccccaaaatgcaatgccactgttattgaacaagtaaaagtataaattcatgtagatgaatgtcagaggaccaatagttatatatctttttgagttgggtagcacatgaaaactttaagagaggaaactgaactgcataatctgtatacttggactgcaaatgactcattacttccagatttagtaacagtgtagcttgatgaccacattttggtggaattaattataaaataagtggaaaggaaccatgaacgcgtttgatccttccagatatggcaatattgtgaatgcttgtagttgaaatccatcatttgggacaaggtctttccatatgaactttggacattgttgttactcagtgttgcggcagatatctatacctaattaaaaaaatacataaagcttccggtgaaaatttcgtccgtcaaaacccatgtccgagagactcttttatccccgcacaattagcgaagtcctgtttctgttaaccaaattaacaaatttaagttagaagcccaaacacggtcacgccaaaaagaaggcctgacctgggccttgaagaaggcccgacctggtttgtggcgttggggaaaaagatgaggaaaacagcctaagccagctggtaaaaccatggaaaaaatttgtatataccaaaaataatgaacaccacgtataagtggaagagatatagaaaataataccatctaacataaattattacaataatgggataattttactaatcagacccaataaatttaaccaaacattatcaacacagacatcaaataatctttacacgcatatttctcggtggtctcagctcgggttgggggaggaagaattactaataaaagatacacaaggattccgcatatttcttttcgtacgctgtccataccaatccactgcacacgaatgatggccagccggcgagcttccgagcttcccctgacctttttatcccaagttttgtgaatcactccgattttgagggaaacggaaagaaaatatcgtgtgggtaaaaaaacctcaactaattttgggagatcgagaaagatttggccggatttgatatgatgatcagcttcggtattgtatagatatgggactgtctcccggaggttgaagatgctactaaagcgcgtgggtttggcttggcaacgagagaagatatatgactatgctatctgagcctgtggctccatttgtgggctgggtcgaagagagccgagccgagcagagatatatagaggcagcagactgagctggggcttataaggaaggaatgattttagtgaaccttttgcattataatgtatagtgatttcaatattttaatttattgttcaacttctaatagatgttgtataaaaaaacgcttttacccgttgcaacgcacgggcattttttctagttaatactacaaacagtatatttgtttactgccaactaaaaaaatccgcaaatatctaaactgccgatgctttgttagaaaggtgttaataataactgaagaggaacataaatgcaaatgaacatattcatatcaaactaaaggtttggagataatgaatcattgttgtgtccatgtatattacatcatggggttatgtaacatcactgaatcaccatgctttgtgccaggcgatgcacggtgcacctctttatattgcagagacttctccttcgcgaatacgtgggacattgatatctttaaaggagttgtttattgtattaggaatactggtatatctctcttccaactgctacacacttttaagtatacccatctatcccctgctgactactccctctgtccccctccccc

SEQ ID NO: 22806 - DNA, 2303 bp, Oryza sativa
  ref <308>: DATABASE ACCESSION NUMBER: AK072965
  ref <309>: DATABASE ENTRY DATE: 2001-12-06
ggctatctacgcccccacgctctccccgcgcgatgactccgccgccgcgcctcctcgcgctgctcagatgcgcgctgcgcctcccgacgcttcctcgctccaggccgccgtcgtcatcgcacggtcccgacccctccagtatcccccccatcccgcctcctcctccaccgcgtcgccgatggctccatgtcgtcgtcgtcgtcgcgcggtcccggctggctgtccaccgcgccatcacagatccagccatccctcataccggactcccccatcctgacggccccatcccagcggcgaggaggcgtcgtcgcgcgggagatgactggtggggagagtgaagagggagaggcggatggcaaccctccctctgtcacgctcgctctccaatcccccttcacagtcgagccctgcgtcgtcgccttcccccgccgatgccaccacatcaaggcacctcacgcatggagctctttccccgaagccggacgtaatggccggtccctcgctaaggcgcccagcagatccggccagttgcctcagcaacagagagtccacggacttctccactgctctgtaagaggatctggactcttctgccaacgaggccactgtctgatccaccatcgtaggggattctttccgttccctaaatgcaccacatatcttcccctccggaatttttttttcgaatgaaattgatagaataccaatggctgttgcaacaagacgtgaggactggcaagccatctcttgatatgtttcttgctgagatgaggaggttcgaggtattgccatcagttaaaaattgctggaatgtgacttcgctcctcctcgctcgctcgctcctcctcgctcctgtgtactgccaccgcgccgccgcatcctcgccggagccactatcttctccatccgccgccggagccgaggtccatcttacagtttaattcctcactgaatgttgactatccctgccaatcaatcacacgattccctctgaatgctaatccattcaattaatttcctggactggtaatatctctcccatagtggggaatcatgtgtcttttgtacaaattacacaggttattaaactggattctccatttcactttagaagttgattttcttgctttcttggctatatttcctgtcatcacatcttacatttacaagtaggaatgaaatgatggccgactaccttcttgatcactgcgatgtgccccttcgcttcaaggatatgcataaatccaaggttgacattgtggccaactggagattttggtaaaatcctatcatgtttcaccatggcatttcactgtttggcgcacggtatttaggagctatttgtatagtaaatgctggaatattgaagtaaattatatgttcagcttattaactgcattgcgataagctttgatctagatccggtttcaattttcatttgtgtggtcgcatcctttaatttatatagcttcataagagtatactccgaagtacatgccgttttatgtatttttatgccttcatattctgattgtctaatggctctaaaacaacagacgtaaactacgatgtctgaagttttccatgttttcttccttatgaaaatgatatggagctgtggcaagctgctttggcaatccctgttgctgtccagagtaaagattttcatgtggcttgcgctaaagggcagatgcctcatggctgacaatctacagaaaagaggtggcctcatcaggcgaattgttccctatgcaacctgacatttcaagatgacacccaacctttttgttcaatgtgctttcacaaacaggatttggagattgctcaggagctaggtgaatgttggctttccgcttcccagtgacctcaatgtagacttggctgattggcggatggcttcaaggagaagcttcagagattatctcagaaaagttttcggtacactcttcttcagagattgtctcagcaagttgtatggttgtgcagctctttggtgacatcaaagaaatcacaatctggagggaggcaggcttcatggtaggcgaaaaacgattggcattattccttttgcagttttttctctcccactctttgtaaccggtttcgacaacttcgtgtggacgcttagtttgtaacaccatctcataatcttaatgaatttgcttagcctactcttgggccagtctggctaaaataaatgtaatcagagttatacttcatttgttggaaacataacttgtaaaataaaactaatcatttttatccttacaaaaggctgctcaatgctgcaataatttatgttg

SEQ ID NO: 22807 - DNA, 1447 bp, Oryza sativa
  ref <308>: DATABASE ACCESSION NUMBER: AK072966
  ref <309>: DATABASE ENTRY DATE: 2001-12-06
ggaccagggcaagcagcagtagcaaagcagaagcagaggcagaggcagcacagcttgatcgttcttccatcgatcgatcggcagctagcgctcacagtactctcgatcgctcgctcgcgctggtccgttgattcgttgtcctagatagatagctaaaggggggccatggcatcgacgacagcgccgtcgaggaccaactctcgggtgaactactcgaacgagatccatgacctctccaccgtgcagagcgtctccgccgtccccagcgtctactaccccgagaaatccttcgccgacatcttccctcctaacctcctcaagaaggtgatatcggaggtggtggcgacgttcctgcttgtgttcgtgacgtgcggggcggcgtccatctacggcgaggacatgaagcgcatctcgcagctggggcagtcggtggtcggtggcctcatcgtcaccgtcatgatctacgccaccggccacatctccggcgcccacatgaacccggccgtcaccctctccttcgccttcttccggcatttcccctggattcaggtgccgttctactgggcggcgcagttcacgggggcgatgtgcgcggcgttcgtgctgcgggcggtgctgtacccgatcgaggtgttggggacgacgacgccgacggggccgcactggcacgccctcgtcatcgagatcgtcgtcaccttcaacatgatgttcgtcacctgcgccgttgccaccgactccagagcggtgggtgagttggcggggttagcagtcggttccgcggtttgcattacgtcgatcttcgcagggccggtgtcaggaggatcgatgaacccggcgaggacgctggcgccggcggtggccagcaacgtctacaccggcctctggatctacttcctcggccccgtcgtcggcaccctctccggcgcatgggtctacacctacatccgcttcgaggaggcccccgccgccgccggcggcgccgccccccagaagctctcctccttcaagctccgccgcttgcagagccagtccatggccgccgacgagttcgacaacgtctaatcgccctgacgccatggacccacaccgtactgctatactgtatacgtatatacatatgtatgtatgtactgcacgcgtacgtacgtacgcacgtgcacgagcgcgggaagccattgtttgtacgatcgacgactctaccaagtcgaaatgtaatgtgtacggtgtctgtgtacgtgtggtggtgctgtgtgtacgtgggcccgctctgcttgaagaagaagagagagcttgagctagctatacgtgtatacatgtaccgtgtactatacgtacgtgcgtatttgtcttttttttttcctctcttccctgcgcctacgtgcgtatgtacgtacgctttctctcgctggtataatcagctggcgatcgatagcggcaaaaatatgtt

SEQ ID NO: 22808 - DNA, 1470 bp, Oryza sativa
  ref <308>: DATABASE ACCESSION NUMBER: AK072967
  ref <309>: DATABASE ENTRY DATE: 2001-12-06
gagcctcgaggctctagctagctaggactccacaggaggaggaggaggaggaggagagagggatccggaatctcgcgggggggatgccgccggtgggggaggtggcggcggcggaggcgagatcggggatggtgctcgggggaggggcggcggcggcggcggtggggggaggggaggacgcggtggtgatgcaggtggcgggggcggaggggcaggacagcgtcatcaccatcaactgccccgaccaggcgggcctcggctgcgacctctgccgcaccatcctcgagttcggcctccgcatcacgcgcggcgatgtgtctacggatgggcaatggtgcttcgttgtgttctgggtcgtgccccgcacgccatcaatcaaggtccggtgggcgaatctcaagaaccgcctcatgtcaatgtgcccgtcaaattacccaatgactttctaccctgagatcacccagccaggcccctcccagttctaccttctcaagcttttctcagctgatcgcaaagggctattgcacgatgttacgcatatattatcggaactagagcttataatccacagagtgaaggtgtcaaccacgccagatggcagagttattgacctcttcttcatcaccgacggcatggaattattgcacacaaaggaaagacaagaagagacttgttcgatgctgattgctaccttaggtccttccataagctgtgaaatcctattagcagaagggttccagcaaggattctcttctctcccaccgacaatctctgaggagctgttcaggttggaactggctgatggtgacaactgttcaaggtcaatttgtgcggagatgaaaagagtgcagaaagcaaccatcaactttgacaataccctgagccccgcacacacactgctccaaattaactgtgctgatcaaaaggggctcctttatgatattttgagaacaatgaaggactgcagcattcaggtaacatatggccgattctggtcagacaagaaaggttttcgagaggtggatctttttatcaagcaagcggatggaaagaagattattgatcctgagaaacaggatgttctcagctcacgctgggacgcacgaaggaagaaaaagtgtaggagttgcggcacatcaccgccgccgctcctacaccgtccgccatagcgattcccttccatctcgcagccatccaaagtgagtccttcttcgccgtctccgatctggaacttcaccgccgccgccgccgccgcatctcctccttcctctcttggcaactgtcggcggcagccaacggctctcttccccccttgttcctcccgctatcgcgagtcaacgggatgctcgattcgttacattttttttaagtactagtattgctaatttgttggagcaagctaactgcattgatcgctcacgtggtactgcttcgatcttcacaatcacccgataaaaatagttgcgacag

SEQ ID NO: 22809 - DNA, 1580 bp, Oryza sativa
  ref <308>: DATABASE ACCESSION NUMBER: AK072968
  ref <309>: DATABASE ENTRY DATE: 2001-12-06
gtgggcagtaggagaggagttggagggaggagagggagctccaagaatcaccagagagcgagcaagagagaggtgagaagtaaggtgagctcagaaggatttggtaagggatctcattatgcagacttcaaaaaccaggaatgggccttcagatgccccacagaaggcttctccggcaacaccacggtcatctcgggtggcgaaaactggagggaatgaaactgactctgcagggatcacaccaacaagaaccactccagagaggagccctaaggtcaccgagcgtcggtcaccacgaagcccaattactgagaagcgcccaagtaggctgtccgagttggagtccagggtcagccagctgcaagatgagctgaagaaggccaaggagcagctgagcttatcggagtcacgaagacgccacacacaacaggaagcagaggaagcaaaaaagcaggagcaggctgcaacctcaaagctcgaggacctacagcgccagcttgccgagttctcagctgcggaggagtcccgactccaggaactgcggaaggtctcacaggagcgtgaccgtgcttgggagtctgagctcgaggctgtgaagaagcagcagtcagtggattcagctgctctgagctcagccttgtctgaaattcagaggttgaagcagcagctgggggccaccacagagtctgatgcagctcgtgccaagcaatgcgagtttgcggagtctgagctcgagggcttgaagcaggagatggagctccggcttgcgaccatcgagggcctgaaggtaaacgttggcgagagcgacaaggctgtagctgaggcgaacgcggtggcagctgagaccaagaagcagcttgagatggcacaagctactattgactcgctgcttgctgagggtgcccggttgcaagaatgcctgaggtcgaaggacgcagagctcggccagtccatggctcgattagccacactggaggaagatctgaagaaggcacataacaaggatgatgttgatggcagctttggcagccctgatcatggtgaagctgtggagaaggtggtggtaactatccccaatggcaatggcagctgtggtggttctggcgcagagattgagcagctgcggacggcgctcgaggtggctgagattaggtaccaggaagaacaaactcgcacgacgatcgagacgaagaccgcctacgaaatgctggagaatgccaagtcagagtacgacaagagcagccggcgcgccgccagggcgtcggagcagctggacgcggcgcaggcggccagcgtcgagatggaggccgagctgcggcgcctccgggtgcagtctgaccagtggcgcaaggcgccgccgccctcttcttcttctccttcaccacggttgttggtttcttggcttttctcctcccttttcttgggaaaagagaagacagataactcgatcttgtgattaatttagccgcaattgaccaattttttttggcaattggctgtgttcttctctctttccaaaaattttgtcgattgggaggaaagaaaagaaattgatagggaaaaaacaaaattgtggagcc

SEQ ID NO: 22810 - DNA, 964 bp, Oryza sativa
  ref <308>: DATABASE ACCESSION NUMBER: AK072969
  ref <309>: DATABASE ENTRY DATE: 2001-12-06
ggccggcatcgcggccacgtccaccccaacctccccttccgccgatgccggagcgccgccacctcgccggagactcaccgtgctggtgatcatcctccggacaacccaccatggagcgcctcctgcacttccggcccccgaaaccgacctctgccaatgccgttgcagcggcggctaccgccgacggcgacctcctcgagctcgacgtgctctggcctgcatcccgcgccccgggcctcctcgcggcgctccctgaggaggacgggaagcggaggaggaagcgcggcgggagcgggagcgggagcgtggccgtccgatccgcggcgcggcctatcccggagaccgccgcgttgaccctggtcccgtcgtcgtccgcggcggcgatggcgaagtcggcgccggtgaggataccgtcggaggcggcggcggcgcgtaggggggtgatgtgggcggcgcaggcgggcggcgaggacggggaggcggccatggtcccgccccacgagatcgtggcgcggcgcgccgcggcgcacagctcggtgctggagggctccgggaggacgctcaaggggcgcgacctccaccgcgtccgcaacgccgtcctccgccgcaccggcttcctcgactgaggcgaagaataaacggcttatgatgcttaccttcggcgctaaatagttgtgacagcactcttggggggaccattgcccctcagcaacacaattcctataaggaaacatatggtatgctcactgctcagttcacctcataggtctagaacttcttgctatcccttggttttttacgtaatagagggagtagttatgttgcttcgtaaccaaaacttgggtgtttgtggttatggtaaaggagttatgtacacatttttgtgtgttttcctggctttgatttattgttttatcaatcctctcttaccaaggttttattcagactatctgagtaaacatgc

SEQ ID NO: 22811 - DNA, 2243 bp, Oryza sativa
  ref <308>: DATABASE ACCESSION NUMBER: AK099312
  ref <309>: DATABASE ENTRY DATE: 2002-08-28
gatttttcctcgtccgctcgctctcgttcatgtacaaataggagggcgcatgcaccttgtttgccattagctctcgacgtagcctagagcgcaagcagcagcagcagctagattggttggttgccaatgatcccggccatctccccgatgatggacggcgccgcgcctctgcttcccgagacgagccccgagagccgccagcaacgtgatccggagagggggaagaggcggacgccggtcctcccggccgtcgtcgcgtccgccgtggtccttctcggcctcgcggcgctcttcctggtgtatggatttcacgacggtggagacgggagggcggccgtactcgcgcccggcaccgtggaggtcgcggcttcgtcgtcccgcggcgtcgtggagggcgtctcggagaagtccaccaccccggcgctgcgcctcggcggcggcgcggtccgggactacgcctggaccaactcgatgctgtcctggcagcgcacggcgttccacttccagccccccaacaattggatgaacgatccgaacggtccactgtactacaagggatggtaccatctgttctaccaatggaacccggactcggccgtgtgggggaacatcacctggggccatgccgtgtcgcgcgatctcatccactggctgcacctgccgctcgccatggtgcccgaccactggtacgacatcaacggcgtctggaccggctcggcgacgcagctgcccgacggccggatcgtcatgctctacaccggcgccacggaggagtcggtgcaggtgcagaacctggccgagccggccgacccgaacgacccgctgctgcgggaatggagcaaggcggaggcgaacccggtgctggtgccgccgccgggcatcgggctgacggacttccgcgacccgacgacggcgtggcgcaacccggccgactcggcgtggcggatcaccatcgggtccaaggaccgcgaccacgcggggctggcgctcgtgtacaagacggaggacttcctgcactacgacctgctgcccacgctgctgcacgtcgtcaagggcaccggcatgtgggagtgcgtggacttgtacccggtgtccacctcgccggccgtcgaggacgggctcgagacgtccaccccgccggggcccggcgtgaagcacgtactcaaggccagcctcgacgacgacagaaacgactactacgccatcggcacctacgacggcgagaccgatacctggacgccggacaacgccgacatcgacgtcgggatcgggctccggtacgactacggcaagttctacgcgtccaagacgttctacgaccccgtcgggcggcgtcgcgtgctatgggggtggatcggcgagaccgacagcgagcgggctgacatactcaagggctgggcctcccttcagtcaattccgaggacagttatgctggacacgaagactggcagcaacctgctccagtggccggtggtggaggtggagaacctccgtatgcgcggcaagagcttcgacggcctcgacgtctctcccggctccgtcgtgccgttggacgtcggcaaagcaacacagctggacatcgaggccgtgttcgaggtggacacttcggcagccgacggtgtcgtcacggaggctggagcagcagcatacagctgcggcacgggcggcggtgcggttggccgtggcttgatgggcccgttcgggcttctcgtgctggccgatgatcagttgtcggagcggacggctgtcttcttctacctggtcaagggagtcgacggcaaccttacaaccttcttctgccaagacgagctcaggtcatcaaaagcaaacgatctagttaagagagtctatggcagcttggtacctgtgctagatggcgaaaacctgtcaataaggattttggttgatcactccatagttgagggcttcgctcaaggagggaggacatgcattacctcgcgtgtgtatcccaccaaagccatctacgagtcggccaaaatctttcttttcaacaatgccacaaatgttagagtcactgccaaatcgctaaagatttgggagctgaactctgcttacatccgtccatatgtagactagatcatttttaatgtaatgggaatgaatgatttgtctacatttgttagttatgtttttataggctaatttatcttttttgcttccttctttatgtcaaactacaactatgacatattactagcaactgaaataaaacataatcaatc

SEQ ID NO: 22812 - DNA, 3710 bp, Oryza sativa
  ref <308>: DATABASE ACCESSION NUMBER: AK072970
  ref <309>: DATABASE ENTRY DATE: 2001-12-06
gaatccccaattccccggagaaaaaccagagatcgccatcgccattgccgcctcctcctcctcctcctcgaatggcgagatcggtgggcggcggcagcggcggtggcggggagcggccggggagcgcgccgatgcggctgtgcgtgcacgtgctggaggcgcgggggctccaggcggcgtacctcaccgggcacagcgacccctacgtgcggctgcagatggggaggcggagggcgaagacgacggtggtgaagaggtgcctcagccccctgtgggacgaggagttcgggttcgccgtcggcgacgccgaggaggagctcgtcgtgtccgtgctcaacgaggaggggtacttcggcggggggttcctggggcgggtcaaggtgcccctctcgaccgtcatggcggcggacggcctctccctcggcacggcgtggtaccacctccactccaagggcggcaggttcaggaagaaacggcgcgttgcgggtgaaattcgcttgaggatttacttatctaggacagccatttgcgacgaaccgagaaacatgccaatgcaacttatcaatgatacaccatgcagctcaatgaggtcagttggaaccactgcctcgtccttatcagcgaggtcagtaggaaccactgcctcgtccttatcagcgaggtcagttggaaccactgcctcgtccttatcggcttctgttagtagccttgatctgtcagcctgtcctagcatggaaagggcatcctgcagcagtatggataagttgagccagggcatcatggatcagcaaggccgtcgaagcccagggcaactgtcttgtatcagcacagaaagatctattcttttggagcccgaggaagatgacaatgatgccaccaccaatgcatcatcagtagtggaagtcatgtctcgctacttttgtcggaaacctgttgacgccgcaccttctgccacatcagatcatgagcagtttcaagatacacaaatgaactctgaatcttgtgaaaatggtgataatggggcgctccctgaaactagtttaaatgagctaatgaaatccctggagtctaaagataaaggttctgaaatgccagaaaacttgcgtggtggtatactcgtggaccaatcttatgttcttcaaccaactgaaatgaattccatgttgttttctgcacattcagatttctggccagcagttgcagaagttcaagggttaagcggattccaaactgacccctggaaacttgtaagcaatgattgtttgaaaagaactttaagttatacaaaagctgcaagcaaattagttaaagctgtaaaaattactgaagagcagacatacttaaaggcagctggaaattcttttgctgttctttccagtgttagcagtcctgaggttccctgtggtaattgtttcaaggtggagattctgtactgtataacaccgggtccacagttgccatctaaagaacaaacatcacatcttactataagttggcgtctgaactttgtccagagtacaatgttgaaagggatgatcgagagcgggacaaaacaaggactccgagagggatatgcacagtttactgaagtactgtcccagaagaccaaagtgattgcgcctgatgattctaacttaagcaaagacgagattttaagctcattgcagacacaggaagaatcaatttggaaactggctgcccgcttccttggaaactttgcattcatattctctctctgtatagcactgtatgccactgcacatcttcgtctagttaagccaaatatggtgcatgggctcgaatattttggtattgatctcccagattcaatttgggaggttgtattttgtgccattttgataattcaggggcagaatatcttcaaatcaggacggcggtttttgtatgcatggaaacaaagaggtagtgatcatggggtgaaagctcatggtgatggttggttgctgactgttgcacttattgagggaagcggtgtagtaggttcaggtacacctggcttgcctgatccttatgttgtttttacctgtaatggaaagaggaaaacaagctcagttaaattccagacatccgaaccgaaatggaacgagatatttgaattcaatgcaatggatgatcctccatcaaggttggaagtagttgtgcatgattcagagggaccacataataaaattcctattggtcaaacagaagtgaactttttgaaaaacaatttgtcagatttgggtgacatgtggcttcctcttgatggaaggtttccccagggatgtgagcctaagttacacttgcgaatctttttgaacaactcgcgtgggactgaaattgttatgaattatctggcaaagatggggaaagaagtaggtaagaagatacacctgcggtctgctcagacaaattcagcgttccgtaagctctttagtcttcctccagaagaatttcttatcgatgatttcacttgttatctaaagcggaaaatgccacttcaggggcgcatttttctctcctcaagaatacttggattctattccaatatattaggccgaaaaaccaaatttttctttctttgggacgacattgatgatatccaggttgctccaccaaccctagcaaaagttggaagtccatccttgatgatcattctccgcaaggacagaggtctagaagccagacatggagccaaaacactggatcctcaaggaaaactgaaataccatttccagacatttgtttcattcaatgatgctcacagaattattatggcactttggaaaatgaggtcagtggatccagaacagaagggagagatgattgacaaaaattctgaactgaaacagctcccttgtgaagaaggttctctattagccaatgaagatgtgaaaatgtcagaagtctactcggcggttctttctgttgatatcaattccttgatggatatgttctccggaggtccattggagcacaaggtgatgcagaaagctggttgcgtcgattactcgcctacagaatgggagctactaaaccaaaacatataccagaggcaaatcagctttaagtttgacaaaatcttgtcgcgctttggagaggcatcaaccactcaacgaaaatataacttagcgaatcgagatgggtgggtcattgaggaggtgatgaccctccaaggagtccaacatgaagactactccagtatccagctcaagtatcagatgactagcacgtccttaaaaccaagcacctgcagcattcaggtattgttagggattgcctggttgaagggagctaagcagcagaagaaggttgtgaagaatgttatgtcgaattctgccaacaggttgagggagatattttcagaagttgagaaggagcttgcatcaaaaaaaggtgtgagctgacatcccgtgcaagatgagtagtagattgattcatgtgttctgaacaattagaagactaaacgaaggcagcaaagctcagtagccaacacgatctgtgttagctcgacggtatcactgcttcctttagctctgttcactcttctgctgccaacctatcgcctatgtaaaattgtgaataccttgataggaatccaacaaatttgcatatacatatttaaaactgtaaacacgtgattacagaatggaacgaaaagaatgaacttatttctggtggcagtaattttctataaagatatttgaccc

SEQ ID NO: 22813 - DNA, 1356 bp, Oryza sativa
  ref <308>: DATABASE ACCESSION NUMBER: AK072971
  ref <309>: DATABASE ENTRY DATE: 2001-12-06
gatctggcccaataatagcccacacaaccctaggctgcgctagtgtcgtcggtccccatcccattcggccaccgatcccaatctcaatctgacgccgccgccggcatccctgactcaccgacgcggctgcaccaggcgccgccgccgccgcctccgccttgatcgtaaggaagtaagtttggagcaccatggctctgcgatcggcggccggtaggctggcgtcgtccagccgccgccgcctcctctctccgcccaccagcatccacacagccttcctccactcccacgccaccagcttcggatacaagcaagtagctgaagaggacaaaagcaaattggtcggtaacgtcttcagcagcgtcgcctccagttacgatctcatgaacgatcttatgagcgttggactacataggttgtggaaggacaggctcatctcaaagcttaatccttttcctgggatgaagcatctagatgtggctggtggaacaggggatgttgccttccgtgcgctcgagagaatcaatagcgtgagccatagagctatgcagggtactcttactgatattgaagaagaaacacaaatctatgtttgtgacattaatccaaatatgctgaatgttggaaagaaacgtgcttcagaaagaggatacaaagaaggccattgccttagctggatacaaggagatgctgaagctctgagttttgaggatggatctatggatggctatactattgcgtttgggatcagaaatgtgacacacattgaaaaagctctatcagaagcttatagagtcctaaagcgagggggaaggttcctatgcttggaattgagtcatgtggatgttccgctttttaaagagatttatgatgtttattcattttctgtgattccggctgtgggagaactagtggccggtgatcgccagtcataccaatacttggttgagagtatccgccggtttccaaatcaggaaaagtttgctcagatgatccaagaagccggtttcgagagggtagaatacgaaaatctggtgggtggtgtggttgccattcactctggactgaaactgtagaacattctgggtttcaagtttgatggatactttactgttactcctacggcaacggcaaggtcttgtgaagcgggcgttaagaatcaggacctaacgaacaaactaactcaatcttgtaccagtagttagcattgcaataaatacatgcagtgtttctgtacatgtttcttgtatttattttttttagatgaaaggcttttgacagcccagctttactgaaaagcataaaatgttgttttgacaaccaaaacaaacaactaaaagggagtcacactagattgac

SEQ ID NO: 22814 - DNA, 1147 bp, Oryza sativa
  ref <308>: DATABASE ACCESSION NUMBER: AK099313
  ref <309>: DATABASE ENTRY DATE: 2002-08-28
gggatcgccgcctccaccaccgttcgtccgattcctcgccaccacacccacccacccaccaatggcgtcctcccgcctcctcctcctcgccgcgctgctcgccacggcggcggtgctggcggcgtcgcagaagccgaaggccgccacgccgacgaaggccacgccggcgtcgcccggccccgcggcggcggcggccgacggccccgcgccgacgaacgtgacggcagtgctggagaagtccggcaagtacaccaccttcctccggctcctccacgagagccgggtggacacccagatcaacagccagctgatggacagctacaacgggctgaccatgttcgcgcccacggacgccgcgttcgcggcgctcaagccgggcacgctcaactcgctgtcgtcgcaggaccagatccagctgatgctctactgcgtgctcccgcggttctacagcctcgccatgctcaccaccctcggcggccccgtgaacacgcaggcgtccggcgccgacggcccgtacaagtacaagatcaagccgtcgaacaacaacgtcaacatctccaccggcgtcaactgggcgctgctctccaccgtcgtcagcaaggacttccccctcgccgtctactccgtcgacaaggtgccgctcccctacgagctgttcggccccaagccgcccacgcccgcgccggcgccggcgcccgcgccgtccaagtccaagaccaagaagcacaagaagtccgccgggatcgccgagccgcccgtcgccgacgacgcctccgccgacgacaccaccaagaaggccgccgcgcccgccaccgccgtctccaggtgggtcgtcgccgccgccggtgtcttggccggcgccattctcgccgccctctaagctaaggagacgacgacgacgacgaacaaatgcatcgcccatgcatgccgtatgcacgatgactgaactggagtggtgaaccgaatccgaatccgaattgatcgagatcgattgaaccgtgtaccgatattgttgtgctgctctgtatgtccatcggctttattctttctcttattttttttggggttataaaatttcttgttgatttgtatttgtaatttatgtgatatacttactagagtgtactttttttttcccattggattc

SEQ ID NO: 22815 - DNA, 3254 bp, Oryza sativa
  ref <308>: DATABASE ACCESSION NUMBER: AK072972
  ref <309>: DATABASE ENTRY DATE: 2001-12-06
gtacaccccgccaccgggtcgcgcgcgtcgttgaaacgtcacacctagctaactgcactgcacttctgcgtgtctgcgtcgtgtactcgtgtgctttggtgttttaatttctctctattttgctctgctgctgccatgccgtggtcgtgcggctggtgcgggaggcggaggaggagcagcagcggaagaggaggaggcgctgatcgtgaggccaacggcggtggcggcggcggcggcggcggggcggcgtcggggagggaggaggagcagtggagcctcttcatcgagctgcccgtgcaggaggccgccacccgtggcttctccgacgacaacctcctcggccgcggcggattcggccccgtctacaaggcttgtttcttactgccatctcatcgtcccctttcgccatggctttgctttgctgctaggctgttgccctgttttgcttgtggaattcacctaacattaacaaagactggttttttattggttggtcaacaaagccattccttgctttccattctgattttgtccttttcacctaccaaaacgacacaaatgattgatctaaccctgtctatgtatgggtaatgggtgtactatcttttccatggacaaatatcttttctactgtttgctggctctctctctttttttttcaccactaataactgattatacctgctctgctactttcagacatcatttcgtcaaattaatatgcgatattagtttttttcctctcttttgagattctaatctcaacattgcacgaaccaaagcatcatttttactcctgcaaagcaaagcagtagtagtaaataataaacgtaccattacttgtcaggaattttacatcttgggaagaatgaactactaactgacaaaaaatcggttgatcttgttaccatctctcttcagggggtgctcgagaatgggcaggagatcgccgtcaagaagctgtcgctggagtcacggcaaggtgtgagagagttcttgaacgaggtgaggctgctgctcaaggtgcagcacaggaacctggtctccctgctcggatgctgcgcttcctccggtcacaagatgcttgtctacccttacttcccaaatggcagcctcgaccacttcctcttcggtgacacctctctctcatctgcatactactgtattatgttgcaaaatgtcctaattattaattgccatcagattgcttctgaattacgggtagaatttgtgagctaaatctgacagtttggtcattttttttagtagtataacgaatcactgttatctgtttatcattaatcaaaacacaaaggttctaacctcggaagctaggcactctgttggagagtttgtggtgcacaaatcataatagccaaaactctatggtagttctgaacaaaattcagggaaagtgcttgtagaaacagtcatttctggtagaaaaacaagtccctactggagttccattgtttgtggcctagtggtttcaactttcaaggagaccaaaacgatgagttagccgtggcaaagcatatattcgcacagacacagtcacacagagttgttcagtcaattaagcagaacacagaatctgcaagaagtctttttgtcagtcaatgtaaggaaaaatctgccttgacgttctcattgacctttactgtgtcaaaagcaatacttcgatttgcttaatctcaaaggctcaacatatcacatcaaatcgggtatggctgtatgccattatgccgcccaatgtctttggattgaccatttctcgaataggatttcttgtcatttggagtaatctgaacaccgcccccccccccccacacacacacacacacaaacttctgtgtggacaaacaaaagacagaaagttcaattagctactccgtaccatagtttgaaatgctccatgattttgttaaaaaaaaacataaagcataactaattatgttctttacaatttccagtttaaacataaagatacgcatgtacctatacttaattccatctgcatatataatccatacaaaaccagatcagtattcagtactacatccattccaaaattaatataatgacttttagcactagtccagatatatgactaaaagttactatattttaggacagaggtagtacaacataaaaaaaaaaaacagaaaatgctctgcaacctgctgtatgtatgatacctgtttatgtacctctagacagaaagaagagcgtgcagctggattggcccaaacgctaccaaataatcgtcggcctagcgagaggcctcctctacctccacgaggaatcccccgtcaagatcatccaccgagacatcaaggcaagcaacgtgctcctcgacgaacagctgaacccaaagatttcagatttcggcatggcaaggctcttcctcgaggacgccacgcacgtcaacaccttccggatttccggcacatagtgagtaattacaccagaacccatcgttgttattcacttgatccgtccacaaaatctctgtggttgcgtgtgagtacagtaagtgatacgtcgcagtggttacatggctccagagtacgcgatgaacggctacctgtctacgaaaaccgacgttttcagcttcgggatgctggtgctggagatcgtcagcgggaggaaaaacatcgataaacatctcgacgccgaaaaaaccgacctcctgaattacacatggaagctgtcagaggaagggaggcagatggagatcgtggacccggcgatggcggagtgggacgccgacgaggcgcggctgtgcgtgcagctcgggctgctgtgctgccaggccgtggtgtcggaccggccggacatgtacaccgtccacctcatgctgtccagcgactccttcacgctgcccaagcccggcaagccggcgatccacggccgggtcggccggtggatgagcaccaccaccacggcgtcctccgccgcctccaccgccaacacggccaccacgctcggcaccgacacgatgacgacgagggcgtcggcgtcggcggcggcgctgggcggcattgccgaggacgactccaggaactccatctcgatctccttcaccactgaaggccggtaaaacaagacaggaattcaaccatggacagtgcaagtagtaggttagatagatagtgtcggaattttttatccaaataattgtgttttgattgatatgaacaggagtacagttgctgtgaattaattggcagtgcatatgcacagaattttgc

SEQ ID NO: 22816 - DNA, 1048 bp, Oryza sativa
  ref <308>: DATABASE ACCESSION NUMBER: AK072973
  ref <309>: DATABASE ENTRY DATE: 2001-12-06
gatctcgtgtgaattgtgatctctccaccaccatcaccaccaccacgacgctgcaggcagagaggagcacgcggcccctgtgatctccgtgccaaaatcctcgatcccccgccgcggaatccagcagagggactgaattttgcaattctcagccatgggttcagttgtggatgctccagtggttgtggagggggttgctgagaacatgttgggtgataagaaagttacagttgtatttgttctaggtggtcctggaagtggaaaaggcacacagtgtgccaacattgtggaacactttggattcacccacttaagtgctggagaccttttgcgtgcagagataaaatctggttctgagaatggaactatgattgagaacatgataaaggaggggaagattgttccgtcagaggttactataaagctcttgcaagatgccatgattaaaaatgagaatgataagtttctaatcgatgggttcccaaggaatgaagagaatcgtgctgccttcgagaatgttacaaaaatttcccctgcatttgtgctattttttgactgttctgaagaagagatggaaagacgtcttttgggacgcaatcagggtagagttgatgacaacattgagaccattaggaaaagattcaaagtttttgttgaatcaagtttgcctgtaattgagcactacaatgcgaagaacaaagttaaaaagattgatgctgcaaaaccaatttctgaagtgtttgaagatgtcaagccatttttgccccatatgctaaggttgaatagagataaaaaaaggaccacagagggcacaaatggtggcgtgctgtcagaaaaggccttgctcgagtgtgactatatatctgtgattaagaaccattgatatagaagaaaagtttttcttggctcccatgagctacctaattatcagtaggcaattcgtttcgttaccagcaataagtagatccgagtctcgctgcccccatggtgtaccggcgtgtgtcctctgtaatgctgtactgttgtataatttacctcatggatgatc

SEQ ID NO: 22817 - DNA, 1632 bp, Oryza sativa
  ref <308>: DATABASE ACCESSION NUMBER: AK072974
  ref <309>: DATABASE ENTRY DATE: 2001-12-06
gggtgctaaccgcaccgcacgccgacatcgccggagagggcgccgctcgccggcatcgtcgtcgccggagactcgtccgtccatccgcaagggagtccagcaatactccatcatgcaaagccccagcaaggtttctgaagcctctggctcagcaccccctgccacgtctgtgatcgaaggttgggcagaactcccagagggcctgcttcactccattgttgctctattgggctctttccttgacctccttgccttcactggcacctgccattcttggcgtgctgccttctcatcctacccatcaaaatctaactttcgcaccatactcccacccctcctcgtccgacccaatgtccgcgtcaaagccccttatagcagcaatggtcatcgcaagctacgctcgtgtgaggtcattgatctagccaaccgaaacaccccactccgctgccagattcctcaagaaactctgcagaggatgcattttgcaggttcttcccatggtcagctcatctgctgccgccgtggttattgtcttgttgttgatgtgttcaccggtgctgaggtttcacctccacgccttccattcagtgagaactgtgatgagttctactactgtggcattctgacggctcctatcacgtcacctaactcacatctcattatcagcactcagtcctccctgtttgattggccagttggaagtgactcttggtctgagctcaagctgcccgttaatcgggtcgatcagattgtggaattcaatggtcagctcatcgctgtgattgaatacagtctgtacactttgcagttggcccccattcttcgcttggaaaagataaaaactctctggtgggataacatgaatgaatgtccgtatatgagaccatggtttgtggtttgtggtgacatgcttctcattgttgaccactacataagtttttcatttggagcaccggtcctctacaggccataccgtctggacatgtcgaccaagcctgcaaaatgggtggaggtaaagaagctggagaactgggcactcttcattgggggtgatgcaaggagccctccattttctttcaagaacccggagcgctggggagggaggagcaactgcttgtactatgctcactactctcagccattgagcctgcatgggttaggtgatgatgcagatgctgtgtgggatcctaacactgatgacaacctcgtgttcaaaagaaactggtaccgccagctgcaggccttgtgggtgtacccaagcatgttctattcagcgggagacggccagtgattgctgcacaagagctctgctcttatcatctgattctgagactctcttctgaattctgatgtagggcagagcatcttaatgcttagcttaataatacttgcagtcgttttgtagctcagttgttagctgcattctctagtctaatattttcgaggtgcactggatgcttttgtacctaaactattagtagctgttgcttttatgctggaagtctggattctggaactcgctaccgttgaggatttccactggtgatggagataatgtttcgttttacgagtgtttgagcttagctgctatattttggaacattaatatatattcttgtgtgcacttggcct

SEQ ID NO: 22818 - DNA, 1965 bp, Oryza sativa
  ref <308>: DATABASE ACCESSION NUMBER: AK072975
  ref <309>: DATABASE ENTRY DATE: 2001-12-06
gaggcaatctggtctcagcctgctgggtagattcttatactgccacagtgccacttcatgtgctctttggcaataccttccatcccaggttcttttctaccaattcaaactcagcaggctgaagtagttctactataatcagagcaattcattacagatcaggaatcactgatctgtccctttattacattgggcatagtgatatgtgatcgagtcctaatggcagagattgttagttctgtggttgttcatgaggcagtcaaccaaatcatacatggcttggtgaactggaatgagcgaaaatcaagcgcagaggagaacatggagaggcttgagatggcacacatcaggttggaggctgcacttgagacatcctgtaagtggcgaatcactgattcttcattactgtgttggcagaagaagctgaagcgtgctgctcaagagtgcgatgacacactgcgcaaatgccggcaacgcatcctggaacaagaagaggcagaacaagaagtaaggaattcctctattcctagacgaatagcccatgccaccaagtcattagtgtcctccttattttacagcaatatcgatggctcatgtagatctgctgttcgaagatttgagtggtttgcagatggagctaatgagtttttgagatttgtggagtttggaggaacaccacatcagtacttgttctttgatcctcttatcaggcaacttcttgcaggcaaaacactagagtataaattagtgtctgaaaataagtaccggttgtttgtcatacggcccttctgtatttcagagaatagaatagaggctaggctgatctttgacagtaaaaatgctagtgcactggaggatgattttttcctgtgtatgctgctacaagtttcagagagtgtggacatacttggcattgtaatcaagtgcttgcagctgtttaatccccatttcatgtctacagctgaatctgttaggaatgaacttactcagctaccttcacaagatttcacctgggtgccatatgctgaatcatgccacaaaaaacactgggataatattcacagcattactacccaatggtttcgccctaacccattatgctgcaagcagcatggtcagaaccacagctgtgaaagtagcaatctaggaatgccatctgtacagggtgtttctctaggaccagttattgaagtgagtttgcagtgccatgtcccagttcctgagttcagagaacagggaacaattgtcaaaggcaagccttctcttaaaaaatgcccgcatatgaaagttgaccttgtctacacaccccatggctcatcacaagacctactcccagaaatcaagagttctgtaatagaggtaattaatggtgataagcaacattgcttgcacacaaacattgccttggaactaatggaagagatcatgctgccaagggcagtagattgttttcatgagaatgcagaagcgaaattgtatcagatgctttggaagtctaaacatggtggtgcatatcttcaggttatgaaggcaaccatgaacactcggagcacacagagaaccattcgaggatctaggaaagcgaagctgttgcaacagcagggtcataaaacacagcatcgtacaaatgcaatctctgacttcctcaacctttggtctgcacatgcgcctgtccagctgcagggctcaatcctcgattggattcagaaagagaaggaagcacaattagcacctcctctactgcgcctgaaattttagatcatgtaacagggactggtcaagaaaacacggataattaaatgaatggaaatgtaatattctagcagagaaaagtaactcatacggagttgatttctaagtcattaggagtgtattgatatgaaatgtgtgctacatatgctgctgctgttggtctaactcaaaacttatgtttgtaaatgatgataacatgatgttcattctctg

SEQ ID NO: 22819 - DNA, 2709 bp, Oryza sativa
  ref <308>: DATABASE ACCESSION NUMBER: AK072976
  ref <309>: DATABASE ENTRY DATE: 2001-12-06
gaccatttcctttcctttcggcatctctcctgcgcgggcgagtcgtcctcctcgtcctcgtcgtcccctttctctgctcccgcgagatctcacccccgctgcggcgacgcggccatggcggggaggaactaccacggctacggcggcggcggcggcgggggcatgtccatggtggtggcgagcacgccggggcaggagctggccctcaccaactgcgcgtacgtctcctccgccgacatccgccgcttccccaacgccctcgccctcgtcggcgacgccttcgtcttcaccctgcgtgcccatgatgctgtttctgctggaagcatcgcattgaatgccattcagcgtcgccagacgaaggtttcagctggggattcaatcactgttagcagttttgcccctcccgatgatttcaaattggcattgctcacattagaactagagtataccaaggcaagaaccaaccgaaatgaggagctggatgctgttgtgcttgcccaacaacttcgaaggagatttcttgatcaggtcatgacatctgggcaaagagtaccatttgaattttgtgggacaaactatatattcactgtcaatcaagctttgctagatggccaagaaaattccacacctttggacagaggattcctgtcaagtgatacatacatcatatttgaggctgcgcctaattcaggaattaaggtagtaaaccaaaaggaagctgctagcagcaagcttttcaagcacaaagagtttaaccttgaaaagttggggataggtggattaagtgctgaattcacagacatatttagaagggcatttgcttcaagggtgtttcctcctcatgttgttaataaattgggcatcaagcatgttaaaggtatattgctgtatggcccccctggtactggcaaaactcttatggcccgtcaaattgggaaactgctgaacggaaatgaacccaagattgtaaatggacctgaagtcttgagcaagtttgttggagaaactgagaagaatgtgagagatttgttcgctgatgctgaaaatgaccagaagacacgaggtgatcagagtgacctccacgttatcattttcgatgaaattgatgctatctgcaagtctagaggatctaccagagatggtacgggtgtacatgatagcattgtaaatcagctccttacaaagatagatggtgttgaggcattgaataatgtgctcctcattggaatgaccaatcgtaaggatttacttgatgaagctttactgaggcctggacgattggaagttcatattgagataaacctgcctgatgaaaatggccgtttgcagattcttcaaattcatacgaataagatgaaagaaagctctttcctttccccgaatgttaatcttcaggagctagctgcacggacaaagaactacagtggagcagagctggaaggtgtcgtcaaaagtgcagtctcatatgctttgaacaggcagataagcatggatgaccttaccaagcctttggatgaagaaagcattaaggttactatggatgattttgtgaatgcacttcatgaaattacccctgcatttggtgcttccactgatgaccttgaaagatgcaggctaaggggtatggttgattgtggcaaggcacataggcacttgtatgagagaggtatgcttcttgttgagcaagttaaagttagcaaaggtagtccacttgtgacatgcctcttggaaggtcctgctggaagtggtaaatcggctttggctgctactgttggcattgacagtgattttgcttacgtcaaaattatatcagcagagacaatgattggtttcagtgaaagcagcaaatgtgcacagatttgcaaggtttttgaggatgcatacaaatctcagtttggcatcataattctagatgacatcgaaaggttactggaatatgttgccattggaccacgcttttcaaacataatctcacaaactctactagtccttctcaagagggttcctcctaagggcaagaacttgcttgttattggaacaacaagtgaagtaggctttctagaatccattggtatgtgcgacgtgttctccgtgacataccatgtccccaaactgaaaaaggaggatgctacaaaggtgttgcggcatctcaatgtgttcgatgaagcggacattgatgcggctgcagaagcactggacgatatgccaatcaagaagctgtacacactcgttgagatggctgcacaagggccatcaggaggaagcgcggaagcagtctatggtggagaggaaaagatagatatcaaccacttctttagcatcttgagtgatattatccgctattaactacacggcgtcggaatgaaccctaggtgacaccataggaatttaattgcacatttcttcttacttcaagttctcccttttgccaccgtcgccagggtatagggttgtttgatctttgaggttcgtgtctccttgttgtgccgctttgagcttttgttggaatgttgttatgattcggacagaggttataccttacacgatgtagcatgtttcaaccgtatgtttcgatactttcccagcacagagttgcacgaatatgattttgggtggctcctttccggctttccctctgtgttgtctgtctcgcttgctctgtgcctgtgtatgtggcggcctgaaccaaacaaaagaatcagctttgtt

SEQ ID NO: 22820 - DNA, 3058 bp, Oryza sativa
  ref <308>: DATABASE ACCESSION NUMBER: AK072977
  ref <309>: DATABASE ENTRY DATE: 2001-12-06
ggaaaccctcgccgccggggccatcccaatcctcgcggcgagcggcggcggcggcggcggcggcggagggcaaccgattgtggccggtctatcctcgtcggctcgccattccttctcgccgcgccaggttcgatctgaccaattccccaagaatcgttcgacctgaatcgatcgacgccgcgtgttcctgccatttcggcgtgcttgattccctcaaaatggttttggtctagggatcgtgcttagctattggtggcggtgctcctctagcggcgggttctcgacggcagaatagtgcgttgtgagggagcctcggtttagttggttctggggatggaggacggcgccgcggggggcgatgtgtccgccgaccgtgtcatcgctgagttgctcgacatggggttcgagttcgacgagatcagccgagcgatcggtgcagtcggcacgcgctgcgccgatgtgctggagtttatgctgggtggttcaggcaatgggaaaatgaaaaaggcgagtagggaaacacgaagccgtagttgtgtctcatctaatgcagaagcacgcccgagtgatgatgggaacaaattggttaatcctaggaaaagattaaagcaatcgagcattaccgatcatcttgcatcgaataccggctgcagaaggggatcttgtggtgagaaagctagcacgtcatatccctgtttagcggcttccgatgatcctagagcgccagtggcagtcagtgctgatgtgtgttctgcattgaagcctgaatctcaatttttgcttgctaattcaagaagtgagtctgacctcggacacaaaattagtgctgttctgcggaaacactttggattttcctgtgtgaaaggattccaaaaggaagctttggatgcttggtttgctcacaaggattctcttgttctagcagcaacaggctcaggaaaatccctttgttttcagatcccggctcttctgactgcaaaggttgtggtagtgatttcaccattgattagtctaatgcacgatcaatgtctaaaacttgcaaagcatgggatatctgcatgctttcttggttcagggcaacctgatagccgtgttgagggcaaagcaatgtctggcatgtataagattatttatgtttgccctgagacagtattaaggcttatggaaccattgaagaaacttgcagaaaagccagggattgcactttttgctatcgatgaggttcactgtgtttctaaatggggtcatgattttcgaccggactataggagattatctgtgcttcgagaaaatttcagtgcaagcaaattgaagttcttggggcatgatattcctttgatggcattgactgctactgctaccatccccgtaagagcagacattatcaagtcgctgaaaatgtcagaagatacagtggtcgtcttgacatcttttttccggcctaatctcagattcagagtaaagcacagtaggacctcagtctcagcttacaaaaaggacttcagagaacttgtagtaacatataatgattcaaggaattttagggggaagggacagaaagctcttagtgagatcaaccctgattctgaaagcagttcatatgagtctccggatgatgctatgtcagatgatgaagatgcaaatgttgattccatgagccatgaagataatagttttggaaaaactaaagtcggcatgcccttgataaatgaaaatgctgaaaatgagttggatgtatatccaggagtagatgattttgatgttacatgcggagagttccttgagtgctcgtggcctgagaactctgcatcttcttctcaatgcaacaaaactggttccagttcctcagaaattgctgatcaaggtcctaccattatttacgtacccaccaggaaacaaactgtggagttagcaaactatttgtgcaaaactggtctcaaagctgcagcatataatgcgaagatgcctaaatcacatttgagacaggtgcatcaacagtttcattgcaatgccttggaggttgtggtggctaccatagcatttggcatgggaattgacaaatcaaatgtcaggagaattattcactatggtttcccacagagtttggaagcatattatcaagaagctggccgtgctggtagagatgggaagttggcggattgcactctatattgtaaccttttgagagcaccgacactccttcctaataaaagaagcaaggaacagacaaaagtagcatacagaatgctacgtgattgctttcagtgtgacatctgtattaatggccctcctcaaatgcatgatttcaaggaagacgcagttatgtttatgagtgtgctccaagctcaaaacggacaagcaacggaagatatgggttgcagcaatataccccgttatatatctggaaggcaaaggtttggggaggttccgaatttcagaggggtggtcagttatataagggaaaagtttcctagatttgccacaactgacaaggtatggtgggaaggccttgctcgcatattagaaggcaggggatacatacaagaagctgctgaaattcctcgtgttttaatccagtatcctgaggtgacagaggccggactgaactttttgagtatgcaatcagaagaggaaggtttatatgaataccttaatgctgctatgctattggtaatgaatgacccaaaacctatttctacatcttccgagtggggcaggggttgggcagatcctgcgatacgccgccagcgtctagcaggcaagaaaatggggagaagaaaaggaaagaggcattctcggagccactctacaggtttcaccactgcaagacagagattagctgaaatactctcaaaacgcagaagataatacagaaactattgagatgctgggatagcgggatgaaaattattcatctaagcctgttactacttgtttggttttagcttgatttacacagcttctgtggttatttgctgcaatttcctttgtggcgtatgaattttttttctcaagggaacaatatgaagtaaaaaaatgatggggattattgtatagc

SEQ ID NO: 22821 - DNA, 2476 bp, Oryza sativa
  ref <308>: DATABASE ACCESSION NUMBER: AK072978
  ref <309>: DATABASE ENTRY DATE: 2001-12-06
ggaattctctctctcctccatttttgtgagtttttttttgttgtttttttttttttggtctcgcgaaatccaaagacccaagaacaaccaaaaaggccaatccttttctcctcctcctcctccatctccatctcctcttcgagtcctcgtcgtcgtggtggtcgtcggaggtggtattcttgatttgattcgaggaggcgggggggggggggggagatgaaatcgccattgcggaagttcaggggattcggtctccacagccacagggagaggaaggaccaccgcccgccgccggccaagctcgacgagctcgccgacgccgcccaggaaatggaggaaatgaggaattgttatgacagcttgctttcagctgcagctgcaacaatgaacagtgtatatgagtttgcagaagctatggaggaaatgggaacttgcttacttgagaaaactgcattgaattatgatgatgatgacagtggcagagttctgatgatgctaggaaaggcccaattcgaactgcagaagtttgttgataactatcgtacaaatatcataaataccatcacaaacccatcagagtcacttctcaaagagctacaagttgtagaggaaatgaaggaactctgtgatcataaaagacaggaatatgaagccatgcgagcagcctatagagagaaaggacggtcaaggcattccaaaaccgaaacattatcctcggaacagctgcaagcttattttcttgactatcaagaggatgcagcattgtttatattccgattgaaatcattgaagcaaggtcaattccgtagtattttaacacaggctgctcgccaccattctgctcagttgagttttttcaggcgagggttgaagtatctagaggctctggaacctcatgtaaaagcagttgctgagaaacagcacattgaataccctttaaatggactagatgacgacacagataatgatgagtacagctcttaccagggcaatcaaagtgatgacagtgagttaagttttgactatgagataaatgacagggataaggacttccccgcttccagaagttcaatggatttggatcagtctaatcaggcatgttccccagaacctctgaaggaacacaagcaggaatataccgaacaaatacaggcagattttgcagctcctcgagtgaagcttgagattggtacccaatcagcgccaatttctgctgacaatgtgtttgatccatctacaaggtttcggaaaatgaatacgtcaaacagaacaaattattcgtacaaactcccgacaccagatgatgacaagaactccacttcagcacacaccaatagatctcctcattcagatcaaccagaaagtaaatctcacgtagcagaaaatttatggcattcctctccactggtcaaaggttttaaaccaaactccatgtttagtggacctgttaagatgccatcaagtactgaagggatatcagcgccacttgtttatccctacgctacttcagattttaagaaaatgaagagggaagcattttccggtccaattccaagcaaagcaggattgaacaagcccttgttttctgctactgatctcagagcaccaatgaactatcctcgtgcaatgtcaacaaaatcatatggcccaggctggcagtcatccgtggctccaaaatttacccctaggatcacttcactcccaactacatcaccgagaataagtgagctacatgaactgcctaggcctccagcaaatgtaggtgctgcccgtcctggtttggttggatattctggccctctggtatcaaggcggcaggtgcctaatgtaccgacccgcgcctcaccaccatcacaaacagcatcacctcttccacggccacctgctgccatgacccgcagttattctataccttcaaatagccaaagaacacccattcttaccgtgaataagttgttggaagctaggcatagcagagagagtagtgaagtttcctctcccccattaacacctatatctttggctgatgtttcccgcagatcaacagcagaaacagctcttgaaaaaacaaggatgatggaaaccttgtgaaaacttgcatggccaaacttcagtcatcataggcaattttgtatgtaattatttgtgcattctagattgccctctgtaaatttatgtttcttgcgaaggaaaaagttgaaataaaggcgcactggttggaagatttttgtttctttggccggcttttctgacaaccttatggatttagtgaatctgactactattagtttaccatcactcactcaatattctgatttttttggggggattgctgatgtgaactatattggcgctgtaaatacattattacctttaccattttctttgtttgaaacaaaaacatgtgtttctcctatgtatttccaggaccaaaagaacgatgtcgaaattgtatatattgagtttgagctgtgct

SEQ ID NO: 22822 - DNA, 1238 bp, Oryza sativa
  ref <308>: DATABASE ACCESSION NUMBER: AK072979
  ref <309>: DATABASE ENTRY DATE: 2001-12-06
gagagaccatttccctcctccctcctctctcgccaaacacgacgacgtcgcctcggtttagtcgtcgtcggccggcagccggatgacgggcagtagttgtccggccgattcttcccagctgctgtaccctcgccggggtgcccccaccaccaccaccacctcccgtcctcctctccatccgctcatcgctcatgcgccctacgacgtcgtcctccaccgatctgtcgtcctctccatcagctcagctcgtgatcaggctgagctcgcgagcttctggtgctatataaggctgggtggtggtgcaagtgcgaagcgagcggccggtgaggacgatcgatcgagatcgagcttgacggcggcgagaggaggaggaggggagacgatgagcgggcgggggaggggggacccgctggtgctggggagggtggtgggggacgtggtggacccgttcgtgaggagggtggcgctgcgggtggcgtacggagcgcgggaggtggccaacggctgcgagctccgcccctccgccgtcgccgaccagccccgcgtcgccgtcggcggccccgacatgcgcaccttctacaccctggtgatggtggatccggacgcgccgagcccgagcgatccaaacctcagggagtacctgcactggctggtcaccgacatcccggctaccacaggagtctcttttgggacagaggtggtgtgctacgagagcccgcggccggtgctggggatccacaggctggtgttcctgctgttcgagcagctggggcggcagacggtgtacgcaccggggtggcgccagaacttcagcacccgcgacttcgccgagctctacaacctcggcctccctgtcgccgccgtctacttcaactgccagagggagtctggaaccggaggaagaagaatgtgagctagctctcccctctctatctctcactccctgaatttgggacaagtcctgaattttgcatgacaaatcctatactcggaacgatttgaaatggtaaaatttgatcatatgtatttttagctccctatcctctctctctgtacgttagttacataaatgctcccaccgattctaaatgtaatttatttatatttctctatttttctcgaaatttaagttgttataggacgttgaggaactttgtcccccatttttcctttcatacccttcattgttaagggaaatgctaccactctgatatatataaaaatgatgtaccattttc

SEQ ID NO: 22823 - DNA, 857 bp, Oryza sativa
  ref <308>: DATABASE ACCESSION NUMBER: AK072980
  ref <309>: DATABASE ENTRY DATE: 2001-12-06
ggctccaactcgccgcgccgccgcttgctcccgttctcgccgtcgcagcccgggaagacgagagagtgtggccgccgcctgcttcttctctagcgctacacctcgatgggtcaaggtctgagccagcccgcgcaggcggtggaggagccttctccgcctgccgtcgaggcggcgccgtcgtcgtcgccgtctcctgccccggcgccatcttccctcgaggcgctcgccgcagaggctatgtcatttgacgaggatggcaatgagtcaattgatgtgaaggtacagaaagcactggactgtccatgtgtagctgagttgaaaaatggtccttgtggaagtcaatttgttgatgcgttctcttgcttcctgaaaagcacagaagaggaaaagggatcagattgtgtgaagccttttatcgcactgcaggactgcatcaaaatcaatccagaggcgttttctaaagagattttggaagaagaggagaatgacgaggaggctgagaagtccaacctgaaagttagagcaccagcatggtccagagaatctaagccaaagctttgattagatggtgtggtgtttggctgatacactgatacaggcattcctccaccagtcgacacacaacatcaccttgtttcttctacgagtgcttccgtattagatcaattgtttttgagatggtggtacataaatttgagtcagcaatgaagcgtccaagacacttcggcggaaataagtagtatttccacaatttaatttacaacaaacacttactgttcaaatggagaactgacgaacttgtaatatgacgtcagttctagacggattatacgagtgggtaaagatcaaagttaact

SEQ ID NO: 22824 - DNA, 2390 bp, Oryza sativa
  ref <308>: DATABASE ACCESSION NUMBER: AK072981
  ref <309>: DATABASE ENTRY DATE: 2001-12-06
gattttccttccatctctctctctcctcctcctctcttgccctagagagagagagagagagggagggggccgcaagagagagagagatcgatcaccggccgccctccggagctcgcgcgctcgttcgttcgttcgttcgatcattcgtacgtccacaacaattccggcgacgcgaccgtcgccgtacgtttgcggtggcgcggcagcgtcgtcggcggtgaagaagaagaagaagaagatcgaagaagaggaagaggatgggcaactgctgcgtgtcccggccgtccggcgccgacaagcggcggcgctgcggcagctccaccgccccgcacacccgcggcggcaggcgggtgatcggcgccgccaacatgcggtgcctctccacggtctcctccgtgtcggacgcggcgcgcgccgtgatgtcgaacgagccggcgaccgtgctgggcaacagcggcagcagcggcaacggcggcgtgatggcggcggaggagatgctgcggcggtacgagatcggggaggagctgggtcggggggagttcggggtgacgcggcggtgccgggacgcggtgacgggggagcggctggcgtgcaagtcgatcagcaagcggaagctccggagcagcgtggacgtggaggacgtgcggcgggaggtggccatcatgcggtcgctgccggcgcacgccaacgtggtgaggctccgggaggcgttcgaggacgccgacgccgtccacctcgtcatggaggtctgcgagggcggcgagctcttcgaccgcatcgtcgcccgcggccactacaccgagcgcgccgccgccgccgtcatgcgcaccatcatggacgtcgtccagcactgtcacaagaacggcgtcatgcatcgggacctcaaacctgagaactttctgtatgccaatgcatctgagaactcccctctcaaggtcatcgacttcggcctctcagtgtgcttcaaacctggtgcaagattcaatgagattgttggatctccctactacatggcaccagaagtcctgaagagaaactatggacaagaaatagacatatggagtgcaggagtcatactgtacatcttgctatgtggtgttcctcctttctgggccgagaccgacgaagggatcgcacaggccatcatccggtcacatatcgacttccaaagagagccttggccaaaggtgtcagataatgccaaggatcttgtaaggaggatgcttgatccaaacccatatactcggttgacggctcaacaggttctagagcatccttggatacagaatgcaagtgcagctcccaacattcctctgggagaagcagtcaggtccaggctgaagcaattcactgttatgaacaagttcaagaagaaggccttacttgtggtggcggagtacttaccaaccgaagagctggatgcaatcagggagctgttcaatatgttggacaccaaaaagaaggggcacttgacactagaagagctcagaaagggactgcaagtgatagggcacaacatccatgacacagatgtcgatatgctcatggaagctgcagacatagatggaaatggcatactggattgcaaggagtttgtgacagtatccattcacctgaagaaaatccgtagcgatgagcaccttccgaaggtgttcagcttcttcgacaagaacggcagcgggtacatagagatcgaagagttgaaagaagccctctccccaagaggtgaccagaagtcgatcgacgacatatttctggatgttgacatagacaaggatgggaagataagctacgaggagtttgagttaatgatgtcagccggaatggactggaggaatgcatcccggcaatactcgagagcagtttacaacactctcagccgcaagatattcaaggaagtgtccctgaagcttgatcacagtggtccacttgttgcagcaggaaaatagcaaccagctgttaactaagtgatgtgttctctacatgcaatgctcactgcctcactcataactgagagaatgtgaaaaacatggcgcagttttccttgttcgcgtattggtctccacatttttgggatgcaaaggtaccacggggttcagtgacccctgaatgtttcagatgcagatgtcaaagagcaggcttaaatacaccctttctctttctctgaaaacagagaaaaaaaaagaaagaaagagttgtatccttctgactttgaagtcactctccatgtttgttaatgtaaaaccagaggtaggccgaatctcatattgttcaacacaggaggcagcaatgccctgtaccactaaccgctttggtgcaaattctccgcggccgcacagtaagggccaaaaaaagaaagaagcaataatataagattgttcaattcaacc

SEQ ID NO: 22825 - DNA, 1033 bp, Oryza sativa; identical to SEQ ID NO: 21582
  ref <308>: DATABASE ACCESSION NUMBER: AK099314
  ref <309>: DATABASE ENTRY DATE: 2002-08-28

SEQ ID NO: 22826 - DNA, 1146 bp, Oryza sativa
  ref <308>: DATABASE ACCESSION NUMBER: AK072982
  ref <309>: DATABASE ENTRY DATE: 2001-12-06
gatttttaccacttcattctccattcagtttgcttagcgagttaggggggaaaaaagctacgaggttttcttggatcatccgacgaactcgagtgattgattgatttacccaagtctgttattgtagtgatttacccgaggttttttgttttcgttttcgttcttgcgaggggtgggtgagagattacaggggggattttctccgacttggaaggagcagagaaagatttgcgtttagaagatctgaggtcaggttactccactaatttctaccacgaaacagagtagagtaggatttgacatcggaaggggaaacaaaaatggcaattggacaggcgaagacgaagagctctctctccacgagcttgagcttctcttgcagcagcacgaggatcctggggaggaagagggtcgccgtctcgccggctccgcccccctccggcggcccgcactcgccggtgcggactctccgcaagcagcggagcaccaggctccacatggacgacgccgtcagcctgctcgaatcactgcctcaagatgtcttgattaaggtcttgtgcaaggtgaaccacagtgacctgaggccgctgctcctagtgtcaaaacaagttagcgaagcaacggtggttgcgagagagcagcatttcgcgtttgcgacgccatcctcgaaggccgccttgagaggcggcgaggaggaagaagaagctcccggggcgcccaagctgcaacgcagggttgcgaggtcgtcgcccgtctggggcaagaaccttgccagcatcagcgtcaacctgttcgaggcgttcgaatcggaggttgtagagatgtaaatattattacaggacacgcgcttcagtttcagcaattcagcttatactttgctcgtgtatattttcatccttttagtgttcttagtgttaggttataaaatgttaggagtgcattttgtagctcacgtcaaacagaggagaaaaaaaacttaggtagtgatactgttattaatctcatactagtagcatgtgttaggagtagctataaatggtcgttcttcaatgctgtgattgaagagaacacgacgccttgtgtaataagtttcatataagcatcgaatgcatgaattatcaggagatctctcttcttttttatgtg

SEQ ID NO: 22827 - DNA, 1852 bp, Oryza sativa
  ref <308>: DATABASE ACCESSION NUMBER: AK072983
  ref <309>: DATABASE ENTRY DATE: 2001-12-06
gggcggcttgacgggagagaaagaaaacctcccgtctctcggctcctccgctccttgcgccatctcgcggctgaacaggggaggtggcgagcagagcagcggagagcaggggaggggatcctgcaggttttctttagaatggcgacatctttggatatgtcactggacgatatgattaagaacaacagaaattctagggggagaggaaggggtaggtcacagggaggaggtcgaggcagaggtgatggccaaaggttcagctatggttcagggcgtggacgtggtgctggcaccttccgtggaaggggagtaggagtgccttcacgaaggccacttggtgttagtactcggtcatcatcgtatgctattgccaaggcaaggacaaatttattgctatttttctgtataccttcaagaatctgaattattagggacctacacaagaggtggttagaaaattaatgaaatgaaacggaccatgggttcatgtcagaccatatctgccactttgtaaccgtggaacttcagagaggatctgacaggtttctcttattgaaatcaccctgagaactggcacttttctgctgagaatttcatggcacaattgtgttggtttggccggtttatgcttgaaactagaagcatcgtctctccttcattggcatgctgatggtctatgtatttactgattggatacttgtttatgtggataagatcttcaattcgtacggaattttgtgcaatggtatagggttattatagttttgctgatgctagttgattcatcaagtaccatggattgatgggttttgtggtttgacgctaactatttctcatcatcatctgggtatgtgtgctatggaaaatcatcagtcattcaacaaaaccaaggatattgtatggaggcaagatctgtttgaggacagcatggttgctgctggcctttctgtgacagaatctagtacaaagctgtatatttcaaacttgcactatggagtgacaaaagaagatatacaggtagctggatctctgcgttttgcactatgcatgctggaatctgacagttccacacacattgggaattttcaagctcatgttctctgttcacaactctgcttcaggaacttttttccgagatgggtcatttgaagcattgtgctgttcattatgataacaatagacgcccaactggttcagctgaggtgatattcactaggaggagtgaagcagttgcggctttaaaacgatataataatgtgcgccttgatgggaagccaatgaagatcgaagtgataggagcagatttgggtatggctgctccttcagcaccccgtgttagtgttgtccctggtgcaaggggtagaggacagcgagaagttgtaatgatgcctggtgggagtgggtttggtcgaggtgcagctggttcatctaatttcattcctgggtggaagcgtaacaattttgcacaaagaggtgggcaaggccgaggtcgtggccgtggacgtaataactttgggcgtgggcgtgggcgtggctatgttcggaagggacctgtggagaaatcagctgagcaattggacaaggagctggatagctatcattccggggcaatgaatgtcgactaagatgtcacctggatctcggtggaggcgtgaaatttgcagtttgttatataagtatctgtttacatttaccgctgagttataatagctggtgttatgtcagttattattcaagctttaatattaggtttcaactgcaaattcttgttctaggctagtcactactccattatattattataactggattgtaactgcttggccagcgatgtttttggttctagttttcc

SEQ ID NO: 22828 - DNA, 3356 bp, Oryza sativa
  ref <308>: DATABASE ACCESSION NUMBER: AK072984
  ref <309>: DATABASE ENTRY DATE: 2001-12-06
gacttttcttttacgcttctcccctcctccctactactgctggtgactagttctactaccactcaaaaacaacaaacatagctagtgatctgatttgcattcaggtcgagtgaacaacccaaccagcaaaagatcggaggaacagaagggtttggttggttgttcggaggaaggagcatttcgtttcgtttcggattgattcccgggtttaacatattatcatccatggcccacgacttgcacgacgacctggagttcgtctccggcgacgacgacgactactacttggagttcgatcacgatcccggccatggcttccacacctccgccgccacttcagcctcccagacgaacaagcagatggacgataccgtgggaacggttgaattatagcaggaatcagtatcgcgagatgagactaaggcaatataagaattatgagaaccttactatgccgcgtgatggactagaaaaggaatgcaaacaagtggagagaaaagacacattctatgattttcatttgaatacaagacttgtcaagtcaacaatagttcattttcaggtaccgatttcctctgacctgtcattcagatacttgtatgcataagaaagctggcgtatgcatttgggtgaccgctttatagaaagttttgaattaacaatgctagttaactttatgatttgtttgcatagcaccctatgaatgctatactatattttgttcatcaatttttatacataactagataccaacagtctaatttctaaccacaattatttatggtaatagaaatggaagaagtttccctctctttcttaaataaaaaagtccacaagcttaaataaaaattcatctatgtggtatcagcatctatcattattatgcacatgatgtttatctagcttattcttaggtttgttatgattaacaaatagtctccaaaatttcgtactgttatgcataccatttgcatgtgcacaacctgcatcactatattctgtttaataaagtgtactgtctgtacctttctgcccttttgtttatatagacataatatttactgcaggttgtatgatgagttgaatcaaaatatgctaaactgagatagttttcgatacgagcaaattaacccatgatattagggcagatgcaatatcttacttcccaggtggatggtcattctcagcagtcggcgcaattatacacgtggaatatggtatgataggatgttttatgataggcagaactgttaaataagtcacctctgagttttgttgcaggttggagatgagagttcagaaatacattatgcatcatcatttttggttgtactttatgcattaatagtgtatgaagattgctcatcttgtgccgtgtatgttgtttaactgcatgttcttgatttgattttgttgtgttgctaactgttctgggtagctaaaaactactaagtgatactaaattcttaattaaaaaataacagtgaacagtccattttatcctttacccattaatagctcgatagctccttgctgaacataaaggataacttttggttggcagtagcatctggatgtctgcaaattataatatacttgccagaaactgattcttctagtcttgtctgcttactggcactgctctagaggttctgtgaggaggcacttggtactagtacattagaggaattgaaaaagaaaattcttatttctgaaccatttaggtagtgccagttgaaatttttactgtaaaaacttgtcattgacttgcacgatcacatcttgtagtaccatttgcattctatcctatcaattcctctgaaaatgtaaatgaccatgttgttgtggacatctctgcagctgaggaacctgctgtgggctacttccaagcatgacgtgtatctgatgcagaactactctgtcatgcactggtcttccctgctccagagaggaaaggaagtgctcaatgtcgcgggccaactcgctccctctcagaatgtccggggagctatgccgttgtcgcgggtgcagatcagtaccatggcggtgaaaggcaacctcatggtggccggtggtttccagggtgaactcatctgcaagtatgttgataaacctggagtggcgttttgtacgaatctgaccgggaacaacaattccatcacgaatgccgtggacatctaccaggcaccaaatggcggtactcgaattacgaccgcgaacaacgactgcgtagtcagaactttcgacaccgagagattcagcctcattagccactttgcctttccatggtcggtcaataatacgtcggtgagccctgacggcaagctgctcgcggttcttggtgacagctccgactgcctgatcgccgattcacaatctggcaaggaaatggcgaggctgaagggtcacctggactactcgttctcgtcggcgtggcaccccgacggccgtgtggtcgccacggggaaccaggacaggacgtgccgggtgtgggacgtgcgcaacatgtcgcggtcggtggcggtgctggagggccggatcggcgccgtcagggggctccggtactcgccggacggccgcttcctcgccgcgtcggagcccgccgacttcgtccacgtctacgacgccgccgcgggctacgccgacgcgcaggagatcgacctgttcggggagatcgccggcgtcgcgttcagccccgccgggaataatggcggcggcggggaggcgctgttcgtcagcatcgccgaccgcacgtacggcagcctgctcgagttccaccggcgccgccgccatggctacctggactgctacgtctgatcgccgccgccgccgccatgtccgccgcggcagtgcatcgcgtgcaaagctgtaagctttgaaaaggtgcaacgcaacacggcgttttcgcgcgcttttttttcttgcgctgccgcgagccgagacgtcagttgtttttttttctttatttaaaacttttggcacgttgctgttttacattgtattttttttgtattgtacggtgcagtgtagtgctacatagtacagtatatatttggaggcggatataaccttagagccaaattagagccaaatgaccgtctataaaaatataaatcaaggtgaaacataccgtccgtctgtgaaaataaatataaatagactgggatagactttgtagctttgtgttgtacgaaagttcattaatttggtaatgtacgtaaagaacacttttgatgctttacagttagtgttgactgcgtgctaatggagactggattattcatgccacgcttctgtaattgatttctccagatattggatcagcataaccttctatatactgtttaatttatccg

SEQ ID NO: 22829 - DNA, 1749 bp, Oryza sativa
  ref <308>: DATABASE ACCESSION NUMBER: AK072985
  ref <309>: DATABASE ENTRY DATE: 2001-12-06
gaattacaagccacccccacccaatccccccgcaccaccacaccaccattacacccgcaatcaaccgcccccaccaccaaaccacaccaccccgcaacccaaacgctaacgcaacaatcccctcctctccaaatccaattccaaatccccatccgccgccgctaatcggaatcgcggcggatcaccctccgcctccgacgagggttcgacccgatcgactccccctgccccggcgggctcgcgggcggcgggcggggggctgagctgagagctgaattcgggttcgatctgtggccatggacatggcgagcatcgagtgcgtctcctactccgacagcatggatgacgacgacgacgatggcgtcggcgtcggcggcgtctcccacctgccacgccccatcctcgtcaagccctcctccgccgccgccgccgtcaacgtggtcgtcgtctccgcgggcagcggagggggcgcggggggaggaggaggaggggtcggggtcgtggccggggcccccgccgtccccccggcgacgagcgtccacgagctgctcgagtgccccgtctgcaccaactccatgtacccgcccatccaccagtgccaaaatggtcatactctgtgttcaacctgcaaaacccgtgtgcacaaccgctgcccaacctgtcgacaggagcttggtgatattagatgtctagcattggagaaagtggctgaatcgcttgagctaccctgcaaatattactcactaggttgtccagaaatctttccgtactacagcaaactcaagcatgaatcacagtgcaatttcaggccatacaactgcccttatgctggctctgaatgctcagttgtcggggatattcctttcctagttgctcatctgagggatgaccataaagttgacatgcactcagggtgcacattcaaccatcgctatgttaagtcaaaccccagagaggtcgaaaatgctacttggatgttgactgtctttcactgctttgggcagtacttctgcttgcatttcgaggccttccaacttggagtggctccggtttacatggccttcctccgttttatgggcgacgaaaatgatgccaggaactatagttatagccttgaggttggcgcgaatggccggaagatgatatgggagggcactccccgcagcataagggacagccaccggaaggttagggacagccatgacggcctcataattcagcggaacatggctctgttcttctcaggcggagagaggaaagagttgaaattgcgggtcaccggccgaatctggaaggaacagcagaatcctgactcgggagcctgcattccaaacctattcagctgaactgaaataacaagagagaaggattcggattcggattcggtttaggtgtatattgggtgatgcgtgtggtgcacctgtgcccgcttctgtaatttgtttgtgttacttccacttttcttccacgtagccgttgtggcctgccctaaattagttagggctgacgtgtgaggaccatgaaaaaaaaatacggcttgagctttgtgggttctgattgatcacatgataagaaatttctcgatttgtttcttttgcccttgtgccccattttgagatgggaggccattatgctctttcttgcttgtaatttgcaaccattgatcagagcattttctgggtttgtatgttttcatctatgcttgattgggtattcgggtgttaagtatccatccatgacgaaatgggg

SEQ ID NO: 22830 - DNA, 3000 bp, Oryza sativa
  ref <308>: DATABASE ACCESSION NUMBER: AK072986
  ref <309>: DATABASE ENTRY DATE: 2001-12-06
ggtctcgtcttcttccgagcggcgaggcgagggcggcgttggcgacgggcggtggtcgtctgggcttggaggagaggccaccgtggcggcagcgagcggtggccggaggagcagcgctcgggcggggacgaatcgacccggcgtggcgggcgtcgttcgggagcgtggaggcggcggggcttcggcaacgtcccgaggttgccggcagcgaggtggatcggggcgtacggtggggaggaagagggaagcggtggtggtcggtggaggccggcatgttgggcggcgcggctaggcgagggggagaggaggctagtggctagctcgctcagtgcgactctgaccgcggcacgcggcacgcgggcttttacagccgccatgaccgcgaggagggcgaggacggcgtgggacgggggcaggtggctgtagcggcgtgcgaccgcatgcactggcggcggcgggaggcaacggggcgaggagtaggggcatgggctcggtgcgacgcggcgaggccgtcttggtccgcgggtatggcgtggacttctggcgacgaggcgttgcggtgacggcggctacagtggcgcgccggctttgaggagaggcgcggtggctcgctgctcggaccgcagcggtgcggcattttgtcgagcaggtggcgtgcgagggcggctgtctcggggcaaggccgtgggctggctgagagatgtggcttaggttgaataatatgccttaggattgagaattggagggaattcattaggtgttaagtttggattttgattttgaatggtttctaattttagaggggagtgtgaggatgtatgaattgagatcctaactgaaatttatcttgggagaacctcttgttgattaaaaaacagacaatatttgtcttttgcaggcagtttcataagatggttttactccagaaaagaagttctctaagctgccatcaggaggattaagggagctcattggtcaagatggcataggcaggagcaacatcatggaagcagaaggtattttgaaagatctgattgatgataaggtgaacaatgttgatgccgagttgcatgtcttacaagaagagcatgaaaaaggcctgctcgagcatgacagaacggcccaaaagaagaggaggcccaggaaatgggaagcccaaagcccagatcagattggcaaacagcaataaagcggggcgaataccccagtttccctctctcccccgccgagccttcgtcgtcagctggtgttaccccagcttgaattctctgcaagacagcaagttcttccctactccctctccaccctgcgcaattccctcgcattctcatcctactccaagagcagaggaggaaggagatggagaggcaggacggcgacgctgagggatcgggacggggagagcataggagcagaggctgccgttccccggcagagaccaagactgaccgaagccccggcattcccagagttctggaggtggggttcgccaccgtgcgagaacaccacgggaccaagagcaccacgggaccccaaaagagcaacaacctccagaacaagaagataaaatcaagagaagatggcagagaaccggaggccgcagagttgagacggggcgagaggagaagagaccacgaggtggtatttgccgctgctgcgcgagatccacctacactgcagcgccccgacttcgactgcgtgcgtcagaacaaacatcccaatgccaatactgagaatgagatgacgggcggtgatctcgagaaagcaagtggaagcttactagaccagagcaagcaaccgctgaacataaagagggatcgtcgcaggctagaagaagtcagtgataaaatgtggaaggatgaagcgaaggagattggaagcaggtcgccagcactaacaaaggggagcacgaaagagtctcagatgcttcagtctctcgatggcaaagcaaaaaacgctcagaaaagaaggaaagatgctaagcaagaactccgcagcaagattccaggagtgacactggtttctgatgactcactgtttgggcaagcagctaattacatcgaagaccttgaagggacatcacttgacttagaaggcttatctggaactgccatgatcagaaaagttcttcctggttcaaataaaatacgaggtgttaccgcgctttttgaggcagcgagcagacatataacagaagttaaaaagaaaaagaaaattgcccctgaagaagttgaaaaggaatttcgtcctggagttgatgcccatgatggccgagctgggaaaaaattgaccaacatgattcccattcctcatattccaaaaataaatggcgatattccttctgccattgaagcctttgcagatcaccaaagactgcttgacaggttggtgctgtatgatctggctgaagtcaaggttaaaggagacaggaattgccagttccgagcattgtcagatcaaatgtaccacaccaccgaacaccacaggtttgttcgtcagcaagtagtgaaacagcttgagtcttatcctgaaatttatgcgggttatgtccctatggattatagggaatatctgaagaagatgacagaggatggagagtggggtgaccatgttacgcttcaggctgctgccgacttgtatggtgtaaagataaccctgctgacatcatgcagagataccttttacattgaagttcttcctgctgaccagaaaccaaaaggagagatatgcattagtttttgggctgaggtgcactacgattcggtatatgcagaaaaagccagttgatccagttccgttacaacctagtcgtcggcgaggaactgcgacgcccggcgagcaggaagaacttttattctagagaattgagagaaaagcagaaggggagagagagagagagagagagagagagagattgttttcttacattttcaacttgtatatatacgctacagcagctggagatttatatagtcagcactcgtttgccctctgggcccc

SEQ ID NO: 22831 - DNA, 1612 bp, Oryza sativa
  ref <308>: DATABASE ACCESSION NUMBER: AK072987
  ref <309>: DATABASE ENTRY DATE: 2001-12-06
gctatgcactccctcccacccccggccgccgcctctctccccatcctcctcctcctccgccgccgccgccgtcgggaagtacacctgtgctctggttccggcgacaccgcgagcgaggagaggagaggtgggggtgagggagtgagggtgaggccggggttgggcaccaccagcaagccagccagcccccccgtccccttagatccgggccgggcgttctccggcgatctcacggccatggcgtcccgccgcctcttcgcctccctcctcaggtccaccgcggcgccgcgcaccccgtccacgcccgggtgcctcttcaaccgcgccgccgccgccgcctactcctcgtccgccccctacaacggccagggttttccacttcctcagtctgaaactgcttcacgtctgggtttgttctccagtcccggcgacacacgccaaccttcatacggagaccgtctaatgcagtcacaacagctgagtcaagactaccgtgctaggacacaggccaataatgcgccacgttttggtgacacaatgtccaggatagctggtggcgagaactcttcctactttgggaccccatcacgcatctttgacgaacacaaacaatctttggtgaaaggaaagagagattttgtccatgtcttgctgaagagaaataagacctttgtgaccgtgacagacgttagggggaacaaaaagaccggggcatccgctggttgtttggaggacaggaaagggcgctctcgtctttccaaatatgctgctgaagcaactgcagaacatgtcgggcgtgctgccaggaagatgggtttaaaatctgtggtcatgaaagtgaagggaactacatttttcaataagaagaagaaagtgatcctgagctttagagaaggctttcggggtgaaagagtaagggagcaatctcctgtggtgctcatccacgatgtgacccaacttccacacaacggatgccgactccccaaacaacgccgggtttaggtctcagcgagctggaatcgaacctgagttgagaggagtcgaagcattcaaggtgatctggaagctctatttaagctgtgtgatgttggtctagttgacctaagacagatatgtattgtttctcttggctctgctacttgaattggttttggcatgacttatgttactcagttagttaagttatcatcaatttcgccacttctttttatcaaattgcagataggaactgaaaccccaaccgttgtatggtatgttatgacttatgaggaacatatatatggttgattctccttcaataaatagcaaagccctcgcccctttttcttgaaacagtttgcacttgcccattttttagcttgaggtactactgtactagaattgcagcatggcattgctgcgctagcccttttatgttttagcagacatatggtacctcatggtgtttagatcagctgcttcatgttattttttagtgttgtgctggaggtagtagatatgggtattcgctgtcaatagacttattacttccactgagttgtccattgtgtatgtagcggtaaaagctgtaagaaggggtgaaattagggaaccactgaacccatgagatttc

SEQ ID NO: 22832 - DNA, 1359 bp, Oryza sativa
  ref <308>: DATABASE ACCESSION NUMBER: AK072988
  ref <309>: DATABASE ENTRY DATE: 2001-12-06
ggccactctcccccctcccatcctcttccactctctcctctccccttcgtggcggcggcggcggcggcggcggcgtgacgaggaggagcaatggcgatggcctcctccgcctacgccccagcgggcggcgttggcacccactccgcgccgggcaggatcaggccgccgcgcggcctcggcttctccaccaccaccaccaagtcgaggcccctcgtgctcaccaggcgtgggggaggcggcggcaacatctccgtggctcggctgaggtgcgcggcgtcgtcgtcgtcggcggcggcgaggccgatgtcgcagccgcggttcatccagcacaagaaggaggcgttctggttctaccgcttcctctccatcgtctacgaccacgtcatcaacccgggccactggacggaggacatgcgggacgacgccctcgagcccgccgacctctacagccgcaagctcagggtcgtcgacgtcggcggcgggacggggttcaccacgctcgggatcgtcaagcgcgtcgacccggagaacgtcacgctgctcgaccagtccccgcaccagctcgagaaggcccgggagaaggaggccctcaagggcgtcaccatcatggagggcgacgccgaggacctccccttccccaccgacaccttcgaccgctacgtctccgccggcagcatcgagtattggcccgatccgcagcgaggaatcaaggaagcttacagggttttgaggcttggtggagtggcttgcatgattggccccgtgcacccaaccttctggctgtctcgctttttcgctgacatgtggatgctcttcccgaaggaagaggagtatattgagtggttcaaaaaggcagggttcaaggatgtcaagctcaaaaggattggaccaaaatggtaccgtggtgtccgaaggcatggcctgattatgggatgctctgtgacgggcgtcaaaagagaacatggagactcccctttgcagcttggtccaaaggttgaggatgtcagcaaacctgtgaatcctatcaccttcctcttccgcttcctcatgggaacaatatgtgctgcatactatgttctggtgcctatctacatgtggataaaggaccagattgtgcccaaaggcatgccgatctaagggagatgaactgagctgcaagagaggatagccaatatctgaattaggcttctctatattaggcactttctgtcagttctgtatttacttctgttgtccctgttgttatgtacttcttttactgtggttcttgtttgtggggaaataatattatgagaccttgattaagctcatccgaactcctgagcatggaatggatcgtgtgtagcataattagaatgg

SEQ ID NO: 22833 - DNA, 987 bp, Oryza sativa
  ref <308>: DATABASE ACCESSION NUMBER: AK072989
  ref <309>: DATABASE ENTRY DATE: 2001-12-06
gagcacatcaacgatcgaacgaacaacgcactctgcagctagctatacaatctctgtttaattagctaggtagctagcgagtcataaatcaagaagccatggacttttacgggcggcgcgagcagtacggcgggtatggcgggtacggtggcggcggcgccctggcgacgccggggtacgcgccggcggcgccgtacgggatgtcgcaggtgagcatcgaggggaacgggtgtggcaggacgctgccgccgcagccgacggtgaaggtgtactgccgggcgaacccgaactacgcgatgacggcgcggaacggcgcggtggtgctggcgccggcgaaccccaaggacgagtaccagcattggatcaaggacatgaggtggagcaccagcatcaaggacgaggagggctaccctgccttcgccctcgtcaacaaggccaccggccaggccatcaagcactccctcggccagtcacaccctgtgaggctggtgccgtacaacccggaggtgatggacgagtcggtgctgtggacggagagccgcgacgtggggaacgggttcaggtgcatccgcatggtgaacaacatctacctcaacttcgacgccttccacggcgacaagtaccacggcggcgtccgcgacggcaccgacatcgtgctctggaagtggtgcgagggcgacaaccagcgctggaagatccagccctactactgagctgatcgatacatcgatccagctctctatcaaggctcaagttgatatcaacgaatctggtgcagaataattattctctgctagctacccacctatatacgtagctaagagtaacttatgctcgtccgtaccgtatgattatcgtgtggtgtgcttgtatcttgtacaagttaattaattacctggcaataagagctcctctcgctgggcgacacatatataaacacatacagttggggcttgattcaacttgcatatatgctgtgcatatgcg

SEQ ID NO: 22834 - DNA, 3197 bp, Oryza sativa
  ref <308>: DATABASE ACCESSION NUMBER: AK072990
  ref <309>: DATABASE ENTRY DATE: 2001-12-06
gtgggggtcacgcgaacacgctgccaatggcggcgagcactcgagccctcttcctctcctgcttccacggaagcggcggcggcggcggcacttccgaggtgagccgccgcctcgtgctgcggccgcggtacccgtccatgccgcggcgaccgaggtcggccgcggtcgccggagagggaggggaaggaggaggaggaggaggcgacggcgatctggaggcggcggccgtgggggcggaggaggaggagaaggtggcggtgttcgaggtgtccgggatgacgtgcgccgcgtgcgcgggctcggtggagaaggccgtcaagcggctccagggcatccacgacgccgccgtcgacgtcctcgggggccgcgcgcaggtcgtcttctacccggcgttcgtctcggaggaaaaaattagggaaaccatccaggatgtgggctttgaagctaagctgattgatgaggaagtcaaggaaaaaaacattctagtatgcaggctgcacataaaaggaatgacctgcacatcttgtgcgagcacagtggaatccatcttgcaagttgttcctggtgttcagagagcttctgtcgcattggctactgaagaggcagaaatccgttatgaccgtagaatcgttactgccagtcaactaacccatgcagttgaagagacgggttttgaagcaatactgatcaccactggagatgatcagagcaggatagacctcaaagtggatggcacactcaacgagagatcaatcatgatagtgaaaagctctgtccaagctcttcctggtgtggaagacataaaagttgatcctgagctccacaagatcaccatctcatacaaacctgaccagacaggtcctcgagacctcattgaagtcattgagtcagctgcctctggtgatcttactgtatcgatatacccagaagcagatggaaggcagcagcatagacatggggagatcaagcgatacaggcagtctttcttgtggagtttagtattcaccatcccggtattcctcacctccatggtgttcatgtacatcccagggctgaaggatgggctcgaaaagaaggttattaacatgatgagcattggtgagctcttgcggtggattttgtcaacgccagttcaatttgtaattggccgcagattttatactggtgcttataaagcgttatcccacggctcatcaaacatggatgtactcattgctcttgggaccaacacagcttacttctactcagtttactccatcctccgagctgcctcctcacataattacatggcaactgatttttttgaaactagttcaatgctcatatcgtttatccttcttggaaagtaccttgagatcttggcaaaagggaagacctctgaggctattgccaagcttatggatcttgcaccagaaactgcaactatgttgatatatgatcatgaagggaatgttgtgggcgagaaggaaattgacagtaggttgattcagaaaaatgatgtgatcaaagtagtcccaggtgggaaagttgcttctgatggctttgttatatggggacagagccatgtgaatgaaagcatgatcaccggagaatcacgacctgtggcaaagaggaagggtgacactgtcataggagggacggtgaatgagaatggtgtgcttcatgtccgtgcaacatttgttggatcagagagtgcccttgcacagattgtacggctagtagagtcagcgcaaatggcaaaagctcctgtacaaaagtttgctgatcagatatctagagtctttgttcccctggtcatcattctttctttgcttacttggcttgcttggttcttagctgggaggcttcatggttaccctaactcatggataccatcttccatggatagctttcaactagctctccaattcgggatatcagttatggttattgcatgcccttgcgccttagggcttgcaactccaacagctgtgatggttgctactggagttggtgcctcacaaggagttcttatcaagggtgggcaagctctggagagtgcacagaaggtcgactgcatcgttttcgacaagacagggacactaaccattgggaagcctgttgtggtcaacacaagactgttaaaaaacatggtcttgcgtgaattctatgcttacgttgcagcagcagaggtcaacagtgagcacccactgggtaaggcagtcgtggagcatgccaagaagttccattcggaagagagccatgtctggactgaagcaagggatttcatttcagtgacagggcacggtgtcaaggcaaaaataagtggcagggctgttatggtgggaaacaagagctttatgttgacttcaggcattgatatcccggtggaagctttggaaatcctaacggaagaaggggagaaggcccaaacagcgatcattgtggctatggatcaagaagtcgtgggcattatctctgtatctgatccaataaaaccaaatgcccgcgaagtgatttcgtatctcaaatctatgaaggtggagagtataatggtgactggggacaactgggggactgccaatgccattagcaaagaggttggcattgagaacacagttgcagaagcgaaaccagagcagaaagctgagaaggtgaaagaacttcagtcggccggaaggaccgtggcaatggttggtgatggaatcaacgattctccagcgcttgtatcagccgacgttggcctggcgattggcgcaggcactgacgtcgccattgaagcggccgacatcgtcctcatgaagagcaacctggaagacgtgatcaccgccatcgatctgtccagaaaaaccttcttccgcatacggatgaactacgtctgggcgctcggctacaacatcatcggcataccgatcgctgccggggtgctcttcccgtcgacccggttccgcttgccgccatgggtcgccggcgctgcgatggctgcttcctccgttagcgtcgtctgctggtccctgctgttgaggtactacaagagcccaaaactgggccgttgatcatgcagtacacacgcatagcatttgcttagaataagaggtgtagatatctgttgacaatgtgctaatgtggttctaaaagaaatgtgctagtgtgtgttgtgtggcacctgaaatgtgtacattacctacgtatatatgcaccgtgtgtttacaagtgtt

SEQ ID NO: 22835 - DNA, 1207 bp, Oryza sativa
  ref <308>: DATABASE ACCESSION NUMBER: AK072991
  ref <309>: DATABASE ENTRY DATE: 2001-12-06
gatacctgcgctgtcgctgtccacccgtccgtccgtcgtcgatggcgtcgtcgtcgccgccggtccggccatgggcggacctgcagcacgacctgctcgtgatgatcatgtcccgggtgggcctccccgatctcctctccggcggcgccacccgcgcctgctccgcatggcgggcctcggcgcgcgacccgctcgtgtggcgccgcgttgacctccgcgactgggccgtcctgacctcggcccggcgccggctcgctgcgggagacggtgaagcagcagccgccgggcgcgggcgtgtccctcttcaagccgctctctgcagtgtgctggagatcgtcgtgcggcgggcggccggtcggatggaggccttgctcctaccggagttcgccgatgaggagcacctcctcttcctcgctcagaggaatccaaatctgcactatttcagccttcctgccacatgtataacttatgatcagttccgtaaggcaattgacaaattacaatttcttaaaggcatggcagtggatgagggtcttattaatcacgatgttctcagccatgtacatcagtgttgtccagattttctggagttgaaggtgtttgctctttatgtcgacgaagagatggcttcaatcatttgcaactcccttccacgtctgaagaagcttgagataccaaactctgatatgtcttgtgctgcaataataaaattccttgattgcctagaggagcttgagtacttggacatatctggttatgagacttcggcaatatcaagtgctgtgctccaaaaagcttctcggctgaacatcttcatctggaactcaaaatttgagcttggggagttcacggactgttcgaattgtggtgaacattgcattaatcctcaagagccttgtaagtgcgtgatggagcacagagtcatggactggctggctggaccttcacaaccttcctgatgcagtaaactgtgacttaagttaaattgacaatcctacctgctcgtcaaatttcaacatttgtctgggttacttgtcaatcaaatggtgggtaaggtggtaccacgctttgatgtgccttatgtggcactttattttggagtttaatatgtatgtgatatcacgatttccagcattttattgtcaatgatgtcttgtgagaacgaagcaacgcacgctacttggtgcagtgttgagccttgttttac

SEQ ID NO: 22836 - DNA, 1290 bp, Oryza sativa
  ref <308>: DATABASE ACCESSION NUMBER: AK072992
  ref <309>: DATABASE ENTRY DATE: 2001-12-06
ggttcatctaactgcacgtcacgccctccgcgtgtgcctccccttcgcccgctcgctccgtcgttaagccagatcgcccgccgctccgtgccctagcgccgccgccgccgccgccgacaccggaatcgccgggcagactgcgagcgcggagccaccagcgtggggcggcgggatgggcgaggaggccaagtacctcgagacggcgcgggccgagcgctccgtgtggctgatgaagtgccccccggtcgtctcgcacgcctggcagggcgccgtgtcctcctccgacgccgccggctccaaccctaaccccgtcgtcgccaaggtcgtcctctcccttgacctcctccgctccgaggagccctccctccagttcaagatggagatggctcaaactaacactggcaatacaccaaagagttactccttgaatatgtccaaggattttgtaccaatgtgtgttttctctgagtctaaccaagggaaactttcatgtgaaggaaaagtcgagcataaatttgacatgaagcctcacagtgataatttggtgaactatggaaagttatgccgtgaaaggacacaaaagtccatgatcaaaactagaaaagtgcaggtaattgaggatcacagaatgagcctgataccgttgcctggcatggttggtctcataccttctggttctaaggagaagaagaagcaaacaccaaccaaaccatctgatgcaaaaagaatacgtagggatcgcagggaactggaaaatattatattcaagctttttgaaagacagcccaattgggcactaaaggcgctggtgcaagaaactgaccagccagagcaattcctgaaggagattctgaatgatctgtgtttttacaacaaacgaggaccaaaccagggaacgcatgagctcaagcctgagtacaagaaatctacaggggacactgatgcttcttgaatatgctagttcatttaactgctttcggataaccaacatactcaacctgttgactctgaagtcacgaacattgagttgtgcagacatctcatatttcagtaacattcgttctgctgctaaatgctaagaggcataggcgaatagttgtaaggatagtttgatacatttattagagaaaagaatagaaaagaaaaatctggaatctatgttcaggtaaaataatgtgcctggtgggagtcgcagcgtagagcatagtcctattcataattttcgttgtttatatgctgtttttatgtctcatttcatcatttgaaatgcaggatttatctgattcttcg

SEQ ID NO: 22837 - DNA, 3638 bp, Oryza sativa
  ref <308>: DATABASE ACCESSION NUMBER: AK072993
  ref <309>: DATABASE ENTRY DATE: 2001-12-06
gtctctccccatctctctctctcctcctcgactcaccgtctctctctctcccctcccgtctccggcgatctctccggcggcgtctccggcgaccgggccaccgccgccgccgccaaggagcgctccccctcattccccagatcggtagctgtctcgtcgccgtccccgatcctcctcctcttcctttcccccagatccacaccccccccctcgcgtactcgctcttagcctccgcggcgggaggtggtggtggtgtgggcggggggtgagctcgtgagtcagatccggtgatctgtgcgctgttgcggttgccatggacgacttccagggcctcctggcccgcgactttgggctgcgcccgcaggggaaggcggcgcccatgtcggccgcccgcgccgccgcgtcctccggatccgcctggtccaactccagatccgcatcggcgtcctccgccgccgccgccaccgccccgcccgcgcccttgtacgatgacctcttcggggccgcggcgccctccgcccagccgcccaaggccgcgccctcgccctccctcgacgccatctttgactccttcaaggagccctccgccccggatgccccacccaagccgaagcactcgtccatgccggtgtttgacaagccggtctacgatgacgacatcttcgatggggttcccggggtgaagagcagctcctcggcgcggtttgacgatgtattcggtggcagccacgcgccgccgccacctgcgtacgatgatctgcttgggggatttgggagcaagccggaggtgaaggaggtgctgccggaggagaagaggaagcctgagccggccgcttcatcggctgggtttgatgatttgatcccagggtttggcgggaggatcccgatgcgtgccagggagactgttggaactaaagataagaatgtgtccatgtcaacgtctaagccagctagcatggcaagtgacccatttgatgttcttggtacaacttcaacctcaaagcatacatcttcagggatattcacggatcccttggatgaactgggcaggcctgcaaaatctcaagggaaaaaacatgataatactgctgttgacagtggcctattcgaggactcaagcacttttaatcaggtcccaaaatcagaacctctgtttacctcagagttgaatgatgacttgaaagataggaatggctccaccaaagatcgagattcaagtcctgtgcaaaatttttccagaaaaaatacaacccaaaaaccttctgtggagaacttcgaaaatatctttcctaagtcacagtctgctcgatattctgatgttcatgttgacattggtgcctctggttcagagaaatacagtgggaatggtatggatgaccagtctccaagatctgatgagtccgaagatgagatctggcttacagtttctgagattcccctcttcacacagccaactagtgccccaccaccttcaagaacaccaccacctcttgctgttaagcaaaaaccacatggatcacaagcaaaaagaaaagatgacaattatccacgccggtctaaccaaaaccacaatcatcacagaagctcgtcaaatcaagctggttcttcttcaatagatgaactggaagattttgccatgggcaagtctcaaagttctgcctatgacaatgcaaatccttttaatgaggaagaatttgagcatagttcatcagcagcagcatctgcagctgctatgaaggaagcaatggataaagctgaggcaaagttcaagcatgcgaaggttgtacgggaaagggaacgcgatgcaaaacatagaaatagagaacagcaggaacaagatgatgaagcaaggttcaacacccaggatcatgaagagagagataggcaggaaagactagaacgggagagagagatgagacaaagggaggaaaaggagagagagcaaagaagacttgaagaggagagggaacttgagaaacagagagaaagagagagggctgctaggcaagctgtggaaagggctacaaaggaagcacgggaaagagcagctgcagaagcacgtgcaaaagcagagagggaggcacgccagcgtgcagagcgggctgctgttcaaagagctcaaaaggaagcacgtgagagggctgctgtagacgctagggaacgagctgagagggcagctgctgaagcgaaggagagggctgctgctgaagccaaggagaaggttgcaactcaagccagggatagggctgcagcagaaagagctgcagtggagagagctcaacaagaagcaaggaggagagctgaaagagcagcagtagagagggctgcttctgaggctcgggaacgtcaagctgctgaggctcgagaaaggcaggctgctgctgctgctgctgcagcagctgcagcaaaagaaaaacagagtaaaccggacgatcttgagtccttctttggtatgggagctcgagccaatagtgcgccgaagcaaagggctccaacagcggattcgatgttcaattctcaaactcaaaatagaggggcagcatcttctgcttcagcatctatgcggaaggcatcatcaacaacaaatattgcagatgacctatctgcaatatttggaggagctcccacatcatctgaagaatttcaagaaattgaaggagagagtgaagaaagaagacgtgctaggttcgaacggcatcaaaggacccgtgaacgagcggcaaaagccctggctgaaaagaatgaacgggatatgcaggttcaaagggagcaggctgaaagacatagaatttcagaaacaatggactttgagattaagcgatgggctgctggaaaagaaggcaatttgcgtgcattgctatcaactttgcaatatgtactttggccagaatgtggatggcaacctgtatccctgactgacttgattactgctgctgcggttaaaaaggtatatagaaaggcaacattgtgcatacatcctgacaaggtgcagcaaaagggggcaaatctacagcagaaatatgttgccgagaaggtgtttgatctccttaaggaggcatggaacaaattcaactcagaggaactcttctaaacggcctgcgcaaatgaaacatattgctcaccaatcttcacctgcatgaggcaatcggggtgggacagcacctcatagaacaaccgagctggagcagtcggtcggcggacccatgaaacgatgaagtgaaagttccaccataattacaattgtattgttattaccaatattgtttgttttattatacaccctcatcttctcccttctgtatgtgttgattcaaatgacatttcacagccacatgtggtggccctgcggcagaccctcatccagtaggtgtatattagcgttctttttgctcggttgatccagggttgtgtagcagcggatttggggtggccagtgttgtggtttttggattaggcacagggtttatttaccatggagggcccaaattgcatggatcatgaatgttgccagtttgatgccatgggcttttcgtaagttcaattatcttgtttatagtgaacttctggaacacacattggggatgttcctctgattcctgtgtgattttgtataaagttgatctggaattttgatttcc

SEQ ID NO: 22838 - DNA, 621 bp, Oryza sativa
  ref <308>: DATABASE ACCESSION NUMBER: AK072994
  ref <309>: DATABASE ENTRY DATE: 2001-12-06
ggcttcagaaaataagaaaaagagaagagaagaacaaagaaagaaggagagctcctggccgcgctcgccgcgatgctgttcgttcgcgccatcgccggcccgggcccggcgctcctccctcctgtcaaggacgaggatgccgacggcgatggcaacccggaggccagcggggaaggaggcggagtgcctccggtgacgataaggtgggcccgcatcacctgtgccgcctcccacccgccgacgcctgccaccgcccgctgctgacgccgccgacagaggggaaggggaggaggggagagcggtgtcgccgcttgccgcccgctgctgacggagaggggagggcgctgtcgccgctcgccgcccactgccgacactgcgacggcagagacgggaaggggaggagaggggcgggggaggcctaacatgttgattgctaccggttaaaccgcagtagtcctgccgtagactgctcgccaattgtcggtctgaccatcgggatccaaaaatcacatatcgacgagacgaaactcttgaaagtagatcaactttattgcatcaatatgtgtttacaaagtgtatctaaagcactcctctgtcaactagtattgaagcctcgaagct

SEQ ID NO: 22839 - DNA, 1633 bp, Oryza sativa
  ref <308>: DATABASE ACCESSION NUMBER: AK072995
  ref <309>: DATABASE ENTRY DATE: 2001-12-06
gactctctcaccggcggcggaggcgcaccaccaaagtccccacgcgcctcaaactccccaacaagagaatgccagattatccactcctccgccttcctcccctccccctccccctcccaccatgattcggattaccacccacctctctcccaccctcaagcctcctcctcctctatccctccacccccacctccctctcctccgccgccaccgccacccctcctccaggcccatctccgtctccgccgccgccccgtccgacctcctcgccagcgtcgagtccgtcgcctccgccgcctccgtcctcgccgccatcgtcctcgtccacgagtcgggccacttcctcgccgccacctcccgcggcatccacgtctcccagttctccgtcggcttcggccccgccctcgcgcgcttccgcctcggccccgtcgagtacgcgctccgcgccatcccgctcgggggctacgtcggcttccccgacgacgacccggactccggcttcccgcccgacgaccccgacctcctccgcaaccgccccgtccccgaccgcctcctcgtcgtctccgccggcgtcgccgccaacctcctcttcgccttcctcatcgtctacgcccaggcgctcaccgtcggcgtccccgtccaggcgcagctccccggcgtcctcgtccccgaggtcatccccggctccgccgccgcccgcgccggcctcctccccggcgatgtcatcctctccgtccccggcctcgcaccggacccctccgttcctgtcctcgtcgacctcatcaaggcaagccccaacaaggatgtctccgtcaccgtctcaagaacagggccaggacccggcgaccggaggtccatcgacctcaccgtcgtgccggacaccagcgtcgacgggaccggccgcattggcgtgcagctctcgccctacttccgtgtcactcgcgtccaccccaacaacctggccgaggccaccgtcctcgccttgcgcgagttcaccgcattgagcgccacggtgctcgacggcctcaggcagacgttcctcaacttctcgcagacggcggagaaggtgtctggtccagttgcaatcattgcggttggcgcagaggtggccaggtcaagcgccgagggcttgtttcagtttgcggctgtgataaacctcaaccttgctgcaataaacttgttgccattgccagcattagacggtgggacgttggcgttgatccttctcgaggcggcccgtggtgggcagaagatcccccgtgaaatcgaacagaggatcatgtcgtcaggtatactggtggtactcatggttggcatgtttctgattgtccgcgacacgctcaatcttgacttcatcaaggacattttgtgatacttgggtgatgaaaacttggatcacagttagtgaagtcaaaagtttcagacattggttggcctctgaaaaggttagtagttgtgcaattgggattcatttgccccatttgttgggattgctctagcattctagcttcttatactgatcataggtccttgtattgttatctgaatgaagctctaatgttgcatttagtcgcatttctagatgaatgggaacactgaattgttgatatgtaaattgccccccttgtgaagc

SEQ ID NO: 22840 - DNA, 1031 bp, Oryza sativa
  ref <308>: DATABASE ACCESSION NUMBER: AK099315
  ref <309>: DATABASE ENTRY DATE: 2002-08-28
ggcagcggcaggtggtggtggtggtggtggtgttgttgctgctgctactactcttcttcccccttcctcgtgttcctcctcttcgcctcgtctctctgccctgcctcgtgcgcgtccagatccgggagggatgggggcgggggcgctgggggtggtggcgatggtggcggcggcggtggtggtggcgatggcgggggcgaactccgagggcgacgcgctgtcggcgctgcggcggagcctcagggaccccggcggggtgctgcagagctgggaccccacgctcgtcaacccctgcacctggttccacgtcacctgcgaccgcgacaaccgcgtcacgcgcctggatcttgggaatttgaacttatctggtcatctggtgcctgagcttggaaagttggatcatctgcaatatctggagctatacaagaataatattcaaggaacgatcccatcggaacttggtaatttgaagaatcttataagcttggacctgtacaagaacaacatttctgggactatacctccaacacttgggaaattaacgtcccttgtattcttgcggctcaatggcaatcgcttgactgggccaatcccaagggaactggccggaatatctagtcttaaagttgttgatgtttcaagcaatgatctgtgtggaacaattcctacatcaggaccatttgagcacattcccctaagcaactttgagaagaacccacgcttggaaggtccagaactacaaggcctggctgtatatgacaccaactgctagatggaaacacgaagaaaagaatgggtagaaagtaatgggcgtaaaatgttaccgaaaaccgggtgatatagattatgttaggtttggacctaccactctgtaatcctccatgcatagctcttgtttgtgctgtttgtcggcaatgaagttgtatgttgtagcagaatactttctttctgtgaaagtaaacatggaactgcttatgtcatgagtcaaatgttattgttatcacgcttccctgtgttatattgaccaaact

SEQ ID NO: 22841 - DNA, 1509 bp, Oryza sativa
  ref <308>: DATABASE ACCESSION NUMBER: AK072996
  ref <309>: DATABASE ENTRY DATE: 2001-12-06
gggggagagagtggctttcgctgcaaaaataataagaaaagaaaagaaaaaaaaacaaaaacgaaaaggcccctcggcctcgccatcgccagccgccgccgacgagctccatccggcgagcagcggtggctgccgccggtccgcccgcccgtgccaagtgttgggtgttgatttgttcaagtctggaggaaattcgagcgaaatggcttcttccctgagcaaatccgacaagaagaaggtgctggattttgcggcatggagtttcaacatcaccacgtctgttggaatcatcatggtcaacaaggctctgatggctacgcatggattcagtttcgccacaaccttaactggccttcattttgtgacaaccaccttgatgactatcgtgtttcggtggttaggcctcagccagccctcccacttaccactgccagatctgattaaatttgtgatcttttcgaacttgtcgattgttggaatgaatgtgagcttgatgtggaactctgtggggttttatcagatagcaaagctctgcatgatacctgcatcatgtctcctggaggttgtcttcgatcatgtacattattctcgggacacaaagctgagcataatggttgtgcttataggtgttgcggtctgcacagttactgatgtcagtgtaaatgcaaaaggtctggctgctgctgttatagctgtttggagcacagctttgcaacaatattatgttcattttctccaacgaaagtactctctgaactcattcaacctcctgggtcacactgctccagcccaagcaggatcccttctgctagtggggccctttgtagatttcttgttgacaggcaaaagggtggatcactttggtttcacatcgattgctttgtttttcctgactctctcatgtgtcattgccattggtgttaatctgagccaattcatctgcattggtcggttttctgccgtatccttccaagtcctgggccacatgaagacagtgctcgtgttgtcccttgggtttctcttctttggcaaggaaggtctgaattttcaggtagtccttgggatgatcctcgctgttgttgggatgatatggtatgggaacgcatcagcgaaaccaggtggcaaagagcggcggagcgttcttccagtaaggtctgagaagcctagtggagcattagacgagaaggatggcagtgagaaatagtatgtgatctgcgatttatatgacaatttcttctgtgaagtttttctggtgatgcaagtatgatatacaaaggaaaccttgccaggcgttttcgtttaccgctgaagccatagattcgccatctagaaactcatcattgtcatagctataggatacagttaatatacatttgtcatcgcatttttttcgttctcctgtacattccttatgggggagatggcatagatgttctacagggttgcaagacagttgtccgaaaagacaatgtagtaattgtttgtgataacacggagttctacatttcc

SEQ ID NO: 22842 - DNA, 1635 bp, Oryza sativa
  ref <308>: DATABASE ACCESSION NUMBER: AK072997
  ref <309>: DATABASE ENTRY DATE: 2001-12-06
gagacaatccccccctcctctcgcagacatccgggccccaccacgtcagcctctcatggccttcgcggcggagccgatggatctggaggtgtcgccggattcctcgccggcggcggcggcggcggcggcggtgtgctcgatctgcctggacgcggtggcgtgcggcgacggggtggcggcgaggtccaccgcgcggctgcagtgcggccacgagttccacctagactgcattggatctgcatttaatgcaaaaggggtgatgcagtgcccaaattgtcggaatattgagaaaggtcactggctctatgggaatgagagccaaccatgtagccattctgatacaggtgactggctgaatggtgaaacctttgactacccgttctcatttgaatttgggtggtgtcccttcaatacaccattgacctctgtttttggggaaagcgaatctgagccaaatccttttttggagtatatagggtctctgcatggttttcaccatccaatgtatgcgccttctagttctactgccagtactgaaagcataccattccatcagcgtcctactggtacggaaggtcatgcaactacagatttgagaaatactcaagttttcaatgaatctgagccaagaaaccatgagagagaacagcagtatttaggtagtgttcaaatgcctggaacactcaatcattccaccgccccatttggcataggaatgccaagatatgatggaggcaaccagcaaagattgcgaccacatatgcatgataattccttattccacaggccgacagctcgcagagcaagcaatcttgcacatttgaggtcattaactgctgcgtctgaaactagaggccatggccatggtatgacaagtcacgctgttcaacaaacaattccatcatccatggcaagcaatccacaacctcctgcgaccagaagggttcgaccaagggctttgtcaatcacatctttcattgcagcctcatcgtcagctgagatcagagccccccatgactttcctctcactgaaaccgcaagcaccacaaacggtaacatccgtaatggtgttggtgcccctagacatgccaatcaatcatacagctggagttcagagaccttctggccacaaactggggaacctcactggtggagtccgatggctcccgtacataatcgatcttatgataattttagtggaagatcagccacagagctgctttccatttatggcgcacagaatggtctgcctactccgcgattcctgtgaatacttgtcttccctccatcgtgtatattccggggttggccgatatttgggtttgtttcagcaaagaatgggaaataactgaggcttcagtgtcaggaactcaggttgctgtcattaatcgtcatcttatgttgatgatgccggtatttcgtaccgttatggttttttatttctggaaggcaacctcatgttagtttcttcaagtgaagatgctttatgaattgtctcagttaaagtgacaatattgtttggaattctctatatgtgctagtcctgaatcatactgaggaaaatgctgctaaacaatgttgccattgaactgtagtaattatcgaatcaaatgcttctgctgtatatcttgaatc

SEQ ID NO: 22843 - DNA, 3604 bp, Oryza sativa
  ref <308>: DATABASE ACCESSION NUMBER: AK072998
  ref <309>: DATABASE ENTRY DATE: 2001-12-06
gagtgcacttcccctcctctcccgaaagctgtcttgtttgcacgaaagcgttacagagctacggcggcgagcaccggctccaacccctcccccgtcgccgcgcccgccggcgatgagctcgccggcagagccccctccaccggagcacccccctactccagctccagcgccagcgcccgcttccccgcctccacaccccgccgcctcaggcaatgaggccgccgccccaccaaaacctaaccccccaatcacacccgcgcctgcccggaatgcctccgccgcgccgccatccggatcgccggctaccgccgccgccgcagcccccgtgccatcccgaaaggaatccgggtctacatccgccgccgcccccgcggcggcgacccggaaggcctcgggggtagccgccgccaccaccggtgtgctacctcggaagccccccgggaccactgcccccgtcgccgcccggaacatcccggcgaccaccgcggcgtcccggaccgccacgagggccaccaccaccactaccgccacctcggtgtcccgaaggcccgccgccgccgccgccgcagtggcctcccgaattcccttgagggcaactgatgccacgacgacccacgcggcatcccgaaatcccttgacgggagccgccgccgccaccgccaccgttgccgcggtggggaggggcggattccgggccgctcctacacgcccggaggagtacacgccgcggatggggatggagttcgagagcgagcacgaggcgtacgagttctaccgctactacggctggaaagtagggttcaacgtccggaaggagtacgccaacaagagcaagaagaccggcgagatcacctcccggaagttcgcctgctcccgcgagggctacagggccaacgtcaagcggggcaaccacatggtgccgatgccggactcgaggaccggctgcaacgcgcacctcgtcatccgccgcaagaagcccggcgccaagctggaggtttacgccttccagccgcggcacaaccacccgctcttcgctacatcctgcatgcccaatcctctgcagcccaatgtcgtgcactggacgacattgcccgatgtcgttacgccgcctgatcttctgatggacgggggtgaggtgggagggcagaattctaccgaagagaatagtaccgcgagtgcaggggaagggcgccggcagccgctgcgaaccaggaggcaatgggagatgaagtatggagaagctggtgctttgttaaattattttcaagaccagtctctggctaacccctcgttctaccattccgtgcagttggatgtcgaggataaggtggcaaatgttttctgggccgatccaaggatgattactgactacagtcagttcggtgatgttattgcatttgatgtggtgtctaggaacagtataagcctccgtcattttgcctcttttgtcggttgtaacaattttggtgagcctattgtttttgggttagcgctcatgtatgacgagactgcagagtctttccagtggctgtttgagactttcttgcatgcaatgtctggacgagcacccaaaactttcttttcacatcaagatgcggttgtagcaaaggctgtctctatagtgatgccagacacaacccatgttatatgtgcatggcacctaaagcatgctgcaacgaggaacataaatcagcttaaaagtgacagtgatttcatgaaggagttcaaggcatgcatcaatttgtatgaagaggagacggaatttctcacttcttgggatgctatgatcaataagcataaccttcatgataatgtatggttgaaaaaggtatttgaagaaaaagaaaaatgggctagaccttatatgagaggggtcttttcagctggaatgaaaggcacacgattgaacgaccgcttccagtctgatgtgcgggatcatttgagacctgaggtaaatattcttttattgttgaggcatcttgagacagttattaatgataggcggcggaaagaattggaggttgagtatagttcaaggctaaagttgctgtactttaaaattaaagctcctatcctgacacaagcttttgaggcttataccaatacgatctttccgctttttcaagaagaatacgaagaattccagtcagcttacattgtaaaccgtgatgaaagtggcccttgtcgtgagtatgtcgtttcagttgttgagaaagagaagcgatatacagtttatggaaaccctactgagcagactgtttcatgctcatgtaagaagtttgaaagaaatggtttcttgtgtagccacgcgctgaaaattttagatgcaatggatataaaatatctaccagacagatatattatgaagcgctggacaaaatatgctaggactttgatgtctggagatgttcaaggtcaagcaattcaagcagataaattatcagaatcctccagtcgctatcaatacatgtgcccaaagtatgttaggcttgttgctcgagcatcagaatgtgaggaatcctacagagtactggaccaatgttgggtagatcttagcaacaaagttgaagaaatcctacagaaacaaacttgtgtcgatgcaactctgacccagactgatgttcagaaccttaaggtttccttaccttctattacaaacggcactcaagcagaaaatatcatggacaaatcaagtggcacaacagcaaaagagtcaaagaagaaggggcagaaaaataagatccaatcaagaaattgcattgaaaaaggtttacgaaagaagcagaaggttcactcagaacaaccttcagagtatgctttgttaggtggttctcaatctggaaacatgtttcaggctttcgagggtcctcctaacatgtccccactgggtacccaaactccgacctataaaacctacagggggattgatctttcaagtccgatgggcccaattagctatgatgaaatgccctctggcttagatccgactttcacgacgcatctaggttttgcaacctatcacacttctcaggtgtcaagtagcagcccacacaaccaggccttgtagatatgaatgcctcattgcaaggtgctgtgcttctctcttttgagcacagcacggaacatgtaagctccatcttggcgtcttgtagattggaggctcgagatgattagatgtcatccatcgactatagatggcatggaccagctagaaatgggcatatacatcattggtatgtagcagttcaattagtacaagtagctgtagttactagctactctttctttcttgcaacttgagttgattatttcttattgtagttggcaggttggtactaagagctggattacctctttaccttagcctgtatgaatgtatatatatattctcagatgtacaacttgtaggccataagatggcgtctgccttttgtgcgcaggaaatgcttcaagatgtaaccacaacttaacttatgtcattccccctagtctttctgtttttcattaccctagggaggtcgacttatgtacatgactactggggctgtctggttatctgtagaatcactttggacaagaggaaaggatgaatatttagttattt

SEQ ID NO: 22844 - DNA, 2681 bp, Oryza sativa
  ref <308>: DATABASE ACCESSION NUMBER: AK072999
  ref <309>: DATABASE ENTRY DATE: 2001-12-06
gcggcttatctccgcctctccctcctcttcccacgcgccgccgccgccgccgccgctgccgccttggctccttcgctcgtccgcgctgcagcctgcagcttgtggacgccggctcctcggcgaggatgtcgaccgaggggtgctcctcgtatctttgtcggctgccaggccctccgactttagcagttggcggtgctgccggcggcgagttggtcgaaacctcctcgtcttctggaccgtcgcatgcttcccctccgcatcggagtactgcctccacctccctctcctccaatcctccccggcccagttccaccgccgtccctccccttttcctccccggccaagtgccaccgcctcctccttctccaccttactatccccagcgacgccgccgccgccatatctccttacatcttcccttcatctggccgatgcaagctggggacgaccagatccggcgtttttgagctcaaaaccaccagatccatcccctagcgcggcaaggggggaggccgccatctccagatccaataatgcccctctttttcttctccggtcgtcttggtggcggcagcatatggcggccgtcccttccgggctcaaagaggagcgtccgtgtgaccaccgcgctccaggcccgcgttgtgaacgctgtccagctccttggtggccacaagactacaagaagaattataggtcaggagtggaagagacgtggtgaaccaaatataacacataaagaaaaacttgtacggaatggtgcttggcgtggttctaccagcagataaacatgagaaggtgatgacaaaggcagttacaataaatagtggcttagtgacaataggacagggaaaagacagtgatagaactgagttctacggatatatcaaagaaatgttcaagcttggatttgaaggtagcagaactcttattttacctgttctattcaattgctactggagttgaggtacaccccaaattatggtttggtagaggtagcacatgcatcttcctaaaccatttctttgtaaaataccatttcttcttgttttctgtatatctgtattttagtattacatatatacataagtacatgctcaaaattggagaggtaatgaggtggatcatcattgtttatgcccttgctgtgccaaatgccactgggttaaatgttcccctgaagttttatacttcattttttaaggattacatgattgcattccactagttctaggattttttgaaataaaacggtgcttcgtaatgaccaaaggatttgcatttctaaatcagacctcatcatttctgcagatattctttttgctaccatctagaggaagctgatttgcaccagtgccatcaaatactcacctgcactgtaagctctcgcacacctgattcttagcaagaagatgtatcttattaatccatttttactatggctagattaatggttcaagtttagttatgatatggtgctgccatcttgctaacaatagtgctaactgctacttcctccatttcacaatgtaagactttctagcattgctcatattcatttagatgttaatgaatctagatatatgtatgtgtttagattcattaatatctatatgtatgtgggcaatgctagaaaatcttacattatgaaacggagggagtacccaataagagtgaaataaaatactgctgatttttttttgaggggataaatactgccgaattttggaacttgctatgctgtgtgccgtctttcattggtactgctgtgtgccgtctttgtaacttaatttgttgtggagcaaaattttttgttttaattgtttgttgaaccaatggatttgtttactgagagtccagcatctgaagaagaagttctattttcactttcaagactatgttgatcttatcatatggaaggtacctacagtgtatccactgctcactttgtctcttactctctttccctatttttatttcttgaaaagtttcttaacacttcacctggaaccaatataattaattttagctaactctcggtaataacacaaccttgatgatagagcacatgtgctgataaccgagcataccatattctatcaaatatacatatatatttttcgtaaaggtgcttataacatgatggttgaacagctgcagtttttggatcgtcatcacctatttatgcagtttttggatcgttgttaacaaccaaatttggtaatttcagtatcagagatggagataaaattgaggcggaatccaagatggaagtcgttctggaaacagagcaaggatctgctaaagtccgcatctgctatgaccgggatcggcagagtccgagttggacaaggttagccgattgagccgagtccgacaatgtgacgcggtacacattgtcgggttgagttaatgagcttcatgaggattgtcatgcacggattgagtcctgagacggcaattatatctattaattaggatatttcatgtaattttcttagagatatgtttgggcaaaagtctgctgcaaagacttatggtatcttagagtttgttagagataagagtcatgtccggcacgaacatattttgtaatctcgggtataaatagaccccgagccctatgtaatacaacaacacacgttcaatacaatctcggcgcatcgccacccttttactct

SEQ ID NO: 22845 - DNA, 1443 bp, Oryza sativa
  ref <308>: DATABASE ACCESSION NUMBER: AK073000
  ref <309>: DATABASE ENTRY DATE: 2001-12-06
gatcgtcgcccggggccactacaccgagcgcgccgccgcgctggtcacccgcaccatcgtcgaggtcgtgcagatgtgccataagcatggagtgatgcaccgggacctcaaaccagagaatttcttgtttgcaaacaagaaggaaactgcagctctgaaggcaattgattttggcctgtctgttttttttcaccccaggtgaacggttcactgagattgtcggaagcccttattacatggctcctgaggtgctaaagagaaattatggccctgaggttgatgtttggagtgcaggagtgatcctttacattcttctttgtggagtccctccattttgggcagaaactgaacagggtgttgctcaggcaattatccgttctgtcattgacttcaagagagacccatggccaagggtctcagataatgcaaaggatcttgtcaagggaatgctcaatccagaccctaggcggcggctaaatgctcaacaagtgcttgatcatccttggttacagaacattaagaaggctccaaatgtaaatttaggcgaaactgttaaggccagacttcaacaattctctgtgatgaacaagttcaagaagcatgcacttagggtcatagctgagcatctttcagtagaagaggttgctggtataaaggacatgtttgagaagatggatctcaacaaagataatatgattaattttgatgagctgaagcttggcctgcataaacttgggcaccaaatggctgatgcagatgtccaaatactaatggatgctgcggatgtcgatggaaatggatctttagactacggggagtttgttgctctatctgttcacctgagaaagattggcaacgatgagcatctgcacaaggcatttgcatactttgatcggaaccagagtggatatattgaaatcgatgagctccgtgaatcattggctgatgacctgggagcaaatcatgaagaggttatcaatgccatcatccgtgatgtagacactgataaggatggcaagataagctatgatgagtttgcggcaatgatgaaggccggaacagattggaggaaagcctcaagacaatattcaagagaacggttcactagcctcagcctaaaacttcagaaagatggatcattgcagttaacaactacccaatagatagatgacggaataggcaagttgtgaattccccagatgaaaaccttgtgtagctttcctggttctttgttgacgactattttcttccgttctcatttctcgagatttccactgctctatttttcattttggtgccccgtatgaagcattaggtgattgttggaaggtttgtttgtttgtttgtatttagattatattgatccatgccccacgggtggccaaacatttggcgaaatgtactgtacaagagaaaggaaaaggaagtaggtggtttttgtgc

SEQ ID NO: 22846 - DNA, 1259 bp, Oryza sativa
  ref <308>: DATABASE ACCESSION NUMBER: AK073001
  ref <309>: DATABASE ENTRY DATE: 2001-12-06
tatatgaccgtgtttttgatgctaacactacccaagaagaagtatttgaggacacgaagtatctagttcaatcggccgttgatggatataatgtttgtatatttgcttatgggcaaactggttctggaaaaacttttacaatttatggatctgaaaacaatcctggtcttaccccaagggctacctctgaactttttagggtgataaagcgtgatggtcacaaatattcattttctttgaaggcatatatggttgagctttatcaggataatcttgtggacctgttgttggccaaaaacgcaacacaccaaaaattggaaataaaaaaggattccaagggggttgttactgttgaaaatgtgacagttgtgaacatttcaagttttgaagaactgagggctataattttaagaggttccgagagaagacacaccgctggaacaaatatgaatgttgagagctcaaggtctcatttaattctttcaatcattattgaaagtaccaacctccagactcaatcttatgcaagaggaaagctaagtttcgtggaccttgctggttctgagagggtgaaaaagtccggctcagcaggaaaacaactgaaagaagctcaaagcatcaataagtctctttctgcattggctgatgtgattggggctttatcttctgatggacaacatataccttatcggaaccataagttgacaatgctgatgagtgattctcttggaggcaatgcgaaaaccttgatgtttgtgaatgtctcaccagcagagtccaacctggaggagacttacaattcactcatgtatgcttcacgagtgcgttgcattgtcaatgatacgagcaagcatgttgccccaaaggaaatcatgaggttgaagaagttaattgcttattggaaggagcaagctggcaagcgtagtgaagacgacgacctggaggaaatacaggaagagaggacaccaaaggagaaagcagataatcgcttgactagctgagaacaaggtaccatcagaattctatgcccctggttgcatccttgcaccgtctgcagaggtgactgatgttgatgatcattttcgactcgccgacgccgacgtgttcaccaatcacccgctaacagaaccttccggtatgacctaacaatgttgtacaccaattgtatagtaacagattatattatggcaatgatgcctcttgtacaaagggaaccgtagcacacattcataggagaatcagatggtggaagagttatt

SEQ ID NO: 22847 - DNA, 1891 bp, Oryza sativa
  ref <308>: DATABASE ACCESSION NUMBER: AK073002
  ref <309>: DATABASE ENTRY DATE: 2001-12-06
gacttgcttcgagcatttggtaccacctattttgcattgccatcttgtaagaaacctcagcatccaccaagagtttcaggccgcaccaatggcttgtgctccagatcccagcaataacaagaatagctcgtcgattcttcatcagcaagtgaagaaaattagcagcattcctttttcatggggagcacatgcatggggtataggaagagaagatccaagaagggctattcatgctctcaaggttgggacagcactcacactggtctcactcctgtacatacttgaaccgttgttcaagggagggggaaagaatgcaatgtgggctgtgatgaccgttgttgttgtgcttgaatttactgcaggtgcaactatatgcaaagggctgaatagagggttaggaacaatcttggcaggatctctagcatttataattgaacttgtagcagtacgatctggaaaagtattccgggctctgtttgttggatcatcagtctttctgataggatttgctgcaacatatttgagattcttcccatccattaagaagaactatgattatggggtcgtgattttcctgctaactttcaatctgataacagtatcaagcttccgtcaagaggatgtggtgcctttagcacgagatcgcttaagtactattgcgataggttgtgcaatatgcctattcatgagtctttttgtattgccaaactggtctggagaagacctccacagttctacagtacgcaaatttgaaggattagcaagatcaattgaagcttgtgttactgagtatttccaagatcaagacaaggatgataaaattcttgataagcaggcatcaagggcttccattcacattggttatagagcagtccttgactcaaaatcaagtgatgaaaccctagcacactatgcaagctgggagccaagacattcaatgcaatgttacagttatccatggcaaaagtatgtgaagattggatctgttcttaggcactttgcatatactgtcgcagcacttcatggatgtctagaatctgagattcagactccaccatccgtcaggtcactattccgaaacccatgtactagagttgcacgagaagtggtcaaggttttacaagagcttgcagtaagcataagagatcatcatcgttgtgcccctgatgtgctgtctgatcatcttcatgaagcactacaggatctaaactcggctataagatcacagccacggctctttctcggctccaaacatgcatgtgcaaatagtcatgtgctgatggaattaaattctagcaagcatacagccacaagaactactctaccatcattcaagactgatggcacatccctattagaaaggaggaatacaaaagcagaccaaccatcagaacggaatgagcggggcacattaaggccaacactaagtaagatagccatgacaagccttgagttctcagaagcacttccattcgctgcgtttgcttcattgttggtagaaatggtagttcggctggagatggttattgaagaagtgaaggaactggagagagcagcaaattttagagaattcactggacatgactatctgaccattgatcttacttccaatgacaagatgagaaacccaaatggcgtaccattagacagccacacaatttccactgcagctgagtaagtactgaataatagatcaaatcagtagatgatcactctgaagcagatatgtatttctttttggactaagaaaatatggcctgtgaggctgtgattcccaataaatgttgttagaatgacaactcataaaaaaacaatattaaacctacaggatgtttatcggagttggatgatgtaaaaaaaatttcagcagaaagtactcatgcttttcccc

SEQ ID NO: 22848 - DNA, 2335 bp, Oryza sativa
  ref <308>: DATABASE ACCESSION NUMBER: AK073003
  ref <309>: DATABASE ENTRY DATE: 2001-12-06
tgggcggcacgtcttgacacgcgcctcctcctcgcctcgcctcgccgccggtggccgccaccgccgccgccgacgcagccgtcgccatcgccgcgcccaccctggcttggcggcgagccgagcaacaggaaggcgataagcacgcgaggaggagcccatagcaaagagagggagagagagagagagagagagagagagagagagagagagagctttgatcacgcaagaccgcggcgtgcgaggaccttccgggtgctgtgctgtgctgcgcgtgcggctgtttgggcggcggcgcgcgccttcggatgagatgcgcaggggcggggtgaaggcggcggcggcggccgagaaggcgcgggaggcggcgcgggcgaaggtgtgggcggcgcgggcgagcaccaccgtggtgctctggctgtgctgcgcgctgctgctcgcgacgtcgcgggagctcgggaggtggtcgggctgcctcacccagccgctgatcgtcgtagagcgccggttcgaggcggttgccgccgcgggcagcgagagggcggctgcatcagcatcggcagtggcagcggcgcgcggcgagagggcagaatcatcagcatcggaagcggcggtggcggcgctcccgccgaagagaatctacaagaacagtggctatctgatggtctcctgcaacggtgggcttaaccagatgcgagcagctatatgtgatatggtgacgattgcaagatacctgaacgtcacccttatcgtcccagaactggacaaaacttcattttgggctgatcctagtgagttcaaggatatatttgatgtggattacttcatatcatcattgagagacgaggttcggatactgaaagagctgcctccaaggctgaaaagaagagttgaactgggatatgttcgctcgatgccacctgtcagttggtctgatatatcttattaccaaaatcaggtttggtgaatctctcgttttcgttgatgtattcatcatgaactgaaaatcatgtgcaaaaatcaggggaggattgtaagtgtttatttgcggaaaacagattctaccactgattaggaagtacaagatcgttcatctgaacaaaactgatgctcgccttgcaaataatggcctacctatggagattcagaaattgaggtgccgtgtcaattttgctgcattgagatttacccctgagatagaagagctgggtaggcgtgtggttcgaattcttcgtcgtaatggcccttttctggttcttcacttgcgatatgaaatggacatgctcgcgttctctggttgcacacatggttgcagcaacgaggaggctgaggagctcacaagaatgaggtatgcttacccatggtggaaagagaaggtgattgactcaaatgcaaagaggaacgacgggctctgtccattaacaccggaggagactgcaatggtattaaaggcactagacattgatagcagttatcaaatatacattgccgctggtgaaatatacggtgggcaaagaagaatgtctgcccttacctcagcttatcccaatgtggtgagaaaagagacattattgccttcagatctcaggtttttccagaaccattcctcccagatggcagcattagattacattgtatccttggagagtgatatttttatccccacttatgatggtaatatggcaaaagttgttgaaggtcatcgcagatacttgggcttcaagaagactgtactgctagataggaagcttatagttgagctcgttgatcagtacaaaaacggcacaatgagatggaaccatttctcctccgctgtgaaggcgtcgcatagcagccgcatgggcgcgccatcaaggaggcagatgattcctgacaaacctaaggaagaagactacttctatgcaaatcctcatgagtgtttgcaccaaccagaagagctatcagttttgtgacacccctcccactatacagaattacacattctttcaggattatattacagattgaattggcaataaatggaggcccagttgtattgatgaataaaagcacacgagatgagagaatttggcctccttttgctaggtgactgttacataacatacacgttggcataattttttgccgttttctcccaaaaataagcatgtaattttgttttgtaaatataagcatacatgctcacaggtgttgagttgttcgtacatatacatacggatcaagacttgtcaaaaattcttccactgtacttctctgtactacatttgggcagttggtggttcatgcatgtactttcctgattgtttctgaattctgaattatcattttcgccgggctg

SEQ ID NO: 22849 - DNA, 2067 bp, Oryza sativa
  ref <308>: DATABASE ACCESSION NUMBER: AK073004
  ref <309>: DATABASE ENTRY DATE: 2001-12-06
tggtctccacctcgaccttccccccacttcgcttcgcgtgctcggatccgaatccaaaccctcctccaagccctaatccaatccacccaagggtctcctcctcctcccctctccgcttcccccccgaaaccctaaacccccacctcctccccccacccgcggtttcccgcccgatccccaccgccgcgcgctcaatccgggttcgaattcgaatcccagctcgaggcgcccgctcgattcgacccccgcggctactgctgctgctgctgcctcgaggcctccagctcagccggcttggcgcggatggtggcgtccccggcggcgtcgagacctaggccgagccctagctccggatctgggaggaggaaccccgccacgcccgcgaggtgttcgacggaatgagcggtcgggttgggggtggaggaggagaggaggcggcggaagcatgagcgggggcggagggggaggaggcgggagcgggagcgggagtgggagccgggacgagtacggtagggcggtggcgcgggcggccgtggcgcaggcgctggaggcggccgggttcgactgcgcgcaccgctcggcggtggacgcgctcgtcgacgtcatcctccgctacgtcgtgcacctcggcaggaccgcggcgttcaacgccaacctcgccggccgcgtcctcgccaacgagtacgacatcatacaggcgctcgaggagatcggcaccgatttcgatgggttcgtcggcgcggccacctccgaccgctgccttgtcggctcgggcgtcgtcagggagctgattgattacgttgagtccaagcccgaggtgccgttcgtgcggcctctgcctagcttcccggtgccgcgcgtggagccgcagccagctcaaagcttcgcgatggccgggaaggagtctgggatgaagcatgtgccggaatggctcccggtgttcccggatccacacacgtacataaggacagaggtttggagcgaagaggaggccaaggccagggtggacaaggttgagcaggtgcggcagcggaggaaggctgagaagtcactgctcagcttgcagcggcggttggcacttgcaggtgctgatggatttaggccagcggttacagagaatactgcggaaaaggggaaggagatacaggtggctgggagcaagagaaatccattccttgagcctgcattgccacctggggagaaggaggtgtctgatgttgctatgcaaccacagaggaggaaaatctctgtcctcgacgcatttgcaccagcgattcaggctgcaaacatgatggacattgatactgggccaggttgggacaacaatcagaatcagaagagcattgttcccaaagagagggcaccggtgcacctcaagattggaattgataagaagccgttatcagctgtgttgaattcaaaacccctggatctgagggaggatccgtctttcttgaaggaggaagtaaaggatgagcggaagcggagggcgggcatgatactaagggcatcaatggagaacccacaggagcttccgcagctttaatgctgcataatgttgatcttgggataagcagagctatcaacattgtacatgttttctttttctggatcttcaatgcgcgttatctcaagggtggtatgacgcgatcctgttccaaagaacacccaacctgcacccaaccagacaactgtaagctggatttgttgtaactatgaccaccatgctgtttccctctatggttgattcaaaaggagctgattttggaaggtcgtgcttcttagccccctcaaagccatggccagtcttcatccaaagaatgacgctcctgctccccttttggtaatcaatcctctttcccgtgcctactcgtagtagaaagaacgactgatgtacaaaacctgactatgctgactaggatggatcgacattttacttagcgagttcctccctcaaggcagtttcctgatgaaatgtgtagaagtcagattgagatggtcgatgctgaagcgagtactgattgagattttgtagtttgagaatcgtttatttcccatttgcttgcc

SEQ ID NO: 22850 - DNA, 1959 bp, Oryza sativa
  ref <308>: DATABASE ACCESSION NUMBER: AK073005
  ref <309>: DATABASE ENTRY DATE: 2001-12-06
aacagcctttccggtccaatcccagctgacatctcaaaacagctgccattcattacaaaccttgatctatcttataatagtttctcaggggagattccagaatccctagctaattgtacttatctaaatattgtcaatttgcaaaataacaaattaactggagcaatcccagggcagcttggtattctatctcgcctaagccagtttaatgttgccaacaatcaactgtcagggccgataccttcatctttcggcaaattcgcgtcatccaattttgcaaatcaagacctctgtgggagacctctgagcaatgattgcactgccacttcaagcagccgtacaggggtcattattggttctgctgttggtggtgcagttataatgtttataatagttggtgttatcctgttcattttcttgcggaaaatgcctgccaagaagaaggaaaaggatttggaagagaataagtgggcaaagaatatcaagagtgcaaaaggagcgaaggtatccatgtttgagaaatcagttgcaaagatgaagttaaatgatctgatgaaggcaacaggtgattttactaaggataatattattggatctggtcgatcaggaactatgtacaaagctacactcccagatggttcattccttgctatcaagaggctacaggatactcaacattccgagagtcaatttgcatctgagatgtcaacattgggaagtgtaaggcagcgcaacttacttcctcttttaggctattgtattgctaagaaagagaggctcttggtatacaagtatatgcccaagggttcactctatgatcagctacaccaacagactagtgagaaaaaggcattggagtggccattgaggctcaaaattgccattgggtctgctaaaggtttggcatggcttcaccacagttgcaatccccgcatccttcaccggaacattagttcgaagtgcatattactcgatgatgactatgaccctaaaatttctgattttgggttggcaaggcttatgaaccccatcgacacccacctgagcacatttgtcaacggtgaatttggagacttggggtatgtagctcctgagtatgcacgtaccctcgtggccactccaaaaggggatgtttatagctttggagttgtgttgcttgaacttgtcactggtgaagagcccacacaggtgaaaaatgccccggaaaacttcaaaggaagtttggtggattggataacatacctgtcaaacaatgctatccttcaggatgcagttgataagtccttgattggaaaggatcatgatgctgagctgcttcaattcatgaaggttgcatgctcgtgtgtgctttccgctccaaaggaaagaccgacaatgtttgaggtttaccagctaatgagagctattggagagaaataccattttagcgctgcagacgatgaattgacgatgcagccgcagaatgctgaagccgaaaagcttgatgagcttattgtagcaaactagatgagggtgatgaatggatgttgctcagatgcagtagctactgtgaagcttctagataatcagggtgatccgaactgaatggaatcctgctcagtatatttttttccagcaattgcactgctgagcaacactaggtaaagctgtaagctccaagatatgcatgccatttggtttgtaagatctgtatcaattagccatgttaaaactttttctgtacattcttgccttgctgtgtactatctctaggattggcatgtcctgctgttgtaagatggatcaactgtatcagcatccgaatttagttgtagtagctcttagatttagcaatgttgaacagtactactgggttgttgatcctccacatttttttcggtgcgttcctttgtcatttttgttagttaatgtggagtgagcccctacaataatctgatgagatgtgggattactggtttc

SEQ ID NO: 22851 - DNA, 1334 bp, Oryza sativa
  ref <308>: DATABASE ACCESSION NUMBER: AK099316
  ref <309>: DATABASE ENTRY DATE: 2002-08-28
ggctctctttgttcttcgtcagagagagtccacgggttgacagttccactcctgctctcttggaggcttggagatcaatcgatggagcacgtccagatcccgagagtgaagctgggaacccagggcctcgaggtgtccaagctcgggttcgggtgcatgggcctcaccggcgtctacaatgcgccggtcgccgaggaagacggcgtcgccgtcgtcaggcgagcgttcgaggccggcgtcaccttcttcgacacctccgatgcctacggcccgcacaccaacgaagtccttctggggaaggcactgaagcaactacctcgtgagaaggtacaagtggccaccaagttcggcattgcaggatttgatgccaatggcatgcctgtgaagggcactccggattatgtgcgtgcatgctgtgaagcaagccttgagcgccttgctgttgactacattgatctgtactatcagcatcgcattgaccagtcagtacccatagaggaaactatgggagaactaaagaagttggtggaagaaggtaaagttaaatttgttggcttatctgaggccagtgctgataccattagacgagcacatgcagtttacccaatcaccgcagtgcagatggagtggtctctatggaccagggatatagaggaagaaataatcccgctgtgcagggagcttggcattggaattgttccatatagcccaattggccgtggcttctttgctggcagggctgctgtacagagcataccatctgagagttggctgactagacatccaaggtacaatggggaaaacttggagaagaataaagttttctacacacgaattgaagagcttgccaccaagtatggctgctcccctgctcaacttgctctctcctgggttcttcatcaaggggatgatgttgttccaatccctggcacaacaaaagtgaagaaccttgatgataacattggtgctgtaaaggtaaagctgagcaaggaagacctgaaagaaatctcagctgctgtccctgctggcgaggtggctgggtccagacttattggagtactggagccttattcttggagggttgcaaacactccacctccaaaatcattgtaaatattaagatgcaaattaaaatatactctagctatgctatgttttatttctttctagccccattggatacttattcaaggcttaatttgaacaaactatgtttgtccatgcccaagaaaagattgtgtattttgggcaacagatgttattggtgttgtactgctgtgtgcaatgtagtgattgctttacattatcaaaaaaatatatgtcatattgatgtt

SEQ ID NO: 22852 - DNA, 3640 bp, Oryza sativa
  ref <308>: DATABASE ACCESSION NUMBER: AK073006
  ref <309>: DATABASE ENTRY DATE: 2001-12-06
gcggtcttcttcttcgtgctctcaccgggggcgtgtgatcaccgccggtgagatgagatgagatgagccccgtctacgctcgattccgggagcccctcctgttcggttcgctttgcgacgtgtttgattttttttctctctctatggtgatttgattccgattagatccgatcttgttctggttttgaattctgtgttctaccttttccccgtgtttcctcctctaggcgtgttcggttgcaggagcgggtttgatccaggattggaggttcctgtggcgtcgtgtggttgaagaggtgaacgtttcttgtctacggtccgtttgatttagtcacttggtttcggtgatttcagatttggcaatttgagtggatatgctaacgttacttcaatctatggatggatgatcatcggttcttatcattcctcacgcgaggtgattcgagaccctgggttgattgttgttatttgtgaccgctgatctggcttgttgtcggtatgtgtttgtgctcctctagatgatgcaggagggaggatgactgttgagatgaaccggattggtggaggtttgattgttattgtccaggttcatggttgttttggattcatgatgaattatggttcttggttgttttgattagtgcacggttgttctgaaattatcctgacatggaagttctgaaactatcctggctggatttcctttggtcagatccgcaagatgggcagatttctaagtggtttggagatagattatacgggagattgttagatggggatttcatcatttcaatgtttttttgggtcctgatcccccttgattttatttagttgtcagcataatttgatttatgtctggaaggtctgatttgggaagttggttgttcttcaggaattggatatatgcagctcacagcgagtcctatttgccgcatcagttggaattatacaggctgctagcagtcccttttttgtgatcgacaacctttacctgcttaatctttgataaccaagttgatttcttttacatgttcttcgtcagtaattaatagttcttgcagatactcctatgccaaagatggaatttgcaatatctgcctcggtctatactaatatctgcaaactccagactttatgccactcagtctttaagtgattttgtttatgcttagactgctttcctccaaaatgaagtctcctggtcattgcaaggctccacataatttttatggcctatctgagtgaagccttaaatcaccacccttttcccttcttaatcattagtagatgttcaatgcttacaaagttgaatttcttcccaaataaatggtctctttgcttactgcaggtctagttcataattttacaaggccattctgatgctgagtgaaatctttaaatcaccttctcttcaattcatcacttagaaattaaatatttacaaagttgaatttcttcccgaataaatggtctcttgctcactgcaggtcaagttcataaatttgcaaggccaacctgattctgagttttaaatcactacccttaaattctcacaaaggtagaatttaaatactcggatttacctgcagagatggaattgcataggagttatggagcttcaagatagatgggactacaggagaatcctacaaccagaacatacttttgctagtctgcctaaaacttttcccttctcgttcaatttctgtttcggtcatcagaattgctctctacgacatatagctatgattttggtgtgcctttgcttttctttgtttgtcacagattctttaattttctccaaggttattgattggaggctgttgacttgttcggtttgtgttctatcactgtacctcaatcattaagtataagttcaatgcctgagctgtttgttcgcatgatagtcatagggtcggtctgggaattggagctctgtatgtcaacgaaggggcatacaaggttttggttgattttttgagattatgttatctggatttagcggtttcagaatacggatcgtttggcttggccttcttatgtggtcttccctgatgggtagttgttggattatcccctagtttgagtggattcaagacaacctgagttggttctttttgtggtatgagttctgttcttgtttagatgatgcagaaggatttttgattctatggtgatattacgaagtttgtgctgcaatagctatgacaaccctgattggatttgttgctgctcagatatgtgcaagttaaaggttgaagcttgactggagcaacgatcacataactggaaaaaagaccatgaagccgcaatatactcatcaactcatttgctttcagttcttgcagtccagtttaagcgatgcttacatggatattagctttttttgtccagcaattggaagtactggcttgttggagttgcagatacgacattcagagttgcagtgcaaaatcaatacggatttggatgttctttgacctctctaaagccaggcttatccctcacccaccatgacataatttttctgatgtttaagcagcttccacctaaataaagattcagagaagatagtattttgctcgtttcaggtccattttcggtcattttggaagggcaatccaactccgattgaaattttctgaaccactagcattttcccttcaactccttgttgaaaattcaatgcccacaaagacgggagggttcgaggattctatcttttgtccatggtgacgtggatattttcttaagaagttgacttgtctggtttgtgatataccactttctgggtttggtcaattatctctagattcagtgtcttgttgttcttgttggcatgtgattgcagggtgggtctagaaaaatgagcatgtgacaaagcttaatctggaaattgagcaagggcatccagtagggtcatcatgcaagaagctttactcatcgtctagccaccatagctggacgttacttgctcgtgtaacaacaagcatcagtttggtaacatctgcacaccatgaatccaagctaccgacgtatatcagaaagtgatgatgagttcattcattttgttctgcctactttaggagattcatcacaatcatcttgtattaggagaccaatgcacacgtcaaaacttacagggggttgccgtgtacatgagattttaacaggacatgaaagattatgcaaaagaaacttccgtatggaggtcgacatttttcatgcactagtcaataagttacgtgagaaagagtacctaactggtactatatgtttcagtagaagagcatattgctatattcttatatacagtggcaaaaaatgcaaccaatgaaacacttcaagattggtttcagcatagtccagacacaatacatagatatttcaaagcagtgcaggaagcaatcacaaatctcacatctgtctacattcgtgcaccatccctacacccacatccaatcttgaggaaaccacaattttaccccttttttcagaattgtattggtgctatagatggtactcatatccctatgaaacttccattggatgagcaagagtcatatagaaataggaagcaaacaatctctcagaattgtatggttgcttgtgattttgatttgaagtttgtgcatatacg

SEQ ID NO: 22853 - DNA, 1475 bp, Oryza sativa
  ref <308>: DATABASE ACCESSION NUMBER: AK073007
  ref <309>: DATABASE ENTRY DATE: 2001-12-06
ttgagtatactcctaaataataggcacatccaaccgtcagatccgcatccaacggctgagatccccgccgccgcggcgtgggagtcatcacactagactagtacactaggctagccgcctcgaccgaacccctccactctcttccgcctccgcctccgcctcgccgccgccgccgccgacgacgacctccacctctccacgccgccgtctgcgatgcaggcccgcgtcgtcgtcttccccgtcaagggaagggcctggtgcttcgccagcccgcgcgccaccgcgcccgccgccgcttgcgggggcggcgatgggggcgccctactacccccactgccgccaaccgtcaaggacctctggcgcggcatcgccggcgggggccgcacggcgtcggagaacgcggaggccgtcatcgacttcgtcgcggacaagatgaaccgggcgtggatcgggttcgggagcgcgccggaggggtcgatgaaaaaccggatccacagcttcgggctgaagctgctctcgcgggtgcggccgtcggaggtgctgctcaagtcggtgaccaaggacgtctccctactcgagatcgtgcatccggcaagtataaatcctcgtcttgtgcgtcgacggttgcggcatattgctgtcaggggtgcatcagttcacaggaaatttctttatggctcagtttgtttgcttccagttacaagtgttttcatggtactgcctttgccaaacataccatttttctgggtgctgtttcgtgcttattctcattggagagctctgcagggaagtgagaggctccagttgttagtttctgacagctcagatcaatggaaaatccttcttgagaagcagaaagagatgagttccagaaaggatggcaacccttgtgaaaacactcaatatgctccttggaatttgcagccttcgaagaagcttgatgggttccttgagagcagaaaattgaatgaaggattggattgtgataccatttcgaggatttgtcaggcatatgatttggacaagattgatgttctgaagtacagggatttggagtaaccacatccagtttcttggctgccgtggtgatttttttgccagctaatgtttgtgtggtagaaatgaattccgtcgtggagaactagctgaactgctgaagggtacacgagtgacacgagacttccaaaattagtgactaatgcagattttttttttttgcaagggatttggagtagtagcattacaattcacaagttttgttgttcctcagtctgctgctggtttacaaggcagaaaaacagacaggacctaaaactgtagtgcccatggtgacatctaattctgtacccaccatgtaaatagaggtggaggcatcctttccccactagcattttctttggtttcagcaccactcagtagtcagtactctgtaaggagatttgcttcaatggattttgcagctgctataacttctg

SEQ ID NO: 22854 - DNA, 2501 bp, Oryza sativa
  ref <308>: DATABASE ACCESSION NUMBER: AK073008
  ref <309>: DATABASE ENTRY DATE: 2001-12-06
gtggtttggatttttatttggttttcctatggagtccgggtctagggatcttgaccctgtcagcgctttaatcctttccatcgaagggaacagtacgcggatctgacaagttttgacggatttgacctttttcctcccggattattgtgttgcaagcgctgtccggggttgaaaaagcgccaaaagtcttcgttttttgtgtgccaagatgatgaggcgcccgcggccgccgtggtggtgaaggtggaggtggaggagaagaagaagaaggtctcgtcgaaagcgaccgggaaaggggacgctgcgtcggatggcgggcccactacggggactcccctcccggacaaaaagttgcttctcttcatcctcgacaggctccagaagaaggacacctatggagttttctcggagcccgtcgaccatgaggagcttccagattaccatgagattatcgagcatcctatggacttctcgacgatccgcgagaagctgttgaatgactcgtataccaccctagagcagtttgagaatgatgtgtttctacttacatcaaatgccatgtcctacaattcagacgacacagtctactatcggcaggcacgatctattgaagctctggccaaaaaggatttcgagaacctgaggcaagctagtgagcctgaagaagaacaacaacccaagactgtacccagaagaggcagaccaccaaaatatgcaaagaaaattgagaagactgaaaatgatgtttcaccagatttatccaatgcaaaaacaaaatctgcagaccatgctgaaacaattagaaaaaggttgactggggacagaactcgaaatgcaaatatcacaacaagagactcaccctttcttcaacataatacacctggttcttttgctggtaaaagaacagatagatttggtgattattcagggccttcgaagtacggaaagaagaccaccccgactatttcagatgatgagcgtcgtagtacatacgatcagcaatacttccatagtagtcctctgttttctgcccttggtggtgagaggaaagtacttgtgccggtgggacttcaacagcaacatgcatatgctaggagcttggcgcggtttgctgcaaaatttggtcccgtaggctgggacatagcagcaaagagaatcagacgactactgccttctggaacaaattttggcccaggatgggttgtggatggtgagccacctgagaactctcagtggcctcgagttcccatgctctctgatccatccatccagtctactggtgttccagctagcaacgtaatatccaagaatgatgaatccaatcagaagtctggactgacttcgaacgaggattctggtgaagagcatctagctagaaccgagccagtggcttctacatctgcatgcgttaacacaaactctgtatctgccaccaagctagctaccaagtgtgaaaacggggctaatgtgtcatgtgatggtgtgggtagtactggacagacacctcccttgcagcagcacagccatagtcgagagatccactcaaatatgaatggcttcactgccttgccaaacacaattagtcaatacgcagggcaaggattcttgggacagatgcagttgacacatgctcaagttcttgggatgttttccggagtcaatggcagaacaaatggctttatccatgggcacccactggtggctaatagcattaaagcaccacaaaatggggatgttggaaaggtagccactaatccatcaccagatgcaggtcatgattcagaagctgcattatcacaaaccatgactagttctgctccaagtttaagtgctggtgttcaaccatcaggttccatgccaagcgaaaagttagcaaatccaaaaaagcacccggacttggcattgcagctctgaagacaattagccattgacatagttcagcttagcgccgtccttgattggaaacatgattcagaatcccagcttctcgagtccttattctccgcttgctatgctgatggatattgtagcagcacactgagtggttctgagggagaattaacaatggatttctcgtcgaagaataattcattgtgaggcgaggtcatgggaaggagtaactagagccgatgaatcgtttgactcccagcaaatttgttgtaaaagggtaggtagtcagtatagattctaatcttatttccgatgataatgtttcggatgggcagcatctggcatccaatgtgtaacattatactagtggaggtatacaagcagggagggaggcaagtgcataggtgtgcctttttcctgcgaggattgatccgattccaggttgtatgagactggcggatggacgactgctgcaactccaccccagttgagctgagtagcaagtagcctgagtcaccaaaatcttgctctgagcccctgacatgattctgtgttgacattttcactgacatgattatgtagtgttttaacatttgttgatgttgctcttg

SEQ ID NO: 22855 - DNA, 1423 bp, Oryza sativa
  ref <308>: DATABASE ACCESSION NUMBER: AK099317
  ref <309>: DATABASE ENTRY DATE: 2002-08-28
gacaaggcgccctccgctgagcttggcttggcaacgcggagggacggacaatactgacctctgagaaagaagacattgagggaggaataaacacaatgccattggcccgttgaggaagggtgagagccaattaattgttaacaagaattgaccatatagagaggttcaatcttgttaacagcaaattttgacgttcacccttggcagacggttttgcgaattcgagaagagaaggcgcgtgcacacacaaaaaaggaatttcaggtgaaagggcatgagcacaaagatgaagaagggaatcctaagaccattccgctacatctctaacatgatggatggtaaggaggcggcacaagacatgcagattggattccccacggatgtgaaacacgtggcgcacatcggatgggatgggcctagtgtccccaacaacaataataatactgcaggagcacctagctggatgaaggattaccattcggcgccactggactcagcctcatttaggagcgacagagggggctctgctgcagctaatccatgggcttctcaagaaatcgtggtagacggaggaagcctaggagacacatccttcagtgaaaccagaagcgaggccagcggcagcatggacatcaccgccggcgactccccgccgtcgcccgactcccgccggtcgaggcggcaccgctccaggggctccgccgccacctcctccatggactgcacggccgccgacggcggcgccgccccggagaagaaggacaaggccaagaagagctcccgcggcaagaaccgcaagaaggacaagtccgacaagtcggcggccgccggcgccggcgacgacgcctccggcgccacctgccaggacctccccgccgtgcccaagaagtccaaccgccggaaaaacaagggcggctcggagggcaccggcgccgctgcggcctccaaggccgacggcgccggagccggcggggaggacgcggcggcgccagagccgccggcgaccgaagaagctcaagatcacgactgataaaaaaaaaaagacacgaacacgaacttctttcgggagacgaaatcgatgaaactaaactaaagcttgtcacgtcacgctccggatttgcttcgagcgagctcggatttagatggatgggtatatagattttgctcgatcatgcatggcgacgttcgaagaagaaacggggtgtgtgcacgccctaattcaaactgatcctttcctctcaattttttttccctttttctttctctctctccctactgtaatactatttgatcgacattttgttgaatatgtgttgtgttgttcctgactcacatatataaagtgtaccaagtgggattatgtacgttttgtataaccgcggtgaaatattctgtgaaatttaatggatccctcttgagtacc

SEQ ID NO: 22856 - DNA, 1395 bp, Oryza sativa
  ref <308>: DATABASE ACCESSION NUMBER: AK073009
  ref <309>: DATABASE ENTRY DATE: 2001-12-06
gacaagccacctcgatcgatctccattgaaatcaaggcaccttaataatttctagtaccatattaagctaagaacagtagtgtacatggcttctcgtagaagtgcagcagctagtccggccatggcagcagcagctgcggtagtagctgtatctgtatacttgctggtgtgcagtgctccggcggcggcgacggcggcggcggtggcgaagaagccgtcgtacccgccggtggcgaaggggctatcgttcgaccactacaagaagagttgcccgcaggcggaggccatcgtgttcagcttcctgcgcgacgccatcggcaaggacgtcggcctcgccgcggcgctgatccggctccacttccacgactgcttcgtccagggctgcgacgcctccatcctcctcaccaagacgcccggcgggcccgacggcgagcagcaggcgatacccaacgagtcgctgcggccggcggcgttcaaggccgtcaacgacatccgcgccctgctcgacagggcgtgcggccgcgtcgtctcctgctccgacatcgtcaccctcgccgcccgcgattccgtcaaactggccggtgggccgtcgtacaaggtgccgctcggccgccgtgacggcctcacatcggcgacgccgtcacaggtgctgggcgcgctcccgccgccgacctcccacgtccccgagctcatcgccgcgctggccaagctcaacctcgacgccgccgacctcatcgcgctctccggcgcccacaccgtcggcatcgcccactgcacctccttcaccgggcggctgtacccgaggcaggacggcaccatggacaagtggttcgccggccagctcaagctgacgtgcccgaagaacgacacggccaacaccaccgtcaacgacatccggacgcccaacgccttcgacaacaagtactacgtcgacctgcaaaaccgccagggcctcttcacctccgaccaggacctcttcgtcaacgccaccaccaggccgctcgtcgccgagttcgccgtcgaccagtcggcgttcttccaccagttcgtcttctccgtcgtcaagatgggccagatccaggtgctcaccggctcgcagggacagatccgggcaaactgctccgtccgcaaccccggcgccgcctccgccgacgaggagctcccgtggtccgccgccgtggagaccgtcgtcgaggcggccgagagcatcgtgctctagacacacaattgtgcgcgccatggacgcgtacgtcagtacgtgaaccgtacgttgaatgtggaaagagacgacgacgactgtggatatatgttggttactgccatgtcgaataaatgcatgacgtcatgacaacctcctttatgatcaatatatatggatgtggattttcatcttgc

SEQ ID NO: 22857 - DNA, 3389 bp, Oryza sativa
  ref <308>: DATABASE ACCESSION NUMBER: AK073010
  ref <309>: DATABASE ENTRY DATE: 2001-12-06
gggacgacaccgaaccgcaatcccctccttcgtttcgccgcggcggcgcggaccacaccactgctccccgccgccgccggcggctgctccgaccgccgcccccgcgcgcgccgccgccgatgtggaagagagttctggagacgacgaagaaggccgccgccgccgctaccgctaccgccgcaactggcccgcagctcgccacgcggaaaaacccttcctccagccgccgcaaggccgtcacgccggccaccgcggtctcccccgccgccctcctccgcctcaagcaggccgcctcctcgaagaggaccaacctgccctccaccctccccgacgcccaagatgtagccgctgtggaggacgagaacccttccggcggtttcaccaaggagatcctgtccatcttaaatggacctgatgatgcagaagaattgaggggggcgcaagcgccaccggaggagtctgaagatgccgaagagtctgtcgtgaacaggatactggacacggagtggtttgcggcgccaccacctagcaacccactggcggcctggcggaaggaggtggcaagggagaagaagaaacggtacatattcaagaacacagagagccgccgcttcaccaggttgatgcagaagtgtgccgataagcttggagcagagcccgcgcttgaattctttgggaagctggggagggatactggggctaaggagtttaatgctttgatcaggatttgtttgggcaaggcaaaggaatgcatggatattgactcagcagtggagcatatttatagggcatatcgcctctttgagctgatgagagaaaggggttatcagattgtggaagattgttatggaccattccttctgtatctggtggatgtagggatgtcagaggagtttgatatgttcagtgtgttctttaaggatgcaaatccacggtccagctcgagaatagcttattacgagatgttgttatggattagagctcaagatgaagaaaagattcaagaactttgccgctctgttgaagacttcaatgaagaaggtgactatgatatggcagaaagttatatgctggcctttgctgaaagcgacaggaggctggatttcatcagcttgcttgagtcacttgatccaacaagaattttacgctcaaagtacttattgaccatattccagtctttgggtaggttagaattgaagaactatgctgagaagcttcttcagcagatgaggtcgaaagaatctggtgttggaaaattttcatcgataatatttgagtatgcttcaaatataccaaacatagcgctaaacagaatgataagaacactggaaatggattttcttgaaggttgaagatgttatagtatcattcaatagatggcatgagcagtttgaggtagcaccctctatttctgcatctgagaagatcatctctgtttgttgcaaatcgtcaaagatcagcttagctcttgatgtagctgagtgcttatgtaaatccaaccccgatatgccagttgaattgtttcatccaataatacaggcctgtgaacaaggctctgaatttcacttggttcatccaatatatgatttgatgcgtcgccacaagatgaaattgaaaaccgaaacattcagaaacatgataaatttatgtgtaaagatgaaagatatgcagaagagtctggggatatatccactgtaagcctgtataatgctatcatgcttggatatttcagagagaaaaaccacaatggagcacagatggtcatggcgcaaatgcagattgccggagtaaaaccagattctgaaacatactgttatttgatatttaactgtgagttcgaagagaaaatctctgagtatcttgatcaattacggcaagatggaatacacatgtccaagcatatatatatgtcactagttagtgcatatgcaagacttgggaattttgacatggctaaacaggttctcgaaaacaaggaaataccacctaagtacctcaatgaaattaagagtgcgcttataggagctcttgcatcaaatgggaaggtattagatggacttatcatgtatgatgaaatcaagcaatctggatgccaccttgagccaaaatcagcaatagccctgattgagaatacccaaacaaaaggtgagctggatagactgtatcaacttctggaagagcttggtgactcaaacatgtggtttgacgggtgcagtagagtacttctgtactgtgttcagcacaatcaccctaatgctgccattggtttgcttaagcagcttaaggagaaagatgaattgagtacatatatggttattgatcaggtcttcagtcaaatatgggatatggatcctgtaaatttggattttggaatgaagattctccatgctgtgaaagagcttgggcttaatgtttctcggacaagccttgactttcttcttagtgcttgtgtaaaggcaaaggattcaaatcgtgcccagctgatatggacagaatatgaatctgcaggccttccacataatgtactgacttccttgaggatgtatcaggctcttttgttgtcccagaagaagaaggcgactaagaagttgctgcggaagataccaaaggaagatgttcatgtgcgttacataatagattcttgtcaaatggcatactgcagccagaatcttaagctaccttctgccagtaggtccagttcaataaagagagctgcttccaaggctgggagcacctgtaagcctgctgcttcaggaaccgggtgtttcgaaatgaagctgaagaggcacatactggcccttgataatagacagacttttcctgaacattgcctctagtttggtgcctggaattacctgcacccgcttcaaggagctacatgtgtttctgtttctggcttgaaacaagcaatcatacatgggagccgtcaccgaaagacggcgagaccactggccacatttgaggcctttggtgtgaccactggccaccactccctgcattgcaattgcattgcagcccccacttggcttaatggccaagacctagctagccagcctctctgctcatagtgcttcccatgtgaccacaaggctagggtttggtcacagtgaaacaatcactgccccatagcctcaccaaccaggaaaaagatctgccctgtttgattttgggagtggagttaggggagagattgagattggtagggcagaatagttgtactcctcagcctgcaaccaagatatcacaggataatatcttaaccagataggtaacagccacacatttttgcacctgttacagctcaagtcattactaaaaccagcattgttgtagaagttatgatttgtgttctagtttttctttattggggtatgcctttgattacaggt

SEQ ID NO: 22858 - DNA, 922 bp, Oryza sativa
  ref <308>: DATABASE ACCESSION NUMBER: AK073011
  ref <309>: DATABASE ENTRY DATE: 2001-12-06
gacggtgtggcgaaggtgtcactgacagccatggcccacaagcgcggccgtcttgttggttgggtgcttctcctcctcctcgccgtggctatcgccgtcgccgccgcggccacgccgaggcagctgttcctggtgacccaggcgccggtcacgctcacgaaccaccacggccagctgctcacggggaactactccgtcaacctgctctggtacggccgcttcaccccggcgcagcgcgccaccgtcgctgacttcttgctgtcgatgccgccgccaccgcctcgccagccgcgacgcgcgggcgcggcaggttcgcgtacgcgtgggtggggaacgcggcggagcagtgcccgggggagtgcgcgtggccgttccaccagccggcgtacggccctcaggcgccgccgctggtgtcgccgaacgccgacgtggtgatggacggcatcatcatcagcctcgccacgctgctcgccggggcggtgacgaacccgtacggcggcgggtacttccagggccccaccgaggcgccgctggaggcggtgacggcctgcacggggatgttcggcgccggcgcctacccggggtaccccggccagctgccggtggacgccgccaccggcgccagctacaacgccgtcggggtcgccggccggcggttcctcctgccggcgatgtgggaccccaagacctcgcagtgctctactctcgtgtagtagtactagtacaaaccctctgatgcgatcgatcgatggaccaaaatggcttgggctcggtgtacggacggctgggattagggagtggagtgacgtggtgtctcgtttcttttgttttgtggatatttcgtggtgaacaaaaaaaatggaaaaaaaaacagaatgaagtggggtaatgtaataaacctaggctttcgttgtcatgttct

SEQ ID NO: 22859 - DNA, 1520 bp, Oryza sativa
  ref <308>: DATABASE ACCESSION NUMBER: AK099318
  ref <309>: DATABASE ENTRY DATE: 2002-08-28
gatctcaaaaaaaagtagttgttacactcctcccggcattcgagtcccagacgaatccgacgccgagataagtgacgggggagatggagattggtcgtctcgtgcggaagcagacgcagccaggctgggcaccaaccacccgaggaggaggaagacgacgaccactcgctctcgcgctcgggcggctctcgtcccgtcgtccggtgcggtgccgctgcctcgccgccatgcagacttcgccgccgccgccgtccgtgcgcacggtctccatccccttctccgacctcaaggagagggatagggacctgagcgggaagatcgaggaagggctcgggcccaacgggctcgggatcatctccattgctgacgtgcctggttttcccgtgctaaggaaaacgttgctgcgcctggcaccaaaatttgcaaaccttcctgaagatgtgaagaaagaacttgaagacccagacagcaggtttaactttggatggagtcatgggaaagagaaacttgagtcagggaaactcgacacattcaaaggctccttttatgccaacccaattttggatgctccaaccactgatgatgtacttgtgagaaggtacccatcttattgccgaacaaatatatggccagccagtcatcttcctgagctcgaaatagcatttaaagctcttggaaagctgatgttggaagttggcttgatgttggctcatcattgtgatcgctatgtaatgcagcaaggagtgggaccatatgatggtgaaagccttgagcagacaattgccagctcaaggtgtcacaagggccgccttctgtattactacccccggcaatttagtaaacaagaggaaggtggttctgtttcatcgtggtgtggatggcatactgaccatggatctttaacaggacttacatgtgccttgtttacgaaaaattcaatggagatcccctgtcctgatagtgctgctggattgtatataaggactcgtgatgataaagttgttaaggttacatttgaggagaatgaattggcttaccaagttggagaaaccactgaaatactatcaagaggtcgtctatgtgcaactccacactgtgtgaaggcccccagcagtgaaaacgcctcgaatgttgatcgttcgaccttcgcgatgttcatgcaaccagattgggatgaaaagctcaagtttccaagtgaaattccgtatcatcaagagttgatcccaccgaatggaactcttacattcggggagtattcagaaagattggtgaacaagtattaccagggaaagacatgaaacactacaatacgcatgcaattttcaattgttgtttgtccgtttcgtactagcagtgaaatcgtcagtgcaacctggacaaacttaactgttaggttctctgcgtgtgttttgaactggagattcgagcaaccaatcatagaaaaaatgtgtctactgtaattgttttttccttacgataaaagcaacaacaccggtggcagcgtcaccttttcttggttc

SEQ ID NO: 22860 - DNA, 3466 bp, Oryza sativa
  ref <308>: DATABASE ACCESSION NUMBER: AK073012
  ref <309>: DATABASE ENTRY DATE: 2001-12-06
gctcgaccgcgacctcacccaccgtttctcgatcgtttctctccctcctcctcccgcgatccggtcttcttcctcctccccgtcgtgctcgccgcccacgactcctcctcctcctccaccaccacccctccacgacgcggcgggcggcgagcgcgcgcctcgtctcaccctcacgcctcccacgccttggaacccaattggagatagaagaggggagcgcgaggtcaaaccaggggaatcggaatcggaatcggaatccgcgacgagacgaccctacccccgcgctccggcgaccgaccggcggcgatggagggcggaaaccacggtgggggagggtacccctacccgccgccgcagcagtatccttacccgtacgggcagtacccataccagtatcctccaccgcagcagcagccgccgccgccctccgcctacctctcgccgtcccgttcgttccacggttacccctccgcgccgccgccgcagccgcagccgcagccgtacgcgcaccattccgccccgctccagccttacccgccgccgccgcagcaccatgcctacccgccgccgcagccgcatccgccctcgccgtacgtctacgacccttaccacgcgcccgccgcggcgtacccttcctacccgagccccaaccccagcccgtccatctccccgagctccagcttccaccaccaccctgaaccgccatcgccatcgccctccgcgccgtcgtacccctccattgcggatgggctcgccaacatgcacgtctccgaccgccacgactacccgccgccgccgtcgccggcggccgtgcccgcggcgtcgtccccctccgtgctcccgccttccgcgtcgttccccggcggcgggagcagccacggcggtggcgggatgcagatggtgccgtacggccctcctgccggagggtcgcagcacggtgggatgcagatggtggcgtacggctcgccggccggagggtcgcagcacggcagcgtgaggccatccctgaaggtggtgctgctccacggcaccctcgacgtctgggtgtacgacgctcggaacctcccgaacaaggatctcttctccaagagggtcggcgacctcctcggtccgcgcctcatcggcgccgtcggcagcaaaatgtccagcgccaacatgaccagcgacccctatgttaccatccaggtctcctatgccaccgtcgcgcgcgcctacgtcgttcccaacaatgagaaccccgtttggacgcagaatttccttgtccctgttgggcatgatgccgccgaggtcgagttcgttgtcaaggacaatgatgtcttcggtgctcagctcataggcacagtgtcgattcctgctgagaagctcctttttggagaaaggattaacggcatctacgatgtgcttgagtccaatgggaagccatgcgctcaaggtgctgtgttgcggctgtccatacagtacatcccggtggctcagctcaaaatgtatcaccatggtgtcattgccggcccagatagcctgggagttcctaatacttacttcccgatgcggcgtggcaatagagtgacactgtatcaggacgcacatgtgcctgatggttgtctcccggatttctgtcttgatcacggtatgcgctatcagcacgggcagtgttggcgtgatatctacgatgctatatgccaagcacggcggttgatttacattgtgggatggtcagtgttccacacaatccacctcatcagggaaggagttgagaagatgccatcacttggggaactgttgaagatgaagtcacaggaaggggtgagggtgttgcttcttgtgtgggacgatccaacatcaaggagtattcttggaattaagacggatggtttcatgggcacacgagatgaggagacccgcagatttttcaagcactcttcagttcaagtattgctttgcccacgatctgctgggaaacggcacagctgggtgaaacagcaggaaacaggaaccatttttactcatcatcagaaaacagttattttggatgctgatgctggcaatcataagaggaaaataattgcttttgttggtggcctcgatttatgcggtgggcgatatgatacacctagccatcctctatttaggtctcttcagactgtgcacaaggaggattattacaatccaaattttgctacagttgatgctcgtggcccaagggaaccatggcacgacttgcattccaagattgatggtccagcggcatatgatgttttgcaaaattttcaggagcgttggttaaaggcatccaaacgccatgggattaaaaagttaggaaaatcatatgatgatgccctcctcagtattgaaagaatacctgattttataagcattaatgacgcaatatattttagtgacaatgatccagagacgtggcatgttcaggtgtttcgttctattgattcaaattctgccaaaggatttccaaaggatccacgggaagcaacccgcaagaatcttgtttgtgggaagaatgtactgattgatatgagcatacatactgcatatgtcaatgctattcgtggagcgcagcacttcatttatattgagaaccagtatttcattggatcttcgtttaattgggattcaaacaaagatattggggctaataatttaataccaatcgaaattgctctcaaaattgcaaacaagataaaggcaaaagagagattctctgcatatatagtaattcccatgtggcctgagggtaatccaacaggtgctcctacacaaagcattctttactggcagcacaagacaatgcaaatgatgtacgaaacaatatatagggccctgaaagaagagggtctagatgatctatatgagcctcaggattatctgaacttcttttgtcttggcaatcgtgaagttgctgacagtccaagcacttcaaactcaacaagcactcctcaggaacaagctaggaaacatagaagattcatggtatatgtacattcaaaaggcatgattgtggatgatgaatatgtgataatgggatcagctaatatcaatcagaggtccatggaaggtatcagagatactgagattgcgatgggtgcgtatcagccacagtatacatgggcaagtaaggtttctgcaccccgtggacagatttatgggtacagaatgtctcttggggcggagcatatgggagtggttgaggaaggcttcaactatccagagaccatggaatgcatgagacgagttcgccaaatcggtgaacagaactgggaacgatttgttgataatgaggtgactgagatgagaggccacctaatgaagtacccggtaagtgtggaccgtaagggcaaggtgaaacccttgccaggatgtacgtcattcccagacatgggtggtaacatctgtggatcattccgagccatccaagaaaacctcacaatatgaatttcgattatctgtaagt

SEQ ID NO: 22861 - DNA, 1591 bp, Oryza sativa
  ref <308>: DATABASE ACCESSION NUMBER: AK073013
  ref <309>: DATABASE ENTRY DATE: 2001-12-06
gagtgatcaactgtgtcttcacctcactggcttcatccctagaagccattcactagctactgcacaagtagtacaggagcatcttttgtcagatttgcttcaggcttgatcttttcttgtgtgagatatggaggagagaaatgatgtcaacatggacaagtcagatgagatcctcctgcctggattcaggtttcatcctacagatgaagagctggttagcttctatctcaagaggaagatccagcagaagcctatctccattgagctcatcaggcaacttgacatctacaagtttgatccttgggatctcccaaagcttgcgagcacgggtgaaaaggagtggtacttctactgcccgagggaccggaaatatcgcaacagcgtgaggccgaaccgggtgacaacagctgggttctggaaagccacaggaactgacaggccaatctactccactgagggtaccaagagcataggcctcaagaagtcccttgtcttctacaagggcagagctgcaagagggatcaagactgactggatgatgcatgagttcaggcttcctacgctcaccgatccatcgctcccgaagaagccgattgacaagaacattccgctcaacgactcctggacaatctgcaggatcttcaagaagaccagttccatggcacaaagggcactctgtcagacctggggagctcaattgcctggaacaattgatccagacatcttctctacattgcaatctgtgcaagcttcacagtttgccctggagagttcctcctgctcattgcaagctgcagcaacggcagctcatcagatcactagcaagtatgcattgcaaggtaataataataatcagcagcagcagcaacagcacaagcctagcaatccactagatggatcttcatgcaaggtcataaacttcaactgcagtcaatctgcagaagtccagaactcccagatcatactgccatttgaggcacacacatcgcagaagaccgctacgccgctgctcttcgacacgcagtttgggcagcctgaccagatcagcagatttgtggtcgattcatctgtaaatgcaaatggaggaggcatcagcaacaagagccaagatccatcagcaagaaagcctggcagtggcttcagcatgaacagtgactgggatggtgtggcaagaatcaacttcccgttcgatttaggagcagattcttcagaagattggaggagcagcataccttgggaatccttccttagcccaactactgtccatgctgagatgccaaactagctgcagaggaatgccaggggtgttgttactaatattattcagagatatagatgtacaaatacagtgagtcaccttcatctgttagcatttctgttagcaacaaaaaaaaaaaaggtattgtttcttcagttttgattagatgtactgtacatactgtgagatataggagtacttgttaacagcaaagctaacagagagaaggttactttggttgtgttgtacatacattttcgagtttctgagtgctgtgagagtgtgatgagtattgtattgtcagtagaagaaatatatgtgaatttatatggc

SEQ ID NO: 22862 - DNA, 3282 bp, Oryza sativa
  ref <308>: DATABASE ACCESSION NUMBER: AK073014
  ref <309>: DATABASE ENTRY DATE: 2001-12-06
gagttgccacaggcaccgtctcgtcgtctccgtggcgacagcgccgccgctgctctgtcgccggcggccagcgcaaccgccgcctcttcggctcgccggcggcgcgcggggactcgaggaaggcctctgcgtcgccgtcactactacccatagctcgagtatgcaacgcgtggccatctccatctgctctctattactactattttcttagcgtgaatctgaaaattgaagcgatatagttgcggacgatggggattctcaaactatacatactagttctgatagagacaaatttgcacatgattttcacgaatttgagtagtgaccatcattcagaatgctcaatctgcacacctgagttgtggcagctagattcttgtcttcaactctgttcatagagttggaaaattaatatgccttgaagagatcttagcctttttagtaccatctgatctaatagcacaccataagcaaagaacaggccaaatgtgatgccaaagataaccttgtcaccgaattgatctgtggatgaagtagggctaggaagtgctcttgctgaattacagtggtgactgagcataccaccacatagctttggattaccagtgaagcttgagttgtcaaatgtatcaaactggcctccagttggaatagccccttccaggtcgttgttgtaaacattgaatgcagaaaggaagtttagcttgttcagttctaaagggattgtgcctgttagattgttgttagacaagtctagcatgaccagcttggtgaggttgcagattgcttgtggggtctccccagagaagctattgaagctcaagttgagcatatcgagtgccttcagctgactaatctctggcgggatcgcacctgtaaaaccatttttggctatgtttattgttgtgtggatatattggtattgtcggtttttgatgaatggaatgccgtaaaatctcatgtttgggacacttacatccagattggttctcttgtctgacttcagcattggaatctgcgttaatattgttggaaattcacctgtaaggttgttattggatatgtctagatagaagaggaagttgaggctgttgatccaggcaggcactgatccgcttaattgattattggataactgcagcaccttcaattttgtgagctttgatagccaaagagaaatttttccatgtaaagaagaaccacttatttctaggtactgaagattttcaaaaccatccattgtttcatctgctagcaatgtctcatggttgaagttccctccaagaagtagagtttttaagttgctaaagctcttgaggatgtaaagtgccttcgtgatattcgtaaaatcattccaaccaactgacaggcaggaaagagacctcagtctgtccattctgtgtgagaactcaccatggaatttgttccacgaaagtctcagtgcaatcaaatttgtgcaatcataaatgctttctggaattgtaccattgaagttgttcacgagaagatcaattatcattagattagataggctggaaaagttgatcttgccaaggtctccactgaggtagttgatcttgaggtcgaggattttgagatttgtgcagttgcctaaagttgatggcagctccccatacaagtagttctcacccaaatggagctccttcaatctcttgagctgacctatggacttgggtatgtttccactgaatatattctgttggagatcaaggatagacaatttgctgagctttataatgttggcatcatcaagtactccatttagatcattgtttgggaaagaaaggtgctccaatgatgaagcattgaatagttcatctgggagtggacccttgaagttgttgcggccacccttgagcactctaagcatggagcagttgcctatgtctgagggtatgctgccaccaaattgattggaagagaggtcaagtaccccgaaggatggtgagttgatgcacaaagaacttggtatctgtcctataaagctgttgttgctggcattaagagccaccagattgttcatcaccttacatgtggttgttggaaatttccctgtaaataagttgcttgagatgttcagtacctgaagaggccagatagttgattgaatgaagagctcttgcaaagctccactgaagtgattgaagctaacatcaagaacgacgatgctgctcgatgacaccaacccctccaatggaagttcaccagacagcgaattgtgtgaaagattgagctgcagcaggccggtgaggctgccaagagacggtgagatctgcccttcaagggccttagaagcgagcaaaatatcagcgatcctcatgtctgcattacaggtgatgccttcccatgtgcagcaatttgtgccgttccgccatgatgcggagaggccaccgtctcctgagaggccagcaaggaactggaggaggacactcttctcctggtctatgcaggagtcggtggaagaagctaaacacagcaccgtcagcagagcaaacccaagtaaatctgtgggtaatttgctgctgcttctgctgcatggaaactgggaaggtctcatgatggatcttttttttatcagattgagtatagtctggaactctggataaatcaatatgcagtagtgggcattataaggccagaaaaatctgaaaagagctgccgtgaagtctttgctgactgcagttactggctgagtggctggtcatcacaaagacaattcagaggtgaataagagccaccacctgcaatgcctttttgctatcaatggtccacggtcaattgttcatagattgagcagacagtaacaacatgaatcgcctgcagttctgcaaaacggtggcagagatgattactcaaatgcagcaggaaagtagggaaaatttcaatggtctagacgtgcatatcctggaacatatgaacaggatctttcaactgccatcaaggtcaaactgcacatttcgaccgtgtgagggagcctttctttcctagctgcttctggaggataagaagttgatagaagtatgaaaagtcctggtagcctcctgttgtcatctttaccggtcttcagccgtcaagactcgggaacaaatatcacctaagctcttctctcactttgcttttttccccttgtgttgattgaaggcgtaaaactgaaggtgctagcagcaaattttggtacatcgcatcttgtcagcaagcatgcagcttgaccgtttctttgcttttgctgttctacaacaaaagatacctcttgaaaggtgt

SEQ ID NO: 22863 - DNA, 2482 bp, Oryza sativa
  ref <308>: DATABASE ACCESSION NUMBER: AK073015
  ref <309>: DATABASE ENTRY DATE: 2001-12-06
gaccacgccactcccctcctaccccactctcgtctcggagaaggcaacgtcgccctcgccgccgcggcggccggatccggcggatggcgaactcgaagcggctcccgtactccacggccggcggcggcgggggaggaggaggaggaggggggaggcgcggcggcgcctccggctccggcgtggtggcgccgctggtggtcctcgtgttcctcttcgtgctcgcgccgtcgatcttcttcgtcgcgcgcaatgggggccacgtccacgtcgcctcagatcccaaggatagggaaggtaatcaggaaacagattggcaaaaaacaactggcaacaaacaacctgaaatctattttgtccaaggagatgatcgatgctttagcttctagtcaacaagaagcaggcactttgagtgttgattttttcagaaaacgtgcatctccctcttggaaaactgatgatctagtcaatgacctgagcaatgctagtttggatgttgatgacaaggttaaatctgaaaacagttctgcagaacatgagttatcactgacagataaaacacccaaggatgatactgctgaacatcaagtcgatgcacctgcaaaaaatgctcgaaggaaactaagggagaaaaggcgtgaaaagagggcaatggatttggtaaggaaagatgatgaagcacgtgttaagctggagaatgctgctattgaacgatcaaaggctgtagattctgctgtccttgggaaatacagcatttggagaaaagagaatgagaatgagaactcagattcaacagttagattgatgagagaccagattatcatggcacgtgtttattctgtgcttgctaaatcaaagaacaagaatgatctttatcaagagctgcaaaccaggatcaaggaaagccagagggctgttggagaggctactgctgattctgaccttcatcatagtgcacctgagaaagtcagagtaatgggtcaacttctatccaaggctagagaagatgtgtatgattgcaaggcggttactcagagacttagagctatgcttcagtcagcagatgaacaagtcaggagcttgaagaagcagagtacatttcttagccagttggctgcgaagacaattccaaacagcattcattgtttgtcgatgcgcttaacaatagattactatctcctcccgttggagaaaaggaagttcccgaggagcgagaacttggaaaatccagagctctaccactatgcacttttctcagacaatgtcttggcagcatctgttgttgtgaactcaaccataatgaatgctaaggagcctgagaagcatgttttccatcttgtgactgataagttgaactttggagccatgaacatgtggtttttgctgaacccacctgggaaggccaccatccatgttgagaacgtagatgaatttaagtggttgaactcatcgtactgtcctgttttacgacaacttgagtctgcagccatgaaagagtattatttcaaggctgaccgccccaccactctctctgcgggttcttcaaacctaaagtatcgtaaccccaagtacctctccatgctgaaccacttgagattttatctcccacaggtctatccaaagttggataagatacttttccttgatgatgacatagtcgtgcagaaagatttgacaggattatgggacgttgatcttaatgggaaggtcaatggtgcagtggagacctgtggggagagtttccatcgttttgacaagtaccttaacttttccaatccacatattgctcggaactttgatccaaatgcatgtggctgggcttatggaatgaacatctttgatctgaaggagtggaagaagaaagatatcactgggatctaccacaagtggcaaagcatgaatgaagaccgggttctttggaagcttgggacgcttccacctggcctcttaaccttctacaagttgacgcatccccttgacaagtcgtggcatgtccttggattaggatacaacccaagcattgatcgctcagagatagataatgctgctgttgttcattacaacggtaacatgaagccatggctggagttagcaatgaccaagtacagaccatattggacaaggtatataaagtatgatcacccttacatccgtggatgcaacttggcggagtagatatgatgtaaaaggctgacggagaagatcacccagcctgatcagaggtgcttctattaagtggagtaaatacacggccggtgtcagttgttctgaaaaaaataaaatgcgttaacggtagctttcaggcttgcctgccggcttaattttgatgaacctgtcactggaactttctctccagctgatcgatcgatcaccgcatgagttgatggatcgaatggatggttgagagataattttcggttttaattgcgtcattgctggaatctgcaactttgtctgcaaccgtgatgtggggcgtcttttttct

SEQ ID NO: 22864 - DNA, 1040 bp, Oryza sativa
  ref <308>: DATABASE ACCESSION NUMBER: AK073016
  ref <309>: DATABASE ENTRY DATE: 2001-12-06
gatataactgcatcgcatcgcatgcaggtgcacgagaacacgtacgcgctggtggtgagcacggagaacatcaccctgaacgcgtacatgggcaacaaccggccgatgctggtgaccaacaccctgttccgcgtcggcggcgcggcgatcctcctctccaaccgcgccgccgaccgccgcggccgcgccaagtaccagctgatccacacggtgcgcacccaccgcggcgcccacgaccagagcttcgggtgcgtgacccaggaggaggacgacgccggcgaggtcggcgtctccctctccaaggagctcatggtggtcgccggcgaggccctcaagaccaacatcacaaccctcggccccctcgtcctccccatctccgagcagctccgcttcctcgccaccgtcgtcctcaagcgcgtcttccgcgccgacgtcaaggcctacctcccggacttcaagctcgccctcgaccacttctgcatccacgcgggggggccgcggcgtcctcgacgagctcgagaagagcctcaagctctcgccgtgggacatggagccgtcgcggatgacgctctaccgcttcggcaacacgtccagcagctcgctgtggtacgagctcgcctactgcgaggccaaggggaggatcaagcgcggcgaccgggtgtggcagatcgccttcggctccgggttcaagtgcaacagcgccgtgtggagggcgctgcgcaccgtcgacgccgcgggcctcgacgccggcgacaacccgtggatgaaggaggtggacatgctccccgtcgacgtgcccaaggtggcgcccatcgatgagacctcctaccagatcccaaactaataaggggatatatgaggctatatagctattataatttataagtagtagacttcttgttctgtcgatcgatatgatgatctcaagaatatggagccattgctaggctgcttatgtatgatgatgatgatgataggcctttattattagggcttaatttggctattaatcaatcattgtgtttgtgtgtgtcctgatt

SEQ ID NO: 22865 - DNA, 1909 bp, Oryza sativa
  ref <308>: DATABASE ACCESSION NUMBER: AK073017
  ref <309>: DATABASE ENTRY DATE: 2001-12-06
gagcggcggctctcttggcgtgctcctgctcagctgagctcgggtgagctctttctacctccaagatttcctcctcctacctccactccactcgcctcacctcagctcacctcagcgtcgtcttcttccttccgcaacctcgcaggttgaaccggagagcgggaggagcgagtgagtggtggtggaggccatggcggaggatgaggcggccagcgccaagaagctcttctccgcctccgatgtcgtagggcacgcgtccaggaaggattgctgggtcgtcatccatggcaaggtgtatgatgtgaccaagttcttggaagaccaccctggtggagaggatgttctcctgcatgcatctggtcagatgagattcagattcctccattcctatcaactgtaatgataatgtttgatgctaaagctgtgatgctattgaaactatttacgaccttatctgctcatcaatttaattgtgatgataaatgctcggattcgttgctgtcagttaattttcttcatttttggtggtcagttcaagcctgcagtagtagaattagattggttcatgttgtttagttaagagaaaccaattgtatcatgctgctctgatctgaatagatggttgtgttcaacacctagtcaactgccattagcaatttatcataaatcagcccgtacggtatttgcttttgtaatgcagccagtgggcatcgatgctgattcatgatttgtaccaccagcttctgttaaccttgtattgtgccacgtggaagcctcataaccataggcatattcaactcctgttgttctaattgtctaagagaattaacaaaattaaaatcatgatagagccgcttgttgcttaattcttgcaaatatcttgccttctaagtcatggaataacatgcattttacatcatgaaaattctcagttattcattaccaaaccaatataatgatggcttgctactgttttcttgggagacaaaacaatgccagggcaattttagtttcaatatttctaaataccgtacggtctgattaatttatgataaatatgttgtcccagcagagaccaatgcatagaagttaatgctttttttacttttcggatgttgctttcctctggactaaatttctgagcctcactaatcacactaaatttgctattgcaaatgttccccttgtattgtactgattccattgtacttgttccgtttaattgcacatgctatgttgatatattactttaactagatgacaaaaataaaatgttaacatatggtgcggttctgaaagaaagacatttggaatagatgcaaggtttattgacaagtttctattttctgttgcctctgtatttaatcaattcttgaagcctctggggatgccacggaggcatttgaagatgtggggcacagcacatcagccatcagcatgatgaacaactacttgattggaagcatcaaggactatgtgcctcctagtgcatcagaggctacaaccattggcggcaatgatgtgccgccaaacttcagaaggatgccacagaagaaaggacctcctgctcccaacacctttctggacttcctgctccctctgtttgtgctcggccttgcctttgccgcttggtactacctgaccttcattgccaaggcctagtaaatttggtgaaggtttgaagtattgaacattttactatgccacgtctgcttcagcgacacatggagatatattctggtcagttctaagttttattatgaggtttctggctgtgaattagaaatgtcatcgtattattatttgttaccaaattgttggctttgcttcgaagttggtaccactcttacatgtaaatggcgatggctgcatcagtaaaatgtatggatggggcattttccctttcgcc

SEQ ID NO: 22866 - DNA, 1562 bp, Oryza sativa
  ref <308>: DATABASE ACCESSION NUMBER: AK073018
  ref <309>: DATABASE ENTRY DATE: 2001-12-06
gctcctcttctttccccggtcttggagggtctcatccttccttccccctccattgcatgcatgcgcgtcgcggttacaattaattaaaaccgcaagcgcatgcatcttaatcgcccccatgcatctccgcctaaattaaatcgatccatccatcgcctcgcgcaattaacgatccatcgatcgaatcgaagctcgctagatttcgagagatcaatacatacatctcatcaatttgggttgcatttgagagagaggaagaggaagaggaagagaggaggagaagagcaaggtagctagggtagcttgggcatggccggccgccggttgctggtggcaacggcggtggtggcggcggcggcggcggtggtcgcggcggcggcgctggaggcgatcaacgtgacgacggtggcgttcgaggaggggtacacgccgctgttcggcttcgacaacatcctccgctccgccgacgaccgcaccgtcagcctcctcctcgaccgctccaccggctctgggttcatgtcgtcgtccatgtaccagcacggcttcttcagcgcctccatcaagctcccctccgactacaccgccggcgtcgtcgtcgccttctacacatcgaacggcgacgtgatcgagaagcggcacgacgagctggacttcgagttcctgggcaacatccgcgggaagccatggcgggtgcagacgaacgtgtagggcaatggcagcgtgagccgggggagggaggagcgctacctgctccccttcgacccgaccacggagttccaccgctactccatcctctggacgcgcgccgccatcgtcttcttcgtcgacgacgtccccatccgcgaggtccgccgcacgccggcgatgaccggcgacttcccgtccaagcccatgtccatctacgccaccgtctgggacgcctccacctgggccacctccggcggccgctaccgcgtcaactaccggtacgggccgttcgtggcgtcgttcaccgacctcgccctcctcggctgccgcgtcggcgaccccatcggccagatgctctcctccgccgcctgcaccgccgccgaggacgcgctgctcgcctacgacctcgccgtgatgacgctggagaagcagcaggcgatgcggcggttcagggagcagaacatggtgtactcctactgctacgacacgctgcggtacccggcgccgttcctggagtgcgacgtcgtggagtccgagcgccgccggttcaagggcagcggccacctccgcctcgccttccgccgccgccgccgcacccgccccggatcccggccggcgaggcccaccagggccgccgacatgtagcgcagcacataatcatatttgtttcatcatttcatcgtcgcgccttcgagtcgtgggatgatcgaaacgggagcaaaagaaaaaaaaaataacggacacacgcaacgaccaattgggcccacgaggaaaggagaaagcggccaggcccaatttggaagttgaaggcccattccaaattgggcctgaattctagtggttgatccaaatgtcatctttaattattgaaccct

SEQ ID NO: 22867 - DNA, 2797 bp, Oryza sativa
  ref <308>: DATABASE ACCESSION NUMBER: AK073019
  ref <309>: DATABASE ENTRY DATE: 2001-12-06
ggcttcttcttcctcttcctcgataacaaacgcagccaacctccgctggagcccgcccgacctccgcctctcctaccttctccggcacaggaaccgaccgccagccgtcgaccggtcggagggctccgcctcgtccagatctggccgctgcttccctcggcggctcgtcggatcctgctgaatctcgcgtcggcgtcggcgtcagcggagggaactcaggaggggatcggtgcttcgcgtattgggggggcctcgatggtctccctccccaacgccgctccgaccgtctcctccccgcgtggcccgacgaggctcgcgggcatggccgacgaagggacgagtgctctcgccggggcatgaccgacgccggcgttggacgggaaacctccgagcttgcgaattcgatgcacaggctcggtgaagaacgggttcgacaggaactccaccggctggttgcctggttgccgtcccggcctcaaccaaaccaagcctagcctagcctagcctgacgcgagttcctctcgcattcggaagaagagggggtggggttcactggaggaagttcattggagtttattgggggtaaggagaacagccttccagcatctcgcgtttccaggatgctgtccagtgagcttccgcaggagctgcattttattaattttgtacttaaaatggggaagtatctaatgtgcaaaaggacaacaccgaaacctactcatggtaaagaaataagtgagaaagggaagtcaaatcttcaatttaaagacctcccggcagtatcttctcttccccattttgtgttcatattgaattatgtactggatttcttaacttgaaggtatgttgttctttcaattcaggatttgatatgcacaattttatcaaaattgcctcagaaagaggcaataaggactagtgttttatcaagtaagtggagatccatgtggacgcttcgctcaaaaatatctcttgatggtggagcagtgtgtggtagtcgcaggcgtggtcaaaataaatattgtcagagattcattaataatgttgaaaaagttctacagaattatcaaggaaagatggtggaagcatttggaattaagtttgaatttgacagcattctagttgataatctgaataagtgggttagttttgctgtgtcagcgaggacaaaacatctatcttttgatttagtgcctattagatttgctcgttgtgacgatcggttcatatttccatttgaacttttagacagtggaagcatttgccgtctacaacatcttcaatttagctttatctctttgcaaccaccttcctggttcggaggtttcccaaacctaaggaagcttgagcttaatttggtgcatgttacaagaaaggaacttgagaacatgttgtgcaactgttgctgtcttgagtggttgagcatggtcagatgccatctgaaggatgaccttagggtagatcgtccgatgtcccatttagcctacctgcttattagttgctgtgtcataaccaagatagagctccacgctacaaaactctctacctttatatatgagggtgaatttgttccaattgtcctcaatcatacgtcaaagctggtcaatgcacacattttcatttttgacgccatttttcaccatgttgttgcttcccttttccatggccttccaaatgtccacaagctgacattatgtattcctgatctacaactggaggttttccctttcaacaactgtgaactaaaaattcagttttcctagcactgtttggagaatgatatttgttttttttttaatctttcagaatctatggtcgttagataactcactgaagttttcctgtctcaaacacatacaattgtttgcgcacatattatctcatggttccgacaaaattctgtacttagcttatgtcatgagggctgcacccttcgttgaaaaggtggaagtgcattttgctagcggtcatagcctatggtttgcacaagaaggcccccttagacatgaacttgggcacgatgaatacaaatatctgaagaacctttgtgttacaggattcaaaggggctagaggacaacttgagtttcttttacatgttgtggaaaatgcaactgcactagacgttataactgtggatacaactgaaagaatgttggaaagtgacattaagaacgactatctctgcagtattgctcgtcagactatcgaacttcatatccgcgaggcactcccaccgaaggcgaagctctttgttctttaggctctgccaaaaagtctttaagcatgcatttagcggaatgtagtggtgtgctcccccccaccctcgatccgtatgatgtgcccggctattcaaatgcatgtctaggtgaagatgtgaggattgggacaggggatttctagatttttgtgtgtgtgtgtgtgtgtaaattctactgaaaggggataaagttcgattgttctgtcgcagtttcggtttctggatatatctgatgctgtctttgtggttataatgcctaatagcagaaaacctgtcttctgacaaacttgaaaaggttgtatatacgactgtttcagttgtacaatccagttttctatttccagttctatttgggaattctactatcatgtatgtgtactactgaattcagcaatagtaggtaaaaacaaatgaactgcagtatatgtcttggactaccttgtcagttttttcttaatcgtgtaacgttgaccaataaccatgtatgcatgtcgacatgccaataaatgttctaccagtgtagacagttcacaagatc

SEQ ID NO: 22868 - DNA, 2152 bp, Oryza sativa
  ref <308>: DATABASE ACCESSION NUMBER: AK073020
  ref <309>: DATABASE ENTRY DATE: 2001-12-06
gatggcttcccggatcaatccccttcttcctcccgaggcgagggttttggcgaggagatcgagcagaggatctctctagcctcccgctccgcccaatccaccgtagccgcggcccatttcgttgtccgtccagccgcgcgccgccgtgcctttttcttggttgctgcggttccaagaaacccccgccatggcctccgatggtagtttcttccgatacggtgagcgccagatagcagctaaacctgaagattgcccagcaatgtcatcaatgttgtcattggaggatctcccggatgcattgctcgcagagattgtaaagaggattaccaacacaagtgacctgaagtccatttcccttgtgtcaaagcgtctgtacactatcgaggcggagcaaagaagttctatccgtgttggctctgacctttgtccagcgatagataccttgtcagcactctgttcccgattccccaatttgttggaagtagagatggactactctggttggaaatttcactggaatctgctagaaaaacatattttctcattgcacttccctgtcctgcgtgatctcaccttatacattgatgatattcgtatgggttgtctagcttcttgcaaaaatttgatgtccctcaggttgaactctgtatcagcgataggctcatgtggacttctctcggtggctgttggttgcaagaatttaacttctctccacattattaagtgcaaccatattgttggcagtgataagtggctggagtacattggcagtgctgggtcactggaagaacttgtagtgaagaactgcaagagaatcagccagtatgatctcctaaaatttggccctggatggatgaagctcaagaagttcgagttcaagttcaagagaagtttcaacacatatgaacctcgtgacccctgttatgtggataactatcagtatggatatgatttctgctgtgaaagtttgagggatgtcactttggctacgattgtaactaaaccagagataggacttcgctgtctcctgacaaagtgcaaagcattagagagactctgccttcactatgtaattggcataagtgatcatgacatcattacaatctcccagaactgcagcaaccttagaagcatctcactttctcaagagatgctgctctgtgaaatacctggaggcacaggcgtaatggctaggacaccactgactgatgacagcctcaatgctctagccctgagatctcatatgcttgaagctgttgagcttatgttttatggttgtgctcctgattggccatctgagatagccttcacacaggatggccttgtgacactcctccagtcctgtccgattcgtcatctcgtgctacgtggtgctaacttctttgatgatgaagggatggaggctctctcatgtgcacaattcctggagacactggagcttatgcaatgtgttgcggtaactgatgtcgggatgcgctttcttgcacaaagcccatgtttgaagaatctcacgctgcagatgtgttacgaggttactgatgatggagtgtgtgaggtggctcatgcacgggatttggagtctctcactgttgaaagctgtaatcagatttctgtagaagctttgcatggggccgccaaatccgttcactacaaagttgattgcccaagctactacgatcgatataaagattaggtactacgtgtgatgagtgaaaactgggatcatttactgcaactgtgctgtataccatattatatgatcttgccaataacaatctcaatttggcctgtaagcagtactactgtttagctttgggagtgtctgcaactatcaactcttttgtcgacgaagcgctacagaaaggtggaagtggaactactgccaatcgtctcagactttcaacattttccttttgtgtatgccaccttcattgttatggcttacaagaaacgtttcaggatataattgtgcctacatctttaacagacgattatatgtttctatcacgttttgtttctgtgcctactctaacctctgtgaactgatcttttcgcttcctacaaaactggtccgaaaggcattggatcattgggtgtagtcaacaatgtacactgcattacctgcttatagtacaatataagatgtttattc

SEQ ID NO: 22869 - DNA, 1567 bp, Oryza sativa
  ref <308>: DATABASE ACCESSION NUMBER: AK073021
  ref <309>: DATABASE ENTRY DATE: 2001-12-06
gacgaagacttgttcttcctcccgccgcgcatttctttaatcactcgatctgagctgcatcccaaatcccccccgatttaattatttgcggggggtgatggatccccacattgtcgtcgcgtcccctcccatcgcggggatgtgatgtctatgaggaggataataagatcatggaggggcacaaaccagtgcaccaattcgttgatagccccaagccgcagcgcagcgcgaggagaatttgtggaatggcatcgaggatcgatgcgaatgaccacggcaatcagcaaggaggcaatccccaaggtccagttggtacagcagagagattagagcatcttttaaaccaaccagcaaacaaaatttgtgctgactgtggtgctccagatcccaaatgggtgtcattgacttttggtgtgtttatttgcatcaagtgctctggagctcatagaagtcttggggtgcacatatccaaggtggtctcagtaaagctagacgagtgggcagatgaacaagttgatattttagctgattcaggtggaaatgctgcagttaacatgatatacgaggcgtttatacctgaaaactacatgaagccaaggcaagattgctcatcagaggggcgcaatgactttgttaggagaaaatatgagcttcaacaatttttgtccaacacacagcttacttgctactcacaaaagagcggaaaaaatcataatcgcgtacaacatagcagttcaaataggcatggtttaggccatgctttcaggaacagttggaggagaaaagaacatgagagtaaatcagtgaagaaaacagtggagataggtatggttgaatttgttggattaattaaggtcaatgtcataagaggcacaaatctagctgttcgtgatatgatgtccagcgacccttatgttatccttaaccttggacaccagtcgatgaaaacaaaggtgattaagagcagcctgaatcctgtatggaatgaaaggattttgctatcaatacctgatcccatacctatgcttaaattgcaagtctatgacaaggacacattcactacagacgaccgaatgggggaggctgagattaacattcagccactggttgctgcagccaaggcatatgagacctcggtcgtcgctgatacggcacagctcaacagatggctagcaaaagaaggcatctggatccaaaaggacagtgctatctccatcatcgatggcaaggtgaagcaggaggtgaccgtcaggcttcagaacgtcgagcgtggccatcttgagatggagctcgagtgtgtcccgctcacgcaatagctgcgcctgcagaaatgggttgctctgacattctgaattcagaacatggttacacgaacaaattctttgcaaacacttagggctttgtgtgtaattactgtggcaaattagaactcaaccatgcgttcaaggtttccatgcatcagatgtatctgtagaagttaggaaggagtacatgatgtgaggcgatttgtctattaaagttgagatcattctggcacaaatctgcttgatttgtaagcttgtctttt

SEQ ID NO: 22870 - DNA, 1367 bp, Oryza sativa
  ref <308>: DATABASE ACCESSION NUMBER: AK073022
  ref <309>: DATABASE ENTRY DATE: 2001-12-06
ggcgccgccggccaatcgccggcaacctcagcccacatcaccggagagaccccgtcggctcgccgtcgccgctccccttgccggcctcctccttcccaccgccccgcatccatttcttcctccagcgaggtcagttcccccgcaaaaccgcccttctccctcgtctccggcgcctcccgctgccggatccgccgccgccgcctcctccccgggcctctctctgatcccgtattcaccggtgaccacctttactccaccggacagagcatgcagaggtggacagattgaagtaggaaaagaaaatgatcactcctcccgtcgccggtgacaccttcgccggagcgccgccgccgccgagtcaggaggaggatgctccgccgtacggctcggttgtcctcggcggcaccttcgaccgcctccacgacggccaccgtcgcctcctcaaggcctcggcggatttggcgagggatcggatcgtggtgggcgtctgcacaggccccatgctcgccaagaaagagtacgctgagttgatcgagcccgtcgaaaagcgcatgaaggctgtggaggattacatcaagtctgttaaaccagaactggtagtacaagtggagcctattgaggatccttatggcccatccattattgatgataagttggatgccattattgtcagtaaggagacattaaatggtggatttgccgtaaataggaaaagagaagagaaaggactacctttgctgaaggttgaggttgttgatcttctatccggaggagcagagggtgagaaattgagttcatctgctttaaggaagcttgaagcagagaaagctaatcagcaagaaggagcagcatctaaaggtgtttagctgtttagggagtaaagtgattctggttggctgtatactaaaatcgagtgaattgcattttggaccccttttcttactataatttcactttggacccctattatttccttttgcttcattttgcacccccccccctttttttttgcccttctcctcaaactcaggcacatatccactgccagtattatggcagcggctgcagaaccgcggaagtggtgtgacctaggagataatgctatttccagagctggagaagaagaaaaagggggttcaaagtgaagcaaaaggtaaagcggattcaaagtgaaactatggtaacaagagacagtccaagctgcaattcactctactaaatcctgaatgatcctccatagtctcaacaagtaatctgaaagtggtattttagttacctttttgaggaattatgtttgaaacttgtcccagcttccagggccctgtaaaagtattacttcactctgaatgatatagttgtacaaattc

SEQ ID NO: 22871 - DNA, 1205 bp, Oryza sativa
  ref <308>: DATABASE ACCESSION NUMBER: AK073023
  ref <309>: DATABASE ENTRY DATE: 2001-12-06
gagctcccgcaccgcgtcgaacacactgacaccagagaaccctagcctcgccggtcgccgccatggccgcctcgctcctccgctccggccaccgcctccgcctcctccgccacggcagcctctcctgggcctccttctccgccgccgccgcggaggagctcatcgacgtccgcaagctccccactgactacgacgcctccaccttcgaccccaccgccccgtcccgcccaccgccctccgaccgcgtctggcgcctcgtcgaggacgtctcctccctcaccctcgccgagtccgccgctctctccgccctcctcctccgccgcctcgacgtccccgctccccccatcgccatcctcaactccgccgcgggcctcggcggcggcggcggcgcgggtgccgcgggcgccgccggggagaaggccggtggggcggcggcggctgagaagacggtgttcgagctgcgcttggaggcgttcgatgcggcgagcaagatcaaggtgatcaaggagatccggtcattcaccgacctgggtctgaaggaggcgaaggagctagtggagaaggcacccgctgtgatcaagggtggtgtctcgaaggaggaggctcggacaatcatcgataagatgaaggctgttggtgccaaggtcgtcatggactgatcagcatcctcatttcaattttcaaggttctgttcacagtttttaactgtgctttctcatggtttgatggttgatgcggattggggtgccagtgttaatatcctgtcaattggcattttgaaagcccaatgatcttacaacacactggccaatccgatggtgccatcatgtgtttcttgttcggtcgatgaattttctgtcactaacaagaaacatggaataatttctgttgaaaaatgagatcaacagggtgcagagctggagtgtgaccttgagcctggagtactatcttttttggttggcttcaccggctgtatatgtatctcatttttgtaatgttactgaagctactgagctagatgcacgctgtggcgttcaagtttttatcctctgcatttgtgaaatgacctcacatgacggtatgatatgggtcatatggacatagataatccatttatgtgtttcttttttgaaactacaatatagtgaactgatgaatgttgtggactatattttcaagtatggaattcaggaacccctaaaatg

SEQ ID NO: 22872 - DNA, 2856 bp, Oryza sativa
  ref <308>: DATABASE ACCESSION NUMBER: AK073024
  ref <309>: DATABASE ENTRY DATE: 2001-12-06
gccttacctggacggggtcgacggccgatcaagaagagccgtggcctaggccaatggcccacattgcacttggtgggcgcgttggcttaccatctccccaagcgggagagtggacgtcataatttgtggtagagggggtacgcgttcgcgcggcccctgccaattctccaatttaaaatttcaacccaattttaaactttgcccataggttttgacttgggcttacctaatttggaaccttaaccgtgggatttgactaaaataataaatcgggtatttcccttctaacggtgttcccagaattgtgaatcttttctaccctagaaatgactattttaaaatgtattttataaattttatatttccaaaatctatatattttataatgtattttataaattttatatttctaaaatctaaatattttctttcttaaaatatcaaatttctttattgacgagatcttttccattttgaaatttgtgaaaggcgtagcctaggttaggtatgggaatttcaaggcgcaagttgcaaaaaatagtttagacagggatttctgaattgtgaggagcaagttgcaaaaatagcttcgtctccgaaggaggaaagggtcctccactcgatgtgcagattcctcatcagtacgcctttctctcggaggagaggggaaaggaaggcggaggcggggaggatggcgcggagcgtgtcgtacgtgtcggcggcgaagctcctggccatggcgcgcagcaacccccgcgtcgccatcatcgacgtcaggtgccgcgcgctcgcttccgctcttcgtctctctccgaccctccgccgcgctgatttggtggctgatgttgatgagatagttcgtttttttctatgtgtggtgggggattgcagggacgaggagaggagctaccaggcgcacatcggggggtcgcaccacttctccagccgcagcttcgcggcgcggctgccggagctcgcgcgtgccaccggcgacaaggacaccgtcgtcttccactgcgccctcagcaaggttggtccgatcccccatacatctcatgccaggcactttgcaaatttgcgattactgtacccgatctcctacaggatgcaggcacatggcaccaatcaccttgcaacaacgttgtttgatttactgatatttaccaggacatcgtgtggttcgtattttaggttactcgattgcgtggtttctgataggaaaaatcgaaagcttatcttagtctcctagctatattatcattgaaccttcgccatcgtgctattgttgtcactacccgatgaagtatgaatttgttagcttctttactctttagtactgatctgggtagatgtcatgagatgtgtactgctttattcattgttgaatggagcttaaagaattgagatatacaccataaaaggcatcaggctaagtgcctgttgtctgcaacttagattacctgtttggatggcatgatctgtcctagttctctggcaacgtttgtagctaaaggttggactaagatttcgggtcctgctgaatggtcttgtttcaattgaacactaggaatttaggattcttaatatccacttggtggcttgaatctaaaccaggatgctttttgagatatgatatcaggagttattcccttcacgttggagttaatttgcctgaaaaatgtcctagcaaattgtagtcctgtcgagacaaaatttccgatattggtgatacaggaacttatacgtggacctgtcattcaggtttaacattttcttgctctaagggtttccctatttccatccactgcaaatggaataacacagtaccactgcaatccatacatgcggaacatcactggttttcacctaaacttgaacagcgtctatcagtaatgacttagacttacctttctggggtcaatttctgtttgatgtgcttcacgtcctttagggatgtagaggccggattgatatccattatctaaaataaatgaaaggctacctatttctggttcaagcagatagtctttcaaactctgattttgatgctttctatagtaaagattttggaaatccccagttaatacttttgaagcattgcattatcttctaatattatcaataatagagagtgttctttgttaacttatacttgtccacatccactgagttggtaccatgttcgatttttgcatctagaacgctgtcgtcattgctgattgcgttagctcatgttttttattatattgtaacagcacatttattaatagcagatggaaagggcaagttttctaatctctttttagctcattattatataataatcaagcatatcgttgtgctctcccgcctgatattcttatttgagataacatgcaaaagtgcatatttcttacacagtgagatcaaatcacgctgcaggtgcgaggtccatcgtgtgccaagatgttctccgactatctatctgagaccaaggaagaatcaggaacaaagaacatcatggtgctggaacgtgggttcaatggatgggagctttcgggacaacccgtttgccggtgcactgatgccccttgcaaaggcacatgctcacctgaagaacctgagttgtaactctactcgcttcctgaatgatcagcaatgttggcagtcgatctccaatgctgaatttggtctattttgcctcatgagatcattcgtcacagtgtattggactgaaatgccactttgtggacaatttcatcagatatagcataagttaactaccccactgtagtgtcaggcacaccacggggtactgaattattactgattactaaaaactctttacatcttggctgaagaatgttcagcttcttc

SEQ ID NO: 22873 - DNA, 1415 bp, Oryza sativa
  ref <308>: DATABASE ACCESSION NUMBER: AK073025
  ref <309>: DATABASE ENTRY DATE: 2001-12-06
ggtttcgattcgtctcgcccaaatcttcaaatccaaatccgcagcggaggcggccggggcgcggcggccagatcctggaagagaatccattccgggaggggaatccgcgcatgccaatgtcggatcccacggcggcggtcatccccaagccggggggcatcggcgtcggcggcggaggcggcgacgacgaggagccggtggagatccgggaggtgtgggcggacaacctcgaggaggagttcgcgctgatccgcgacgtcgtcgacgagttccccttcgtcgccatggacacggagttccctggcatcgtgtgccgccccgtcggcgccttccgctccccggccgactacaactacgccacgctcaaggccaacgtcgacatgctccacctcatccagctcggcctcaccttctccagcccgcgcggcgagctccccgcgctcggcccaggccgccgccgatgcgtatggcagtttaatttccgcgagttcgacgacgcccgcgacatcttcgcctctgactccattgagctcctgcgccgtagcggcatcgacttccgccgcaactccgagcgcggcgttgacgctcgccggttcgcggagctgctcatgtcctctggcgtcgtgcttaacgattctgtatattgggtcaccttccacgcgggctacgacttcgggtacctgcttaagatcctcacatgcagcagcctaccggacacgcaagccggcttctttaagctcatgaagatatatttccccaccgtgtatgacatcaagcacctcatgaagttctgcaatagcctgcacggtgggctgaacaagctcgccgagctccttgacgtggagcgcgtcggagagtcccaccaggccggttcagatagcttggtcacttcatgcgcgttctggaagctcaaggattcgttcttcgctggctctaccgagaaatatgctggagtgctgtatgggctcaatgcggagaatgttgtcagtgcgcattgatggatggtactcctctttgaattttagctttgtgaatggattgatttaggacagaaaatgtgacaaatgatcaagatgatgttatgtaggtcaagtttgtctcactccatttgggtttaatgtgatcctagtgttcttcagttattcgcgatgaaatagtgaactgtatttatgttaagttgttctgtccgctttcattttctcctacctggtttagttagataggaaagaaaaatcacctttaaggattaggagatggtaaaatgaatatattttgttgctgttttgtcattgatatgtatagcatggaagctggttgtttccaaagagtggggtgcgggtacatcaaagtgctcaaacatgtaacttgataacattacaatacaatacacagagcgcgacctctcttcacatggg

SEQ ID NO: 22874 - DNA, 1210 bp, Oryza sativa
  ref <308>: DATABASE ACCESSION NUMBER: AK073026
  ref <309>: DATABASE ENTRY DATE: 2001-12-06
gacgaacaagcgaaagtaaacgcgacggagaagaaccttccccacgttgggttggattggtcaaggcggcaacgaaccgaaggaaggaagggaagcatctgggctacaggtccacgcgatcgattgttcgatcgatctcggattgatcgctttgtgattgtgattaatctcgcggcgacatggcgacgtcgtgggctgcgccgccgccggggtacccgtacgcgcagggtcagggcggcgcccagccgccgcacccgccgcagtccacggccgtcgccgtcactccggtcagcaacggcgtggggaacccctacgtgatcgtcaccccggccagcgcgtccccctccacctgccagtcactaaggaaggcgctggagcggtacggcaggaagctggaggacggcacccgcaaggccgccgacaccaccggcaacatctggcaccaccttcggacggcgccgaacatggcggacgcggcggtggcgaggctggcgcaggggacgaaggtgtacgcggagggcggccacgacagggtgttcacgcaggcgttcggcgtcgtgccgggggagcagctgcgcaaggcctacgcgtgctacctctccacctcctccggccccgtcatcggcacgctctacatctccacggcccgcctcgcctctgcagtgacagccccatatcctaccacgcccccgccgtcgctgtcgccggcgccgccccagctcaccctcctgaggccatctacaaggtagtgcttcccctgaaccaagtgaaatcggtgaacccatccgccagcatgacgaacaggggcgagaggtacatccagatcatgacgacggacaaccacgagttctggttcatggggttcgtctcctacgacaaggcgctcaagaatctctacgaagccctgcagcgccgtgcgtgatcgtcgcccacggccaccgcagctaagcttcactctgatcctaatatacatatctgccgatttatattccattggtgaacttgtaagcttcagatcttgctctggaataagtgtgacacatcactaaaacaaaatctgatgccgtgtgcccgcgtgtatgatctgtaattcgctcatcagtgtagaatgtgctgaattcacttgttattgtagattgtgctgaactcactatcctttttataatgtactgaattacctgaacatagataaaactgagcattaatcgct

SEQ ID NO: 22875 - DNA, 2043 bp, Oryza sativa
  ref <308>: DATABASE ACCESSION NUMBER: AK073027
  ref <309>: DATABASE ENTRY DATE: 2001-12-06
ggggctccttcctaaaattataactctgatatctatatctatcttgcctacaaattataactctcgttccccaattttgtgtgtgacgttgagaagtgccgaccggcgacgacgaaaggccggcggagagagatcccctcaccaccatggggatgctggatctgatgcgcctcatgtccatccagcgccagcgggaccaggagcgccgccgccgccaagcccaagctcccccccgtgatggattgattgctttacgggctaaaagaaagggctcaccctgccaacaagacggcgattctcagggtgctgctgacatagagataccaagccttccagaggacatctggcgtcttatacattccttgatgccaatgcgggatgctgcccgagctgcctgtgtgtctcattcctttctaagttcctggagatgccaccccaacctcaatttcagtagtgaagcattggggttgagcaaaaatgcatatggaaacgaagaattggctggacttttctacagcaaagtcaaccacattctcaaaaggcactcaggcatcggcgtgaaaaaactgacgattaaggtatattcagattatagtgggaagggctcttcatatctcaacaattggcttcagattgctgttaaaccagggattgaagaactcataattgcactgacccagttccaggcaaagtacaatttcccatgctctcttctgtcgaatgggagtggagactcaatccaatatcttcacctttctaactgttccttccacccaacagtcacacttagtggcttaagaagtctgacgagattgtatctttgtcgtgtgcgtattaccgagaacgagttaggctgccttctttcccattctcttgcattggagcagttggaaatcaggtactgcaataggatagtttgcctgaaggtaccttgcctactgcaacggctcatctccctgaaggtgtttgggtgtgacaagttgaaactgatagaaaatgaagctcctaatgtctccatgtttgcatttcaaggggacaaaacggaactgaaacttggagaaactttgcaaataaagagcctatgcatggtccgctctggttatgtttatcatgctcgtgctgaacttccatccatcatgccaaatcttgaatctcttgccctaaagtcatgcaaagagacggcctttgcaccgaagctgtgtagcaaattcctctgcctcaggcacttgagcattggccttattggatttttcccagcctatgactatttatccctggcttcttatatttatgctgcaccttctctggagacttttgacttgaatgtaatgcagcggaacgtgcagagtgtttcaatttttgcacatcctgcagatctgagatcaatacgagaagagaagcatcacaaccttaagagtgtgacggttacatcattcatctctgtaaagagcttggttgagctgacatgccatatccttgagagtacagcttcactcgagtgcttgacattggatgcttctcagactggttttaggtgtgatactccaggcagcaaaatcagcaaatgccccccactagatagggacattatcatggaaggtcacagaggggtcttggctatcagaagatacatccagcctagggtaccttccacagtgaagctgactgttttggagccctgcagctgccattccactgaactttagatgtcatgtttatcttagttattcgatgtttaatcgtgctgctgctgatgatgattctgtagattcttagatgggtcatggtttctaaagtttgctcttaatgattactactagttgatatcataaccaatgcacatgatatccactagtaactctagtttccacctagcagcagtgttgtatgcacattaaaaagttcttactagcagaagttctcgaacgtttgatttacctacttgtggccttgtgggttataaaaagctaaacattagagtttgtaacaaattttagtgtgtagcctttaatttcttttcacctatatatgcatcggtttctt

SEQ ID NO: 22876 - DNA, 2751 bp, Oryza sativa
  ref <308>: DATABASE ACCESSION NUMBER: AK073028
  ref <309>: DATABASE ENTRY DATE: 2001-12-06
ttaacacatgtttgaccattcgtcttattcaaaaaaaaattgtgaaatatgtaaaactatatgtgtacatgaaagtatattcaacaataaatcaaataatatgaaaagaataaataattacttaaattttttgaataagacgaatggtcaaacacatactaaaaagtcaacggtgtcaaacattttgaaacggagggagtactatttcttcagacctgtcatggttgctagggctgtcatctttgaggcatcttgacatgagttgggtggatcttagtgccgtcagggactgggtccataccgtcaacacgctctcttccctgaaagttcttcgcttgaggggctgtaaacttgagagtgccatctctaccatgtcacatttcaacctcacacgtcttgaggtcctcgatctttcagtcaacaaattcaatgcttcgattcagcagaaatggctttgggatcacaaaggcatcaaggagctctatctgacagaaggccattggtttgggtccattccggacgcatttggtaacatgtctgcacttcaggttatggatcttggccacaacaacctaatggggaccataccgacaaccctgcagcatctgtgtgatctgcaggttgttagcctatatgacaactatattgatggggacgcaacagaattcatggagagattaccgaggtgttcatggaataagttgcgagagatggacctgcattctacgaatttgagcggtgagctgccggtttggataggaaagttgagcagcctggatttcgttgatctctcacacaacacactgactggtgagctgcctgtgggttttggagcacttagaaacatgatttacctaaatctcggttggaataatttcaccggacagatttccgaggagcatttttcaagtttactgaacttaaaatatttgtacctctctgggaactctttcaagcagatggtcttcgaggaagattggattcctccattcagactgaaggtagcacatttgcggtcgtgtcgattaggtcccaagttcccatcatggctaaaatggcaaactgaaatcagggtgcttgatgtctcaggcacgtgcataagtgattctttgcctgtttggtttaagaccgttttttctcaagcttactcactgaacttgtcggacaatcagttatgtggtaccttacccagaactccagaggatatgttggcaatggtgatggatcttgggtccaacaatttgacaggtcaagttccacgcttccctgtaaacatcacctactttgatctctcaaataattctttgtccgggccactaccatctgatcttggagctcccaggttagaggagctgcgtctttacagcaattacatcacaggcaccatccctgcttatttctgccagttgcgtcgattggtatctttgtatctgtcaagcaatcacctgacaggagaattcccacaatgttcagataactacaaagcactaccaccggatgatctggatccgttcttctcgccttattttggcgccgcatgtctacaatagacctgagcaacaatagcctcacaggcccattcccacagtttcttgaaaataccacatatttgcgttttcttgatctctcacacaacattttttctgggaagctgccaacatggatagcaaagagaattccgtactcacggtttttgcggttacagtcgaatatgttttctggccacattccagaggaattaaccaactcttttggccttcattatttggaccttgcaaacaacaacatatcaggaataatacctcaatctctagcaggcatgaaggccatgaggcgcactactccggatgggaacaggggcgatgtctacgagggcagcatatcatcgttcaccaaaagccaagagcttcactacaccttcagcaactacaatctggtcgtcctcctcgatctgtcaggcaacagcttgacaggacagattccagaggagatatcactgctccttgggctcaagagcctgaatctctccggcaaccacttgggtggaaagattccgaacacgatcggcgatttgaaggggttggagtcactggatctctctcgcaacaggttgtccggtgaaataccgtcaagtttgtcggaattaacttccttcagctggctgaacctgtcctacaacaatttgtcggggagaataccatcagggcatcaactacagacactcaatgaccaagagtacatctacatcggcaatcctggcctttgcggccctcctctccgcaagaattgtgcaatgagaggaagacacgatgaagttgacgatgtgtcagatgatttagcagtcctgtatcttggtatgagcatagggttcgtagtgtctctctggttggtgttttgcactttgctgttcaggaaataatggagaatcgcatactttgtgctctttcataggctatgtgacaacatatttgtgcaggtggcgtgcaagctgggcaataagtcgagtgttacaggtcccaagaacaatacttaagatcaactgataggaaacttgggagtcattaatatatgatgttttggacaagtaaatgaacctaagttgtttgtcctagcaacaagtatcttttggacaagagtatgctgcaaatcggttgtcatttcctcctttttttgtgtgttttccttttggggaaacttatacacggtactgtagatgcttcagctactttatatcaagccatgtacttctgc

SEQ ID NO: 22877 - DNA, 2610 bp, Oryza sativa
  ref <308>: DATABASE ACCESSION NUMBER: AK073029
  ref <309>: DATABASE ENTRY DATE: 2001-12-06
gacggtcgcactcgcacccgcacccccacccccaccccgcgacgccgacgactcccctcccctcttccccttccccttcctcccagatcgcgcgcttgtctgtcggggagagtagaagcggggacgttggggggcgcggaggcggaggacgatggcgctgctctagggtttccaccacctctccactcgccccgccgggtgcttccgtccgttcctccgttggggctcctttgctcaggtaggtagggtttcctctcgctctcccgttggacgtgcgtgcgtgcgtgtgggtgattctccccccgattcgggcgatttttttttcttttcgttggtcaacggcccgcgtgccgttgcgagtgcggcctcgcagaatctcggccttcgtgtgtgatttagggaggggggttccaattcctagggtttcttcaatagtaatttttttgggtttggcgtgttgggttcgaatcatggtggtttagtttggtgttggggggctccaatcctagggtttgtccatcagttcatttcgtatttcagttaattgtgttgtcgaatcgtgctgtagtttgggtttgttcgaggttatctgttccgcggtagggggggttactcgcctataatcccaacttgatgtttaagcatcaggcttcatgtcaaaataaggctgctatgagttgggaatgcttgaaaaggtagcctttttttcaacaccaaaaggtagcacattacaataccattgatgcatgatcctggatgcgtgttagatcggttgctttaccgcgaacatttgtgaggtgagtatttctggtggagagctgcatcaaaatgctgcctgcccgtttctgacactccggtaggtttctgaacttccctggtctgcctgccctccttgttgtctgttgcaatgggtgaaacgagcaggatgactttggatggcggcatgcatgcatgatagagcaaacgacaactaggggtttatcttccctcttatgtattgatcaatctggttttggcataattgtctcagtactgaccttatagtggataacggtaagttgtaaatatagttgaaaccgctatacgaattcaggcaactttgacgtgaaatgtggattcaagtcaagtttgctactccctccattgaattacttgtcatcttgggccaaacacacaggctagggtgatgttcaattgtgttacttgagactgtcttacccctaattaatatactttatttctactgagctgtccacattactatgctagtccagcttgttcaatttcatcacaagtagacatggtgcgtggctgaacaggattgtgctagtggtcgtgttacagccaagccaagctctagacgaaatatgctagtggttagaaataaatgagttcattggagcaatatacctactacttttattaggggtaatttgggaacataatacctacaaaacataaaaagctattcaaaaacaaaaccaataccctaaaacatcatctaaataaggatggaggggggtacatctcatgcttggcacccaagaaacttgatactccctccgttccatattataaatcgctttgacttttttcctaatcaaacttctttacatctgaccaagtttataggaaaatgtagcagcatctacaacaccaaattagtttattaaatgtaacattgaatatattttgataatatgtttgcttttgtgttggaaatgttgctatatttttctacaaacttggtcaaactttaaaaaagtttgacaaaggaaaaagtcaaagcgacttataatatgaaatggaaggagtatttaatactccctccatctacttttgatagtcatatttcatcttggcacacagaccaaggataagtaattctacttatcatctatttaaacatgctactagtcattcctcgtaaacaagcgattcattaatatttacattttttgatacccatgcagcccaatcttgtgtggaagaatggagagtcatgcattaaatccgagaaagttattaagatgataggttgttggataaattttcagatttggaaatatgactatcaaaagtagatggagggagtaattttgtgggagaaatagttttttttttagtctgactatatgatttggatgtacatcactgccaattaataagatggtaccatatgcatatgttctatctggtaccagtgaaacttttttaatgcttgaggaaatgtttcatctcaacatgggggaaggtccgatcttttgagttgcatgcactagctagttgaactaaaagcttaatctgatggagtagggcaccaggcaatttactctttacttcaacactccccctcatgtctagattcgaaatcaagacctttggccttgataccatgctatgaattgcgcttgtattcattacagcccaatggtgcagtatatataaatatggtgtatacacaataaaacccctaatcccccaatacaaagaggaaaacacaagtactaattatgttaaatacaatccaggtgccatagacaatggggaatgacagtccaatttagctcttgggtaggtgtatgctatttttgatttatgttgtttgtg

SEQ ID NO: 22878 - DNA, 754 bp, Oryza sativa
  ref <308>: DATABASE ACCESSION NUMBER: AK073030
  ref <309>: DATABASE ENTRY DATE: 2001-12-06
ttgggtactctgtctgttctgccgcacgagacacgagagccacggatagctagacacagacggcgcgcggagacaggggcaatggacgggcatgggaaggagggcagcagcaacggcgccagcggcggcggcggcggcggctggagcgatcagtgcgacgtggtggccagggccttcgtggagtactactaccagacgttcgacaccaaccgcgccgcgctcgccgcgctctacggccagacgtccatgctctccttcgagggacacatggtggccggcgccgaggagatcggccggaagctgttggggctgcccttcgagcaatgccggcacgccgtctgcaccgtcgactgccaacccacgccgtccttcccgggaggcatcctcgtcttcgtcagtggcaacctccagctcgccggcgaggagcaccagctcaggttcagccagatgtttcagctggtgcccaacgagcagggaagcttcttcgtgcagaatgacatattccggctcaactacggctagcagcaggttgcgtgtggctgccgaaaggaacagggtgctaggatgctttgggcccatgtggatgcgagattgcgagaagcttctccgggccgtctctaccgtttcgctttcatcctctgtacttttaccttcgttcatgtagcatcgtagaataagttgggcgatgaccgtgttgtgttgtgccttctcctgattgttaagtaattccgtggaacgattgaaatctccatgc

SEQ ID NO: 22879 - DNA, 2051 bp, Oryza sativa
  ref <308>: DATABASE ACCESSION NUMBER: AK073031
  ref <309>: DATABASE ENTRY DATE: 2001-12-06
ctgttgactccaccgctgagacttccatctgccatgacagggagattttaaccctggtgggatcaccttggagattgaaaaagaaatgcagaatattgtgcttgagaacaaaagagaaaatgtctttaaataagctgtctgttagtaaatctatgacagtgcattgtatctactacctccatcccaaaatatttgggatttatatgggcaaaatcccttatattttgggacggatgtattatcattttatttctaaaagatatagtcatgtacttggaagaattcttgaccacgagatggaaaacctgtatgcatccattcccatctccttcataatgcgcacatcttcctgcaattttttttggtgatcaggccctcaggcctcaggatgagtactaaattagtcattttaaagaagagaattaaagttttaagagattgtggcagaggaagactggcaaacatggagtgtatatttaattaaaacccttactccctccattcctaaatgatcttcgcattaccaaaagtaaaaagtttcaatttgaccttcgtatttcattaggaagcagcagaaatcatgggtagacgataatggtgcttcgtattaagcagcactacatgcatgcattggctctgtgagagttaagttgggagctgctgcatgcgtggaattaatgcattatagctgattggctggtgcatgcggcatgcaaaattgatgaagcgacatgcacggatagatgggatagtaactgctccttggtcttgctgcttaggtgaaatatgaagatcatttaggaatggagggagtactaaagtcaatgctagttgccaataccttgtagagatggtagctattgcaagcaccatccccgttgctcttgtcggtgattttgtctgccaaattagagaattgtcaatccaaaataatgtaatgaccttttatttctggccatttatagtcagcatgcctggatactgatgtgtgaaggtgtcccagatgcttggtcctctgccacccttcgccgcggcaccctcaaactgcatcatgtgtgaaacagcagtcaatttgtcaggtttcagatctgaaacagagcacatcgtgatgagatgagaaggaatcaggaaacagttaaattgactactgaatacagtattggatcatggaatttctctctacatgcaaatatgagcattattcttattctttagagaaatttcagcatttttcagtgccatcattttctggttacctacatcaatgaggtactctagttgcacaatttatcttaacctgttcctttttcatgtgtttcatttgtacattctgttcgtacttttgtttccccttcgaaaagaacagtctgttccgactgttgtccttgcagaatttactttcggtggcagttttatgaaattcttctcgatttcttgtaggaaggatgaggttggatgcctgacctgatatgacgacgaggacgtcccaaagatgaaccccttggggaagcttctccggctgatcggcggcagctcgccggcgtcattgtaggcggcgcaggtgaaagccaagaggagaaggagcacgccacctgacatcaccattgcacctgcaaccgccatgacctacatagacagaaaagagtgatgggctgatgaacacaaacggtgcccaacatatagcctctcgtacatagggacttgcttaataccatatcaggatatgtgtttggacttgtggacaaggtggggataatggtttttcagagtggtgaccaccctgacaaaacactatcaacacacccatcagtagtcagtgggagtacactgtttccatcccataataagtttatttttgatttctctcatttatctcaaaataaattcattttgagtaattattgtaacagagtttgtgaaaggaggaaataattgcattaggagtaataaagtaggaaataattgtattaagattagataaaataggggtattctagtttcttttgtttgtattggtatgagtagtttgggtgaaaaatggacctatttcg

SEQ ID NO: 22880 - DNA, 1512 bp, Oryza sativa
  ref <308>: DATABASE ACCESSION NUMBER: AK073032
  ref <309>: DATABASE ENTRY DATE: 2001-12-06
gatactcctcctgctccagtgtcaacacgacagtcaaacaaacaccaagcctctcattcccacctctcgaggagagctttccccaccatggcgtcgctcaccgccgccctggccacgccggcggccgctgccctcctcctcctcgtcctcctcgccgcccccgcctccgccgccaacttcacctgcgcggtggcttcaggcaccacctgcaagtccgccatcctctacacctcccccaacgccaccacctacggcaacctcgtcgcccgcttcaacaccaccaccctccccgacctcctcggcgccaacggcctccccgacggcacgctttcctccgcccccgtcgccgccaattccaccgtcaaaatccccttccgctgccgctgcaacggcgacgtcggccagtcggaccgcctccccatctacgtcgtgcagccgcaggacgggctcgacgccatcgcgcgcaacgtgttcaacgccttcgtcacctaccaggagatcgccgccgcgaacaacatccccgaccccaacaagataaatgtcagccagacgctgtggattccgctgccctgcagctgcgacaaggaggaaggctctaacgtgatgcacctcgcctacagcgtcggcaaaggggagaacacgtcggcgatcgctgccaagtacggggtgacggagtccacgcttctcaccagaaataagatcgacgaccccacgaaattgcagatgggacagattctagatgtcccgctccctgtgtgccgttcatcaatcagcgatacctcagctgatcacaatctgatgctcctcccggatggcacctatggattcaccgcaggaaactgcatccgctgcagctgcagttcaactacctaccagctaaactgcactgcagtacagaacaagggatgcccgtcagtgccactgtgcaatggaacgctgaagcttggtgagacgaacggcaccggttgcggatcaacaacgtgcgcctacagtggttactccaacagttcatcgctcatcatacaaaccagccttgcaactaatcagacaacagcctgccagagaggaggatctgggaggtcgcagttcgctaggtccatgtggagcatgtctgttatctccttccacatggtgttgatcattatctgtttcctttgatgttggagactactgcaactctagatggtacatttcaaagagttctctacgatctatgattgttgtatacgatatatgattgttgtcgtaacttagattttgatgactggtttatccagctttgaaatttgagttttgactctgttctttagaggatgagtggcacttgtacggctgcttgaataaaacgtcgatgtattgtattcgatctgcatctgaaaaggaatattcattagataggattattcgaaataaaaagatcccacatgtttttgttataggcgttacatgttctggatggatatataatgtaccatgcggaagtatgaatggacttcccaccttccaatcttc

SEQ ID NO: 22881 - DNA, 1572 bp, Oryza sativa
  ref <308>: DATABASE ACCESSION NUMBER: AK073033
  ref <309>: DATABASE ENTRY DATE: 2001-12-06
ttggagccaaaccctaaaaaactaaaattccccaaactctgtcgccgtcgccatggaccgcgatgcgggcggcggcggcgaccctgctaccggaggaccagctgaattccctggcgaggccaagataaccctgcgacctgatttcctccacttacaagcggcccccttacaagcagctgccagaaaatctaaaagatatgctattcagcaaagtattctctacaaagagcacaaaaggcaatctagacatcaactaagaggagcacagccatcaacctcccaaaaacctaggcatgcagaagctggaagtaagactcatgttcgtcaaagtgttctctattcagagcgtaaaaggcaacctagacatgaacgaggaggaacacaaccaccaaccttactgactgcgagtgagcatgattctacaactgtggagccatcaagacttaaggaagcttcaccatcactgtcagatgaactacgtgaacttgaggaataccgcaagacgcatacctttagcagctttgaagatgcgattcattatgttctttctgttcatcctcgtactttgtctgggcttccagtaactgaggatgaccaccatgatggtgaagcttttgagcttacaacaccagctcaatcagtcccagtacaagtaccaacttctgaagcttccgtggacgtagttcagaacggaaataaatggatgggcgaggaagttatgacggcattcgagaaatatgtagaggaaagggattatcttaagggcattgagtacaaattggatgaactttgtcatcaatgcctcaatgtgaaaaactacaatcatatctttcaccacttcaacttcagtgtgaagactaagaccccaggttctactgattggacatcggagttatattttgctgaggttaaaacaatgttcagacagaaagtttatttctgctggcccttggagccgaatgaaaacggtatgaaaattttcagttatgttacatattgatcactgacaacttgatgaaagcttttgcactggttttataaatattctgttttttcttgtaaggtcattgcaatgcatgcaagaatcaagggatggatgacctgaaacatcctgtgataggtgcatttgatagaggtgacaacgatacaatgtttccctatatgtacatcggtgatgatacagcatgtccttatttctggttgagtgagtctgatgatgagtttccaaatagagttttggatgattcagatgacgatgatataatttagtgattattagttttgatgaaattaatgggtcataaaacttgtaacttgtgactctatgttatggttgtgaacagggttagattctagtgctcttaaagtattattttataatgcattatgtaacactggattgaatttttagtatctttatgtttctctctgttattgatcgacacaaagcttcatgtttattgtggttgtgggttgtcatatttatgtaatgtttctcgatcggtttgatctgtatcaaaatttacacggttacttcctatatgttcggaattaatgttaatttgtttacct

SEQ ID NO: 22882 - DNA, 2609 bp, Oryza sativa
  ref <308>: DATABASE ACCESSION NUMBER: AK073034
  ref <309>: DATABASE ENTRY DATE: 2001-12-06
tggagacgactcgtcggcggcggagctccggccaacccacggcggcgggccgggacaaggtagcggagatgatgcaccgaagtttacccggcggcggcggcggcagcacatcagctggtgaagggggaggaggaattgaaggatggggattcgaagaaagtacggcgcggctgctgccctaggcgaaggcgttgggctctccgtggcaagaacgccgccggtcgcgaccaccatctggcggtatcccgggcggcagcagagtaccagactgcaatcctggctgctgaggtaacattttgtggttttaacaagggaaaattcgagttgagaagcacgatatttttcgtactgaattttctgtgcatctgtggcttaagattttacagcgacgagaaattatccgtgaattagatttgagatgacagatgatagaccacatgcctgagcattatccaacatttcatatggatagtcacaaggggtgaagcacaattgtgttattggcatcaatagttgatgaaaaacgattatgtgattagatcagttatggtcatacagcataagatgctcaatgcttagggagtgccatttgatttcttagtcaattgctgaatatactggcagcaaatggaagacaacgaatgttcaagcaccgagtcgaaaaattctttggattttgaactaacttagatttgtatatgcagggcacagatgcaacttgtgaagatatatttgtttatctttcaggttctatttctcaggttttatctgataatgttcacaagtagaatgaaattattatctttcatctagaactgttatatactgcatcgttgattacatgcaaaataaatcttagagaaaaaaggaaaataggcggagaacaacagtgtccccaagacccaaacatcccacaggacctggaaacatacaattggcgtaccatgtaactgatgctattctgttcttccttcaaatagcttcatcaattgtgccttcagcagctcaggggtataccactcatgctttctcttagccttcatatacttgtcaaggtgtgcttggtaagccaagattaccttgtcacagacagctcgccgcactttctcccgaagctgaggatcttccaccttccagcactcttggttataataagttgaatcgaactggaggctaaaccttacggtactggaaggctgactgaagcagccaccaagcatgcctgtcctggcactgaggcatgatattgcaggcccccatgacaagtccacataagtcttcaaatactgctcgatgaattctctgtgcacttgaacccatgactgccctaggagtgagatcagctctgaaccctccacttgcttgacaacaaaatgcaggttgttcataagaaagaagcattgtaaaccttgagattcataggcctcaggtgccttgttgagcatggattccaagcagataatcagatcttgcacaatatgatccagggagtccatccgctcattgtccttgttgcgatcatcgtttccgaggatgagaccaagtgtggtcttatgatgcaacaacaacctgatgtaattcatgacatagcgagtcacttcatggattcccccacctggtggtacacgcctagaagcacgggtttggatcaaaattttaagctcacgaagcatgtggtacacggccatccttagcttctgcagcgtgtcatcatactttgccacgctgaactcttctggacgacattgcgatacaaggaagaagtctgggttgagtacccttgagcagcctcagcaccacgaagagcttgtcaggggacaattgtagcttggtgatctcatctgcaaaggcgagaagtcgaagcttgtatgaccatacgagtgcatgctgccttcctgccttgctgtggatctccttcaccatcgcatcaatctctctctgcgccatgtgccactgtgacgctgcagccatgtggtgacctcctctgatgttgatgatcatttcggtgatgtttttgcaggtgttgggatcaatttcttcagagccgacattgctggagccagaggcagatgtcgatgactccacggcactggtggggaacatgaacgactcaccgctagagattggggaggctgccatggtctgaatttctggagctactaacactatttcgtatctgcagtttctgttcatgtgatttgcacattgttgtacggagatcaaaggcctattcagtggttatagagttgacactacattatggtaatgactccgcgtggaagaaaagtcagagttatttagttgatgaagggagtgttctccgtgtggaaactaagacagcttactgagaccacaaattggaacagattatacaacaccatattgtggtctccctgctagctggcccaaaattgtgtttgacaaaatgacataactgaaagcgaaagcccttgtcagaacgcgtgagtcgttttgctatctatctgtctttgctgtatttttccacgaattgttgtatctttgattgtttggaggataagacattgcaactacaggtaaacaccctttcttccctgaatctaccagtttatttcttgagcgtgtttgac

SEQ ID NO: 22883 - DNA, 2246 bp, Oryza sativa
  ref <308>: DATABASE ACCESSION NUMBER: AK073035
  ref <309>: DATABASE ENTRY DATE: 2001-12-06
tagcggctcatagtcatcttctccaaccgccgtcggccgccttcccccgtgccggcaaccgccgccggctctgaaacggcaagaactcaccgtcgatcggacgaaattttccgatgagcgggaggccccgcgcaggacatgtgttcgacgaaatgcctccgaagaaagccaagctgtccgccggcgccggcgccggcgaccgcctcagcgccctcccggacgcgctgctgcaccacgtcatgtcgttcctgcgggcgtaggaggtggcgcgcacctgcgtgctcgcccgccgctggcgccacctctgggcctccgcgccctgcgtcgacctccgcgtctggcgcggcggaggccacctcccacacccggaggagttcgccaagttcgcctaccgcttcttgctcgagcgggacgtgtccgcgccggtggacactctccgggtgctgtccagccccgtgtgcgaccccgaggtggaggattactccacttgcgatgtcgatgcgtggatccgtgctgccatcgagcggagagcccaggtgatccatatttctcaccatccgaaggacgaggcatttagtaacttcgaccatgtccccatcatctcctgccacctcaaacacctgaagctgtctggctacttgtttcgacaaaggacactaatgcagctctcttctcagtgcccttcattggaagttctagagctcaaaggctgctatctggatggccatcagatatcatctgcctctctcaagatcttgaccattgtcgagtgcaggatcatggagggcttcaccatcgctgctccgaacctcgtatcgctgtgctgcgtcacgccataccaccgtgctcccttgtttgagaatgtggggtcactcacactggatgcagccactatcgtgcttgatgattcgtttctatatgctggttatgaatacgagtatgaagacatcgatgaggatgcgatcgaaggaaacggtagcgaagacggtgaaggttccttgaatgattctgactacgacagtgatgctgtcagtgatgcaagtacctgtgaatacagtgagattgcaaacaactatgatgatgaaaaacagcttgtagagcatgatgaggtacataatcgaagcaaaggcaactatcatggctatgatcacaggtataaagccagaccatataggggctatcgcaagaagaaattcaatggtggtaaagttctaggtggtgataatgttcttcacagcctatcgaatgctagaagtttggagctattagctgatgctggagaggtgattctgaatagggagctgaaaacatgcccaacttttagtaacctgaagacattgtcccttggtgaatggtgtatgggtgctgacttcggtcaattaatttccttcctgcagcattcaccaaatctggagaagcttttccttgaacttaaattggattatgacaacacacaggcaatgaaagaaggtaccaaaccaaagggatgctcatttgcttgcacacaccttaaaatggtaaagatcaaatgctctattgatgatgtgagagtccattggttggcacagttgttcaggactaacggcgtacccattgagaatatctttgtgcgtcagactagcagcacttgtgagtgatacttctcttgtaactctcatctctgatgaagttgcagtaccgtcatacattattactgtttttgttagatggaaagcatttggttcacttgatgttctttgtggtgcatgatcgaaaaccataaactaatatgttttgttttctgacatatcctccaggccttcccgccagaccatggtaatgtgaagctagagggtgggaccaataatatcttatgatcttgttcaatatgataatttcgctttatcacattgtatttagcagggttctgaagggtaagcatctgcactgatcatgctgggattacagaatatgtgatgcttcttttgagtgcattggaactatgtatatatggctaccttaacgcgaaaatgatcttatctagtggaatgattttagctatgttatctctagcttgaggtcggcttcttcctgaaacgatttgacgagttctttttgcttaatgctataactgaaagtgtaatatgttcaatcttctatgtgtggtaaaaacgctgtggttgctggattcgatacttgtgacataaaaactttgtacagcgacgagccattaccaatgcgcatatgaaagacatgtccagtcttgc

SEQ ID NO: 22884 - DNA, 2659 bp, Oryza sativa
  ref <308>: DATABASE ACCESSION NUMBER: AK073036
  ref <309>: DATABASE ENTRY DATE: 2001-12-06
gactggctcactgcctcccctcgtccgtccccagttcgtcacccttcatctccacagcgccagacaatggcgccaagacagcggctgtcattccgccgcctcgtcctcctcctcgtcgcctccaccgccctcgcgtgctcggtgctcgcgggcggcgccgtggcgagcgtggtcgagacgctcggcgtccggcgtcacttcggcagcccgaagcgcaacaccacggggcagcacggggccggccggcgccgcggcggcggctccgcccggagcggtctggcgtcgtgcaacatgttccagggaagctgggtgtacgacgactcgctgccgatgtacgacacggcgggctgccccttcgtggaggcggagttcgactgccagaagtacggccgccccgacaagctctacctcaagtaccggtggcgtcccagctcgtgcgagctcccgaggttcaacgggctggatttcctcagcaaatggagggggaagaagatactgttcgtgggggattccatcagcctgaaccagtgggagtcgctggcgtgcatgctgcacgcggccgcgccgtcctccaggaccacctacagcaggggcaccccgttctccaccgtcacgttccaggactacggggtgtcggtggcgtactaccggagcacctacctggtggacatcgtcgacgagtccatcggccgcgtgctgaagctcgactccatctccggcgacgcgtggctcggcgccgacatgctcatcttcaacacctggcactggtggacccacaccggcagagaccagccatgggactttgtgcaagatggaggccaggtgatgaaggacatggaccggctctcggccttctccaaggggatgtctacatgggccagatgggtcgattcgaacgtggacacatccaagaccagggtctacttccagggcatctctccaacccactacaacggagcggactggggggaggggtcgaggagctgcgcgcagcagacgcagccggtggcggggtcggcgtacccggcggggccggtgccggcgcagagcgcggtgaggagcgcgatcgccggcatgtcgaagccggtgttcctgctcgacatcacgctgctgtcgcagctgaggagggacgggcacccgtcggggtacagcggcggccacccgggcaacgactgcagccactggtgcctcgccggcgtgccggacgcatggaaccagatcctgtacgcctcgctccttgcatagagggaaagaattggaaggggatatatctctcaatccgattggccgttctctcataatttgttggttgattgtatggagagtatttcaattggtggttccataattggttaactgatatatatggatagtccatcagaggatactacattttccttcttgttggagaagttggggataatgccagggtagacagcgaggatcaactggatacaactccttcaaaagacaacagatggttgttcggatgtggatggaaaattggaaacaactagtagtgtagtactatttctaatccaatacgcttaataaagatataccaagcaggcaagcacaacgttgatctcaaccgttggcagtaatcctttacatatggtagtaccagaatttccagacaacagatttatctaccaccacacacatacatttcgctgcaaaattatgtaaagctaatcacaacccagccaagctgacgagatactggttaggaatagggccctagagagagaacatggaggggacaaaaatgaaagacggctacagtgacaacgagaacatagattgttcactggtgtgataaatctagtgagaacatttctcaacagaaacaagcaagaaagcaaacgaactatggtaacgacgaaatgatatgatacatcgggatagtaaaatggtgctcaggccctggcaacgagtttttgctgcctccttagatgacggttctgctcttgtcgttgtatccggcacatagatgccttctccttgagctcttggaatgcccgcatggtgtccacgtcgaacccgcctgcaaactgcagcaaacgaggagtatggatgtgattcgtttcaaagttgcaccttggaagaaaatgtaagcatgaattcttttcagaaattattcatgcgcatcttaacatcttagcgagtaaatatatacctggtgtaccctgaaggcgaatcgcactccttgaagcattagttcttcttcgtcaggaccaccctttatggcctcaagttcagaagagacccgcttcaagtacttcattgctaacttcaccgactggagtttgatctgtacaccaaaggttacattcatgagtaatcatcaaacgtacacgtttattcatgcattttatcgataaaagaaatcacagatatgcccaaattacttgcccatgaatcaaatggacatcattcagagaaagagaggactgctttcatttgttagcctcaaaagttaggatatgaagcggccaaacgacaggacagaccaatcaactcagtgattgcagattgatgagggcatgtgtttatgtttctaattttcctaccaatttgtaaactgtaaatgttttttcgcgaatgcaataaactgtaaatgtaaagacttcatgtgcaatttacaaactgataggcc

SEQ ID NO: 22885 - DNA, 1342 bp, Oryza sativa
  ref <308>: DATABASE ACCESSION NUMBER: AK073037
  ref <309>: DATABASE ENTRY DATE: 2001-12-06
gattcgcagccatggatttgcgcgacgccgccgacgccgcgcagtcggctgctcgcctcttcgggtcttccatcgcggcgccaccggcggcgagccagcatcccccccgcgcgcgcgcgcgcgccatgggggtaccgccgctccatgcccctccccggcgcttccttccgcgcgcgtggctcgccataggactaggagagaaacaatggtggaagtactacacttcgagattttacacgaggggtaatgtcatcatctcagtcaaaaattaggtcgcctgtggcgtaggtgttgtagaagacggtggcgctgaagtaaagcaccgccgtgagggtgaggaaggcctggaaggatcctagccactgcacgaagtagcctgttcctatggtgctaactatggcggccactgtcccgatgccgttcgtcagtcctgttcaagcagaagaagatatgtcagatttcaggatccaaggagtgcgttcatttggtgtgggtcttgtgtacagctgatcgagtttgtggactcaccgtgcagagatccagcgtatttgggagcaatgtcctgctcgaacaatcaagaagaacacattccgtcagatagggtacaattgcaattgaggtggtgaacaagaagaaaaaaaaaggttgttcgagttaaggcggaatctggtatgagcagggtaatgcaggaaacactacctgtacattacagaagtatccagcttgactgaaggaactcaagctcagggcgatggtcatgaggactgctgcaactgatggcgtctgggcaaatcttaagcaaagcagtgaaacgcctggcccgataaaaccgatggactgtaccaagcatgaatagagaacaaaattgtgagaaaccagatttgatcaggaaatctgcagaagctcctgcgacgtaaccagacagagccatgactgcccaagttgttgaccacattagctacaatgatggcccacatttcgatcttcgacagaatttctcgtaaggatgggaatttgctaccctgaatttttgatgcacttcttccggctaggattaattgcagctcagatttgcttattgtacgactgtcaagagggtcaccttcaacattgaacaaccatacagaaagccacaagtaaccaagtgatgcaaagaaggcaaatgtcccggcgaggcctatatgtgacatgatgatcggtgttgctaagaaacttatgacatttccaagatggaatcctcccatagaaatgccaacagcagtagcacgttcatgtgttgggaaccacctgttttgtgttcaaagtgagattgaaagcccgaaatgagattgtgtttgattgc

SEQ ID NO: 22886 - DNA, 3096 bp, Oryza sativa
  ref <308>: DATABASE ACCESSION NUMBER: AK073038
  ref <309>: DATABASE ENTRY DATE: 2001-12-06
ttggagagagagaagggaacaaaccacctctccactccgctgcttctccccacaccgcgcgccggcgatgccatacccgcgcccgcttcctccgccgctgcactccgcgcccgcgcagcgcgccgtcctctcaacgccgtgcgccagcgctgtcctccccgcgcccgctccgccgctgcccttccagcaccaccccgctggctctccctcgccgcctcgcgccgttgccggatccccgctgtcagggtgccgtcgatacatcgtcgtctagtctccgtcaagccgcttcgcccttgtgtctgcaccgcacctcgccgtcgatcccacgcagtccggccaccgtcgatccctcgccgtctggtttccgtcgacccgcatcagcctagcgccggcaccggatctcctgctgtccggccgcgccgccaccgcgactcctcgctgcccccttcgcaaactcatctggatcacgtctccctcgctgctcctgtctaagacaaaggtgaatttatattgagttccagccggacaactgtgggcgaagaggtaaaaagttaatggctcacgaaggccagcggagactggagtttaacgatgaagcagcgtacaaaggttttcccatggtgcttggccacattgccgacggtcaatgcctgatgccatgccgctccactgatgaggccgagaagatcaggtcgccttcaccacaacgaatccggacacttccgccttccgccatcacgcacggtctgatgagcatcatcgcacgcctgtgcctcatggcctttccattgccaaccatcaaggttgcctaaatttactagcaggtggagaagccatccatgtgctcaataggtctcaagataggtgggtagcaagtttggtttaggctgttcaccataaaagagcaatggaccaatatctcaaataatatctgaatcgagtctgaattcataaggtatatactattttcatccttctgattaactttggatgatcttgtggcctgattcactacataatatctggagtgttgatgctaactcatatagtgctttgctctcactatttcaatactacattattactcaaaataatttcagtagtacatatactattactcactataaggctacactgaaactttgcaaaacaacatctgatgggcctgcaacgtgctgctgcttaggtaagaagtttcagcttcaactttggcattgtgcactgtaggtttcaggttcaaatatctgaccacagtactatccttgacaaattcagttgcagaatggcatctagctcccaaatggtcatcgtgaagcttgtgtcatatatgttttcttggctgccgcaatctaaatttaggaggctatttctaacacaatgcccttagatatttgagtgggaatttgttttttggttcaatcagaggatggaggataatatgatatacccaatcaaggaccaagaaaccatgctgtgagttggccaatctctgttctcctgcaattacattttcctttttgcagtagatcttgcttccaattgattttgtagggcagtaccaatggacatgaacaggcagcaggatactgtttgctccaaggtaattttgcagcaccaaaacagtactatattggctagcaacatataattgtctcggattacatctatgttattaattatatattgcttctcaaaacaaataatgctaccgctcgctaattgttcccatttagcaacaaccctgttatctagatttactacttatatattgcgtaaatagatacctgaatagggagatgaatatgtttgtgctgaacttcaaacataaaaagcttaattcgaaccgattctattgttcattctcttttcaattagccctatttcttcaagtatatgaatggtggatggatgtaattcatgcatggaatgctttattggtgcatgaactggccttaaattgcagtcaaactccattagcgagcggatttggagagccagatatttttctgaatacttttgtgtgcagatttggagagccactgaataattgattaatgtatttttgctttttgtgatggatcaatgtcgcccaacgaaggtaaccggctgacacaaaattattttgtagtaaatacaaagttatcccacacaatcatatgtctttttttaagcaaatattctatgtatcggcagcaaactatctttttgtccattaattgtcttgttgtcttgttgaggatcttggctgcaactactgatgttcagagcatcacagaagatcaaacagtttttaagaacaaaattagagaaaaatagtgctacagtgcgactgtctgttggctgtttcccctgtatttagtttgtttttgtcagtactgattttagacatgttcctaaaatgtaaggggtgatgtttttacaaaatgtcagcactaattttttacacaatcatattcttggttcccttaactaactgaactattgtttacccaagttttatgcatctccactattgtttgctgtattaaattaatctccagagtttctaccgattattacatgtccatcatgcagaagatatcctcttggagcatatttcagtaattcaatacctaatattattttgctgcaaaggaaaaacatggaggattcatatttcggaataatgtttaacataattgtacccaattgatcgagtttttgatgtacggtcattttgtttcatttttcagttctgtgacaggctatgttgggttttgttttgaaactctatatacagtcactcgctttaactaaacagagatagatgcctaaatcgattcagagtttctggagttgttaaggggtacatccggcagaagaaatttgaggtcaagattgccttaggatgtagggcaatcaatcttgaaccgagcggcactgacactacctcatctcctgagagggactgatttcgaagtgaatatgaaatcgatgatgacaaataaatattacattttttttgcatttggttgttatgtaataaataaacaagtaaggtttatttcatgaattgccaatgtattgcttacaataatgttatttttacttggttcc

SEQ ID NO: 22887 - DNA, 2298 bp, Oryza sativa
  ref <308>: DATABASE ACCESSION NUMBER: AK073039
  ref <309>: DATABASE ENTRY DATE: 2001-12-06
gagggatctctcaatttctttggacttcctcacttctagcgtgcaaatttaataactcctcggctccacttctttcccccgttttctttcttgttttcaggcaccaaatctctgctgtttatatactcgagtggtgtttttggatgcaattaggcagcattctgcggcaaatttagcatatagttttttttttttctgttctgtttttggcgattgttttctatctgtgtggagtagtaagcatgtgaaaggagctgagaggttgaagcagcagttggatttgatgttcttgccaagaccccgacattttctcttgattctttaagactttttggggatcgattcgattactgatgcacctacctcgcagctccgagctttggattcaagaaacccaaatctggtgctggaatccgagctccagattcaagccggagcaattcgggtaaaaccaggcgagagatctttgcgcaagaagatgtcgccggccaccgccgccgccgacgacctccgcgccgaggaggaggggaagggggggaggagcagcagcaggcaagaggaggccaatgtcctcctcgccgtcgatgcggcggagggcggcggcgcgtggtcgccggtggggtggttcaggatgctggggagggagctgcactggagcttcgtggcgggcgtggtggcgacgtacggcgccagccaggggctcggcggcggcgtcatgcgggtggcgtcggactactactggaaggacgtgcagcgggtgcagccgtcggcggcgcaggtgtaccagggggtgacctccatcccgtggatggtcaagccgctctggggcctcctcaccgacgtcctccccatcgccggctaccgccgccgcccttacttcgtcatcgcaggcttcatgggagtagtcgcgatgcttgtattatctctccacagcaagcttcatgtattgttcgcgttgttggcattgatggccggaagtgctagtgtggcaatagccgatgtaactatagatgcctgtgttgctgaaaacagtatagtgcaccctcatcttgctgctgacatgataagcttaaacggattctgtgcatctgtgggagggcttattggattctcaataagtggtttccttgtccatgcaataggctctcaaggtgcccttggcatgttggcaataccttctgccctggtaatcctagctggaatgatgataaaggacgtccatatgcccaactttccatatgagctggcccatatgaagtttgtagaagcaagtagaacaatgatggcaaccttaaaatgtcctgaagtatggcgaccatgtgtttacatgtacatgtctcttgctttgagcgtggacatacaagaaggaatgttctattggtacacagatagaaatgcagggctatctttttcagagggattaattgggtttatcttcgcagttgggtcagttggttctcttattggggtcatactttaccaaaatattctgaaggaccattcttttcgcagcgttctctgtttaagtcagttgttgctgagcttgtcaggaatgcttgacctgatcttggtacttcgtctcaatctaaaactggggatacctgactactactttgctgtgatcgacgagggtgtctccaaaatgatcaaccgcataaaatggatgcctcttttggtacttagctcaaagctttgccctcctggcattgagggcacattctatgcgttgctcatgtccatcgacaatgttggcttgctatctggatcttgggcaggtggattgatccttcatgtgttgaacatcacaagaacagagttcaaaaacctctgggccgcgatcctaatccgaaatgcaatgaggttactacctttggccctgttgtttttggtgccgagaagtgaccagaactctaatctccttccagctgacttgctacctgaggatgatgctgcccaatatcaaatggacaatgttgagttaacctctcttacagtggatgggaaatcgagcaccggtagtttgcaccaagaatgcaaaaatcaggacgttgtcgaaaacgacgatgacgaggcttcactgcttgccaacaggagttgataggttatatgcatggattcatttcaggacaagattgaaaatgatatatagaaaaggagaaaatcacaccattagttttacgtttttttgttgtttgtgccatattcattcattttacggcagcacattagatactcaacagttgtactcagaacattttcctttgacaaaaatcgaatgcccgaaatttcgatcttggg

SEQ ID NO: 22888 - DNA, 3728 bp, Oryza sativa
  ref <308>: DATABASE ACCESSION NUMBER: AK073040
  ref <309>: DATABASE ENTRY DATE: 2001-12-06
gaccgtctctctccgttcctctcctctgctcatcttatctgttcgtctgaaaaaaaaaaaccgtttccggcggacgcacgggcggaggctcggccagcgttctcctcctccgcgacaccgactcgcctccgtcgcgcgcgcggccggcgagcagggccggaggcgcagtgcggacgggctgctgctccccttccccgaccccctaccgcactagtattctcccctgtgcggcaggccggcgagcatctcggttcgaatcgaagtatcgaattgaagcctttgtggtgaaggcattaaacagaaatcaaagtagcatgagcaagcactaactgggaatctccataatacagcattccagtgagttgaggacttttttttgtcactacagaaactaaggatacctgcgtgatttcaaaatttcaatgtgtgattagctcagtgaaatcctgtccaacttgtttcatattcaatatgccaccatggtgggggaagtcttcatcaaaagaagtaaagaagactgccaaagaaaacctcattgacacatttcatcggttattaagtccaaatgagcaaaaggggagaacaaaatcacgggggaatcgtagacatagtaaagatccaactgctgagaaaggttgctggtctactgcccaatcacgctctgcatccccttcaaaagaggtttctcgttgtcaaagctttgctgcagccagagcacatgcacaaccacttccccttcctagatcccgtgctatggtggcacgtactgcttctgatattaccgaatcaaaggtcgttttggaaaagcgtggcaaaggacaacaactaccgctccctaccacaaattgggttaaagaaagacctgaaactaccgaacctgttgcagaattatcaactgcttctatctccagccatggttctatagatagcgatgatcctggagatttgcgacttcagggacctgtggcaaatgacaccgacaatgtggctaaagttgctacaaccggtaattcaagtgttgtgcataaggagtgttctagtgccatcaccagaaagggcactaaggaagtgacgatgccaaccaatgctttcttgagtaatcaaattctatctacaagtcccagaggtactgttgttgctgacagttaccagtcaaatttacaaaattcacgaaaggttgttctggacagtgctcccaatagtgtgatgtcaagcccttctcgaagcccaagaatattatgccctgatcagattccaagttcagcattttgggcagttaagcctcatacagatgtaacttttgttgggtctgctcagtgctccagtcctggttcagggcaaacatctgggcataattcagtgggaggtgatatgctagcccagctcttttggcaacctagccgaggtagtccagagtgttcaccaattcccagcccaagaatgacaagccctggtccaagttcaagggtacatagtggaagtgtctctccattgcatccaagggctggtgggatggcacctgaatctccaacaaggcgacttgatgaagggaagaggaagcaaacccacagattgccccttccaccactaagcatatgtaacaattccacctttttgccaaacaattccaccccaactagtcctatctcacatagtcctggtagagtagaaaatccaactagtcctggatcacggtggaagaagggaaagcttgtcggccgtgggacatttggccatgtatacattggctttaacagtgataaaggtgaaatgtgtgcaatgaaggaggtcacccttttctcagacgatcctaaatcaaaagaaagtgcaaagcagttgtgtcaggaaatattacttctgaatcgtctgcaacatccaaatattgtacgatactatggatctgaaatggttgatgataaactttatatatacctggagtatgtttctggtggatccatccataaactactccaggagtatgggcaatttggtgaacctgctatccgcagttataccaagcaaatacttttaggcttggcttatctgcatgcgaaaaatacggttcacagggacattaaaggtgcaaacatactggtagatcctaatggtcgtgtaaagcttgctgacttcggaatggcaaaacatatcaatgggcagcagtgtgccttttcatttaagggtagcccgtactggatggctcctgaggttataaaaaattctaatggatgtaatcttgctgttgacatatggagcttaggatgcacggttttagagatggctacctcaaaaccaccatggagccaatatgaagggattgctgcagtgtttaagataggaaacagtaaggagcttccaccaataccagatcacctctcagaagagggcagagactttataagacagtgcctgcagcgcaatccatccagccgtccaacagcagtggatcttttgcagcattcatttatacgaaatgcatctccacttgaaaaatcactgtcggatccattgctacagttgtctactacatcctgcaaaccagatctgaaggtggtcgggcatgccagaaatatgtcttctttgggtttggaagggcaatccatttaccagagaagagctgctaaattttcttctgtgcacagtgatattcatgtacgaagctatatatcttgccctgtttctccatgtgggagccctcatctgaggtcaagatctccacaacatcaaaatggtataatgtcaccctctccgatttcgagcccaagaactacttcaggtgcttccactcctctgactggtggtaatggagctattccttttaaccatgcaagacacctagcttacaataatgagggtttcacaattacatcgagatgtcttgatgagcccttgccaaaccagcctccagatccggtccttggtcgttttgttagagtgaaacaaccctcgctaggttttcaggagagggcagtccctgaagctgacattctgagccctcaatttggaaggatgggacatgtgagcgtgtggaatttgcatgataagccactgccttctgagcatgcttcacagaagggctttgaggatcgggtaaaacttaagcctccactggatttgagatctggtccaccacaccttgggtgcaaccatggtcattgatttcacccaaaggtgtgctggataggcattgagttggagcttgatgagagctgctgagccagtttgcccatctatttactgcaagcctggcactgtatcatagtacacgaataatttcattaattatttcagaagctgaccgtctcaacaaaggtgagctatgcccccaccaggaacaggcgttgacttccatattaccatgcctgttatgtgttaaccagttacacgtcgttgatgcaattgtatattacagagggtctagatagccaaggacccaaaacagtagttcttcacctgtatactctggtatctacattcgttttcctttggacaatctatgggtttcgaggccattgtacaggaggaaactcaactagaagtccacattttgcaaaggtagaggcaattgaaccattcaatacccattctttttctcagtacttccccttgctgcgagcttttgcaactagtcagctgcagcctgcatagtgaaagcgttgttgctgtactcaggtaatccattcactgtatctattactctggaaattacacagagattctgatcgttaacc

SEQ ID NO: 22889 - DNA, 2746 bp, Oryza sativa
  ref <308>: DATABASE ACCESSION NUMBER: AK073041
  ref <309>: DATABASE ENTRY DATE: 2001-12-06
ggaagcgagagacagctcatcgcccattcgccctcgcgccgcgccgcgccgcccgccgccgcctcgccttgcctcctccgccgccaccggcgctagagccgacgctgctgcagcggagagtgcggtgccctcctcctcctcctcccccgcgcgcgcggcggcggcggcgggggtttccggagttaatgcgcccgtgaagaggtggccgcgtcggcgtcggcggagagagggagagggagagcgagtcttttgtgcgggtggttggggcgtgggcggtggcgtgttcaaggcggggagctacgtttcctgccggaggagatggggggttccaaggcggaggagaagcccgccggcggcggcggcggcggcgaggattggtggtgctaccagttcggcaacaaggacgcattgattgtgaagtcctctaagaaatcaccccccgcattgagaatggttgttttcgctatgactatgatctgcgggatatttatctgcacgatgtgtatgaagcaactaggaagtgatagcttgtctagaatagtgaagatcgaggttgcagaacagctatgcaataagtctgcaatcctgcattcagaggttcactttgtgcattacccacaaccgataacttatagcaggagtgaatgcaagtgtacacctgtccggttcttcgcgattatctcgtcacaacgttctggaagtggctggtttgaaactcttcttaacagccatatgaatgttagctccaatggtgaaattttctcttcaaaagaaaggagaagtaacatttcatctataacaaagacactggataaggtgtacaatttggattggaatagtagtgcttctaagaatgaatgcactgctgctgttggcttaaaatggatgcttaatcaggtgagaagaagagtgaaatctagattaacattttgtttttttttaattcaccctccttgcccttcctcgaagtttgttattttttttacttgataagcaaaagtataccccaagtaaactaaatattagaccacattttactcaatttatgaaactatggaatagtttcatgtggccctgttcggttcagttgtatctcaatgatcatgactgggcaagaatctcttccagtactgttggctgctgctgacacacatgcatgttccattctagatgcttgtgatttaggtatgctttattgaatatcatgtagcgagtacggccttgcttgtaatttaggaactgccggcttgtttgccatgaattgactcttttgtgcaatcatgaacacgatcgatctcttgatttatgcatcctgttgttctcaaggagattgagtataggtgttatggcttggtcccccccttagtaataactcccattaccaatgtagtgacatctgttgtgtgcacaatacaattacaatcctgcttctactatccataactatgcttgatggagcatatggaaatacaacccattcttgtggtagagcattttccagtcatggctagaaaatgacatccttctacaccagccagagtagtacccttttttctgatatggttacctgttaatgcattcaaatattactcctttttatgtgcttaactctggatgagatcacacatgaatatgattgttagggtgtcatgctctctgttattatcctgaaaacaccgtcattattgaaactgaggtagtcaagaccctgctggtttaaacaaagtgcggtgtgcatggtgttatgtgatagtttcgaattataactttttaattaagtagatctggacacacatagacttacaatctccataatggctataatcctttgtagaagtaccttctattccaggtttcaccatatcagtataaatgctttatgcatagacaaatcaaactaactaatcatgcacatggttaaaatgatggcaaagcagaataagcattcttctgatattatgtcttcagggtcttgtggcaaatcatgctgatatagctgactacttcaatcgaagaggagtctctgcaatatttctcttcaggtggaacctcctccgtcagttggtatctcaacttgcgaataatcatgacagatacctcaagcagttgaatggaacgcacaaggcccatgttcacacggcatatgaggccagtatacttgcaagatataagcccagactcaacacaacatcattaatacggagtctgaaacaagtagatgattacacccgtgatgctcttgaaaatctaaagagtatcaaccacattactatctactatgaggatctcatccgaaatagaacaaaacttcttgatgtcctggatttcctcaaagtgccaaggagcaaactagtcagccgacacgtgaagatacacaccaaaccactttcggagcaaattgaaaattgggatgaagtctacaatgctctaaatggcactcagtatgagagcttcttgaatgctgactacagaatatgacagtgtgccttcacactccctgtatagatatatcctttttctggttacatttctttttaaaatagctggccttgatgtgcctggcgaaaattttgatggtgcattgccacggttgcccacgagtgttctttgataggttcactaattgtcatagcagggttttgttttttgttttatgttttctgtaactgatatgctcaggattctaatcttgtgtattgcagtgcttattcttctcccatgttaatgatatgcatgtttccagccc

SEQ ID NO: 22890 - DNA, 1487 bp, Oryza sativa
  ref <308>: DATABASE ACCESSION NUMBER: AK073042
  ref <309>: DATABASE ENTRY DATE: 2001-12-06
tggcatcaccatgttcgccgccatctgccgccgccggctcgccgccctattcccccaaatccgcggtggcggcggcggcgcatatcatgtccagtccaacccccaggccgccctcctcttccacagctactcctcaaccgccgtcaccggcggctccgaccccgagccatgccccgacaccgtctcttacctggtctcctgcggcctccccccggccgttgcccgtcacacggccgccaacacccgcggcctccggatccgatccaccgagaaggcggacgccgtccgcaccctcctccgcagctacggcttctccgacgcggacgtcgcccggattgcccgcagcgccccgctgctcctcaccgtcgatcccgaccgcatcatccgccccaagctcgagttcttcgccacgatggggttccagcccagcaagctgtccaccgcgccgctcctcctcgcgcgcagcctcgagaagcacctcgtccccaccatccagttcctccgcagcatcatcggcagcgacgacgggatccgccgcgggttctcccgcatccctcgcgcactcctggtcagcctggacaactgcatgcgccccgcggtggaagccctccacaggcacggcctcaccggccgcgaggacgtgtccaaagtcctcgtcctccagatgggcgtgctcatgctatcgccggtccgcatcggcgaaatcttcgaggatctcaaggctatgggtatgtccatcacggacggccgctttgccaactcgttccgcgcgatgtgcagcatgaggagggcgacctggctgcggaaggtggcgctgtaccggagctttggcttgtccgagagtgaggtgttcgaggccttcaagaagcagcccacggcactgcttggcgctgacgagaccataaaaaagaatgcgtcgttcttccgcgacgcgctaaagcttgaaatgcgcgaggtaatggtgcatcctgttgttatggcatatagctttgagaagaccatcctgccaaggtgtgccgtgttgagcgtgttgatgagagaggggaagattaatccagatatccagttgcttcatgcattgcttggcagtgccaagacattctcagggaggtatgtagataggtttgctgctgatgtgccagacgttgttgaagcatatgagggtaagatcaaattcaaaggattcaagggtcagggtcagggtgtttaagtccacggaagccaaaaggctattcttctggagcaaaatcacttcaggttgggttgtctgtttttcttttagagccattgagatcaaggcatatgattctaaattctaacgctgtttcatggagcagcattactctgttgttggaccatggttacttagtatcatatatttgtagtttagcagtttccattttgaagtattctggtcttgggaaacctagatacatgacgtcgtagtgatacctttaaggccaattcctctatcattttctgattcc

SEQ ID NO: 22891 - DNA, 1220 bp, Oryza sativa
  ref <308>: DATABASE ACCESSION NUMBER: AK073043
  ref <309>: DATABASE ENTRY DATE: 2001-12-06
gatgggcaacgcgagcggcaggctggacgacatcgccgacgccgaaatggatgacggcggcggaggcggcaaccgcgccggcgctggggactactcctcctcgcctgcgccccatggaccgtgctggcctcccgccgtacggcggcgccgggggaagcggcggactggtgcggcccccgtcgtcggcagcggggtactccggcggcggagggtcgtcgtccccgccggggacccccccgcggccgcactccccgcgcatgttcgtgccgcagagtcctgtaactccattgcatagagctgtagatggacctcctccagtatttaaccagatattaacgagtgaacaagaggaggatcacgatggtccccctgacaagctgattcctactctgcttgtgtggactcttggagggaagaatgtctatatagaaggatcatgggataactggaaatcaaagcaactcgtccataaatgtggaaaggatcactgcgtcatgttagggcttgcatctggagtttaccgttatagattcattgttgatggagaaagaagatttcagcctgatcgtccccgtgaagctgacattatgggcaccatttcaaatcttattgatgttcatgattatgtcccggatagcgtggacagtgtgtcagagctgatggctcctccatcgccggactccagctacggtttcctggctcctgacgacaaggagttcaccaaggagcctcccgctctgccgccgcagctccacctgggcgtgctcaactcgcgaggaggctccggcgggaaggagggagagtgcgccatgcccaagcacaacgtcctcggccatgtcttcatcggcaagggcaccccacccatggtcgctgccctcggcaccaccttcaggttccagtccaagtttgtcaccaaagtcctctacaaggccatccaaagagaggacagatagctttattagctggcaatgctagaacaaattagtcatgcattctgttcattcattgttttggaatagtaataataatggtaatcttgagggcgtggaccgtgatgatttcatcagtgttaggaacaaaaacagacccattgatgtgcttttcagtcaccaatttgtttgctgacgccatattaaggatctaccagaagaataaagatggtgatcgatactctttcatacatttttgtgtgtgtgtgtgtcagggttggtcagttttgt

SEQ ID NO: 22892 - DNA, 1097 bp, Oryza sativa
  ref <308>: DATABASE ACCESSION NUMBER: AK073044
  ref <309>: DATABASE ENTRY DATE: 2001-12-06
gatctcatcacagccaacgcatcgtcttccttcttcgtcgtcgatagatcggctctcgagctcacaaccacatcgatcgtctccggcaagccgacgtacgtacgactagctagctagagaggaagcgagaaatggaagccgccgtggggtacgccgccgacagcctcatcaaggccaccgagctcaggctgggcctgcctgggacagccgacgacctgccctccacgcccaggggcaagaagcgcgccgccgcggcggaggacaacaacgccaacgccgccgccgccgacgacgacgagcacgacgccgtcgaggccgcgccgccggtagccaaggctcaagtggtcgggtggccgccggtgaggtcgtacaggaagagctgcttccagcaacagtcagcggcggcgagcaagagcaaggccgccgtgagcagctgcaacaacaaagacgagcccatcaccaagaacgcggcgccggcgccggcagcctcctcggcggcggcggccaacggcgggtcgctggtgaaggtgagcatggacggggcgccgtacctgaggaagatcgacctgaggatgtacaagggctacagggagctccgcgaggccctggaggccatgttcgtctgcttctccggcgccgccgacggtgccaacccgtcggagttcgccatcacctaccaggacaaggacggcgacctcatgctcgtcggcgacgtccctttcgacatgttcaccagcacatgcaagaagttgaggatcatgaagagatctgaagccacagggctaggatcaccaaggcaaatgaagatctaatctaagagcgacaagagatcgatcgatgcattccatcaacttttcatttctttttattttttttcctcccaagccaaaaaggagatgagcttgggggcatcaaagcaaacacatggatgtgcttctgctttgtttccatctttaaaaactagtaggttttaattttatgattttagcagcacaaaggagatgtggagatttgggttcaactctccatgtgtatgtacaaacgaaacagttattatatattgattgttggttactactactatactacttcaaacc

SEQ ID NO: 22893 - DNA, 1557 bp, Oryza sativa
  ref <308>: DATABASE ACCESSION NUMBER: AK073045
  ref <309>: DATABASE ENTRY DATE: 2001-12-06
gtaggtccttcctacattgggcacctcgagcgcgacttacccaaacccgccaccattaatctccagtgaaaaagagggtaacttcatatcattaaaagctcggatatcgcaggaattggcgatcttttagttgaagtccttcagatttcttgggacacctgtaatggcagcttaccaaactggccccgtgtctgagccaccgatgctgaacactgagattatcactcaaaaagtcaccgggtttaatactgagaccacgaccaaagaaaagcccataggctaccttgatgtttttgtacaccaagcacgcgatattcacaacatatgcatctaccacaagcaggatgtttatgcaaagctgtgcctcacgagtgacccagatgtgtcatgctcaaccaaggtgatcaacggtggtgggcgcaacccggtatttgacgatggtctaaggctcgatgtgcgcactgtggatgcttcccttaagtgtgaaatatggatgttgagcagggtgagaaactacctggaagaccagcttcttggctttgcccttgttcctctggcagacattgtaatggctgatggaaagcttgtccaggaattctccatgacatccactgacctgctccacacccctgctggatttgttcagctgtccttgtcttatgttggatgttctccagatgtcatccccattccagcacccaacaagtcagcgttagtagttaacggttctggtaatgatagctctgtcccttgcgaacttgaaaagattgaattcccggacttgaatgtggtgaatgagaatcaaattatggtctccaagtatttcgagatggagaccttgagctatgaggattcagttaaggttgacaacccaaagttagtgcaatctgatgcagctgttcctggtactgaattatttaacaagaatctcgatgaatatcgggagggtagtcctcaaagttgtgtatcaaccacagactactccacagccacatctgtcactccacattcagtttctgagccatcagacaccatccttgcagcatctcccactggaagccagagggagaaaagccaggatgttaccgatggcgaggctgattcttccgatgtaccactcaagggtgaagttgtcaagcctgtgatcagcattaatctcaaccctggtgagtctgttgttcaggaggacatagttaacatgtacatgaagagcatgcagcagtttactgaatcccttgcaaagatgaagctgccattggatgtggagaacagtagcccctcaactgaaaacaacactgactcgattacagctgagaagccatccccatcgaagggttctagggtcttctatggaagcagagccttcttctaagatgctgatactaagtaggatcgtgtattagtatacatggttcgtatttgtccgactggctgtcatgtgtttaatagttatatatatgcttcctaagtttctgtggctacaatgagtttctaggactcactctacacttgtattgcttacaatgtcatggtcagttaaaaatataagcattttgg

SEQ ID NO: 22894 - DNA, 1121 bp, Oryza sativa
  ref <308>: DATABASE ACCESSION NUMBER: AK073046
  ref <309>: DATABASE ENTRY DATE: 2001-12-06
gtaatccacgccgtctcgtctccaacacccaacctttgcaatggtcaagaccagagcggcggcgactccccgcccctccggcggcggcggcggcgcaggcgcagcggacatcaccgccggtaagatctccttccgctcccgcaagatcgtcaagagcacacccgccaaagggaaatccgtcgccacaacaacaacagccgtactatcgccaccgccgctgtcctcgccgggggagctcgcggcggcgctctcgcacctccgcaccgcggacccgctcctctccgaggtcatctcctccaccggcgccccggccttcatctcgtccccttcccgccccgccttccactccctcgcgcactccatcctccaccagcagctcgctccctccgccgccgccgccatctacgctcgcttcctcgcgctcatccccgccgccgctgatcccgatgccgcggtggtcaaccccgctgcggtgctcgccctctccgccgccgacctccgcgccatcggcgtctccgcccgcaaggcggcctacctccacgacctcgccggcaggttcgcggccggggagctctcggagtccgccgtggccgcaatggacgaggcggcgctcctcgcggagctcaccaaggtgaagggcgtcggcgagtggacggtccacatgttcatgatcttctcgctgcaccgccccgatgtgctgccatccggcgacctcggcgtgcgcaagggcgtgcaggagctgtacgggctgccggcgctgccgaagccggaggagatggcggcgctgtgtgagcggtggaggccgtaccggtcggtgggcgcgtggtacatgtggcgcctcatggagagcaagggcgccgcggccaagaaggcgaagagcaatgccattgccactttgccatcgagttgctaggtatgtactgtaccatgtaatttgttgatggtgtgcctcagaattgttgtccccaagctgtcaaatttagatggcagtgtgttagattctacttacccggattagtgtagtgctgcgtgtgtgtgtgactatgctcacactatggttcttgcaaagttgcaatcggaattctgaatatgctcaaattgaatgttactacttttgcatt

SEQ ID NO: 22895 - DNA, 2838 bp, Oryza sativa
  ref <308>: DATABASE ACCESSION NUMBER: AK073047
  ref <309>: DATABASE ENTRY DATE: 2001-12-06
ggcaccggtactgagcaccgcagccacggcgccgccggctgctcgccggcgaagggagcagccacggcgccgcccaccaccgcctcgaaggccacctactgcactcgtcgaggtcttgtgtctcctcggccgagcgagtggctagcgttctcaaggcggcctctctctcacagacacccattctcgctgcttcgtcgggctgtggtcagaagttcagaggactttacatgcccaatgtacaagttgccgatgtgtctaatttgacagcaggaattacggtctacaagaaagataagatgaactgtatgctggatgcttatgtgtttaacaagtccttcaagccttggtctctccgggttcattcctctttgccttcagaaactcagcaagaacctgaagcgcgacatcgacatcatcattcctcattaggacctctgcaacctccgcaggcgttgtcagcacctcctcaatcagctgctcgatttctgggtacatggcatggttttcgacattgtggtagttgctggccagaactcggaaagcctctcgagtgcaataccccatgtggatgtgcatgtccatcctgccagggcgcagccagtgctgggtcaagccgctctctgtagtttgttgtgaagacgatgatcctctcctcgccgctggttgaccacagaccgtcgacaaagttgagcagtccagatagtgtcacctgttagaacaaaaatacccaaagtggcagcatcattggtgggcttggcacgcttgatctctccttcgtcccgttgctgcaggtcgattgcagtcaatgtcttcaacgacgaggatggaccggttgctcatcccgacgagcagcctccggaggtcagagttggacttgacctcggtgagctcaagatcgtagatgtcaaacttgaggtagttggccatggcggcgatgaggctggacttgccggtgccaggtgggccgtagagcagccttggtctcgctggcatcttttatctttgactttaggagctccagtagaccaaggagtgcaacatcaatatcatcatttctcatgagagcctcagcgacctccgcaggcgtcaccatcacctccttgatcagctcctcgatctctggatatgtgacatgatagtcgatcgagtggtagttgctggcaagaatccggaaagcctctggggtgcagtaccccatgtggatgtgcatgtccatcctgccaggccgcataagtgcttgatcaagacgctccttgtaattggtcgtgaaaacgatgatcctttcctctccacttgttgaccacagcccatcaacaaaattgagcagcccggataatgttacctgtgtggacggcaatcaaattcttatcagcatagagttggacttggtacgttcctcccctgcctcccgttgtttcagttcgatgctacagtcaatgtcctcaacaacaagaatggaccggctggtcattccgactagaagccttctgagctccgagttggaatggaccccagtcagctcaagatcatatatgtcaaacttgagatgattcgtcatggctgcaatcaagctggacttgccagtccctggtggaccatacagcagcttctggtccatggcaagcgtgtcgaatgtggatgggtggtggagatcaattggagaccatgagtctgagtattcattcatgtatatctggagaattctttcctggtcttttatggccttggctgtaccaatgatgaatgggaggtatgatttcagggctttctccttgtgcttcctgtggaagctcagctcataggagcggacctcacgttggccgctgccattgccattgttggggtcagctgaaatgctacgtgagattaagcaccatttgaattctgttccctcatgcatatcaaccagctcttcaccttcctccatggtgacaaccatcttctcggaagattcatccatgctgctgactcgcaggcgctgcatgttgttgttgatgcgtgttgcaaggtagccgaggccggaaaacagcacatcacgcacctcgtatggaaccagctcgtttcacgacgctgcggaccagcatcacagacgctgcaacggatgcagcggttgtgatggccttcttgtatgactcgatggccttgtcgtaggacgccatgggagcagaagagttgtgcaccgcaagtttctgctcgaaatactggagcagaagaatgcccgcatcagtattccagaaaagaatgcccgcatccatctaccacctcgttggctgaatccattccatgtgcgcaaatcgcataccgttccgtgcagacgacggttggtcgacgtccgagtcagagactgtcgatcagcaactttataaaattctgaaaagttccagctgcatgcatataatggtccatttggggaaagtggggggcgttgctttggctttgccttgtctcggtctacgtcgccgacgtgttgagatcgacggaaccgagccccccatggttacaactgctgctgctgctacagctggtgatggattttggaccaaaggggtcaaattgttgatcgcgtagcggcggtggcaccaatcgacgtgttgctctgtggtttgtccggcgactccatggaccattttccttggtgatatcatcagtgagttgagtgggtgcttttattcgtttctgttggtgacagctactcgtattctatccttgtgtaaccgcctctctctgttctcttgtgctcttctgttgtgatggggaaattatctagtacatttaagttcatacagattcctcatgaaactattaaaaacttttgtgagctgtaaatgtattctgggc

SEQ ID NO: 22896 - DNA, 1570 bp, Oryza sativa
  ref <308>: DATABASE ACCESSION NUMBER: AK099319
  ref <309>: DATABASE ENTRY DATE: 2002-08-28
gacgcgaaacaaaacctccccacgccgcgagatctcgcagcaatggcggcgccgcgccaccaccacctcgccctcgccgtcgccctcgccctcctcgtcgtcaccgccgcggcggcggacgaggggggaccgcgggggaggcgggtgctggtgctcgtggacgacctggcggtgcggtcgtcgcactcggccttcttcgcgtcgctccaggggcgagggttcgatctcgacttccgcctcgccgacgaccccaagctctcactccaccgctacggccagtacctctacgacggcctcgtcctcttcgccccctccaccccgcgttttggaggatcagtggaccaaagttcaattctggaattcatcgatgctggtcatgatatgatcctggcagcagactcttcggcctctgatcttatccgaggcattgcaacagagtgtggggttgattttgatgaggatccagaggcaatggttattgatcacattaattatgctgccactgatgctgaaggtgatcatactttgattgctggtgatgacctcatccagtcagatgtgatactggggtcaaagaaaattgaggcccctgtattatttcggggaattggacatgcggttaatccatctaacagcttggtcctgaaagtcttatccgcctctccgtcagcatactcagcaaacccaaagtctaagttggcttcccctccatctctcacagggtcggctatatcactggtttctgttatgcaggcaagaaacaatgctcgggtcttgatatctggatcactcgatctgtttagcaacaggttcctaaaatctggtgttcagaaggccggtagcaagataaggcatgagaaagctggaaatgaacaatttgtgacagaaacaagcaaatgggtcttccatgagaggggccatctaaaggcagtgaatgtcaagcataacaaggttggggagacaaatgagcctggcatgcaccgcatcaatgatgacttggaatactctgttgagatctacgaatggtctgggaccagctggaagccgtatgttgctgatgatgttcaagttcagttttacatgatgagcccttatgttctgaagacactgtcgactgacaagaagggtgtattttcaacatccttcaaagttccagatgtttatggagttttccagttcaaagttgagtaccagaggcttggatatactggtctctctctttctaagcagattccagtgcgcccttacaggcataatgagtatgaaagattcataacttcggcatatccgtactatgctgcgtcgttttcaacaatgggagccttcttcatcttctcatttgtgtacctgtaccacaaatagataactcatgagagagcacgagttacctgaggctgatgtgtgctagatccatgcactgattgtgctgtaaacccagtgttgggggttccaagttcatagaaccatatttttgtagcgcaatctagagcacctttgacgaccactatcattgataacaagaaattgtactcctgctgctagaatcttccaaccatcccccttttctttc

SEQ ID NO: 22897 - DNA, 3157 bp, Oryza sativa
  ref <308>: DATABASE ACCESSION NUMBER: AK073048
  ref <309>: DATABASE ENTRY DATE: 2001-12-06
gacttcgcttctcctcctccccatgtgtactgaagccacatcctcgccggagctctgtcgccgctccgccgcatcctcgccggagacgccgccgccggatcctgcttcttctccaccgccgcggcaacctcaaccccatccgccgccgcctccttcttccccaccgccgcggccggcctcttccccatcggccacagccggagccgacgtcctccccatccgccgctaccgcagtccctgtcgccgtcgtcgacgttgtctctgctgcctcgctccgctgcccatctcctgtcatgcagctgtacttggccaatgtgcctataccctaggtgctgaacaataggagggaatctgaacatcgttgagacgtacaggtaatcagactctatcttgcagcttcgattcatcatttaattatacaatttgatgttctttctttgttgactgccaaacaattccccttcagctcactgccatcctcctctccatctgctgtgtggttggtgtaaagcatcaccattctatacatcactgtgcttattatgagcttggctatgcaatatatggattggccattcaaatatcaatgttttggttcttggatttgcaatgcttacgaaattactctctgaaattgtgcttgcaatgggccttgtatttcttttcccacgatgtgggtagtatggattttttttctgtttgtcctccatatatgtcagctctaaaaatggacagtatgaacttaatttagtagttcaggccatagaatatactaacagactgcctatgttttgatttccatttgtcttaacgtttttagtttcagcagtgcaaggttataattgcttcatggttctcctctctttgtttttagcaaaattaatatgaactgcacatacatcactgtgctaatattccgtacagattcaggcgtgatgctatactgttgtgcaggaagaagcttcacaatttcacacaagggatttagttggtagcagctcacacactcccttcgagcaaatattgttttcaagtacttatctcatttaacttaataagttgcttgattattgggagcaactcacacactcccttcgagtaaatattgttttcagttacaatactatcgatgattcttttattctacaagaaatgtgaattatggaccattatactaccttggtaaatatttttgttccagtttgaagctgaaaaaattgtttccggttgttcttattaacgtggttcaaattgattcttagaaaatgaaaagtcctcagtaggtcttgttattctgtaacatgtaggtcctaattgatgcttacgaaatgtggatttgggattttgttatagcgagcggactgtcatcaatattaacgagaacctgttgcatattaaaactgcttttatatgctcatggtgtgttcttcaaggttgtacatccttgcgatggacggcgttcctaaactaactgtgaaggaattaaaaagtcagcaagcctgagagcggtacacggcactcagcgttgaggagaaggctgcgctggttcaaaggaaccgtgaaaacagggagaggaagaattctgcatctatatcgggcacagttttgaatcagagtttgcatgaaggaagccaaactgtaaattgtcagccatcatttcagccagtgccatcctccacacctatgtcttcctccacacctggaaagcatcgtttctggccaacggatcactggagcgccgcggacacaaggcactgtttactcccaatccgtcccccctataaagctagcctcaatcccactacttcgatgttgccctgtagaccattatgcaaattttccaaacagtgttagaaaggtcacattgatggattccaaaggtgagaaactccatgttcaaagaaccagtcctgcatgatgccattaagattggtgtgaactttaggaaccaagagctactgcaaccggcagaacaaaataatgctccaagaaaaccagaagtggtgatagttgaagataatgaagtggtgattgagccattgccaaaaaagaagtgcactggcaacaagggataaactatccctctaggagttgaagtcattggtataccctccaccgcttaggcataataataataggacaaaatgtgcacaactcaataattttaagatattgcccctaaataatgtgcatcaatatcatagtatggattttggtttatgctatgtagtgtttgctgttatgaaatataattagtgttagtggccacttccatttcaataatttattgtgctatgtatgttcttcctttgagatatcaatctaatgttcttccattgttttctcagacattacctctgcatatgggcttatgcatatctctgcacatgggctgaagatcatatttattttttagcaaatcctggtatctaatatgaaaatcagaatgcatatatgcatgcactttatgaaaatggtgcagatggtgcataagtcaggggggaatcgttagagcttcaagtgtgattgaagcagatcctctttcttatgatctatttcctatttacctattcttctttcagattattaggttataatatatggggtttaatttatatattgaacataacgtgccttgcacgtgtatgattactagtattagtacaacatgaacggtttcctttatgcaaaatcagtgcgagagaaacatggcaagcagtggcgccgggagagacgagaggtggatcctcgccggcgccaccgcgctagtcaccggccgcagcaaaggcatcggccgcgccatcgtggaggagctcgttgggttcggctcgacggtgcacacctgcgcccgtagcgaggcggagctgagcagatgccaggaggaattgacggccaagggcctcgccgtctccttctctgtctgcgacgtgtcggtgcgcactgacagggaggagctcgtcagcagggtgcgcgagctcttcggcggcaaactcaatatccttgtaagtctcataatctcttgccaccatgatttccagcgatccaacggtatatgtaaaataaggggggctgttcacattgcacccacctaacaagttcaaacaagttcatgtacctctgatgtaatttactctaaaataaatcttatcagattttc

SEQ ID NO: 22898 - DNA, 1643 bp, Oryza sativa
  ref <308>: DATABASE ACCESSION NUMBER: AK073049
  ref <309>: DATABASE ENTRY DATE: 2001-12-06
gctgatgccgcagcgccgcctcgccgcgcgccaccgccgcccgcctgcccccaggtagcgttacatgatcgcccgctcgagacacgctgcctcgctcgcagccgcagcatgtgggggtacctcctccgccgctcgctcgtacgccggcctcgacctgctcctgcaggagaacttctcggccccgcgccgcgtcctccagctccacgccctcctcctcacctccggcgcgctctccctcccgcaccccgacccggccgccaccgccgccttcccctacaactgcctcatccacgcccacctccgcctccgcggctccgcttctcctccatggggccccctccggatcttctccgccatgctcgcccgcggcgtccgccccaaccgccacaccttcccctccctcctcaagtctagcgccagcttcgacgcggccaccccgaccctccacgcgcagtgcctccgccgcggcctagacgaggaccgcttcgtcgcctgctcgctcctcagcgcctacggccgcgacggccatcttgtgcgcgacgcgcgtaaggtgttcgacgatatggctagtccggatttggctacctgtaatgccatgcttgacgtgctgtgtctctccggagacatgtatggtgcccgctgcttatttgatcgtatggtggtgagggatgtggtatcgtggacgacgattatctctgggttaacgaggattgggtgtcactgggatgctgttgaaatgttccgggcatttctgctgcagaataagggacggctttctgaggccacactggtaagcgttctttcagcttgtgctaatctggatgctgtggaggggcttgcggttggaatggctgttcatgggcatgttgttccccctgaggttcagttcactgcgttcttgggcacagcactcatcgacatgtatggtaagtatgggaagcttagctgttgtggccatatctttcatttggtaagagacaaggaggtttgtacgtggaatgcactgttgtctgcatttgctaatcatgggaaggaggctgaagcactggttaagtttgagatgatgaggagtgaagggttcttgccaaatcatattacattcgttgctgtaatgacagcctgtgctcgcgcaggattggtggagactggcttagacttcttcgaagagttgtttactgaatataaggtcattccaatgatggtgcattatgggtgtgtggtagatcttttaggccgtgctggtcgttttctggaggcaattcagattatagagaggatgccatttatggctgatgattctgtgtggggtgcacttcttggggcttgcaagatccatggcaatatagagctttctgcccagatcagggagaaactaatagttcttggtggtcagcaacctggacggtatgtgactgttaggaacatgtatttagaagaagggaactggtatgctgccactagaatgggagaggtgatgcaggaggctggtattaagaagatagtgggtatgagcagtgttgtgcttaattgagttaattctatcacatgaagtagtagttatattattcatcggattagatgtttgtaagaacagaataggtatgatgttacttctagatgttggaattaatttgtcatttggg

SEQ ID NO: 22899 - DNA, 1752 bp, Oryza sativa
  ref <308>: DATABASE ACCESSION NUMBER: AK073050
  ref <309>: DATABASE ENTRY DATE: 2001-12-06
gattcccaactcttcggcggctcactcgatcagcctctcctcctctctacctgccccgcatctcgaatatttggccagtaaagcgaaagtgaagggtttgcaaatcggctagcagttcagagaaaatgggggttgttggatggagggttcgttcgatggtccaacatttgggttggaactgtcgccggggcctctcgtccgctgcggttcaatctcagttggagaatgtaggattcataggactgggaaatatgggtgcccatatggcgaggaacctggtaatggctggatataaagtgactgttcatgatgtcaatgagaataccatgaagaaattctcggatgatggaattcccacaaaactgtctccacttgaagtgtccaagtctagtgatgtcgtaattacgatgctgccttcgtctgcccatgtattagatgtatacaatggacggaatggtttgcttgctaatgggggctgccttggaccttggttgtatatagattcatccacagttgatccacaaacatcaaggaaaatatccatggacatctcaagatgcactttgaaagaaaagaaagcctatgctgaaaagccgatgatgctggatgctcctgtttccggaggtgttcctgctgcagaagctgggaaactcactttcatggtattcaatccttgctttttcgtaactttggtgttatcaccaggaatatactttggtcggacagttgctacattagatggaaggatttctgtcttattttggtgcaaaggaatgatatataggtaggtggttcagaagaagcatatctagcagcaaaacccttacttctctcaatgggcaaaaaaacaatatattgtggcggggctggaaatggctcggttgcaaagatttgtaacaacatggcaatggccatcagcatgcttggagtctccgaagcttttgctcttggtcagaatctcggcatcaaagctagcgttcttacagacatattcaactgctcaagtgcccgctgctggagcagtgacacatataacccagttcctggagtaatgatggatgtgccatcatcgaggaactatgatggtggtttcacctccaaactaatgaccaaagatttggatttggccatggcctctgcatctggagttggcttcaattgtccctttggttctcaggcacttgaaatttaccgaaagctatgtgctgatggctgtgaactcaaggacttctcatgtgcatttcgccacaactatgctggcaaagatgaaaattgatcttgtagctctgccacctaacttgccacctgttaaaaataaataaagcaataaaaagttgtgtgattgaagtgtactcaggcaaagttggactatcctttgtaaagtgaattatcttaattgacgcctttcagcctgtaaaatcaaatccatgggctcaaagcaaagctttctctgacatttgtactaaattgattttactgaggtattgtccctcttgtattttcagggctgtgtcaacataaagtgtactcttgctgcattcggaccaagtattccatactatgtgtaacaatgtaattagacataggcatcaagttctgtatgtatgatcagaaaatgtacaccaaggagagccctgtgctgttgtgcacatattgacatattgtacaaagaaatgtagcaatcgcattgccaagcaaatgacttgatgaataagaacatcagatttgggagaataaatgtaggtttcattg

SEQ ID NO: 22900 - DNA, 2439 bp, Oryza sativa
  ref <308>: DATABASE ACCESSION NUMBER: AK073051
  ref <309>: DATABASE ENTRY DATE: 2001-12-06
ggagctttcccaacgccaagagatcgtgtccgaattgggtttgatctggacggctggtttgttgctgcatactcttctgaaaaattcaacaagcagatgaggtgctggctttgttcctgatgctagtgttccttcctttttgtcacttgtcagttgtaactttcactatccatacaacaaacgtaacaaaatttccttttcagagaacaaaactgatgatctgatcgacaacgtcagttcttgtggatagttcttgtgtgtgttggtcgcattgcatgcatttaacaacgagcttagatgatacctatgttcagctgatgcctaatgccagcagccacagccatgtcgatacatcgtacatggagctaatcgatgactccaatgtaagcatggaaaacacctaagtaatacatcatatgccactccagtgatgagaggagttcgtcttgcggcgctgcgttgctggagttcatggggccagccgcgccgccgtccgaagccgccgcggcggccgacgatgtggtgctcccgtacatctcgcgtattctcatggaggaggacatcgacgacgacatgttcttctgcctgtaccccgaccaccccgctctcctcgaggcgcagcagccgttcgcccagatcctctcctcctcctccagcatcgccggtgaggtgaacagtgcacccatggaggattctgctgccttgatgatgcaggggagcggcaatggtaggggacggaagggtagtaagcatggcggggacgagctggaggccgaggtgggcagggcgagcaaactgatggccacccccgaggaggaggaggacgacgacgatggcgtcggcgagatgttggagaagatgatgctccacggggacgaggcaagaggcattccacggggagacgaacgccccgcgcgtccccgcggagaagaagtgcgggaaggcggcgcggcggagaggagggcaggccaaaggggaggttgtggacctgcgcgagctggtcatgtcgtgcgcgcaggcggtggcatcgggcggccgccgggccgccgccgaactcctggagcagatcaagcggcactcgtcgccgacaggggacgccaccagcggctggcgcattacttcgccgatggcctggaggcgcgtctggccgggcgcggcgaggccttgagcgccggctggtcgcgtccccggaggagcgcgcgtcggccatggagttgcttgaggcgtaccaggtgttcatggcggcgtgctgcttcaaatgggtggcgttcacgttcgccaacatggccatcctcccgcgcggcggaagggaggaacaggctgcacatcgtggactacggtggtcagtaccacggcctccagtggccatccttgctgcagcggctggcggagagggaaggcgggccgccggaggtgaggatgacgctcgtaggccatccccagccagggttccggccagcccgacggctcgagaggacggggcgccggctcagcaactgcgcggcgcgcgttcgggctccccgttcaagttccgcgccgtggcggcggcgaggtgggagacggtcaccgccgaggacgtcgtcggcgtcgaccccgacgacgaggcggcggtcgtcgtgaacgacgtgctcagcctgggcaccctgatggacgagagcggcgtgttcgacgacccgagcccgcgggacacggtcctgggcagcatccgcgacatgcgcccggcggtgttcgtccaggccgtggtgacggcgcccccggcgcgcccttcttcccgacgaggttccgggaggcgctcttcttcttctcggccctgttcgacatgctgggcgcgacgacgccggaggaggggagccacctgcgggtggtgctggagagggacgtgcttaggcgggcggcggtgggggtgatcgcgggggaaggggcggagcgggtggagcggccggagacgtacaggcggtggcaggcgaggaatcggcgggcggggctgaggcaggcggcggtggagggcgacgtggtggaggcggtgaggagaagggtgaggaggaggcatcacgaggagttcgtgatcgaggaggatgcagggtggttgctgcaggggtggaaggggcgcatcctgtacgctcactcggcgtgggtcgtggcagaggatggtgcgcactaggcagcaggcgccggtggtggtgttcgtgtgtgttctgggatgggaatgcgtgtttgcttctgtaacgttgatcagtgaagctatggagcgtttcttccctggagcaactagcgttggagacttggagagctcacaactcacaagagtaaacaagtttagtggcaatgatcctttcagctcgggacgagcgttcattgtccactaatgtcataccgggatgtatcatgtatgaaggctagctcagaaacatagatagcttattaattcagtgtcattgc

SEQ ID NO: 22901 - DNA, 1248 bp, Oryza sativa
  ref <308>: DATABASE ACCESSION NUMBER: AK073052
  ref <309>: DATABASE ENTRY DATE: 2001-12-06
ggcggttgccgtgccgtctcgtactctctcgtgcaggctaacgttggaatcttgggaggggagatggcggtcgtggcatcgaggtgtacggggctgctcctccccgacctcggcgcgagcctcgccggcttccgccgccgccgctcgacgccggcttcttctctcagcttccgcccgcggcgggcccgtcgacggctcgggtccctctcctgcatcgcgccgcccgattcggcggagccgcagacggatgagccggccgccaaagatgactcgactgaagataaggctgaggcaagtagtgcatcccaggatgctggaaatccaacctttcccaataaagatctcagcagaaggatagcactggcctccactattggagctgtgggcctctttgcatatcaaagactcgactttggaggcgtttctctcaaagatcttgcagcaaatgctacaccgtatgaagaggctctctcaaatggcaagcccactgtagttgaattttatgcagactggtgtgaagtttgtcgagaattagcaccagatgtctacaaagttgagcaacagtacaaggaccgtgtcaactttgtcatgctaaatgttgacaacacaaagtgggaacaagagcttgacgagtttagagtagaaggcattcctcattttgcctttctggacaaggagggaaatgaggaaggcaatgttgttgggagacttcccaacccatattttcttgataatgtggttgctcttgcttccggtgagccccctgtacctcatgcacgggttgttggccaattctcgagtgcagaatcccgaaaagttcatcaagttgctgatccaagaagccatggctaacaatagcttgtggtgatcaattttagtggtaatgctaagacctattgacaagaggcgatatggtctgcatgctcagtcctggaaccaagcattagcgcgtggacattggtactgagctgttccaactcccttaacgtatatgattttgctggtagaaccaggcattcggctacagcattgatatgttggtgatatttgaatcggtgcatgtctgcatacatatttgcataatgaaaatgcagacatgtgttgcagccgcaagcatgcccatgttagtaaactgtttaccaatcaccactagtttctacttagaattgcaatagaatgtttatatacaggagcttactaaaatttgtgtgatatatatatgcttctgctactcttggggaaagctgc

SEQ ID NO: 22902 - DNA, 2980 bp, Oryza sativa
  ref <308>: DATABASE ACCESSION NUMBER: AK073053
  ref <309>: DATABASE ENTRY DATE: 2001-12-06
ggtgggacatttatatgcgatgaagtcggctattgggatgttgtcaactgacaaacttgtgaaaatcatcagagaccgaaaaaacgagatgccgactgaggtgcaaaattatcatcaagaagtgatggagcggcttcctgcaatccttcctttcaccccacattctcattgtgaagaacaagatacagtaccaattggatttatggaaaaaattgaagaattgaagaatatattgttgcgagatgctgctccagtgatctttgtcagtggagagcagctctcagggaagactactctcatgaaccaggtgtataaagacatcgatgtcaggaatcatttcaaaatacgttccaaggtcgacgtgtcaaaaactagatgtttgagtgacttgctgcgggctgtgctgaaacacgaagagcgtgagacaaactccatgtatcccgatgccattgatgaattgaagataattgaagagatccagcgtacctttcggactgtgggcaatcgctacttgatggtgatggatgatgtcgacgatacatcttcgctgcatgttttacgacatgtcctaggaggatgggaggggaagattgtgtgcctgaccaggaacacacgtatacagtacgaagagttgcatgccaaggttgagattcgccctcttgaactggcttaccaaccagcagctactggtgcatgtagcttttcgcaatgctgatgacacccctgctcctgtggccgtcgatagaaacaatgatgggcagcaaggaggaggagaatacgatcaactggaaaaggctctcaaggggaagacagagacagataacatcgatggagatgacttgacgccaatggtggagactctgaaaggcatcttgaggaaatgcagaggcaacccgtggaacatacgggccgtgggagcgttgcttggtgctaatcgcgtcgataaatggaaggaaatcgaggaaaaccaagttgatgatttggtaataggagataagaagcgtgatccactcataccagcagagtatgcccaactgcccgctgacatccggctcggcttcttgtactgcctggcttttccagagagatcagaaatccctgagaattcattgatccctgcacggaagcttgtgcgcctctggacggcagaaggcttcccaccggacgacagcccacttcagagccaagagcaagaggcagagaacctgctacaaagactcattgactacaaactgctcgtggtgaagaaaacaggcttggatggcgaggtgctgaaatgcaaggtcaacgagcacatgcgatccctggctctggaaatgtgtgaggcacagaaaatctgcagatttgcacgggaccccgctcacccggcaccccgagccagacccagctcgagcttgttcagcagaaagacagcactgttgcaccgctaccgtgtactcgctgtgcatggagatggagacggcaatgaagctgtccaagaaatgtctagtgcgatgagtaaagacattcggctgcgctccctgctgtatttcagaaccgagaggaaggagcctcccaagcttgagctgtcatttggtcggacgtacaagcttctacgcacgttggatcttcagggaactcggctcacccgcttgcactccagtatcacctgcctcgtttgcctgcgctacctaggcctgcgaggaacacagctggaatatctccctgaaactctgcagagcctccgccgcttgatgtgcctcgatatcagggacactggcatcacagaggtgaacgatgtgtctgaatttaaagagatgaggcatctctatcttgcaaactccttccgcgaccagtccgtgctcatcaaggaaggcctgctgtcgctgcttcatctgcagacgctgtcaggtgcaacacacgaggtgccttctgaacgaaaaaaggcaggcatggtacctttcgagcaagaactgctatacctcaagctccttaggaagctatcagttaagaaggcatcaatctcatgcagcaaaggcatctctgatgcaatcaacaagatggacctcctacaatcgctcactataacatgtgctgctggtgagaagagggggttcaatttgagttatctaaatgtcaacaagaatctccgtaagctgaagcttgggggtcgtatgcagaaatttgaccgtctacaaccaaagcttcaatccataacatacctctacctctgggacagcaaactgccagtagaaggtaaagatccactacagcttctgcaaggccttcagcagcttctcctcctctcgttatacaacgtctacgaaggggagaagttgacttgtaccaatggctaccacaaactgaagaagctgtccatcatcgcgatgggaaagctcaatgagtgcacgtttggcaccaagaacatggcaaacctcgaggtgcttgtttttgctaaatgtgcaagactcagcagcccgccgccgaagcttgatgaactaaacttcctccgggaggtgcatttggctcaaatgcctcaaggattctatgacggcatgaagccagcaaccaagaagctcgtgcattttccagagttccagcaccacttccactcgtcaaccagagctgtcgtgcaagggggaagctaagccataatcgccgatccgttcgcttcactcaccacaggcttctgtttcagtgctgtaatttccggccagcttctagtcacagcttcatcagttcggtgtggccgtcagatatatttgctgtgcaagttctgaatatttaccgtttcataaatcagagttgagtgaactactttcaaaataaatttagtcatcagtgaactacgtccatatatggtgagatccctgcccgccctcgtttactgctgtttcaataaggctgtatgttttcacaaacatggtgttaatggtgagtgttttttcttaaaaaaaaaattggcaatggtgaccaattggtaatctactacggttgcccc

SEQ ID NO: 22903 - DNA, 1788 bp, Oryza sativa
  ref <308>: DATABASE ACCESSION NUMBER: AK099320
  ref <309>: DATABASE ENTRY DATE: 2002-08-28
tgaaggtctcgagaacaaaaccccccaaaccccacggcggcggcggcgagcggcggcggaagaagcagccgcaagaggcagcagctcgcgctggcggcggcatgggtgggagcagcgcaagcccgtgtgacctggacagggagttcgcgccccaaatcgcccagctcctcgccacccctcctctccaacccgcgcaggaatactacaatgggctcatacagtccaggaaacatgatggtataagagtgaacttcagcagcaagcatgggaaaggtgtttgtgcgaacaaggagtttgcagaaggggaccttattctgaaggatcaaatattggttggtgctcagcacagtcttaacaagattgattgcgctgtgtgcagttattgctttcgcttcattggttctatagagttccagattggacgaagattgtattggcaaagcgttggttcaagcagtgactgcactaataggaggcattgccatgagagtgatttgggatcgagtgccagttcttctggtgcaacaaaggaaaacagtagtactttgccagaagaggtcttaggatcacttattactggtgacatgtcactgcctttcacagaccattttagtttgcctcaagttgttccttgtcgtggatgtgaggaagaacgctactgcagccaatcatgtgctgattccgactgggaaacttatcactctttgctgtgtactggatctaagactgaaccatcccagagatctgctcttcagaaattcatagaacatgcaaatgggtccaatgatatttttcttgttgctgccaaggctatcactttcactctgctgaggtacaagaaactcaaaacgcagcctgaatttcaaaataacacagatgaatcaaacttttctttgcttatggaagcatggaaaccactttcgatgggctaccaaaagaggtggtgggactctgttgctttgcctgaggatgttgattcctgtgatgaagatacatttaggcagcaaattagggatctagcacttacgtcattgcagcttctcaaggatgctatttttgattctgagtgtgcacccttgttctcacttgacgtgtatggccatttaattggcatgtttgagctgaacaatcttggtttggttgttccgtctccagtggaagactatttcatacatattgatgatcttccagatgatgagaaggaggaagctgaaaaggttacaaggccatttctagatgctttaggtgaagactatgcagctccttgtgaggggacggcattctttcctttgcaaagctgtatgaatcattcatgttgtccaaatgctaaagcatataaaagggatgaggatactgatggtaatgcagtgataattgctctggagccctatcaagaaggacgatgagattaccatatcctacatcgatgaggatgtctcctacgaggagaggcaggcggagcttgcagattatggattcatctgtacgtgccctaggtgccaagaagaaaagcccaactgaacaagatccacagtttggaggttcctgaaatttatttttttggtgtggaatatgcaattgaagttttgacgactccatttattttattttttttgtctaggatatgcaattgagattttgacaactccaaaaatgttaggataggatatgcggaaagaatgatatgatacgtacttatttgagtggatgctggattttgctgtgctaatgttggatgctgcagaaagtttttattccttctgttcagttgagatttttccttttgtg

SEQ ID NO: 22904 - DNA, 1002 bp, Oryza sativa
  ref <308>: DATABASE ACCESSION NUMBER: AK073054
  ref <309>: DATABASE ENTRY DATE: 2001-12-06
gtccgacaccgtttgcgattccccaattttagccctagaacacgcacatcccggaatcggagcaagaggcctgccttgccggcggaggagaggaattgatcgcgagaagcacgggaagtcgagcatggcgagcgcggatctgctgcggagggaggaggagttctacgcctccttgttcgactccgccaaaggtggagatgccgtcaagtcgcgtgggcagatgattgagaggaagattgaagttcttgaggacatggccgccaaggttagtaatcggagatctcgtaggtggttgaatgaccggttgctcattgaacttgtcccccgtcttcatgtggaagaaatcaaaggcctttttgctcctccaccatggggtgaggaactgcccgtttctgcattctgcaggacaagtgtcggtgaatgggatgccttcaggagtattgacatggatgttgaggcacgattggtgcaacagatgaaacagtcttctacaaaacagaagaaccatttggacagagatgaattggttgctctcaattcttggcatcatatagatcgtcaaacaagagaagccataaagagaaatttcctcccagatcttcttgaaatatacgaagaacgagttaggaccttcatcgaagacactagtggtaaagatatgcttgtactgaatgtccaggacccatttcagagattgcttttgcacggtgtatgcgagttctataatgtatcatctacaaccacgactaccgtaagagatggaaagctgtgtaaaacgacagcaatcaagaagagatcaggcacaggtgctccctccagaatcacattggttagcttcctaaggatgaagaaaaagtcccattaacatgtgccgtgtattggcaaaacatgccgatttaggttctgtttaggatgtacacatgtaaattatcgatattatcatcttaacatatttgaatgcaagattggtcactgcctcactgatcgtgagtcgtgacctcc

SEQ ID NO: 22905 - DNA, 1637 bp, Oryza sativa
  ref <308>: DATABASE ACCESSION NUMBER: AK073055
  ref <309>: DATABASE ENTRY DATE: 2001-12-06
gccacgtgcaagaggagcgggtacaagcaggccatgaagcttctcgacgagatgcgagataaggggtgcaccccggacattgtcacctacaacgtcgttgtcaatggaatctgccaagaaggacgggttgacgatgccattgagttcttgaagaacctcccgtcatatggctgtgaaccaaacacagttagctataacattgtgttgaagggcctgtgtaccgcggagcgatgggaggatgccgaggagctcatgggcgagatgggccagaagggttgccctccaaatgtggtaacttttaacatgctcatcagtttcttatgccggaaaggattggttgagccagcactggaagtccttgagcagattcccaagtacggttgcacacctaattcgttgagttacaacccgcttctccacgcattctgcaagcaaaaaaagatggataaagcgatggcgtttttggatttgatggtgtccagaggctgttatccagacatcgtttcatacaacactctacttactgcactctgccgcagtggtgaggttgacgtcgctgttgaattgcttcatcaactcaaggacaagggctgcgctcctgtcttgataagttataacacggtcattgatgggcttacgaaggctgggaagacaaaggaagcactagagctgctcaatgagatggtcagcaaagggctccaaccagatattatcacatactcgacaatagctgctggtctttgtagagaagatagaattgaagatgcaattagggcatttggtaaagtgcaagatatgggcataaggcccaacactgtgttgtacaatgcgataattcttgggctttgcaaaaggcgtgaaacacacagtgccattgatcttttcgcttacatgatagggaatggctgcatgccgaatgaatcaacttacaccatattgattgaaggcttggcttatgagggattgatcaaggaggcacgggatttgctggatgaattatgttcgagaggtgttgtaaggaagagcttgataaataagggagccattagactgcttgattgaactatgaatacatataagaggatcaactgagtatcgagggtctgagaatgagattttgtgcatcttcgctcttcagcaggagaggagattttactggatgttcacctaattgatgttgctttcttgacaacattcttgccgtgctcaaatgctaatggaggtccttttctcagattgccaccagaaggcccagctggttttgtattcagaagaggctggattgccttcacgacgatcgtcatgttcggtcggaagtcggcttcgtactgaacgcacaatgctgcaactgctgctagctgaaaaaaaatcttgaaagaaaaaacaatggcactcactgctgctttctgaattttgtcagatttgctacagtatagctacctttgcgacagccttcggagggtaatcattgttgagctttggatcgacgcactgcttaactttatcttcgctcaatcttggagtagcctgcctcacaaagatcatggtatatgtaagatcattggaaatggaaagattgaaataggatatattgtaataagttatcttttgttgaaggataaaacttctccttaccc

SEQ ID NO: 22906 - DNA, 2789 bp, Oryza sativa
  ref <308>: DATABASE ACCESSION NUMBER: AK073056
  ref <309>: DATABASE ENTRY DATE: 2001-12-06
gttccgactccgaccgtccgccgccgtcacctcgccgccgcctcctcccctctccgccatagatacggatcggaggagaaggagggactcactccaatagtatcgtctattattgtttgttgctctcccctcccctcccccgtgcgtacgtctccgattaccaaccaggtcgcccgcctctcgtcgccgaccgggccggagctgctcgatctgctgcagtacgtccagcctgcagcaattcggccgcccgcccgttgagaggagagggagaggagatgatctcatcttgccccatctgcaacgtccaggttcttacggctgagctccaatggcatgcgaatgcccattttgacgatgatcaactccaaaccgacatggaattggcccaccaaatcgccctcactcaatccacgcccaatcccctgctgctggacactcatcaagaatgtaacaatctgttcgctggtgatcctcatgctcaaggagcctcctcaagcatcgccggaagctcatcacttcagggaagtgttttggatgagcaagtatcttgcttgctccaagcgcaactccgaagcaatgttcaggaaatacaaggaggtgttatgaacttgttgagagcctgcctggaatcagaagctggttcatcgacaagtatgatatcaggacatgttgatcactatcagagtctttcatcagaagataaggggtggggatgtgggtggagaaatatccagatgctgagctctcatttgctgaagcaaaggccggaagcaagggaggctttatttggtggttctggatttgttcctgacatcccttcacttcagaggtggcttgagattgcttgggataagaaatttgatacccttggctcaagccattttcataacaaagtttatggcgccaagaagtgggtagggaccacggaatgtgctgcccttctccgctcttttggtttgcgtgcaagggttgtagattttgatagcacggaatcatcaggtcctcacagtaagaacggaaaacatgcaccaaaaagagtacaagggccaatggacaagttcttgataaagaatgtttctccaacatctacatcttctgaactttgtcgagaagatgctgaaaacatgagaggccaacaggttcttgttgactggatctggaactactttgctagcaggcattctgataactcggacagttcaaggcgtgtgcttgtgagtgataaaaccccattgtatttccaacatcaaggtcattccagaaccatagttgggatcccaaaagccaaaatggtcaacatgggaatcaagatcgatttacccttttgattttggaccctggccatagaacgtcagatttggagagggctcttcgaaggcaagacaggatggcagcgtctagtgaaaagaggtgtccacacctcttaggaagccacagtatcagttgtgctatgtggatcctggaattgctagttcagaagaaatggggcagctgaaaactattgatagtatcctggtcaggttctagaatgctggggaatacatagactaccaggcttgggatgctcttccctgcttggagaaacgtggaccattgatgcattgctgactgctgaggctctgcgttgggttttataatgtatgtatggcctgtcatgcttgtctctatagagaagtccaataatttccttttgctttgctcctacttatttaaacattatccggacactgagcattgatgcccttaaagtcattgtttttttagctttatgtatattatttcctttagagttttgttccatctatggttgttctctcttttttagttccattggtttctttcttgtattctagggattatataaattaatttatctattcaagtagcatggtggaaatattagaaaatcagcaacataagaacaattttgatacagctatttcagcaaatctaagaagtaggagtataaatatgagaatcaatggactttaagaagataatgggtaagcacatattgttattacaatccttcacctctatttacattattctttacttttatgtgcattcaactgacattcatgtcagtattattacgtgtctatgtataacttcttaactttattgttgaatattccttactgcatcctggttgttcatggatctatatactgtatggttctggtagttgaagctggcaaaactgactacatgagcattatgcgtttaccatgaaccttactatgccaattctggaactgtttactgtggtatagatgcagtttacgtagaaatgctttggcaggattgctgctgcttacatgatctgtgaagtaggctgaatgtcttcagattgcttattccagtgcataggctcttgcatcttattctgtgaattaccatgtactatctgaagttgtgaattgatctgcatagagtgtttgcctttattttatagatgccttcttggagaccctcacaagtcacaaccagttcaactgaagtgggcgactttcataatgcatctgattctgaacactggggttgcatttagttacaagatcagattccaatagcaaatcgagaggtgatcggtcccaatagattgtctgaaactggtcaggtcatctgaaccttgacaagatctgtagttgtcatttctgttagaatgtatgccgccttggtaaatattccttggcagatagtagctcttttattatgtgaaacagaacatctgaacgtgactttggtaatattccattctgcatatgttctctcgacgccttttc

SEQ ID NO: 22907 - DNA, 1104 bp, Oryza sativa
  ref <308>: DATABASE ACCESSION NUMBER: AK073057
  ref <309>: DATABASE ENTRY DATE: 2001-12-06
gaacgaaagcgccgcccgccgccgcgtcatctcttctcttctgttaaaccccctccgccaccgtcgctgccgccgccgccgcctccggagcccgagacgatgtcgcgcctcggccgctacggcccaccggcggtccgcgactcctactccctcctcgtcctcaacgtctccttccgcacgacggccgacgacctcctcgcgctcttcgaccgctgcggcgaggtcctcgacatccgcatcccccgcgaccgcaggactggggattcgagagggttcgcgttcgtgaggtacaagtacgaggacgaggcgcagaaggccgtcgataagctcgacgggaggacggtggatggagggatatcatggtgcagttcgccaagtacggcccaaatgctgaaagaattcataaggggaggattgtagaagagatttcgaagccaagaggccgatccagaagtcctagtccaaaacggaggtatcgtgctgactaccgagacaggggctaccgtgatgactatcgggacagacactatcgtgatgactatcaggacagggagtataggagaagccgaagcatagagaggtatgaacgtgagaggtatcaagaaaaaggctatcgtcgcaggagccggagcattagccctgattatgacaggagggcatcgcaagaatgggcccagggatgaacgttctccacgctctcgaagccctttgacctagctgaatgccctacacaatatatcatagatagcttgaggatgaatagaccggagccttgtctgcttgcttaggacggatactgataatggtgtagtgttcaacatggctgcatttgagcatccaaggctgcttccttgttaacaagacagcaccttttgagaacaatgtagatttctgttattttttgtatctactttatttcttatatccatgtcagtgctatttttttccctcaattgagtgcttattatagactgtaatttgcatgatggagcgaagaggtgttggttgataattgctccgtatgcaagttgctgtcatgatcttgcggttgacggaccatgttgatgctaaacaccttgatgatgattttggtgattctgaggc

SEQ ID NO: 22908 - DNA, 2286 bp, Oryza sativa
  ref <308>: DATABASE ACCESSION NUMBER: AK073058
  ref <309>: DATABASE ENTRY DATE: 2001-12-06
gagttcaaagcgttccccctgttcatttcgacctctctcttcctctcccgtcgtcgtctcccccgtctccggctagggtttcggccgctcgccgccctcgcctccgcctccgcctccgccgccgccgctcgccagggggagcccttctcacctcaccgctcccgtctctctctccccgtcgaccccgacgggctacggctctacaccctccccgcctcggctcgtgtctgttcgcccgcggggacgctgtttccggcgggcggaggcgcggccgcggcgtcgcggctcctcctcggaggcacggtgcgggcgacggccctcctcctctccttccccgaccctctctctctatctcactctctctgccctagccttctacgctgtgtggaggcgtcgtcgcgcgcgcgcgcccggacggcgagcatctggatttgagcctaattgaagctgaacccccatggcccagtttaggtctgcgcctgtggaaagcgaggcggagccaggcgccgatggccctgtggatgaagccaatgctgtggaagaggagaaatctggtaagggtgaggatggcattgaggaggctgccgataccgttgattccgtgaaggattcagcaaagcctgaaggcatggatgcaaaggaggaggcggtggagcaggagggtggggccgcagcggataaggcaaaggatattcctgtgactagtaacggtaagacggatgctggcggaaatgaggtggctgaaatgaaggttgaaaaattggagaatggtgatgggcatttgaaggcggacggcgatagcaatggtgataacaagggtgctgatggtgagaaacagcttatgttagcgtcagctggggaggacgtggaggacccggtgctgtccaagcttgcaagcaactccttcatgtttgattacagctgtggtggtgatgactcggggactgaggaggagcaggctgctttcatgaaggaacttgagcggttttacagggagaagcttatggaattcaagcccccgaagttctatggtgaagggttgaattgcctcaagttgtggagacaagtgactgggttgggtggctatgatcaggtgacatcgtgcaaactgtggcggcaagtgggagagtctttcaaacctccgaagacatgcacaactgtttcatggaccttccgtaacttctatgagaaggcactccttgaatatgagaaacacaaaatcgaaacgggcgagtttcaagttgctgcatctaatttaacagagaggattacttctgaaagtcaggttggcatccatgcttctggttctggaagagctagaagagaatctgcaacccgagctatgcaaggctggcactctcagcgcttgcttggcaatggtgaaattgctgatccaataattaaagataaagggacggtgtctgtcttaaaaaaggataaaactcctaaaagcagcggttctgccaagaggaaaaggacaccgaccttggaagatgacaggattgtaccatataaacctgacaagctacaaaatgactcaatggttcttgaccttggccctccagctgattgggtaaagataaacgttcggagaaccaaagattgctatgaagtctatgcattggttcctggccttctgcgtgaggaggtacatgttcagtcagatcctgctggccgtttgatagttactggagagcctgagcaactagacaatccttggggtgttactccattcaagaaggttattagtttgccctcccgcattgatcctcatcaaacttcggcagttgtcactctccatggacagctatttgtccgtgcaccattcgagcagtcaaagtaaatggtgctctacaagatgaagcgcaacatgcaaggttgcttttgtaggtgggggtttatgtgattgacttgggcctgttcatcctgatcttcgttgcaaactagttactttctgcttcattactcctgccatgttgtctattctgtattgattaattctagttaactagatggtctagttatgtatcttgtagttcgttaattgtgatatgtagcttaagttcagctctattagtttagaatgttaatagcctgatgctaaacatgttcatggtttctttcttccttttttttttctcaactaaagaaaaggtgataatttgtagcatgtagcttgtgaggttattcctaatactcagttctcatactactcagaacatgaagacaagatagattcttggatgtaactgttgccttgtgcattgctgttgtatctgtataact

SEQ ID NO: 22909 - DNA, 2136 bp, Oryza sativa
  misc_feature (1465)..(1465): "n"=any one base of a, t, c, or g
  ref <308>: DATABASE ACCESSION NUMBER: AK099321
  ref <309>: DATABASE ENTRY DATE: 2002-08-28
gcgtatactctcactctgtctcctcccccgcgtcggtcgcttcgcttctactggaggagagcagaggtggtggttggtgagagaggatgcgcggcggcggcggcggcggcggcggcggcggcgaggaggccggccagaagctgaagagcatggacgtcgacaagctggagaacggcggcgacaagcccgccctcaagtaccacggctggagggccatgcccttcatcatagggaacgagacgttcgagaagctggggacgctggggacgtcggcgaacctgctggtgtacctgacgcaggtgttccacatgcggagcgtggacgcggcgacggctgctcaacggcctcaacggcaccaccagcctcgcccccatcatcggcgccttcctctccgacgcctacctcggccgctacctcgccctcgccatcgcctccgtcgcctccctcatcggcatgttcttgctgacgatgacggccgccgcggacgggctgcacccggcggagtgcggggtgggggagacgtgctcgaaggcgacgtcggggcagttcgcggtgctgttcatgtcgttcgcgttcctggtgctggggtcggcggggatccggccgtgcagcatgccgttcggcgccgaccagtttcgaccccccacacggagtccggcaagcgcggcatcaacagcttcttcaactggtactacttcaccttcacctccgccatgctcgtctccgccaccgtcatcatgtacgtccagagcaacgtcagctggcccatcggcctcggcatccccaccgcgctcatgctcctcgcctgcgtcctcttgttcatgggcacccaggctctacgtccgcgtcacccccgagggctcccccttcaccagcatcgtccaggtgttcgccgccgcggcgaggaagcggtcgctcaagcagcccaaggaccccaagcaggacctgttcgacccgccgcacaccagcgccatcgtcaccaagctggcgcacacggaccagttccggtgcctcgacaaggcggccatcgtgtccggccccgacgacgtgcgcgccgggggcgccgcgccgtcgaacccgtggaggctgtgcagcgtgcagcaggtggaggaggtgaagtgcctcatccgcatcgtgcccgtctggtccacggggatcatctactacgtcgccgtcgtgcagcagtcgacctacgtggtgttgtccgcgctgcagtccgaccgacacctcggccggagcttccagatccccgcggcgtcgttcacggtgttcgccatgctggcgcagacgctgtggatccccatctacgaccgcctcctcgtgccgcgcctccgcagggtcacgggcaaggacgagggcctcaccctccggcagcggcaggggatcgggatcgcgctgtcgacggtggcgatgggtgatgtcggccgtggtggaggaccggaggcggcacatcgcgctgacgcanccgacgctggggacgaccatcaccgggggcgccatctcggccatgtccagcctgtggatggtgccgcagctcatggtggtggggctctcggaggcgttcaacctcatcagccagatcgagttctactacaaggagatcccggagcacatgcggagcgtggccggcgcgctcgccttctgcaacctggcgctggggaactacctcagtgggttcctcgtcaccatcgtgcaccggaccaccggcgccgggagcaactggctggcgcaggacctcaacaaggggaggctcgacctcttctactggatgatcgccggcatcggcatcttcaacatcatctacttcatgatctgcgccaagtggtacaggttcaagggggcagccgccaactgagatgcaagtgaagtgaagtttgttcgtttgggtggttaattaattatgtcaatggcagataattaattggtggagtgcttttagctgggttttttttttctgcctcatcatttctctcttgtatttttgtatctgtggtgtcttgaattataaaatctataggattaagtgggtgaggaaagagaaggaaagaaacaaaagggttggtttcttgtaagtggttaaaattcaaagataaatgaatcttcaatcctagtaaatcgctacttgctgtttgactg

SEQ ID NO: 22910 - DNA, 1216 bp, Oryza sativa
  ref <308>: DATABASE ACCESSION NUMBER: AK073059
  ref <309>: DATABASE ENTRY DATE: 2001-12-06
gacctcctctccccgaacccccaaccctccagaaccttccgcctcccgccggcgccggcgccgccgactcggccgcggaaaccctagcgtgcgctcgcgcccgccctcgctcgccggccacctccggactccgcctcctccgcctgctcctcgtctccggcccctccgccgccgtcgaccggtcagatctcgacgccgtcaagccgcgatggaggactgggattctgaagactttcagcccgcagtgcctagtgcaaaagctgagccgcttaaaagtaagtgggcagatgaagatgtggaagaagatgatgtaaaagaatcatgggaagaagaggaggaggagaaacctaaaccaccacctgtagaaaagactgcaccaaaacctagtgggaaaggtgctgcgaagaaaggaaaacaacaagcatcaactagttctgaagtagttcaagatgaggctctggatgatcctgctctagagaaacttcgtcaacaaaggcttgtggaagaagctgactttaagtcaactacggaactttttggaaagaaggacggcagtgaaaagtccctagataccttcatcccaaagtctgagagtgactttgcggaatatgcagagcttattgcaaacaaactgcgtccctatgagaaaagcttccactatatgggtctactcaagaatgtcatgagactttccatggcatcattgaaaggtgcggatgcgaaagatatatcgtcctccattgcagcaattgctaatgaaaagatcaaggctgagaaagaagctgcagcaggcaaaaagaaacaaggggcaaaaaagaagcagctacacattgagaataaagacgatgatttcatccctggaaagggtaattttgatgatccggatgagtacgatttcatgtgatcggctgtgagggaaccgtcatcttctatgtataccttggcaagcagagattagagtttgcggcatagttggtattttcattcagaggcacctgaacacttgaaacgattgcatgggaacaatgcccatttgttcgacgttgattttgactctcacagaatagggaagagcacctgtgtgctcgagctcgacacataggcgttttttcttattcttaatccacattgtgtttttggtctgttcatgggttgggatctatatttttttgccaactgtagtataatgtgtatctggtttatattggagtcctgc

SEQ ID NO: 22911 - DNA, 2883 bp, Oryza sativa
  ref <308>: DATABASE ACCESSION NUMBER: AK073060
  ref <309>: DATABASE ENTRY DATE: 2001-12-06
cctctttaaatacctttacaagggacatgacaaggcctcgatatccataaacgaggcagataaaaacggtgaaatcgatgagattcagcgctacagggatgcgaggtgggtgacccctccagaagccttgtggcgtatatatggttttgacatatgccacatctcgccgtctgtgaggcagttgcaattgcatctgccaaacatgcacatgttggctttcgatgcagacaaggatctccgtgatgttctggataaggaagacgcaggcagatcgatgcttacggcgtatttcgaggctaacaggcagcatgtctaggctcgagatatcctttatagagatttcccaatgtggtttacttggcagacgccaggtaagtactggaagaaaagagatagaggtggccaggtcgggagaattgtgtgtgcccacccggcagagggggagcgctactatcttcgggtgcttctaaaccatgtgacaggatccacctcatttgaagacctacgtactgttgatggtgtgctcatgccgtcgttccgtgctgcagctgaaagaaggggtcttatagaggcagacaacaccctcgacgagtgccttacggaggccggtgtctaccaaatgccggcgtcgctacgcaggttattcgctaccatattggtgtactgcgaacctaccgatgtccgtgcactttgggacaagcatctagattccatgtcagatgtaacaacgcatgcccttatgctgtccaacagatggtgctgatagatatccggggcatgctacaatcaatgggtaaggaaatctcatcgttcccgctccctgaaatagatgaatcacatgatagtactcgaggagatcccagagagattattgaggagtcttccattgttgtggagagagatgatatgaacctcccagaccagctcaatgatgagcaaaggtctgcattcaataaaatcatgaacgcggttggtagtgctcaggggagcgtgttcttcgtagatggcccaggaggcacggggaagactttcctatatagggcgctactagctacagtgcgtggcaatggtgatatagaggtggcaaccgcgacgtcgggtgttgcagcttctataatgccagcaggccggaccgcacattcgcgggttcaagatcccactcaacattgaggaagggtcgtattgcagcttcaccaaacaaagtgggacggcaaagcttctccagatggcatcgcttataatatgggatgaggcctccatgacaaagaggcaagcggttgaggccctcgatatgagcatgagagatataatgggttgtccacgttctccgtttggagggaagacgatggtgtttggaggggatttcaggcaggtgctcccggtcattaggaagggcactaggtctcagataacagaagccactctacgcaggtcctatctttgggattgtatggttcaattaaagcttgttcgcaatatgagggcgcagagcgacgcgtggtttgcggactacctccttcgagttgggaatggaaccgaggaggtgaacaaggaaggaaacataggccttccttcggatatttgcttagagtgcaaagggaatgaaacggacctcgaaaggctcatcgataccgtgttccctaacctaaacgataacctgacggacccaaactacatcatatgtagggccatattgtccactcggaatgagttcgtcgatcgaataaacatgaagatgattgagcggtttagaggagatgtgatgacatatcatagttttgactgagcagaggatgaccctcataactattacccgccaaaattcttgaactctctaactccaaatgggctacctccgcatctgcttaagctgaagataaactgccccatcatgcttttgaggaacattgacccagccaacagccaacggactttgcaatgggacaaggctggtggttcgtcagttcggaaaaaatgctattgacgcggagattgttgtagggcagcatgctggaaagagagttttccttcctcggatacctctatgtccttctgatgatgagatgttcccatttcgcttcaagaggaagcaatttccggttagattgagctttgcattgaccatcaataaggcgcagggtcaaacaattccaaatgcagggcgtctacttaccagagcctgtcttctcccatggtcaactatacgttgcactgtcaagagcaacctctagaacaaacataaaaatactatcgatgccggtagaagacaagaaacaaaagaaaaagtctaagcgtactggcgtgaaggacaatgagaagaaaggaaaggaattgtctaaacaagctgcaacatacacaaaaaatattgtgtatagagaggtcctcacagattagaaaagcagtaaacatttactttcttggtctgccccttctcctgtatatgcctacatccactccttccccgagcagtccctccggccgcctcctcgttatggctgactcagagaccaaaaccgttgtagtcggctgctcgccgaggagttgcaggtgatcaggagagaagcagccaggtccaggatgaagcaattcactgttatgaacaaattcaagatgaagtccttacttgtcttcagtgagtgttaagttttgtgtgaggacgtaagcaggagccaggaactgtgagtactgatttgtaacggagcacatttgatcagtaatttgctccatgtgaaaggagcttcggattcagattaggtcagggattaatatgttttgctcaactggctattttatttaattgcaaatttcagtttgtcaaaccacttgtaaagttttttgcatgttgtacatgcatttggtaataaccatgaagtcatcttaggt

SEQ ID NO: 22912 - DNA, 2395 bp, Oryza sativa
  ref <308>: DATABASE ACCESSION NUMBER: AK073061
  ref <309>: DATABASE ENTRY DATE: 2001-12-06
gtgcgtccagggcaaggtcgtcgccatcaccctcccatggcgcggcctcgccggcaccctctccgagcgcatcggccagctcacccagctccgccgcctcagcctccacgacaacgccatctccggccccatcccaacctccctcggcttcctccccgacctccgcggcgtctacctcttcaacaaccgcttctccggcgccgtcccggcctccattggcaactgcgtcgcgctccaggcgttcgacgccagcaacaacctcctcaccggcgccattccgtcctcactcgccaactccaccaagctcatgcgcctcaacctcagccacaacaccatctccggcgacatcccacccgagctcgccgcctcgccctcgctcgtcttcctctccctctcgcacaacaagctgtccggccacatcccagacaccttcgccggctccaaggcgccctcctcctcctcgctcaaggaatccattaccgggacctacaacctcgccgtcctcgagctctcgcacaactcgctcgatggcccgataccggagtcgctctccgggctccagaagctgcaggtggtggacctcgctggcaacaggctcaacggcaccatccccaacaagctcggctcgctcgccgacctcaagacgctcgacctctccggcaacgccctcaccggcgagatcccggccagcctgtccaacctcactactagcctccaagcattcaacgtctccaacaacaacctctccggcgcagtgccagcctcgctcgcgcagaaattcgggccttccgccttcgccggcaacatccagctctgcggctactctgcttccgtgccctgccctacgtcgccgtctccatcaccatctgcgccggcatcacccgcgcagtcacgggaggcgacggggcgccaccggaagttcacgaccaaggaggctcgcgctaatcatcgccggaatcgtggtcggcatcctgctcttcctggcgctctgctggcatgctgctctgtttcttgacgaagaagaggtccggaagcggcgggaagcatacgacgagcagcaaggcagccggtggtggcgccggcaccgcggcggggggcgggcgaggggagaagaccggggtcgggggcggcggaggtggagtccgggggagaggtgggagggaagctggtgcacttcgcggggccgatggcgttcacggcggacgacctgctgtgtgcgacggcggagataatggggaagagcacgtacgggacggtgtacaaggcgacgctggaggacggcagccttgtggccggtgaagcggctgagggagaagatcaccaagggacacaaggatttcgagtccgaggcggcggtgctgggcaagatccgccaccccaacctgctgccgctcagggcctactacctcggacccaagggcgagaagctcctcgtcctcgacttcatgcccaacggcagcctctcccagttcctccacgctcgcgcgcccaacactccgatcagctgggagacgcggatgacgatcgccaagggcacagcccgtggcctggctttcctccacgacgacatgaccatcgtccacggcaacctcaccgccagcaatgtcctcctcgacgaccactccaaccccaagatcgccgacttcggcctctcccgcctcatgaccactgccgccaactccaacgtcctcgccgccgccggcgccctcggctaccgcgcccccgagctgtccaagctaaagaaggccagtgccaagaccgacgtctacagcctcggcgtcatcatcctcgagctcctcaccggcaaatcccccgccgagaccaccaatggcatggacctgccgcagtgggtggcgtccattgtcaaggaggagtggaccagcgaggcgttcgacctcgagctcatgcgcgacggcgacaatgggcccgcgggcgacgagctcgtggacacgctgaagctggcgctgcactgcgtggaccagtcgccgtcggtgagacctgatgcccgggaggtgctccggcagctcgagcagatcaggccggggccggagggcggcgccgggccgagcgaagaaggtggcgcagggcatgtggctgctgcttctgcaggcaatgagtagtatgcagcagctgggctcttgagcagaatttgaagatgaaatcgaaggaaatgaacttgtcagtcagctagagactagaaacagagcaagctagagagtagaagcagagatactcctatatttcatttatgaattctttgatttatttgaaagcttagtagtagtagtattagtaagtggtagacattattcgtctatgttgtttttgaagcttcttgtataggcaaatattattatttgcaacacaactgaatcgctctatcagaatatcaatt

SEQ ID NO: 22913 - DNA, 2056 bp, Oryza sativa
  ref <308>: DATABASE ACCESSION NUMBER: AK073062
  ref <309>: DATABASE ENTRY DATE: 2001-12-06
gatggggatttgtttgtttaagctgtatgtgccacactttcttattcctgaaaagaagattggtttccctcttcaacttcatactccgatgttcttgcccctctatagctcattaaaaagttagtagttgagttcatctcagctgctcttcttctggttcttttatcttttgtttttttggtggttccttgcaagtgctttttctcgaggaatgtcccttttggttctgttgcctgttggacctcagttcttatttatttaatgatttgtgctcctctgtaacctggtgttctcgctttctaatctgtaacgctatacctgtgcttaacaggcatcgtcaggaatttttcctcggttattccagcatgtgcgttgttacgttgaaggatgaattccaaaagagcactacattaatcctctaggtcactttgtcaccatgaagttcattttctatctgttcagtattttctgttgtctgtgttcctgcgcacaaagccaaaacatctctgggaggcccgatgcagtgagaattggagctcagttcgcaaggaattcaacaattgggagagttgccgcagttgccgtccttgctgctgtcaatgacatcaacaatgattcgaatatccttccgggaacaaagctggatcttcatatgcatgattccagttgcaatcgctttcttggcattgtgcaagccttgcaattcatggagaaagatacagtggcaatcatcggcccattgtcttctaccaccgcccatgtcctttctcatcttgcaaatgaactccacgtacctctgatgtccttttctgcaactgatccaactctttcgtcacttgagtatccgttctttgtgcggactaccgtcagtgatcaatttcaaatgactgctgttgctgacttagttgagtattatgggtggaagcaagtgacaaccatatttgtggataatgattatggaagaaatgcaatatcctctttaggcgatgaactttccaagaggcgatctaagatcctgtataaagctccatttaggccaggagcaagcaacaatgaaatagctgatgtgctgatcaaggttgcaatgatggagtctcgggtcatcatcctgcatgcgaatcccgactctggacttgtggttttccaacaagcactcaaacttggcatggtatccaatgggtatgcgtggattgcaacagattggctcacttcataccttgatccatcggtacatctcgacattggattactgagcacaatgcagggtgttcttacattgcgtcaccacactgaaaataccagaaggaagagtatgttgtcttcaaaatggagtgaattgcttaaggaggatagtggtcacagcagattcttgcttagtacttatggcctgtatgcttatgatactgtctggatgcttgctcatgcgctggatgcatttttcaatagtggcggaaacatttctttctctcctgaccccaaactaaatgaaatttcaggaagagggttgaatttggaagcattgagtgtctttgacggcggacagctgctactagaaaaaatccaccaggtagacttcttgggtgcaactggcccagtaaaatttgattcaggtggtaatcttatccagcctgcatatgacattgtcagcataataggatctggtttgcggacagttggttactggtccaactattctgggctatcagttatatctcctgagactctctacaagaaaccagcaaatcgtactagagaaactcaaaaacttcatgatgtgatctggccaggtgagactataaataagcctcggggatgggtttttcctaacaatggaaatgagataaagattggagttcccgatagggtaagttaccgtcaatttgtatcagttgatagtgaaactggaatggtgcggggactctgtattgatgtgtttgtcgctgcaataaacttgttagcatatccagttccgtataggtttgtaccttttgggaacaacagggagaatccaagctattcggagcttatcaataaaattataacagatgtaagtcct

SEQ ID NO: 22914 - DNA, 1280 bp, Oryza sativa
  ref <308>: DATABASE ACCESSION NUMBER: AK073063
  ref <309>: DATABASE ENTRY DATE: 2001-12-06
gacacacccactcgccgagccaactccaatccccaaaccaccagatcgaatcgcggttgccgcggcggaggcgaggaggaagacgaggatgccggcggcggcggcggcgaagacgctggtgccagcccgcggcggcggcgacatggaggagccgctgctggcggagtcgtcggatcgcttctcgatgttcccgatcaggtacccgcagatctgggagttctacaagaaggcggtggcgtcgttctggacggcggaggaggtggacctctccgccgacgccgcgccactgggacgccgcgctgtcgcccgacgagcgccacttcgtctcccacgtgctcgccttcttcgcggcctccgatggcatcgtgctcgagaacctcgcctccaggttcatgtccgacgtgcaggtcgccgaggctcgcgcccttctacggcttccagatcgccatcgagaacatccactcggagatgtactcgcttctgctcgagacgtacatccgcgacgacgtcgagaaggaccgcctcttccgcgccatcgacaccgtccccgccgtgcgccgcaaggccgactgggccatgcgatggatcgacggcggcgagcgcttcgccgagcggctcgtcgccttcgcctgcgtcgaggggatcttcttctcgggttcattctgcgccatcttctggctcaagaagcgcggactcatgccgggcctcaccttctccaacgagctcatctcccgcgacgagggtctccactgcgacttcgcctgcctcctctacgacctcctccgcggcaagctcgacgagtcacgcgtccaggagatcgtcgccgacgccgtggacatcgagagggagttcgtctgcgacgcgctccccgtcgcgctcgtcgggatgaacggcgagctcatgagccagtacatcgagttcgtcgccgaccggctgctcatggcgctcgggtgcaagaagatgtacaacgtcgccaacccgttcgactggatggagctcatctccctgcagggcaagaccaacttcttcgagaagcgcgtcggcgactaccagaaggcgtccgtaatgtccagcctcaacggcggcgcttcttgcaaccatgtcttcagcatcgacgaggacttctgatcacatcgactgccatagtagtattaaagtagaaatacatgttctcccaaagtgttcgtatggtttcttgttttatttgttctggtttgacatgtactcctgtaatgaatcaagtaaaaagtttctcaatacatcaactggtcattgcctgt

SEQ ID NO: 22915 - DNA, 1127 bp, Oryza sativa
  ref <308>: DATABASE ACCESSION NUMBER: AK073064
  ref <309>: DATABASE ENTRY DATE: 2001-12-06
gtcgacatgaagcagaaggccgccctccccaagatgcaggacagggtagttcgcgagtcaaaatacattgcggcacttaaggagaaagccgaacaacgtaaacgagagcaggacattatttatgagaggaagcttcaaaaagagaggagtaaggaagaccacctatatggtgacaaagacaaatttgttacatctgcctacaggaagaaacttgaggaggagcggaaatggctggaggaagagaagcggcggcagcttcaagaagaaaaggaagatgttactaagaagaaagacttgagtgatttttactttggtcttagtaagaatgttgctttcggtgcacagacacatgacaatacaaaacatgctaaacctgaaaagttagacgagaaagttcaagatgctaaaactagcaaggttggtgctgaagtatccgatcgctctcctaagcacaaaagggactccggtgaaggagcagagacggccaatgaaagtagaagtgtggaagaacctgctacaactcaatcaagggattcagctgctgctagatctaccgagaaaaatgcagatgtttccttggatgctcctcagacccagacaccagaaaatacccaaccagctcctcagacccagaatccacagaatactcaaccagcacagatcacggatgaacactataagagaaatgctgatgcacttgctgctgccagagaaagagctctggcgcggaagaaagccaaggcgcagcagatatgaagtacgaggcagagatactcaccgagttttttcttataggctaaggtcatcatattcttgtttgaggtttcgggaagactgtaaaatgatggatggtttcacccttctagcatttccaggagataatccccttggtttgatctgcatgatgctctaccttgcttgatcaaaatatatgtgcaggcaacccttcaacgttagaatatctcgttcggcttttctgaacatttgttctgctgtaagatgggaaataacttagcacagtgaactgaaggttgtatgcatatgttctcattcatgtataccgttgtacttttgtaacttgagtgattgaacgcgatatgatttctgcaatggcacaaattactact

SEQ ID NO: 22916 - DNA, 1734 bp, Oryza sativa
  ref <308>: DATABASE ACCESSION NUMBER: AK073065
  ref <309>: DATABASE ENTRY DATE: 2001-12-06
gtggttcccccaccaccacctctccctctcctcccccttcctccaaactccacaatcccctgcacccccattcccaccctactcccccgtcctccgccctgctgccctccaatgacctcgccgggcgcctcctctttcgccgccgcgctcgtcgtcgaggacttcccgtggagggaggaggagatggggatggacccggacaagtaccgcgaggtgttcgacctcgcgcagcgcggtgctcgcgccttccgcgacggccacttcgacgaggcagtttccttttactctaaagcacaaactttgagaccaggagatcccattatccttagcaaccgaagttctgctttctgtatgataagtcaagtgttgagggagagatcagcagctgactcagagtaccaaccattgaatggtcttgatcccacaacgcatgcggaggtagcgctcaaagatgcagagaaggtattagctatcggcagtaattctccaagaccatatcttctcaaggcatatgcgcttatcctgttggagcagtaccatgaggcacgggaggctattctttctgggcttcaagttgatcccctcagccatgtcctgcaaagctggctcagtgatctgcacagaaatacaagtattgcagctcgagcaagacgtccaacattagatagaccagatgattttgagtgcacattatgtttcaagctattgtttgaaccagtcaccactccatgtgggcactcattctgtcgctcttgtttacatcaatcaatggatcatggcaataaatgtcccatgtgtcggacagttctttttattggtccaaaaacatatcctataagtgtaacgctgagcaacataattcagaaaaattttccggaagaatatgctaagaggaagtcagaacatgagactatgacatatgcaggcgttgatttgatgcctctctttgttatggatgttgtactgccttgtcaaaagatggcactgaacatatttgaacctcgctacaggcttggtaaggaggataatggaagggaatcatcgcatgggaatggttggtattgattctgctacgggtactgtagctgactgtggttgtgaggtggaaattctggagtgtgagccacttccggatggtcgtttttatctagaggtggaaggttcacggcggtttcgtatcttgcgatcatgggaccaagatgggtatagggttgctgaaattgagtggctccaagatatttcattaccagacggatcgcaggagagaaaagatctgatggaaagggctaatgcagcttcagaattggccaggacatatacaaggcgagctagagaaatctcaaggcctgcgaggcgagcaagacagacagatcttgagagcatgcctggaccacaggatcctgaaaaatttagtttttggcttgtcaacttaataaatttgaggccgtcagacaggttggatctattgcgccttagtgatactcgagagagaatttctcgtagtcttagattgctgggtgatgcagaacaaatttgtcgtgtacagtaaaagatatatttgttgcacaagcataactattgtaacaagtgatttattcatcaagaggtacatactcctatgtacactgaatgatactgtagagtagagttgtcgtcatttttgatttattcaaaacaatgatttgtgcaaactcatttttgtaacttgaattgaatctgttgtattattcttgc

SEQ ID NO: 22917 - DNA, 2444 bp, Oryza sativa
  ref <308>: DATABASE ACCESSION NUMBER: AK073066
  ref <309>: DATABASE ENTRY DATE: 2001-12-06
gtgatcgagatcatcgttatgttcccgatccagcaccgtgcctaccgcagtggcattgagaacctgttggtcctcttgatcggtggtatcccaattgccatgcctaccgtgctctcggtcaccatggccattggttcccacaagttgtcccagcagggtgctatcaccaagaggatgactgccatcgaggagatggctggcatggatgttctgtgcagtgacaagaccggaaccctcacccttaacaagttgagcgtcgacaagaacctcgttgaagtgttcactaaaggtgttgacaaggaccatgttttgttgctggctgcaagggcatctaggacagaaaaccaagatgccatcgatgctgccatggttggtatgcttgctgatcccaaggaggcaagagccggtatcagggaagtgcacttcttgcccttcaacccagttgacaagaggactgctctaacatacatcgatgccgatggtaactggcaccgtgccagcaagggtgctcctgagcagatcctgaccctgtgcaactgcaaggaggatgtaaagaggaaggtgcatgctgtgattgacaagtatgctgagcgtgggcttcgttctcttgctgttgcaagacaggaagtacctgagaagtcgaaggagtctgctggtggaccatggcaattcgttggtctgctgcccctgtttgatcccccgaggcacgacagtgctgaaactatccggaaggctctccatcttggtgttaatgttaagatgatcactggtgaccagcttgctattggtaaggagactggtaggaggcttggaatgggtacaaacatgtatccttcatccgcattgctcggacaaaacaaggacgcttcacttgaggcacttcccgtggatgagctcattgagaaggctgatggttttgccggagtcttccctgagcacaaatatgagatcgtgaagaggttgcaagagaagaagcacatcgtcggtatgaccggagatggtgtcaatgatgcccctgctcttaagaaggccgacattggtattgctgttgctgatgctacagatgctgcaagaagtgcttccgacattgtgctcactgagccaggtcttagtgtcattatcagcgctgtcctcactagcagatgcatcttccagaggatgaagaactataccatttatgcagtttccatcaccatccgtatagtgcttggatttttgcttattgctctgatctggaaatacgacttctcacccttcatggtccttatcattgccatcctgaatgacggtactatcatgacgatctcgaaggacagagttaagccttctcccttgccagacagctggaagctgaaggaaatcttcgctaccggtattgtgcttggaagctaccttgctctgatgaccgttattttcttctgggccatgcacaagacagactttttcacggacaaattcggtgtcagatcaatcaggaacagtgaacatgagatgatgtctgcactgtacctccaagtcagtattgtgagtcaggccctcatcttcgtcacccgttctcgcagctggtccttcatcgaacgccatggtcttctcttggtcactgcattcatgcttgcacaactggttgcgacattcctcgctgtctatgccaactggggctttgccaggatcaagggcattggctggggctgggctggcgttatctggctttacagcattgtgttctacttccctcttgacatcttcaagttcttcatccgctttgtgctgagtggaagggcctgggacaacctccttgagaacaagattgcattcaccaccaagaaggattacggtagggaggagagggaggcacaatgggccaccgcacaaagaacacttcacggccttcagccaccggaggtcgcctccaacacgctcttcaacgacaagagcagctaccgcgagctctctgagatcgctgagcaagccaagagacgagctgagatcgcgaggctgagagagctgaacactctcaagggccacgtcgaatcggtggtgaagctgaaggggctggacatcgacacgatccagcagaactacacagtgtgaggaaccccctcggcattcaacgagagatcgtcatcagcgctggagcgggaattgcaaacggcgctctggttaaaggaaattttcgatgaatgattggaagaacaaaaaacaaaaaaacatggctgatctgaacagccctagttgtaaagtgctaccaaatatatggtccggtttccctcttctagagaggttttacgttctagtggagtaccgtacgtacgtgttggagtacgacgacgtgttgtgatcgtttttggtctttttttactcttttccccctaactagcggtcttcttgcggaatgcaagatggagaaataatggatgaaaaattttctgccacgttaattctcg

SEQ ID NO: 22918 - DNA, 1336 bp, Oryza sativa
  ref <308>: DATABASE ACCESSION NUMBER: AK073067
  ref <309>: DATABASE ENTRY DATE: 2001-12-06
ggacggcacagcacaatcgtgcgaggctcgcctaaaaaaaaaaggaaagaaaaaagaaaaccgtgcggcgccgctcgtccgcccgccgctagcgccgacgtcacctctctcggccactggtgctccggtgcgagctgctctgcgcggcgccgccacctgaatcggatcggaggggaggagatctcggccgagcagaagcggcggcggcggtgctcgcggaggagggagtagcagcagcagcagcatcgcaaagagggggaggaacagccatggatcccgacgcggtgaagtcgacgctctccaacctggccttcggcaacgtcatggccgccgccgcccgcgactaccagaaggaaattgtagctaaagagaaagcccaagcagcaagtgcaagccatgatgaagttgatcttgacgaattattggatgacccagagcttgagaagttgcatgcggagagaattgctgctctcaagaaagaggtcgagaagcgtgaagtgctaaaaaggcaaggtcatggtgaatatagggagataactgaaggggacttcctaggagaggtcactggcagtgaaaaagtcatctgccatttctaccaccgtgaattttaccgttgcaagatcatggataagcatttgaaggcccttgcaccaatctatttgggaactaaattcatcaagcttgatgctgaaaatgctccgttctttgtcacgaaactgggaatcaaaacattgccctgtgtgatactgttcaagaagggcattgctgctgatcggttaattgggtttcaagacctcggcagcaaagatgatttttcaacaagagcattggaaaatatactcaagatgaaaggtataattgacgaaaagaagaaggatgaggatgatgaagatgatgaaacctatatgtcaatgaacaggagggtcagatcttcaaccgctcaagattctgattctgattgagtatgaagtgttccactcccctgtaacatcaagtttcttttgtactctagttctcaaaatatctctgtgtttgtgtaatatgtattccgaatattatcaacctggttaggaaatgagtgacttgaaaatgtactgcctagttagctgcatttcattcatactggcaagtaggcgtatgtgttatcagttggtatgctttacccataacagtatctacaaaggagtttctactagctcctacgttggtcatcatgctgccaaattactggagtaaactagtgtttcagctagaatgcttgattggtgactagtaccatctgtaaccaattcactgtgaaccattacagttgcagttgatcaattggatttagttc

SEQ ID NO: 22919 - DNA, 1242 bp, Oryza sativa
  ref <308>: DATABASE ACCESSION NUMBER: AK073068
  ref <309>: DATABASE ENTRY DATE: 2001-12-06
aaaaaaaaaaaaaaaaccggtgacgccctcctgctccggcgacccagcgcctcccgccggcgtcggaagcgaagagctccaggtttgggggtattgcacctcctcctcgctcccccccgtccgtctcgaatcgccatggaggtgaagcaggtgaaggtgacggcggcggcggcggaggcggcgacatcgtcgtggtcggagctcccggcggacctcatcggccaagtgctcctgcgcctgccgtccctcgccgaccgcgtccgcctccgcgcggcgtgccgcccatggcgcaccgacgccaagcggcaggcagcgctgcccccgccgctgccgtggttcgccctccgcgacggcggcctggtcgaccaccacggcgctcccgttcgccgctgcgcgcccatcctccgcgaaggcgtcaccgactacctcgccgtcgacaacctcgccttcctcgcgcacaaccgcgccgcctgctgctctctggtaaaccctctctccgcgtcggaggagaccccgctcccccagcttgccaatgctgtgctccgagcgatgaacgattccaagttctacactgtggggaacaccaaaatgccgtatgttaaggtgattctgtcatcgccgccgctcgattcatcgccggatccccttgtgcagcactaatatttgagggatactatgttgccatctctgcttgcaatcttcctcggttcagaatgcaccaaggttgttcgcgctagcaaatgtgtcggcggagttcaagaagattgcatctacttcatgcacaggacttttgacaatccgtcccgagagtactttggtccgtgtgtcgatcctcttggcgactctggtgtgtacaacatgacaaatcggaggatcactccatttcttccggaggctgtgatggaaaagctgtgtctcaaacgccagtttctgacttggttcttccctgctgatgtgtaactgctttgttggcttaaatgattgtttctgttatggaaaaagcagtatggtagattctagctattatgcaaactttagaatccttttgatggttgaacattctctgtgcaaggtatgcaaaatttagatcctcttgatggtaaatgtttccatgctatgcaaaatttgttgtcttgatgtctggttgaagaaatggcttggtgctgacatgtgtgttttgattttatttgattatgcactgtccaagttaatgtatgtttcagtatgaaagaaaattcagtg

SEQ ID NO: 22920 - DNA, 1855 bp, Oryza sativa
  ref <308>: DATABASE ACCESSION NUMBER: AK073069
  ref <309>: DATABASE ENTRY DATE: 2001-12-06
gagttgagtgaggagacacaacggtggaggcagaggcggctcatgagcttgaatctggtcttcctcttccccatcgatcctgcggtgagcctctctgaagacctccaaatccctttcctccttagcagtcaaggctggagctgctgctgttctcttaattgccaagagaaatgctccgagaactgagttgttgtggctgctgcattgtactctcgatgattttgtatctttagttccttagagcatcaccaacaatatctgtatatggttatcctgaaatttggagattttcgttcaaaaacccagtccaacagaatccctagccaagcgcccaatagttcaaaaaccgaatttttcgttctccacaagtagggagaggcgctcgctcccaatctccctctctcgtgccgtcgtgcgaattcccacgcgcacgtgaagtgttctcgacagggggttcatcacgaggttgttcgccgtcgcatcgaggtgtcctacaggtgcccacatctcacgcgcgcgccgctgcctagagctttctcggcgtcgatagttcctgctctggcggcggcagcggcaccatctccactacagccaggcgaacttccatcagcccgagttggtttctcctcaaatcgggattggtctctcgatgatggagatgagcgaaggtatctgctagtgcttgctagttttggcgctgctaatctgctactacgaattctacagttggtactgaataatgttgttggtgccggtggtggtgttgaaagttgatgttggtgttgctgatgatgtgctgttgttgatgctactgacctgctgctagttgtgatctgctgcttgttgcttgccatgctattgctaattgccatgctgttgccgatctgaatttttttttgaacgacgtttgctgatctgagttgacgctactgatctgctattgttgaaaatggtacgatgttgttggttctggttggtaattagggactttgctgatgctgctacttgtagtggttctgcttgattgtttgcaggatcagatttgctgacgtgctactgcgtggagaggggtgaccagggaggtgaccaccaagtggttcccgcgatcaatggtcacacgggcgagcgtgataatctcacaggagggagagcctgaaacagatttcagttggtagttttgtagagggaccactttttagatttagggagtcaattttagccaatctcttggagggctcaatattttaacaccttaaattttatttaagattcccataaaccaaattttgggatactcttggtgatgctcttactgagttattctagtacagtactgaattttaacacctatcattattctgaatttttttatgctacttgtagagaagtaaagagcaatactttctagtatatctgttagtgggttttattatgacccacacaacgggtaatgtactaatgagaatgatttgaactgaggaaattaaatttatattaatatttggtgctatccctaaatttatattaatatttggtgctatcccaatctgcagtccattggaaaagcttgagaggagagcaacatgcaacagacaataatcctgtgggtctggggttcagcacttcaaaactgacgaccattgtgagaatacataggaggtgctaactaagatgattgaaggtgacaatctagaggaggtgctgcaggaattggaggagatgaagaacttcatcaagacaatgcatagcacttatcatgctattaggatttaaaaagaaaattcatataagagttagtttgtaatcaatttgtctatatactgaaatgacaatattacacaatgtgtaaaatgcc

SEQ ID NO: 22921 - DNA, 1524 bp, Oryza sativa
  ref <308>: DATABASE ACCESSION NUMBER: AK073070
  ref <309>: DATABASE ENTRY DATE: 2001-12-06
gaaggagaggcggcggcagcggcggcggaggtggcggcggccgtatgcgggagagagaaagagctcagctcgcatggccatcgcggtgaggtcggctgcggcggtggcgaggcactccctgcgccctccgctggccgcgcccggcagcatccgcggcgcctcgctcctgccgccgcagcgcgcgcggcgagctcctccgcgactggaggtggcgggcaccttcctccgctgttcagcgtggcgccgatgatggactggacggacaaccactaccggacgctcgcgcggctgatctcgaagcacgcgtggctctacacggagatggtggtcgcggagaccatcgtgcatcagaaagataacttggatagatttttagcgtttcctgctgaacagcatcctattgtgttgcaaattggtggaagtaatctggataacttagcgaaggcaactgaactggcaaatgcttattcgtacgatgagatcaacctaaactgtggctgccccagtggcaaagttgctggtcatggttgcttcggtgctcgcttaatgtttgatccagagtttgtaggggatgctatgtcagctattgctgccaattgtaatgtcccagtcagcgttaagtgcagaattggtgttgatgatcgtgactcctacgaagaactttgtgaatttgtagataaggttgtttcaaaatcaccaactaggcatttcattattcatgcccggaaggcattgctaagtggcctcagtcctgcagaaaatcggaacgttcctcctttaaaatatgaatactactttgctttattgcgggacttcccagatgtgcagtttactctaaatggaggtataactactattgatcaagtcactgcatccataagacaaggtgcacatcgagttatggttggccgggctgcatataataatccatggaacatgctggggcatgtggacagtgaagtctatgggatgccgacaagacgctcttctcgtcgccagatccttgagagctaccaggtttatggtgattcaataatgggccaatatggccccagcagaccaaacgtgagacaacttgtcaagccattgttaaatttattccactcggaacctggcaatggcctttggaaacgcaaggctgactctacactgcgtcattgcaagacacttgaatccttcttagaggagactcttgacgcgataccaaactctgtccttgacgcaccaataggtaaggaggcatacatcgaggagggacattttgctgatatggattcattattgccgcctagatattcatcactgaccaacggtagctgtgaaattccagcacttgtaactgcatccacctgaccaccatattttccgtggagatgctaaaatttactgaaaaaaaaagataagcctgcaagattactgttataatacagacccctcctgggttagattagatacgcgggaacactattgattgtaagttgaaacaaacatcatgaaatgtgtatatattctttgggaggaagg

SEQ ID NO: 22922 - DNA, 2002 bp, Oryza sativa
  ref <308>: DATABASE ACCESSION NUMBER: AK073071
  ref <309>: DATABASE ENTRY DATE: 2001-12-06
ggacggttgctccatcgcggcttccggagttccaccgccgcgctcttcccccatcggcggcggcggcggcggcggcggaggaggagaagcgaaggtgagtgtacatgtgttagggtgaactcccagacgcggccgctcaacggagagggaagcgattttctgggggacagggggtttattggtctgcattggatatcaatcaggggtgtagcgtctgcattcattcactcgaacaaagaagagggtttgtgcctgatcaaaattgcgcacaaagaataagaggttcttggttaggttttgtacctgatccacacagatttgttgagtggcaaaaagggccaagaaaatgggtgtggtgacaagggccaagaagaggaagctggaggaggaatccagcaacccacatctggcgcccggaggaggagaagacctgataaaccgcctcccagatgatatcctcatcggcatcatcaccatcctccccggcaaggatgcggcccgcacccaggtgctctcgcggcggtggcgccccctatggcgatccgcgcctctcaatcttgaggccagggtcaatggtggcagaatagctaaggatgtggccaccatccgcagcacgctgcgaacccacaagggtcctgtctgccgattctctgtcagctggacctttgactacaaccactttccggtcgttgattccttgcttggatcgcctaggcttgacaacctacaggagtttgaacttttctatcattataattgctctcgctatcctccagttccgcggtctgtactccgtctctcgcctactctacgtgttctctggattagtggaacatgtgacacgcttctgtttcccatggagactgcttatttcccacaccttatgcagctcaccctatccaatgtgaacatctcagatagcactctccatgctcttctgtcacaatgccctgtcttggagagcttggtgctggctggaacaggggctgtcgtcgtctccggatcagctccttgacccttcggagccttggtgtgtcaaatgatacccgaaaagatgaaaagctggaggaagtcattgttgaggatgccccactcctggaaaggcttaccccacacactatatggcagggtgactttgttattcgggttattcaggcaccgaaactgaagacattgggctatctaagccataaaattaccacacttgagcttggaaccatggttttccagaagatggtacctgttagtctgtccaatgtgatgcgcagtgtgaagattttagcccttgacaccactcctgatctggatgttgttattgacttcataaaatgctttccatgcgtagaaaagctatacattgtggcattcaatcaggggaacttaaagaatatacggcgaaatgtttcacttgagtgctttgatctacatctcaagatggtggaatttataaactatcagggaaatatgttagatttgaacttcatcaggttctttgtgttaaatgctcgagtgctagaatgtatcaagcttgtagcccgtcgtgacaaatgtgaagcaaaatggattgaaaaacaaaatcagaagctacagctttatggcagagcttcacgaagagttacatttgattttcaggctgattatggggtggatagtttggtacacatgaagcacatcagtgatttgactacagatgatccctttgatagatcattttgtagatgccgtgatgaggaaatatattagttcatttgaagctgtttatcagtcatatactttggtaagtatcaagtgcatgtttagtttacatgcctgaaatatcttattttggcatattttgttgcaagaatggaatatgtattttgccaaagaagttgcattgcattgatctattctagtatttttactctttctgtttggtatgacgatgtgttcttcctcacttattgtacacaaaactagactatgttggtcttgatactgtgttattcattccactctgagc

SEQ ID NO: 22923 - DNA, 2997 bp, Oryza sativa
  ref <308>: DATABASE ACCESSION NUMBER: AK073072
  ref <309>: DATABASE ENTRY DATE: 2001-12-06
gaatccgagcccctcgagctctgtctttatctctcttcctcaagaccagctgccgccaccatcggccgatctccctcaccggagcaccactaaccaaatcctctcaccaccagccttgcctcactccggcgaacccatttttccaattttccccttctttttcgtcccatgtcaagccccaccggagctctctctctctctctctctcttgccggttcacacttcacagtcttgctctcgccgttccgaccattcccttaactccctctgccggccactgcccaccctaggtgctccgctccctgaaacaccaccggccgccggcgtcgccgcctcccagccaccagagccctggcgccccttcttccccctcctctcagttgctcggctggaagaagaaagaagaaagaagaagacgagagaaagaaggcgagcaagctaggaatcggacgtccgttatttctccaaatatcggacgccgctcacactctgcctatctatttgcatggcatactgcatgtgtgcatgcctgcagcgagaagtagcggtgcagcgagtggtaggggtgacagaggtttggcacagcatcacatatatgtttgactctacattctctctctcttctttttgtttaatcaaattttaaacaaaattttcaactaaaatatgtatctaatctataatttgattataccattttatttattataattaaatctttataagaagatcttacacgaatatattttgattaagaaaatatatgtgttctagaaaaatcaaccttttgttgcaccattcatagatgcgaatgttttagcccactttataaaatgttccagtgatatgtaacttataaaatttacaaacggtaacaagaacctatgttacatgaaacattatgtcccaaatagtgaaacataaaaaaaagtatgatacagtatatttgtaaacattgattttgttaaaatttatatcactattgaaacgtccacttgtaatttttaaaacataaaaaattatttgctgaaacatatagaaatatagcgtgcaacaataactatataaaatttacagactgcaacaataaccaccattacatgaaacattagatcccaactagagaaacataaaaaatatgatacaacatatttgaaaataatttattttgttgaaatttttaaaaaataaaaaatatatttactgaaacatataaaaagaccacgtgcaacattataaatgaatcagtgaaacaacaataaatacttattgaaacattggaataaaaaaatcatcggaacatagtcatatgagatctcattataaagagttaattgtcacaaatctaatggtataattagttcatagttcggataaatagttcaacagaaaagatcatttaaattttaaattttagatctatccgacttgcatgcatgctggctgcatgcacctaccactctgttggggtgtccgattttttttccttgcccggacatatgatgataagcatttccggaaagaaggagagaaaaagaaaagggaaagaaagttactgacaggtgggccccagcacactactatttcacaatttctagatttaattcagatcctaatctttagaagcccatatcttttgaaatataaaaccaattctagtgaaacttggaccaaaattcttctaaaatctttctctatcttttgaggctatttttactattttctcattttattttattttttcctatttttggacttcattcgaatcccttttgaatttgaattttatatatttaaccctaggtcttgaggatttttctgacacactagataatattagtcaatcttaggacatcgagcaaggcaagttattgttcacctcttgctcatttaagcctatattttataaattatttatttatagcccttctattcaaatattctcttttatatatgcataactcaaccatagaaacccagataatttagctttgcttattttgcttacaatctgattaaaatgctttatacttagattgagacagtacgtaagaatgggttgattttcgggtggctagtactgtctcagtcgccataaatgttaccaagtacttgtgacaaacgaacgtgtatgaccgcagttctcgaattggtacagacctagctattatgttaattaacaaagtggtacctctgtatagtggttcttgtttttaagtccacgagcatgaggcaagtttatgccgaggagggaaaatgttatatttatcgagcaagggtaaatatattgcgcgctatgcgagcaagggaaaattttatttaaaccctgattgcgatgacatagtgtcatacaatcaatcctctctaaagaccccggaaacaccagaactcttcacattgctgataacgtacgttcaaagcacatggggactagagttcatggaataggtgccactgttgttagtaacctaatgacttggtcataactaagctaatgtttattggcaagtcatggattgcgggtaaagcgtatatctactgcaatagaatgattatgaaactatttgaatagccgtgctcacggatttgagcatcgggactcatatggtactttggttagaaacttgaataatttattttataaattcttgctttaattgaccagattgtctactattgctttgtgcaaaagaacccctccatacttataccaatgcatgacatgtttccacaataacttgctgagtattgcaaatactcacccttgctcctattactccttttttcagatttgggtcaagagaaggacccctataactattactatgatgaccccgataacctagaaaatccctagagtttattcattcctagttaaaatatattaaagtttccgttgtataacattaggtctaagtatagttaagtgagtacctactcttgtaaaacccatagtattgtaaaatttaacatatgcaatgaaaattcagttgtatt

SEQ ID NO: 22924 - DNA, 1096 bp, Oryza sativa
  ref <308>: DATABASE ACCESSION NUMBER: AK099322
  ref <309>: DATABASE ENTRY DATE: 2002-08-28
gaaatgctccattagctcccgaaatccaaaccacccccctcctcccctcacgggctcacggcctcacccacccaccaacccatccatccaactccgcggcggcggcggcggcgatgacgacccgatccaacggcgagcaccaccacgggccgccctcgtaccagcagcggcgcccgcactacgggggcgggtacggcggcgggtcggcctcgttccgcggctgctgctgctgcatcttcctgctgctcaccttcctggccctcctcgcgctggccgtcgcgctcgtcgtggtgctggtggtgaagccgcggaagccgcagttcgacctcaaccaggtgtccgtccagtacctcctcgtcaccccgccgtcctccgccgcctccgccgtgggggggaccgtggccgccgcggtccccgccgcggcctacctctccctcaacatcacgctcctcttcaccgccgtgaaccccaacaaggtcggcatccgctacggcgccacggcgttcgacgtcatgtaccacggcgtgccgctcggggtggcggccgtgcccgggttcgagcagccggcgcacagcacccgcctgctccagacccgcgtcatcgtcgaccgcttcaacgtgctccaggccgacgcccaggacctcgtccgcgacgccgcgatcagcgaccgcgtcgacctccgcatcaccggcgacgtcggcgccaagatcctcgtgctcggcttctcctccccaaaagtccaggtgtcggtggattgcgcgatcgccatcagtccgaggaggcagtcactgacatacaagcaatgtggcgtggatggcctaagcgtctagcagcagcaaccaaccaccacaccatcgcagcaacagcagcagcagaagaagaagaaggatgcagaaggcttaatctaatggagatagataagtggatgtgacccgtgtttgtcgattctaatctctctttctctatctaatcctgggttccgattcctgtacgtggggggtaaattttgagctctctcacctcaccctagaggaggaggtcgccgctgatttttgtgaattactgtccggtaattatcactatcgcccaattcgcc

SEQ ID NO: 22925 - DNA, 917 bp, Oryza sativa
  ref <308>: DATABASE ACCESSION NUMBER: AK073073
  ref <309>: DATABASE ENTRY DATE: 2001-12-06
ggctttgcgtctctctctctctctctctctccgcctttcccccttccttcgccgtctctccctctttccctctctcgattcccaaccgcaacgccgagcggcgtcgccatggacgacgaagccggggagtgagctcgccggcggcggagcatgatgggtttgggccgtgcgtggtctggccaacctacacgcgtgatccatggtcgctctgcccggatctgtaccggtggcgaggagagtttgcttcaaagtcctgtgtaatattttttcttccctactatgtccccttcggcgctgctgcctccacagatcaggccgagtctgatggcttccttcgtcggctggatgatgataggtgatacggtggatctgattcttcttgcaccggagatggctccagatctcgttcatcggctggcatctggtggtttcgttcatcggctggaggaggaaaggtgagatctttatggcttagtcggctggagatggaaagatcccatcttgttggcttcccttcgtgcctgtcctgttatttccccctctcccttctggtttttcatcaataagactgcacacattgtcaggcatgagcggccaaatatatgatcagtataaagacttctttgtcaggcatgataagcatataagccttcacacattgtcaggcatgaacaggcaaatattagattagtaaatagggcttcacacattgtctggcacgaacagatcagtatatgaatgcaagattagtaccattgttacataacttggagaaatgaatttcttctgttctacatctcctactcctgaatttccagctgcaagtttttacatgttataagtctgcaagtgccataattccaaactttctaaaatccaaatgttccagtctgctttagttacttttatcatgttct

SEQ ID NO: 22926 - DNA, 2624 bp, Oryza sativa
  ref <308>: DATABASE ACCESSION NUMBER: AK073074
  ref <309>: DATABASE ENTRY DATE: 2001-12-06
gccctccgcctcctcgccgccagcccgccacctgcgaactcccccactcccggctgcccgccgccgcgatgcagatcctccggcggaaacttctggaagcttcccgccgcctccccttctacttcccctccgcgcccaccgcccactaccgcggccacgcccatgccgtcgccaccctcgccgccgtcctgcgggaccagaccgccggctccctcgccgccgccccgtgggccgccatccagcgccgcggcgcgaagatgctcggctccgaagtgaagcttggaaacgtaatacagagaagaggtgtgtgtgtttacatgtagttatgttttatttttgccttcaagtattgtggattactacttatcccatccctttggtcaaccttcaaggtcgcatttatcaggtgataaaagcacaacattcacatcaaggtagaggaggagccactatacaggtggaattgagggatgttgacactggcaacaaaataactgaaagatttcgtaccgatgaggctcttgagagtatgaacatctttaaaaccaagacatatatgccttctatttttcagactaattttccttttacgatcatatcatatattacctgttcttgagatattctagcgtgattttaaacgttaatctctttatatttctatctacagatctaactatcaaagcaatacattcttctgaagtgttattacattacattcatgtgtcaagctaattttaggcagtcacagctcatttagagtgttaaacatataaattgtaatcatgctttttttgataggcattacatattttttctccaaaacattcaggagtttttgttgaggagaagtcattcacatatctttatcaggaaggagacaatgtgactcttatgtagcctgaaacgtttgagcaacttgaggtctcaaaggaactgtttggcaaaactgcagcatatctgaaagatgaaatgaaggtgactctgcagtactttgatggccgacctatgtctgcatcagtgcctccacgcgtgacttgcacggttgttgaagcacaacctcattcaaaagggataactgcacagcctcagtgagtctcacatgatcattttcgtttctatttttactgtaatgtttgtttctaatgttcttatgacttttgggttaactgttgctcttactaccttttacgactttgatactagattgttttgatatgctgatgctggtcactgttcacagtttgtggatcaaaatagccattttgcgaaattcagagataaggctagtattatatactaaaaggtttttctttgctattcacagtttatgcctgatggattaggtcattagggtgttaagacttaatttggcatggcttgaggcctattgtttatgagctgcgcaatgaatactgatatcatggggtaggcctttggcattttagtaggcctttttatataaccgacgagctatttgctgttacatgtatatgtatagctttgtagttaccttctagcattgatccattagattgcaaggtccatttgtccaatacttgtgagctgtctcattaagggacgggcttaggtccatttgtccaatacttgtgagctgtctcattaagggacgggctttgaaggaggcttggcttagctcagctcatttaacaactgagccaagctggttcacagcttgtaaggctcaggcttgtttccccagcactatctgtgacatgcgaggctgcggaactgtatctgtcattctatgcactacacacaaagactttttttttttgctattatgagcttcataatctttcgtcaccagatgtttgaggctatgttatgcgggtaactaagctcattttgcactgcagatataaaagggtattgctggataatggtcttacagtgcttgtaagttgatgcgccatttcctagattttattgacctatccttttatataaatgttgaagtacatctaagaatggttgctgtatgtgctatcactttgatatccttttatttgtggcaatgtgtggaaaatggcatttgcagcatacatatgtctctgattgagttactgaaaatcaactctgttttgttctacatctgacttactcaaaagttgggatacacgtgccactactgaaatcaaccttgcttttgccgtgaaataatttactggttacatatagattagtactgaaaattagaaaacattgatgagtctgctgctttgaaatagttcttacttcctgttgcccttctgcgattatcttaggtaccaccctttgtagaagccggtgagaaaattgttgttagtactgcagatgattcatatatgacgagggcctgagggcaatacctggtagatggtgttattactccaaatttggttctcagcttgcattttcttgggtaaattttcaaccgccttgttgtagaaagacatcacctagcttcattaataattcagtattcaacaagttctgttctcatagattcttcttttcaattagtcattttgagttttgtttcccaccataaacgcaatcccaccatggtaccccatgaaatttttgtgggaactctgatatatatgctattggtattgagt

SEQ ID NO: 22927 - DNA, 1124 bp, Oryza sativa
  ref <308>: DATABASE ACCESSION NUMBER: AK073075
  ref <309>: DATABASE ENTRY DATE: 2001-12-06
ggcacaaacaaagccacccaaaaaagttggggagaggagagaccgagatcgatccgcacccaccgcgacaaacgctctcccctcccctcccctccccctccgcccttcgctcccatccgctccgccccctcgccgcgcagcgccggcggcgagaaggttgagttcgtggggggtgtgaccgaacgatggcgtaccgggcggacgacgactacgactacctcttcaaggtggtgctcatcggggactccggggtcgggaagtcgaacctgctgtcccgcttcacgcgcaacgagttcagcctcgagtccaagtccaccatcggcgtcgagttcgccacccgcagcatccacgtcgacgacaaggtcgtcaaggcccagatctgggacaccgccgggcaagaaagatatcgagctattacaagcgcatactatcgcggagcagtaggggcactcgttgtctatgatgtcacgcgacatgtcacctttgagaatgtggagaggtggatgagggagctcaaggatcacacggacgccaacatcgtgatcatgcttgtggggaacaaggcagatttgcgccaccttagggctgtctcgactgaggatgcgaaagcatttgctgagaaagagaacactttcttcatggagacgtcggccctggagtcaatgaatgtggagaatgccttcactgaagtgctcacccagatatatcatgtagtgagcaagaaggctcttgacatcggcgatgacccagctgcaccaccaaaggggcagaccatcaatgttggtggcaaagatgatgtctctgcagtgaaaaagtctgcttgttgttcatcagcgtagatcgaaaggacttgacaaacatggagatacccgaggtggttgatactatgcagtaggacacaggatgttattgcattcatagacctcatctgtattcatgtgttactaagtgtctccttcgttttgccatttgaaacattaattcattcaggacataatcttgccggtatagtttagggatatgaaattgtgaggccgtcagattttcatacaggccatttgtttgcttctattatggtttgaccgcttgatttatttatatgttgctgtctatttttcagtagc

SEQ ID NO: 22928 - DNA, 2066 bp, Oryza sativa
  ref <308>: DATABASE ACCESSION NUMBER: AK073076
  ref <309>: DATABASE ENTRY DATE: 2001-12-06
ggaagcggttgcccaactctgtgctccgccgtgttgccgccgccgccatgggctcctgcctctcctccgacctgcctccccgcgccggcgccggcgcgggagcgtcacccgggtggccgcagcggtggcggaggaggaggcagcggggggtggagcggggcggggctgtttccggcggcggcggcggcgtcttctccatcggcgtcggcggcaagaagctgcaccacggcggcggaggaggaggggagatgacggaggaggagctcgcgaaggtcgaggggagggtgtgcgtcaacggcgcgagcgcggcggcgtgcctgcacacgcagcaggggcggaagggcaccaaccaggacgccatggtcgtgtgggagaactttaatacaagtgatagtgtcttctgtggtgtgtttgatggtcatggtccatatggtcattttgttgccaagaaggtcagagattctcttcctgtcaaaatacgcacactatggaaaaccagtgccaacgaggacactagttcccaccaaaatggaagcatttctggaagtgttaattcagaagagtcacctgttgttgatgatgaatggggtgaatatgctgatgacagcgagaagcttcctgagatgtttcttccacttaagcagtcttattttaaggctttcaaattgatggacaaggaactcaaaatgcaccctacagttgattgcttttgcagtggatcaacagcagtcacgttagtaaaacagggattggatcttgtggttgggaaccttggggactcgagagcaataatggggacacgagatgctgccaataatctaactgctgtacaactcacagttgatttgaagcctaaccttccaagggaagctgcgaggatccagcagtgtaggggaagagtttttgctcttcaggatgaaccagaagttgccagagtatggttgccaaataatgactctcctggattggcaatggcaagagcttttggagacttctgccttaaagattatggtttaatatctgttccacagatatcctatcgtcgtcttactgaaaaggatgagttcataatactggccactgatggggtttgggacgtcctctcaaacaaggaggctgttgacatagtagccgcagctccatctcgtgcaacggctgccagggctcttgtcgactgtgctgtcagatcatggagattgaagttcccaacatccaagagcgatgactgcgctgttgtgtgcctattcttagaccatgcaaagtcacctgacttgattcaagagaacgagagcgaggaagaaactacagaggatgttgcaatcccagacaccgttgctaaggttgaccaagacattgcacaaggagatgcacatatctccagtgaagagcaaatcaccgagccagcattgcagcactcctacacattaagggatgttgatgagattgtaccggtagaggagcctccagtctcaaaggaacctgaaagatgtggatctgcccgcagccttgctgattgtatatccacaaacgaggaggaggaatggtcagcactcgaaggtgtgacgcgggtcaattccctcttgaaccttcccagaatactttcaggcgagaagagatcaaccagctggaggaagcggcgatgaacgattcccccgcttaagtcaggctgagagcgcatttcagtcgaaaccggcaatttcagccaggagtgtgcaaatctcttcggtccctgggattttattagagccgatttttaggtttcttcacccagattgtttcataccctgtacactccagatcgatctgttcttccttttgttctcttgtcaggaggtgtttcatgcttgggcttctttacttgtttttttgtgtataagaaagtttttgttctgtgagaagccttctgtaaaatcatgtaatacctcctcccttctcctctcttggtggatggatgttcagttcacctgctgtttctatgctggaacaagaactcaattctatatgtattagctcatgaattttcagctgcaagtataaaagcttcctaattttgcaccttgtctgcc

SEQ ID NO: 22929 - DNA, 2141 bp, Oryza sativa
  ref <308>: DATABASE ACCESSION NUMBER: AK099323
  ref <309>: DATABASE ENTRY DATE: 2002-08-28
gataaaaaacaaaaaagaaaaaaaatagaaacacctcgtcggcgtttagaaaggcggttggggttcggcggcggcggcggaggccggtgagtatccgcggccgcgcgaaccagtcgcctgagctcccagaagcatccggcgctgcggctcctccgtgatttgtgtatttttccccttgaatcccgcgccgtcgcggccgccgtgtgctcttgccgccggcgagaaggggggaaaacgcccgcggagatgtcggtcctcatcgtgaccagcgtgggggacatcgaggtggacctccacaccgacatgtgccccctcaccaccaagaacttcctcaagctctgcaagatgaagtattacaatgggtgcctgttccacaaggtggagaaggatttcttggcacaaactggggacccaactggaacaggagctggaggcgattctgtatacaagttcctttatggtgatcaagctcgattttttgatgatgagatccgaccagaccttaggcattcaaaaaagggaactattgctatggcgagtgctggtgaaaattgcaatgcctcgcagttctatatcaccttgcgggatgacgtagactaccttgatgataaacacacagtgttcggcatggttgctgaaggctttgacacgctgacaaagattagtgaaacatatgttgatgataaagggagaccatttaaggacatcaggattaaacatacgtatgtcttggatgatccttttgacgatcctcctcagctcagtgaacttattcctgagaattctcctgtagggaaaccacaggatgagattgcagaagagcgcttagaggatagctgggtccctatggatgaaatggtggctcctgaagaacttgaggagatgatccgctccaaagaagcacatacaaatgctgtgattcttgagagcgtgggagatattccagatgctgagatcaaaccaccagacaacgttttatttgtttgtaaactcaacccagtaacacaagatgaagatttatatacaattttttctcgttttggaactgtgacatcagctgaaataatccgtgattacaagactggtgatagcttatgctatgcttttattgaatttgagacaaaggaggcttgtgagcgggcattcttcaagatggacaattgtttgattgatgatcgaagaatacatgttgactttagtcaaagtgtttcaaaactgtggggtcagttcagacaaagcaaaagaaatgcaaataaagatggatgcttcaagtgtggcgcccctgatcacatagccaaagactgtgaccagggcactgagcagaaaaacaaaggcccaagttatgtcctgaaagatgaaaacactcagcgtggtggaaataaccgtcgaagctatgatcttgtctttgatgaagatggtgaaaattatactgatcagcaagatcctggaagtactggccgaagaaagattcaaagaacagatgatcgcaaatcagggctgccacctcggggtgaccatgacaggattagccgggagagaactcacagtgatgagaatggtagagaaggtggtaaagaaggtgatagggaccgagggattcgtaagcacgaggactaccaccgttacaataaatctggtgaacggagctctagtagatacgatgatcgtggctacagcaagcacgagagcaggggcaaatatagggatggcaatgatgattacagacgacaaccgggaggtggcagtcgatatggcagggataagtatgaaggtgaacggcgctacagagaagatgatggccatggaaggagtgaccgtcacaagagagatgaaagtgataacaggaaaagaagcccagatactggtaagcatagaagagaagacggtggtcaccgtgagacaagcaagcacagggaaaggaggcagagagatgatagataggtcactgcatcaccgtcagttttgtcttgcctgtttctcatcatacattgaattttgtcattcttaatccaaagatagcaccagaacactaaacatgtagcttagaatctgcgtgtagacattatgagagctccactggctacagattgttgtaacttgtagaccttttcttttctatacatgctcatggacgttgttct

SEQ ID NO: 22930 - DNA, 2388 bp, Oryza sativa
  ref <308>: DATABASE ACCESSION NUMBER: AK073077
  ref <309>: DATABASE ENTRY DATE: 2001-12-06
aaaagtccgcaacgcgagaaacgcaggcagcaaagcaagcgaacccaaagctggcctcgcactcacactgacagccttgctctcctcctccccctatatctctcctccctccctcgccgcctcctccccaatcctccaaaccctaatcccccacctcactctctctcgatctcgtgctctcctcctttcgcgagcgcgttctttggaggggagatggcggaggagccacagccagaggccgcgcccgccgcggtggcggcgacgaccgaggtggcggtggcggagaaggcgcccgtggaggcggagaaggagaagaaggtggaggaggagacgccggcggtggaggccgaggcgaaggaggagaagaaggatgaggcggcggcggcggcggcggcgggaggtgatgaggccggggcgatagaggggaccggatcgttcaaggaggagagcaacctggtggcggacttgcctgacccggagaagaaggcgctcgatgagttcaagcagctgatcgccgccgccctcgccgcctgtgagttcaatctgcctccccctccgccgcctcccaaggcgaaggttgaagccgccgttgaggagaccaaggcggaggagaccaaggccgaggaggaacccaaggctgaggagccggccaaggaggaggagcccaaggccgaggtggcggcggcggcggcggcgccgccggaggcaggaaccgaggagccgaaggcggaggcgtcgtccgaagaggccaagaccgaggagccgaaggccgaggcggcggccgacgagccggccaaggaggagtccaaagctgaggcggcgccggctgaggaagccaagccggccgagccggagccggaggagaagaccgtcgtggtcaccgaggaagaggcggccaccaagacggtggaagcgatcgaggaaaccgtcgtgcccgctgctgctgcgcctgctgccgccgccacggaggaagccgcggcgccggaaccggaggtgcaggcggcggcggcgcctgagcccgtgttgatctggggcgtgcccctggtaggcgacgacgagcgcaccgacacggtgctcctcaagttcctgcgcgcgcgcgagttcaaggtgaaggaggccatggcgatgctcaggtcggccgtgctgtggcgcaagcgcttcggcatcgagtccctcctcgacgccgacctcgccctgccggagctcgacagcgtggtgttctaccgcggcgccgaccgcgagggccaccccgtgtgctacaacgtctacggcgaattccaggacaaggacctgtacgagaaggcattcggcgacgaggagaagcgggagcgcttcctcaagtggcgcatccagctgctggagcgcggcatcctgtcgcagctcgacttctcgcccagtggcatctgctccatggttcaggtcacagacctcaagaactcgccacctatgctcggcaagcaccgcgccgtcacccgccaggccgttgctctgctccaggacaactaccccgagttcatcgccaagaaggtgttcatcaatgtgccatggtggtatctcgctgccaacaaaatgatgagcccgttcctcacgcagcgtaccaagagcaagttcatttttgccagcccagccaaatcagctgagaccctcttcagatatatcgcaccagagcaagtccctgtccaattcggaggtctcttcaaggaagatgatcctgagttcaccacctcagacgccgttaccgagctcactatcaaaccttcatcgaaagaaaccgttgagattcctgtcactgagaattccacgattggatgggagctccgggtgcttggatgggaggtgagctacggagcagagttcactcctgatgccgagggtggatacacagtcatcgtgcagaaaacgaggaaggtgcctgcaaatgaggaaccaatcatgaaaggcagcttcaaggttggcgagccaggaaagattgtgctaacgatcaacaaccctgcatcaaagaagaagaagctcctctacagatccaaggtcaagagcaccagtgagtccgtttgaggttgcagctgcctgatcaccagattcaccacaatggcagctgaactcattccctgatggaagagaaaccttttggttttggttctttaatttattggttttgctgttttggttcacattttgtatttgtttaattaaaaaccaaagtgagcttgtttttgtgatagttggaaggagagggttgatatgatataatgacatcgtgatggtttgttgagggcagaggacaaaaattgtggaaggactgaagaatatctgctgctttgtatatctgtctgtacattgcatctctggattctcatggacatgttaaatttagaagtacttgtcatc

SEQ ID NO: 22931 - DNA, 786 bp, Oryza sativa
  ref <308>: DATABASE ACCESSION NUMBER: AK099324
  ref <309>: DATABASE ENTRY DATE: 2002-08-28
gtcacccgcaccccggcgcgccgctcgccgcgcgcccgctctccgcgctcgcctccttcttcctcgcccggccctcctccaccgccgccgcgcctcctcctcggcacgtcaccctctcgtgctcgcggccgcactgcaaccacaaccagtgggccgccagccggtgccgcgggacggcgggccggcggcggctgcaggtcgtcgtggcgatgtcctcgtcggcgccgccgccgcctccgggatccgtgcagaagtcggaggaggagtgggaggccatcctctcgccggagcagttccgcatcctccgcctcaagggcacggagtatcctggaacaggtgaatatgacaagctcttcgctgagggtgtttatgaatgtgctggatgcgggactccattgtacaagtcatctactaaattcaactcaggttgtggttggccagcattctatgaaggatttcccggagccatcgcacgaacgcctgatcctgatggcaggcgaatagagatcacctgtgcggcttgcggaggacatttaggacatgtcttcaaaggggaggggttcaacacgcctacagatgagcggcattgtgttaacagtatctcactcaagttcattccagcctcagaagatagtaagctttgagcatggaagtataagcccgcaatagaacagtctgcgcagtcatagtaaacctgtgattattaaaaaagtatcggatttttcagaaagcaatttatactctgcggtttgtcaataatgcgaaataccaagtctgatgattgtc

SEQ ID NO: 22932 - DNA, 1844 bp, Oryza sativa
  ref <308>: DATABASE ACCESSION NUMBER: AK073078
  ref <309>: DATABASE ENTRY DATE: 2001-12-06
gtagaagagaaagagagagagaaaaaaaaagaaacaaaacccgaagcccccatctcttcctcttcccaccttcgcattcgcctccgccttcgccttcgcacgcagtagtagtagtccacgatgatggccaccgcggggtccaagtcgccggggcgcgcgctgaggaggatcgccggcgcggccgtcgccgccgtgctgctccgcggctcgttcagcgcatccaaatgcaagacggaggcgaggatggcagcggcgaggatgaagctgctgcggaaccggcgggaggcgcaggtgcaccagatgcggcgcgacatcgccgcgctcctccgcgaccgccaggaggacaccgcccggatcagggttgagcatgtcattagagaacagaacattatggcagcgaatgagatcattgatcttttctgtgagctgattgttacacgccttcccatcattgcaaagcagaaggaatgcccagcagacttgaaagaaggtatctgcagtttgatttttgccgccccaaggtgctcagaactccctgaactcggtcggatccgcgatctttttgaaaagaagtatggcaaagattttgtttctgctgcagttgacctacggccagatgcttgtgttaataaccttctaattgagaagctatcagttaagaagccatctgggcaaactaagctgaagattctcaaggagattgcgaaggagcatcagatcgattgggatatgaccgagactgagcaggagcttctcaaaccttctgaagagctgattcaaggaccaaacacatttgtggaagctaccaactttccagtgaaaactactatgtcagcagcacatgctgtgcaaataaatccatctaattacagttctggatacgctgatgaatatgatgacgagcgtacgatgcaattcaaagatgctgcatcagctgctcgagcagctgcagaatctgccaatagagcagcttctgctgccaaggcggcagctgatcttgtcaataagaagacccattcatctgatgaggttgaggaccgtagaacttcttttcatgaatctagtcattccagcaagagacagtcaatgagcaactctagtagatcgtccaggaaggaagatatagtggcctttgatgaatcaaacccccaagggaggaggacgtcccgcacagggagctccattgaatcaaaccacgtagaagataaagaagacactgaacaagtggaattgagtgccaggaggatgcggaaaaggaacatccgttctactcggaaggtacactcagagataaagtttgatgattcagagggattgaattcagagacagaggacgaaagtgatacggagatacaatccattgaaaggccagctcctagaagtgaaccttatccaggaagtcgtcactccgaagatgaagagaaagaaaaccatgaattacctgatttgccgaaggcaaaccttagttctcgtgttcatccaaatatgcctctggactacgaaactcttactgcacgcttcgaggcgctcaaatctgggaagctcccatagtgtgcaattgaagatgtagcatataatgctaaatttctgctacttctacaaagaaccatatgatataccaaatactagtaggttacttccagtactctagggccttttattttggtgaactgaaagatttgctgtttcaaactgctcctacattcattttattcaagtatatatatgtgttatctgaagtgagaatttgaggcacctactgtaatctgcagagtgctggaaggtactcctgcactatttgtaaattgatttacatccgaagaaaacattagccccagtttctg

SEQ ID NO: 22933 - DNA, 2144 bp, Oryza sativa
  ref <308>: DATABASE ACCESSION NUMBER: AK073079
  ref <309>: DATABASE ENTRY DATE: 2001-12-06
gggagtgggtaaagccctggctttcctcccccaacaactcggccaaattcaaagcaaagccgccattactgctcctcttccattccactggggacgtacgagctccgcgcatcccttccattccattactgaccttggctgctgcggctgcagtgcagagggggtttggtggtgcggttgatttgagcaataaattctctaggggggagggaggtatcggtcatggctgccgctgctgcaaggaggggctcatcgctgctctctcgctgcctgctgtccaggcccgccgccgccgcctcgcctgctgtcccctctgcgctccgcagggcagatgggacacaaggattgttgccgggaatccttcagaggttcagcactgcagcagtagcagaggagcccatatcacccccagtccaagtgaactacactcagctcctcattgatggaaaattcgttgattcagcatctggtaaaactttcccaactctggaccctcgtaccggggagctgattgcccatgtggctgaaggcgatgcggaggatattaaccgtgcggttcatgcggcccgcaaggctttcgatgaagggccatggccaaagatgactgcctatgagagatcccggattctgttgcggtttgctgacttgattgagaagcacaacgatgaaattgctgcattggagacatgggacaacggcaagccgtatgcgcaagctgccaacattgaagtgccaatggtggcacggctgatgcggtactatgctggttgggctgacaagatccatgggcttgtcgtgccggctgacggcccacaccatgtacaggtgctgcacgagcccattggtgtcgcaggtcagatcatcccatggaactttccgcttctgatgtttgcgtggaaagttggccctgctttggcttgtggaaacactgttgtgctcaagacggctgagcaaactcctctgtctgctctatttgcttctaagctgttgcatgaggctggactcccagacggtgttgttaacgtggtatctggttttggacctactgctggtgctgctcttgctagtcacatggatgtcgataagattgcattcactggatcgaccgatactggaaaagtcgtccttgagttggctgcaaggagcaaccttaagtcagtgacactggagctaggaggcaagtctcctttcatcatcatggatgatgctgatgttgaccatgctgttgagcttgcgcattttgcactgttctttaaccagggacaatgttgctgtgctgggtctcgtacatttgtgcatgagcgtatctatgatgagttcgtggagaaggccaaggctcgtgctctcaagcgtgtggttggtgatccattcaagaatggtgttgaacagggccctcagattgatgacgagcaattcaacaagatcttgcgctacatcaagtatggtgttgacagtggagccaaccttgtgactggtggcgacagattaggtgacaaaggttactacatccagccaacaattttctcggatgtacaggataacatgaggattgctcaagaagagatatttggccctgtgcagtccattctgaagttcaatgatctgaacgaggtcatcaagagggcaaatgcaagccagtacgggctggctgctggggtcttcaccaacaacctgaacacggccaacaccctgacccgcgcgctcagggtcgggaccgtgtgggtgaactgcttcgacgtcttcgacgccgcgatcccgttcggcggatacaagcagagcggcatcgggagggagaagggcatcgacagcctgaagaactacctgcaggtcaaggccgtcgtcacgccgatcaagaacgccgcgtggttgtaaacacatagatgtttggacatttcagaactggggaagaaataggtataatcttatggacggatgcgaaaatggcgataaattatggcgataagattatgatgatgatgatgaagaagaagaagaggaggaggaagaacagctgaaataagcttgtcctagcatggggctggcattgtctctaataaaccttgtggttggtgctcatgttactgatggagtatattgtagaagcagatttatgttcattatgaaatatatatcgcttgtttggg

SEQ ID NO: 22934 - DNA, 835 bp, Oryza sativa
  ref <308>: DATABASE ACCESSION NUMBER: AK073080
  ref <309>: DATABASE ENTRY DATE: 2001-12-06
gatctcctcccacactcagctagcttgttagctcacaatggcaggcactaaactcgtagctcttggtttcattgttctcttgagcattggattagccaatgcttcaagagtggcaagatactcaagtgcccaaggatcaggcagtggtagtggagaggggtcaggatctgtgaatggtgggggatccgggggcggaagtggtacgggatctggtcagagtggttataatggtgcacacgcaagtggtggaggcagagggggcggcggtggcggtagccagtatggtggatcagggtctggtagtgggtcaggctcgggctcaggctctagtcagtatagttcaaattattatggctctggtggtgaatattctagtgcaggcggtagcggtggcggtggtggcggaggacaaggcaatggaaattatgggtcaactggacaaggatctggtagcggtactggttctggctatagtgacgctaattctaactactggcgtggaccaagttatgcaaatgcaaatgctggtggctatggtaatggtaatggctatggacaaaatggtggtagcggtggcggcggaggttcagggagtggctatggtgatgccaatccttaatttcctttatactggaaattatgaaaacttgaagcccaacctagtccgtgccatgtcaatgttgtgaaatttgtttttcttttttttttcacacctgttttatgcatcacgtttcaagaaataaagggcttcatgtaaagtttctgccaatgcagtaacatgtaacaaattaggagagatattgcataactgtggtgaaaattatattatttaacc

SEQ ID NO: 22935 - DNA, 973 bp, Oryza sativa
  ref <308>: DATABASE ACCESSION NUMBER: AK073081
  ref <309>: DATABASE ENTRY DATE: 2001-12-06
gacatttctattttgcacatttgcaggcaggcgccgggttgatgagtccatcttgatttgccgctgcggcggcggcggttgcgagttgggacgaacaggccaggcggactgcagggcataggcatggccgcccgccccccggacccggagctcatcgagatgaaaaatgatggtatcttgcatttgttgtctggatagttcaccatggcttgtaaaacaccccaggcctccttggcaagatcagggcgctcctttctgtcataccggcaacatctcagtgctaggattgccaactttttactatactcaggtggccattcccctgcagaagcatcaactacctgttgcagcatttcattgttcagggctgcctctacctcactaggaaggcctagtggactcttgccagttagcaatcttagcagcactactccaaatgaatagacatcatactgtgctgtgagctcccctgaagcaatgtatcctggatccatgtatcccaatgtgcctttaatttggtttgtttggtggtaaggtgtgatggtggtgtttgtcagattcaacgaacgagatatcccaaagtcccctagcttgcctacaaagttgtctccaaggagaatattatcaggcttcagatcaccatgggcaatgccttttggtttgttggaatgaaggaagataagtgctgtgcagatgtcagcagcaattttgatcctcattctccatggaagtggatctgtttggtgtttacattgcaaacggtcctctaggctcccgtttggcaagaactcatagaccaaagctttggcctccctgcacactccaatcagggtcacaaggtttggatgtctcatccttcccagaatctctacctgtaatgtattggcaaaatcacatatttatataaagttttttactctctttctcatgtaaatatatagccataagttagaaggattggtgaaaaataccc

SEQ ID NO: 22936 - DNA, 3558 bp, Oryza sativa
  ref <308>: DATABASE ACCESSION NUMBER: AK073082
  ref <309>: DATABASE ENTRY DATE: 2001-12-06
gtcctgttttgttctgattctcgacgatttcttggcccacgcatagggatttccccctctagaaccagcgcaggggaaggaaagatgggtccggtcgatcggcgcatgcgtcgtgcctttgctgccgccggcgcaggggatggggggatggcgctcagatctggaacgagcgcgcctccatccgctcgtccggtcgatcggcgcgtgccgttgtttccgccggcgcaatgatccccttggagcaatggaggtggtaggcggagggaaggatgggtgtggtgttcagaaccaagcaccggcggggagatgcggctgcataaggtgctgcgggtgtcgtggcgtaggaaaacggagaagaaccggaagatcaatgtgctacactgcgaagagttgagtccctgcgaaggtagaggtgttgcgggcgtatttcctttcgcgcagatggaaaaagctaagccgggtaaggtaacatcaagcacttgttcttcctttcagtttgaaagaaatgttgcaattgactggagcttggaaaatagagatagtagttttgaatacatggctgataattgattggaaataacctagatggaaaaacagtgttgcataatataaaagtttagatagatacacttagatggaaatacagtgtttcaaagatgccactaattggcttcaaagcttcattgtaacttcagatgtggacgaattttctgaatgtagacgtctgatgtcgtcgtggacagcaagcactatatttagagtagtgttgattaggttggcggcgacctttagtctgaaaacttcattcggttcctgaagtcaagagggagtgaaaaatatgtgtaagagatgtgtaacactaataaaatgtgagtcatagtagcttagtacttttcggagcagtaccatatttaagaagtcgctcgttaattcctttccatcccaggtctccatgaacttcaaagcatttaacccacatgaccaactaaccatagaaattgagaatgtcagttagcaataattgttagttaaaagcgtattgatgatatttcacctgtctttctgttgaggtacactctttgggcacagtggccattttgcaacatttgtgtcagtccaggatgttggaacaggacgttctttcaccgtgtaatcaatatacttggccacgccattgatctgttatgtgttaaaattacttagaacatatgttattatagcatataggaactgttattgcgatggagcttactaggtttttaatatcttcgcttgcattgtaccattgtggctgcatctgcattgagtcaagaatttgaatttcttggcatcttgcattaataacaattacgtaccaatgcgatttgtccctatttattggtaggaagaccttcaggaaatagcataagttaaagtagtttttggaaaggcataaaaataaatgatgacctgatttagtaccatatcatggaccatgtatctttgggcaaacgttgatctggattcaatgtatcttttacttggctttcctcttgtcttaccaacggcacaccaaacctggacttgcgtttctttctcaattagagcagaaccgtactgcctggtgtggccttgttgattgtcgtttatgagttctgtgtaagcttcaatgacctgttgcaaaataaaaaaaaatatagaaatgtatgggaaaggtagaaattattataacagataaaaataatcttaacgaggtgttcaaccattttgattttgatgaactatcaagcggcgttacaagtggcagtagatgtgcacgtgatagctctatgtcttgtatactggcaagaaccttagttttttctgactggaggatgtaattgattgttattttatctttcaatgtcaaaccaaggttcgctgatcctgaattggatatttgaattttgggctcgaatgtttttttgttatgtttgtagaatatgaaatcactttgagtttgatatgatggcttgactgtccttccgaactgacctcttagtctttctgcaatggttttgttattgtcatctgtctcagttgcttcatccccagtgattatgaacggagcttcctctgttccattaccatcaatctctttggctaaatttgtctcatcctagagaagaagacataaaaaattgaatgctcgaacaatagttttgtaaattagttcagtacaactcaccgtattatcttcatgcatctcttcagtatggtaggcatcctttcattgcctaaatcgaatgttcgattatcctcgactttgttgacatcagcttcttgtttgggtctaaatgcatcggcttgtatagggactgacttcctttttttggacagggtgtttttgatgtcctgtaagagttgcagttcatttagctatatattatgaacaaaagctatatattatgcagttcatttagccagtgctgctttatgcttacctcgatggctagtgtgtttttccggcatatttgttccacggaaagtaacttgtttgtcaatttgttctccatgaactgaatggacctttctaactgttggaacatgtcaacaagtactttgatgtgacctgaatgctacaagaaagaagcagttggttatgacattatgtgtaggaagtaattttttgttgataatgtgcactcaaaaaaactgagctaagaatgtattacctctacggctgcaatttttgctggagatttgattttcgtttcatggtcatcctcacactgatttagctctctgtcatcatctttttccttctcattgtcagtaccgtacggcatgtgatcattagcatatgcaaaagattgttgtgcatctatttcttcgttgtcagaaagtatgggatagtcattttctagttcctcaaaggcagtgtcttcctcaattctctgttcattgatataaaagtcattttctctgtcttcaaagccatgcgtgtcatgctcatacctctgttcatcattcaaaaagtctgggtgttctatctgttcaataatctgtataacatatggcagcaattagcatatgatctactactgcaactagtatttctgtatgtgcagtaacttaccaatccccccccttcagctgttctgcagtcatatttgtttctcaacctgacattggctgcattccagaatgaaatcaggggaatctgacgtccattgtaattgatgttgcagaactcagagtttactgccttcacatgttcccaataccaacactgaatgcaatgtaaaaaataagcattttgagtacaataagaaaataaattcagcatgtgataggtttgtatagtacctgcagtaatggaagattgccttcaatattttttagtcctcccttgaattccttcaagcaatcgcagagatgttcccttgttaagcttgcccaattgatagtgtgaatttttgttacatctctcagtaaaggtagatagctggagctgacatgggcctttgtagtaggacaaaggatgtacccaatggtgaaaaacatcatccttctaatgaaatcttcctcgttgattcc

SEQ ID NO: 22937 - DNA, 1621 bp, Oryza sativa
  ref <308>: DATABASE ACCESSION NUMBER: AK073083
  ref <309>: DATABASE ENTRY DATE: 2001-12-06
gaacgccattccccaccaccacctgtcgacggcgtacgactactatctcggtgctttgttgctagcttcttccagctagccatgggtgtgaagtggaaaggtggtggcgcgctcctcctgctcgccgccgggctgctcctggtggccgtggcggcggcggcggcggaggaggagggtcggcgggacccgaaggaggagctccggtggtgcaagaagcagtgccggtgggaggccgggcaggaccagcggcagctgagggagtgcgaggagcagtgtctccagcggcagcaggaggacgacgacgacgacgagaacacgcacggcggcggcggcaaggagtgccgccgcgagtgccgtggctaccgcgacgagccgtggcggaagcaggagtgcatgaggcagtgcgagtggcgccgccacgagcagcaccaccacggcggcggccatggcggatccaggccggactgccgtgagcagtgcgagcaccagcaggactggtgggagaagcagcgctgcctcatggactgccgccaccggcgacaggaggtcgacgccgacgacgacaaccaccatggcagagacccctgctacaagcagtgccgccaccaccacgaccagtggaagaagcaacaatgcatggaggagtgcagataccaccagcgccaacaagacgccgccgtcgacgtcgacgaggaagacgacaaccacggcggcgatcgctgccgcaagcagtgccagcaccaccatgaccagtggaagaagcagcagtgcatccaagattgcaggtaccatcaccgccaagaagacgacgtcgtcgaggaagaagacggccatggcgatcagcaatgccgcaagcagtgccaacaccaccatgaccaatggaagaagcaacaatgcatgcaagactgcaggcagtggcggcgccaggaggaggaagaggccgccgtcgacgaggaagaagaccacaactacggcggcgagagagagcaacactgccgcaagcgatgccagcaccaccacgaccaatggaagaggcagcaatgcatgcaggactgcaggtacaggcgccaggaggaagacgacgtcgtcgacgatgacaaccaccacggcggcggcggcggccatggcggcgaccactgccggaggcaatgccagcaccaccgcgagtggcacgagaggcagcggtgcatgcgagactgccacgagcgccgccatggatgggccacggtggccgccgaagccatcctccaggcagtgtaattaaaggtaacgtaattaagatactgcttcgccgggtgtagggtatagctagctagggtttccatggtcgatcgacctagagctagtgctgtgctgctcgcgcgcgtgcacacacgaatgtgtacgcgagggaggggagaggaataaattgagcaggagatagatggccatggctctctccgataggagagcttctatatatctgggggagacttggaagctatatatactagctagtgtctactatgtctatgtatccggttgttgcagtacacttgtgcttggaagaggtgtatgtatgagataaataaagtggcgttcgcgaaaaagaagagataaataaagtgagagccctttgagt

SEQ ID NO: 22938 - DNA, 1943 bp, Oryza sativa
  ref <308>: DATABASE ACCESSION NUMBER: AK073084
  ref <309>: DATABASE ENTRY DATE: 2001-12-06
gggaggattcccccccacttcccctctcctccatccatggcgagcgccgaggcggaatgcgccgcggcggcggtgggcggcggtgggagggcggagatcgacacgtcggcgccgttcgagtcggtgcgggaggccgtcgaccgcttcggcggcagcgccgcctggagctcccacctcatcaggcgcatgttcgcccctcccaaccccaaggagcaatctgaagaaagtaaacagcctgtcgatatcaaagagcaggctgcacaactagaacatgatcttatcatcaaagaaaaggagacacttgatgtgttaaaggaattggaatctaccaagaaaatcatagcagacttaaaacagagaatacagaaggaatcaaatgaaacatctccttcagctgtgaagtctgatgaccaaagtgaaattcctattacagaatctgaagagcagaaacctgaaaatgttaacattgatatggatatggaaggcctagatgaacatccacaaccgctttcaggttcagtactgttagaacttgagcaggcaaaagcaaacctaaacagaactacaggtgacctggctgcagtacgagctgcaattgaattactgcacaatagcatagcaaaggagaaacttttgcttgagagaagccgggaaaagctttcttccaatactgcactggcttcttctttggaagatgagctggatcagacaacacaaaagttgcaaaccctgaaagatctgcaggcaagacgtgaagatccctctgacattttcattgagatcaagaaaatggcatctgaggtacagcagctcaggggcatggctaatgcttcaaagtctgaggctatgatgctggctgcagaaatcgagcagacgaaggctagcattggcacagcagagatcagatgcattgcagccaagaagatggaagaagcagctagagcagcagaagcacttgcacttgctgagatcaaagctctgttgagcagtgaaagttcttctgaatgtggcagctctgtttgtgatggagtgactctttcagcggaagaatatttcacactgtgctcgaaggctcaagaggctgatgaaaactcgaggaaggaagtagaagaggccatgctgcaggtagatgtagctaacagctcagagactgactcagttaaaaagttagatgatgcccgattagaggttgaggaatgcaagagggcactgcaagaggccctgaagagggtggaagctgcaaaccgtgggaaacttgcagttgatgagattcttcgcagatggaaatctgagaatgggcacaagaggcgctccatcggtggctctccaaagtttaagaatgcagctcaacgtcgtaaagattcacacagcatggatatcatctctgatgcttcaactaattcctgcaagcaaacgttgtcaattgggcagatactaagcatgaagctgatggggcctgaagggtatgacaaaaccatctgggacgacaaaacgagcgagatgccgaacgtttcccttggtcagattctgaacaggggtagagttttgtccagagaagagacggctgttcgcaagagggtctcagggaagaggaagaaattcgcattgactgggctctcagttctattggcgaagcaagccaagaacaagaagaagagggaatccctctgatctgctacaagagatcgatcttagttgtactttagctgtatttatgtagctggctagctgcagttcaatctgccgttcagacaagtagctaattgtcggacccctttcaatcctatgtagtacaacgttctgtttaggttagtatgatgtattatgctgcagttcgctctgctgattagggactatagagtcaagttttagttgtggtacttgtatcatttcgtaatctaaatcgatggatttaattatccatcatttccactgtgcctctt

SEQ ID NO: 22939 - DNA, 2181 bp, Oryza sativa
  ref <308>: DATABASE ACCESSION NUMBER: AK073085
  ref <309>: DATABASE ENTRY DATE: 2001-12-06
gctctctctcccgattccgacttcctcctgatccacctccaaagcccacgccacccgcaccgcaccacccaaagcggggggaaacccaaaccggcgaaaccctagatctctctccgctccgcctcgtcgctcccccaaaccctagatccccgccatgcaccaccccagggcgcgctacccgcccggctacacctccggcggcggcggcggaggcggaggcggaggaggaggcggccgtggtaatggcggcggcggatttggaggaggtggcggcggcggcggcgggaaccacggctactacggccggggtccgcagccgcagccgcagcagcagcactaccaccaccaggcgcagcagctgcatcagcatcagcagcagcagcagcacgcgcagaggaacagctcctcgcagcagcagcagtggctgcggcgggaccaggccacggcggcggctgcgtccggggaggtcgcggcgaggacggcggcgcagctggaagccgtcgactcgagctctgaagattggaaggcacaattgaatttgccagctccagatacacgttataggacagaggatgtcactgcaacgaaaggcaacgagtttgaggattactttttgaaacgtgaactactaatgggaatatatgagaaaggattcgaaaggccatcacctattcaggaagaaagcattccaatagctctgactggtagcgatattcttgcaagagctaaaaacggcactggcaagactgccgcattttgcattcccgcacttgaaaaaattgatccagagaaaaatgccatacaagttgttatattggtaccaacacgggaactagctctgcagacctcacaagtttgtaaagagcttgggaagtatctgaatattcaagttatggttagtactggtggaaccagcttaaaggatgacattatgcgtttgtatcaacctgttcatttacttgttgggacacctggtcggatactagatctaactaggaagggcatctgtgtgctgaaggattgttcaatgctcgtaatggatgaggcagacaaactgttagctccagagtttcagccttccatagagcaactcatccatttccttccagctaatcgtcaactattgatgttttcagcaacctttccagtaaccgttaaggatttcaaagagaaatacctacctaggccttatgttattaatctcatggatgaactaacactaaagggaattacacaatactatgctttcgtggaagaaagacagaaagttcactgtctgaatacacttttctcgaagcttcaaataaaccagtccattatattctgtaactctgttaacagagttgagctactggctaagaaaatcaccgagcttggctattcatgcttctacattcatgcaaaaatgttgcaagaccatcgaaaccgagtgtttcatgattttcgcaatggtgcttgcagaaaccttgtgtgcacagatctgtttacaagaggaattgacatccaagctgtgaatgttgtcattaattttgacttccctaagacttctgaaacatacttgcatagggttggtcgttcagggagatttggacaccttggtttggcggtgaacttaatcacttatgaggaccgtttcaacttgtatcggattgagcaagaacttgggacagaaataaaaacgatacccccacaaatcgatctggcagtgtattgtcaatgatcaatgtaacattgtaacggtgtttttatcatttacttattgttaggcaagtacatcagatgtacatagcacctcatcagggttttatttggtgccttgatgacacatctaagcttatattccattagtgaggaagtgttttctgtcggcactgatactaatcatgttaactgtggacttgcatttttggctgcttgaagacgctgcttgaagacccagggctgcggccaaactgaacctttttcttgctccttgtatctgctcaatatttgctttatattcatttgctagcgacagttttggttgtgttatattaggatactgctgcttgagtctgttaccgtcactgtggttccttaattttcctttcctttttcccttttcttctcatgtttggattggactagtagaagtatttccctcactgtattcctcgtgtcaatttctattatccttggtgt

SEQ ID NO: 22940 - DNA, 963 bp, Oryza sativa
  ref <308>: DATABASE ACCESSION NUMBER: AK073086
  ref <309>: DATABASE ENTRY DATE: 2001-12-06
gagagaccactcgtcttcttccttccgctcgctcgctcgctcgctgacgtgtacgcttcgcggcggaggcggcggcggcggcttccgatggcggaggcggcgggggcggcggtggcgccggcgaagctgggtctgtactcgtactggcggagctcgtgctcgcaccgcgtccgcatcgccctcaacctcaaaggattggagtacgagtacaaggcggtgaacctgctcaagggggagcactctgatccagaattcatgaaggttaatcctatgaagttcgtcccggcattggtcgatggagatgctgtaattggtgattcttacgcgatagcattatatttggaggacaagtaccctgagcaccctcttttacctcaagaccttaaaatgaaggccttgaatctccagatagcaagcattgtatgctctggaattcaacctcttcacaatcttaccgtactggtaagaactgatttgcattcaatttcttactgccataggttcattgagaagaaggttggtacaggggagagcatcccatggactcaacaacagatcgacagaggtttcgcagctgctgagaacctagtaaaaggctgtgctgggaagtatgcaacaggagatgaagtccgattggcagacgtattcctcgcacctcagatttatgcagcagtgactcgttttcaaattaacatgttaaattatcccactctcgcgaggctccatgaggagtatatgaaacatccagcatttcaagcagcactcccagacagacaaccagatgccccttcctctacctagaaaatacagtgtatgttcatctgaaaaatagattaaaagttgtacccaacttatcattggaagctgtaacaataagcacagaacttgttgcgaaaattgaaaataggtgtatatgtttttcaaagcttctgtccaaataaatgacccttaaaattgctagcc

SEQ ID NO: 22941 - DNA, 1945 bp, Oryza sativa
  ref <308>: DATABASE ACCESSION NUMBER: AK073087
  ref <309>: DATABASE ENTRY DATE: 2001-12-06
gacgcaaaggcgcgcgcacacctgtccccgcctcacccccaccgcctgattccatcccttcccggcggcgcctccgccggagccccaccggccgccgccggccactgcccccgagctcgtccggacttcggacgcgggatctccccgtcgtctcccgcgatttggtgccatctgatggaattagaggcgtgaaactgtatatttcttgttgagtctgaagataaggaggatctgatgggctctgttgtaagttctgcaaacattaatgcccgatctatggaccggcatgaaaaatctggatttggttctaataagagggtcaagatctccacatatgagtgcgattcgtttcagaggataattccaactcttcccgatgaactctcgtttcaaattctagccaggttaccacggttgtattacctaaagttgaagttggtcagccaagcttggaaggcggcaatcaccagcagtgagctttcccagctgagaagagagcttggcttaactgaagagtggttgtatgtactgaccaaacttgagccaaacaaactcgattgttatgctcttgatccattgttccgcaaatggcaaaggttgccaccgatgccatcttttgtcagtgaggaggaatccactgggaggacgcagtcttcttggttccagacgtggaatgttgtgggctcaagtataaggattgctgactttataaagggatggcttcgtcgccgatatggtttggaccagatgccattttgtggttgctccgttggagttgctgatggttgcttgtatgtctttggaggattttccagagctgttgccctcaactgtgtatttagatataacccttgcctcaatgtgtggcaggaagtgagcccgatgatatcaggtcgagctttttctaaggcagcattactgcagagtaagctatatgttgtcggtggagttagcaggggtcggaatggcttgcttcctctacggtcaggtgaagtttttgatcccaaaactggtatatggagtgagttgcctgaaatgcctttcatgaaagcacaggtattaccaacagctttcttggctgatgttctgaagcctatcgccactggaatggcgtcctacaagggaaagctgtatgttcctcaaagtttgtactcatggccattcttttttgacattggaggtgaaatttatgacccggaattgaattcttgggaaacaatggcagatggtcttggtgatggatggccagcaaggcaggcaggcacaaaattaggtattgtggtgaatgaggaactttatacgttggagccttctagctccttggacagtggccagataaaaaggtatgattctgaacaagacacctggaaaactattgtaccacaggttcctgttcatgatttcaccgatgcagaggctccttttttttacttgctggccttcatggaaaggtccacgttattacaaaagaggcaaacaacaatcttcaagttatgcaagctgtattgcagaataacattgagaacagtccatctgaagaaaacatcatatggaacatactggcttcaaagaactttgggtctgctgagcttgttagttgtcaagttcttgatgtttaaatgtgggataaattcagttactgatgttggcatcccgtggttcaactatctttttgactgattggatctataatttgacaaggggagagatagatatatagattacaggtatttagatttgtataagttgattcttgcccaaacactgttatataggccataagtatacatgattactgtatagttagtgttcttgtacacatggagagatttccagctgttgaaccttatccattctgctatcaactgtacaccatgaatttgttgtgatccttttgatcttctctgcatgattctgatgcctcttgtcccacatatttggtggc

SEQ ID NO: 22942 - DNA, 2500 bp, Oryza sativa
  ref <308>: DATABASE ACCESSION NUMBER: AK073088
  ref <309>: DATABASE ENTRY DATE: 2001-12-06
gatcggcgccagctttagcttcttcctcatcacgcatgctcagcaacaagctactcgttgcagaccacaagagagagacgccctcctgtccttcaagcaaggcatcaccaacgacagtgtgggcctcctctcctcatggcggagaggccatggcgattgctgctcatgggcaggcatcacctgtagcagcaagactggccatgtcgtcaagctcgatgtcaacagcttccttactgatgattcacctatggttggccagataagtccatctttgctgtctctcaactacttgcagtacctcgacctcagctcaaacttgctggcagggcctaacggcagtgtcccagagttcctaggttcaatgaacagcttgatacatcttgacctctcctacatccccttctccggtacactgccacccctgcttagcaaccttaccaacttggaatatctcgacctctccttcacatcattttctggtacacttcctcctcagctgggcaacctttcaaatttacggtatcttgatgttagtgagatgcagaatgtagtgtattcgactgacctctcatggttaagtcgtctgcatttgttagagtatattgacatgagcaatactattctcagcaaaataacgaatttgcctgccgtgctcaacaagatcccaactctaaagcatgtcctccttttgaattgttcaattccaagtgcaaaccaatccatcacacacctaaaccttacccagcttgaggagcttgatctctctctcaactactttggccatccaatttcatcatgctggttttggaaagtaacaagcatcaagtcgctccgcctagatgaaacctatctccatggtcccttccctgacgagctaggcgaaatggtgtcgctccaacacctagatttttgtttcaatggaaatgcagccacaatgactgtggacttgaacaacttatgtgacctggaaagcatataccttgacaagagtctctcatccgggaacataacagatttgatggataagttacagtgttccagcaaattgtatagcttgagttctataagcaataatatgataggaatgcttccaagtagtatagagcacttcaccagcttaaatcacattgatcttactaacaacagtgtcagtggagtcatgccacgaggatttcagaacatggctaatttggagtacctacatctcagttccaatcgactcagtggccagatgcccttgttaccgacaagcctcaagatattgcatgcccaaatgaacttcttgtcagggcatctcccgttggaatttagagccccaaatcttgaaaacctaattatatcctccaattacattactggccaagttcctggatctatttgtgagtcggaaaacatgaaacacttggatttgtcaaacaatttatttgagggagaagtacctcactgtcgtcgtatgcgaaacttacgtttcctgctcttaagtaacaacagcttctctggaaagtttccccaatggatccaaagcttctcttcactggttttcctagatctttcatggaacatgttctatggttcgttaccaaggtggattggagacttggtgaccttgcgtattctgcacctgggtcataacatgttcaatggagatattccagtcaacatcacacatcttacacaacttcaatacctgaatttagcagacaataatatatcaggtttaattcctctatctttgtcacattttaatgaaatgactctaaaagctgtgggtgattcaatctcgaccctggcatttgatgagtcatttgatacattttccctcggaatgaagcatcaaatactcaagtatggatcacatggggtcgttgatatggttggaatcgacttatcgctcaatcgcataaccggtggaattccagaggaaataacatctctcgatagattgtctaatttaaatttatcatggaatcgcttgagtgggaaaattccggagaacattgggtctatgaaatcaatagaatcactcgacctctcaaggaactacctttgtggtgaggtcccatcaagcttgacagatcttacatatttaagctacctggacctatcgtacaacaatcttactggaaaagttccatccggacgccaacttgacaccttgtacttagagaatccatccatgtacaatggaaacattggtctttgtggccctcctcttcaaaggaattgttcaagcaatggttatgcacaagggcatggtgatcacaaaggacaagagaaggattccaattcaatgttcttttactatggtcttgcatcaggttttgttgttggttattgggttgtgttttgtgctctgctattccacaagtcatggagagtcacttatttctgccttgtggacaaggtatatgacaagttatatgtgtatgtggtcattacttggaccagatggatgaacactacaaattaattaagcacagtaaggaaatgtgttactagc

SEQ ID NO: 22943 - DNA, 3640 bp, Oryza sativa
  ref <308>: DATABASE ACCESSION NUMBER: AK073089
  ref <309>: DATABASE ENTRY DATE: 2001-12-06
gatttgtttattaatcccattcccttcccatggatgagtcgatccattcccaaatccaagccaaaagcttcctctctctctctccctcgtcgtcgtcgtccctgcgccgcggggcggggcgggccattggccggcggcgccgactgcgcccggccgtatctccccaccgcattcccgcggctaccctgcctatacgacacgacactgctagctcagaacatgaattgagcgtcaatcttccagtcttgaaagagaagctctaatgcacccatcccatttctctgggtaaaacagctatatattgtttgaagcaaaacattttcaatgggttcagataagcagagtggtagcccattattgggaaccctcaagatgaagagcgtcaggacgatcctgacacacacatatccatatcctcatgaacactcaaggcatatcatgactgcagtcataattgcatgcctctttttcatctcgtctgacaatatgcataccctcatacataaactggacaacaatatcaagtggtggtccatgtatgtttgcctaatcggtttcttctatttcttctcttctccctttctcggaagaactattcagccgagttactcgaatttcaaccgatggtatgtcgcttggatttgcttcgcttcactatatcatcttcccagcttccaatcaatgggagttgatatgcgcatgaacctttcactttttttgacgatatatttctcttctgtccttttcatcatcgcctttcatatagtttttattggtctctggtacattggactggttgctcgcatggcaggaacaagacctggaatttggaccatattccagaactgtactgtaatcagtattgcttgctgtgtattctacagtcactgtgggaatcttgctgtgcacaaaagtaaatctttcagtaggaattctgatccaaatttgcttgcttttcttgagaatgaaaagggaaccacctggatatcaaattttctccgtatgaatgagttaaaagatcagatatgttcatcttggtttgctccggttggatctgctagtgattatcctcttctatccaaatgggttatctatggggagctagtttgcagtggatcctgtgctggcccttcagatgaaatatctcctctgtactcattgtgggctacatttgttggcctttatattgctaactttgttgtggagagatcaactggatgggctcttacacacccatcaactgtattggaggaagagaagctgaagagacaaatgaaaccagatttcctggacatggtaccttggtattcagggacatcagctgatttattcaagactgcatttgatcttatggtctctgtaactctttttgttgggcgatttgatatgcgcatgatgcaagctgcaatgaaaagaacaacagatgaaactcagaatgatgaccttttgtatgactacttcaatgaaagagaagacctttggtttgactttgtcgcagacactggtgatggaggaaattcatcatatacagttgcccgattgctagctcaaccatccattcagactgtaattggtggctccatgcatactcttccacgtggaaatctgcttcttattggcggagaccttgcatacccaaacccatcgtcatttacatatgagatgcgcttctttagtccttatgagtatgccctgcaacctccaccttggtatagagctgaacatatagctttggacaagcctgaggttcctcttggtatatcaaagatgaaagattatgacggaccacagtgtttcataattcctgggaatcatgactggtttgatgggctgcacacttttatgagatatgtatgtcacaaaagttggttaggtggatggtttctgcctcagaagaagagttattttgcattgcggcttccccagggttggtgggtatttggacttgatctagctcttcatggtgacattgatgtataccaattcaagttctttgcagagctttgccgaaacaagattggagagaatgactctgtgattgtgatgacacatgagcccaactggcttcttgattggtattggaaggagactactggcaagaatgtttcacatttaatccaggactacttgaatggaagatgcaaacttcgtttggccggggatttacaccattttatgaggcattcagctaatcagatagacaaccctacttctgtgcaacacttgcttgtcaatggatgcggtggtgcatttttgcacccaacacatgttttcaaaaactttgagcagttctctggagctacttatgagtgcaaggctgcgtatccatccttcgatgactccagcgggattgcgctgggtaatatactaaagttccgcaagaagaattggcagtttgacacaattggtggttttatctacttcatactggtattctcaatgttcccacagtgtaatcttggtcacatcttaaatgaagaaacttggtcagggcgtctgggaagcttctcaaatacaatatggagtgctttgctctatatttttgaacactcttatgtctcttcagtaggaagtctaactttattactggcatcatattcatttgtaccatccaagctctcacggagaaaaagagctattataggtggtctacatgttttggcccatctcactgcagccctgcttttaatgttgctgttggagttgggaattgaaatttgtattcggaatcatttattggcaacatcaggttatcacacactatacgattggtatcggtcaatggaaagtgagcatttccctgatccaaccggtcttcgtgctcgcttggagcaatggacacttggactgtacccagcatgcataaaatacctaatgtcagcctttgacgttcctgaggtcatggctgtgacaagaattaatatctgcaagaatgggatgatgtctctttctcggagtgttctgatgatgtactacacttctgtgtttatctacttctggattttctcaactccagttgtctccctcatatttggtagttacctatatatctgcatcaactggttccacatacactttgatgaagccttctcttcgttgcgtattgcaaactacaaatcattcacaagattccacattaagaaggatggtaacctggaaatattcacgcttgcagtagacaaggtcccaaaggattggaaattggatcccaagtgggaggcagaggaaaggaggcctcatcagctcagccatcaccggaagcaccccagcaagtggaggtcatcctcttccccagaccctgtcacgtcggtacgggttgtcgaccatttcaccatttcaagaacaagaacatcagatcccaacacctcttgttgattagacacatggtgggtcgaggaatggacaactactagttgcggtgcgcgttgctatctttatagatccagctgacttagtctgccgaactgacaagtgagcctgcattttagagaaatggagttttacagagtatatatagaattagtaacaaagaaatgattattagttcagcaaaattgtaaggcctgattggttgtattgcttgaagtagactattgagattgcttcagctagcatggtaaataaaatcaatcttgttatc

SEQ ID NO: 22944 - DNA, 2594 bp, Oryza sativa
  ref <308>: DATABASE ACCESSION NUMBER: AK073090
  ref <309>: DATABASE ENTRY DATE: 2001-12-06
gatcttcttcccgcgagaggaaaccctcgtcgtcgcctcctcccccaatcccctccctagctcttgccccgatcgtcgatcctcgcctcgccggagaatccccgagccgcgccgccccttccttccttccttcctcctcgcccgcgccgtacccaggtatgtcgggccgatcgtcgatcgatccatgcccccgccgttcctcccgaagacctaaccctaacgcttccgcatagatcatccccgagctcagatcccgctcctccactcctcatcgatcggtcatggccgccgcaccagcaccagcgctagcccccgacgccgccgcactccagctgcaggtacgatctaactacgactctcccctccctgaatcgacttcgtttttgcgagatgatgagactaattttttgagttttatagtgcagaatccggacaaaatttacaaagtgctaccgagatcctgtctgtctcgatccctggtgtttggatttggttgttcctcgcgattgcattttggttccttgttcatatatgcgtatatgtgtgctcggaaattcgtggatatgcatatgctgtaaggtgttgcaccccttggtgcttggatcagaatgtcgtgcatatgcatatatgcatatgcatatgctggaaggtgttggtccccttggtgcttggatcaggatgtggtttggttattcgccgcagttggttttcttgttaatatgtattcggaattcgtggctatatcggaaggtgttgtcgccggatctgtggttcactcagaatgaattggtgattttgaggtacaatctgtcatttggccatgaattcgtggcattatcagaaggtttgcatttgttttcgttacacatttgatggtaatagttgttgtacggttctgtggcaaaatctattcaaggtagttagattaaatttattcaaggtttgccatgatgttgagtacttcacacggaaggtaatttctgaagatattcattttcctttccctgaacaaccaacaaaaactgctagtcactaaagaacagtggttaaaatatttacatatatttatttccccaaaggttaggctgattaataggaaattaccacatgatagatctataacatgatatggtaacaacatatgagtcctttttataatttatttactcttctttctcctcaaaaggttctttgacgcttggtaatattgtctttaattattgctacctgctttgaaccaagtgtgcaaaaactctgcggttgcatttgaaatgttctagatgtgttaattgtggcacacaagtcatcttactgctggttgccttttggttatttggctacaccattcaatgatggtgttttgtggcaacgtttagatccagaaatcatctgcaggtttgaccatcgagctatgcttgcccaggtgttccttgcaacatcaaaattaattcaactgtgtaccaccatctattgtgcttgccagaatagttggcctgttctcgtgtgagacttattcttgcagcgtgatcatgtccatcaatatgccatgcaaaaaactatgtcattgctgtacttgctatccataccttggtgattttaagatttaagtcgctaatgattcatagaactttcctcaagtatgctgactattggcaaatagtggccatccctataccaacacgttgccatctgggatcactcccagctttatctgctgaaattgataaattcttgtagttctttggctttgaaaactcaatctatcactctcatctgccattgcctttttttttttctcatgataatcttgcttttcctcctgacgaaatcaaatagcttctggcagtggtcttaggttgctatctgcttaaccacctcaaaagctactgcttttatttatattgtgattttggtcagagttccaatagccaataggcattctgtcacctttgtcccaaggaacctctttacgtgtccacaatcaattgagttccatgtatacaaccaaagccattataactgttgcactaataaagaagatattggtaatcaattctaagatttttcttggaactaaagctcaagtaagaaagcatttcacatccagagttaaactgtagctacctatacattctagatttctagtgaaactatagctactgatatattctaactccatcagcacattttttggctcgaatgtgtaatttagcttctttgtcattcaccatttgactcacttcataaggaaataaatcttaacctctgattaatgaatgaccattttcgcatacttaatactaaccttcagatgctacttgttttttcttactattaagttgattcaatatgccttcctgctgctaggttcaccgcacattatattgttcagattccattattttagaagtccttttgcaaaaacaaataaacgaatatagaaacattaatgaaatatagaattgttgttcaaaaataagcaaaactttatctttttgaatattaagatattaaatgtgaaaatccatactctggctgattttttttgtgacacttgataggcaagaaaaattaaaagaaatgcacttgatgcc

SEQ ID NO: 22945 - DNA, 2712 bp, Oryza sativa
  ref <308>: DATABASE ACCESSION NUMBER: AK073091
  ref <309>: DATABASE ENTRY DATE: 2001-12-06
gtttgacgccactctttcccccctcccgagcacagagcagagagagagagagagagagagagcgctgcggaggagaccgatgccgccgccgccgccggagccggagccggagccggtggtgatccacgcgtggtcggcgccgcgctccctcagcaccagcctcatgtactccttcgcccagagggatgacatggaggtgctcgacgagccgctctacgctaatttcctgcgcgtcaccggcgtcgacaggccgtatcgcgaggagcttctgtctaacatgtgcaggatcctgatggtaacaaagttatcagtgaagtcatttttgggccagggaagagaaaatatcgttactgcaagcacattgcaaagcagcgcctccctaacctgtcaagtgacctgatgaaaaagggaaaacatttcatattgatacgcaaccctctaaatatcctgccatcatttgacaaagtcgtcccaccatcattctttgagctcggcatagcggaacttgtctcgatatacagtgaattgtgtgagcttgggagccctccgcctgtgatagatgcagacgatctacaacgggatcctgaggctgtcttgagtggactatgtgaggatctaggtattccttatcagccacaaatgctccaatgggaagctggccccaaggactttgatggtatttgggctccctggtggtataggagtgtacacaagtctactggtttctctatgccacgccgttatcctttgacttttccatttgctttgtatgatctacttgaacaaagcttgccattttacaacgtgctgaaacgccatgtaagcaaaaccataggatccccgcaaccaacattacctgatcctcctcttccagtacctgaaaataaaaaaattcttgtttgggttggagatgagcttttgccccgtgatagtgcaaaggtttcagtatttgattcagttgtacaaggaggggatgctgtgtgggaaggattacgtatatacgatgggaaagtgttcaaacttgatgaacacttggataggttgtttgattctgcaaaagctatggccttcagcaatgtgcctagtcgtgattggattaaggatgccatctttaggactctcaatgcaaatggaatgttcaataatgctcatataaggcttacactcacccgtgggaagaaggtgacatctggaatgagtccagctttcaacctctatggatgcaccttgatagtgcttgcagagtggaaaccaccagtttatgataactcgcatggaataaagttggtaactgccaccacgcggcgtaattctccgaatagcatagattcaaagatacatcacaacaatcttatcaacaatattctggcgaagatagagggtaaccttgcacaggctgaggatgccatcatgctagataaagatggttttgtatcagaaacaaatgcaacaaacatttttatggttaagaagggcattgtgttgacacctcatgctgagtactgccttccaggcattacgcgtgcaactgtaagtctaatcaggttccagttggaaaactatcagcagagccaatctaaaaaattggatacctccattggaatgacatggaagagaatttattagaacttttctgtctaattgcagccactactttttcaaggagcgttattgcaatacacatttcatttatacactattttgacttgtacaactatatttgtactggaaattattgtgaaaatcagagaaatttttgtttttactgacaaagaggcccgataaatattgaatatgaggaaccacttctgttactccctctttttataatatatcttgaggttcttgaatcacgggcattttataaattatcttcaagagaaaatgtaaaatatctgatagtggctttgtaccatgagatctaccgagttactttgtttggcactgatagtgccttttttttttcttttcgtttcctatgaatgcaaaattgcaagtaccacaatatgtttacctaagcctatagttatatcatgtagatattttttactggcttgctgcatcatgacttcaagaaatatgttgtatctacttacgtgcaaggaagacgaaatttgtggtttcagttagcatgaagcactatgtgattatcaagttgaacaaacttcttttctggaaaaatcagaagagtcatatttgctgatgctaatatttttcatgttggatgaaattaacaggtcatggatcttgtggtaaaagagagcctggtgttacatgaacgtcgcattagtttatcagaatttcatgctgcagacgaggtatggactactggaacgatgggtgaaatcacaccggtcgtaatgattgatggtcgtgaaattggtgacgggaaaataggtccggtcacaagacaaatccagaatgcatacaaagtcataactgcaggttctggagtaacaatacccagaaatgccgatgaataacaggtgtatatgccttcctggtctacctgccggaaccagtataaagcaaacttgattgttagagaaataaatgtgaaaagatgcatcactaaattgtcgtgccaattggaaaatgtgtatgaagcatgtactctgtttttcttagactcagtaggggttttcgccaaaattgcagatttcatttgtggacgattatgaattcaataaacatgtccaatgctagtagccc

SEQ ID NO: 22946 - DNA, 2322 bp, Oryza sativa
  ref <308>: DATABASE ACCESSION NUMBER: AK073092
  ref <309>: DATABASE ENTRY DATE: 2001-12-06
gaatctcctcctcctctccctctctcttttttagttcgccgccgaactctccaaaacccccacgaaaaccctcgcttcccaccgactccatgtggcgcctccggtcgcggacggcggcggcggcggccgtcattgccgcgtccgcggcgtcgctcgccgacgtcgcctacgcggacagcggctactccttcttccgccgcagctcccccccgcctccacctcccgccgccgccgccgccgccgctgcttcggaggactctggcacggaggtggccgtcgaggtggattccagcgggttcgaccccgagagcctggagcgggcggccaggttgctgcggaagctcaactcgtcgaaatacgcgaagcagctgtttgagctgatgcgcatgcaggagaagacccggcttgcggagctggaggccgagaaggttcagtacatcatccaacaacacctcagggacattgagaggcaacagaaagaaggtgaaaaattcagagagagtttgcagcagcaagctcaagcagaggcacaaaagttacgttatgacgatgaattagctaggaaaagaatgcagacggagcgtgaagcacaaaggcgacaggatgcagaacttgtgaagatgcaagaggcagctgcccttaggaaagaagaagttaggcgtaccacagaaaagaagattttagaaaaaatgctagaggatgagaaagaaaaggctctcttaaagaaacaaaatatccaagctaacgctgaagcaaaaggtgaagcccttactcgtgaagcaaaggctttagaagactacaacagaaagatgctcctggaacgtataaatggcgacaaagagaagtggattgctgcaataaatactactttttcacacattgaaggtgggtttaggatgctgttgactgacaggagtaaattattgatgggtgttggaggagttactgcgctcgctgctggaatttatactaccagggaaggagcaaaagttacatggggttacattaatagaatcttgggtcaaccttcactgatccgtgaatcatctatgccaaagtttccactttcaaggtttaaggctctcaaatctacttcagcatctctgtcaggaggtgcaggctttgagaatgttattcttcatccttcactgaaacggaggattgaacatcttgcacgagctacagcaaatacaaagtcgcacgatgcaccatttcgcaacatgctgttctatggtccccctggaactgggaaaacattagttgctagggagatggcacgcaaatctggcttggattatgccatgatgacgggaggagatgttgcacccttaggatcagaagctgttaccaaaatacatcaaatttttgactgggctaagaagtcaaggaagggcatgctgcttttcattgatgaggctgatgcgttcttgtgcgagcgcaacagcacccacatgagcgaagctcagcggagtgctctcaatgcactactatttcgaactggagaccagtcgagggatattgtccttgtccttgcaacaaaccgacctagtgatcttgatgctgctattacggaccgcattgatgaagttattgagttccctttacctggggaggaggagaggttccagctgctcaggttatacttaaaccactatatgctcaaggaagatggaaaaaactcgttttgggactcactgctgaaaaagcaacggcagaagatacaagttaaggacataagtgatgatttgctcagggaggctgccaggaagatcaatggattctctggcagagagattgcgaagcttatggccagtgtgcaagctgctgtttatggccgccctgactgtgtgttggatccccagttgcttatggaggtagttgaatacaaagtggctgagcatcatcagcgcatcaagcttgcttctgagacttcaacttgagcaatgttatagattttatcagaaagcagcagtccttttcagatctactgtccccatatatatgttctgatatgaggaatggagtgagatatagtcagtttcctccagctgacttcgatagaagttgaaatttagaacacaccggatactgatgttcttctttgcggggggtatgacctaggcttgtccggttccaattttgttccatctctttgcctgtagcatatttatggtggtttttatggaaatacaggcaaataggtaagactgagatgcgcatgctgaaaatcttatttgactgaagtggttcaaccattcatcttatttgttagaatttgattttgtcttcattatcatagatgatgaaaagttgaacttaccg

SEQ ID NO: 22947 - DNA, 1607 bp, Oryza sativa
  ref <308>: DATABASE ACCESSION NUMBER: AK073093
  ref <309>: DATABASE ENTRY DATE: 2001-12-06
gtctccctcgcttcgcatctcgcctctggtgatgagagcggacagagccgagctgagggaattaaaacccccttatcctctctctgcccccgggctgccattgctggatccaaccatctgcccccgccacgcctcgtctcgcgctagccgtctcgcgtgcgtgcgcgcgcgtcgcgccgcgccctcgttttggagccttgcgccccgctactttccccttgtcccgaacccggaatccgcctcggcgagcgtccttgctttgcttctttggtatctgtgctcccgtttgctttgccttgccacgctccttcctcctcctcattgtctcctcccgtggttcggctcattctgttcttgggttgacgcgggctgcgtgcgtgcgtgcgtgcgtgcggaggcgatgtcgtcggcggtggatgccatctcctgttccaagggcatcgcggccccgccgacggaggaggcgacgaaggagcgggtggcggtggtgggcaagaacggcggcgtggagcacggcggcgacgccgcgacgatgaacgggaagcagtgcggcgaggcgccgcattgccgcaaggagagcaacgaggaggaggaggatgacgaggagaaggcccccaaggccatcgacctcggcccgcgtgtcagcatcaaggaccagctcgagaaagacaaggacgacgagagcctgaggcggtggaaggagcagctgctcggcagcgtggatttgaactccgtaggagagacgttggagcctgacgtgaagatcatgagcctggccatcctctcgcccggccggccggacatcttcctgccgctgccggtggagcccaacgccaagggcgtctggttcaccctcaaggagggctccctctacaagctcaagttcaccttctccgtcagcaacaacatcgtctccggcctccgctacaccaatgccgtctggaagaccggcatcaaagttgacagccacaaggagatgctcggcacgttcagcccccagccggagccgtacacgtacgtgacgccggaggagaccacgccgtccggcatgtttgcgaggggatcctactcggccaggacgaagttcctcgacgacgaccggaaatgttacctggagatcaactacaccttcgacatacgccgagagtggccggcgttgagctaatgatcagctgagccgtttttccggtggtggtcgccgagtagaagggtgaggcgccggccggccggcattcatgctgtgtgttactgtcgtcaccgttgggagcagaagtggacatttttttttcgtctcgtttgcgtcttatccactcatttttttttttggtttgattcaccctagggttcttttgtatattgttgccctgtctgtcccggttgtttgctgtgttaacgccgtgttagacgtacgctttgtcagttcaagttgatgttatgctatgtgttatgtcagtgtgcgtgtttgagcttctgtcactctgtcagggtcctgtttcgatcgaactgcctgtttgagttcagagcaacgcagctgcatttcttgtaaacactgggactgtatctgacgcttcccttacaaatttcccattctgtgtgcttctctctgc

SEQ ID NO: 22948 - DNA, 2171 bp, Oryza sativa
  ref <308>: DATABASE ACCESSION NUMBER: AK073094
  ref <309>: DATABASE ENTRY DATE: 2001-12-06
gacgtagccccggaggaagaagactctcggtcaagagtcaagacttcgaccaatcgaccaacacgaagcggcaaaggaaacgtcaccgtcgcggcgtcgccgatggagtcgtccgcctcctcctcggccgcggtggcggcggagggggcgccggcgacgggggagcagctggcggtgttctggcacgagggcatggtggcccacgacgccggccgcggcgtgttcgactcgggccgcgacccgggcttcctcgacgtgctcgaccagcacccggagaacgccgaccgcgtccgcaacatggtctccatcctccgccgcggccccatcgcgcgcttcatctcctggcactccggccgccccgcccacgccgccgagctcctctccttccactccgccgaatacatagaggagctcgtgcaagcaaatgccgttggtgccaagaagctgtgtgaaggcactttcttgaaccctggatcctggggtgctgcgcttctggcggctggaacaactttatcagcgatgaagcacatactagatggacatgccaagattgcctatgcgttggtccgcccccctggccatcatgcgcaaccggaccgtgctgatggttactgcttcctgaacaatgctgggcttgcagtgaagctggctctggattcaggacgcagaaaggttgctgttgttgatattgacgtgcactatggaaatggcactgcggagggcttctaccacacagacagcgtgctgacgatctctcttcacatgaagcatggttcatggggtccatcacatccccagagtggctcggtggatgagattggtgaaggcaggggtcttgggtacaatctcaatattcctttgcctaatggcagtggggatgcagggtatgagtatgcgatgaatgaattagttgttccagccatagagaagtttcgtcctgagcttttggtttttgttgttggccaagattctagtacgtttgatcccaatggaagacagtgcttaaccatggatggttatcggaaaattgggcaaataatgagaggcatggctgatcaacacagcaatggtcaaatattgatcgtgcaggaagggggttatcacatcagctattcggcatattgtctgcatgcaacactagaaggtgttctgaatctacaagccccgttgcttgatgatccaatcgcctattatccagaggatgagaaatacaccatgaaagttgtggacatcatgaagaaatgctggaaagaatctattccattcttgaaggacatatagaaatccatttcttttagatgcgagtgcccttgaacctcaatttcatatcagtgcaccgtctattcttatggccttttgactgaaagtacatgcattcattggagcaacattcgagtgcttgttcctttcataaacccctgattcacaagttctcaattcacattggtattgtacatacatcatgtcaaactctaccatcttatatttgtggacctcaattgctgcgcctaataagtaacgctgactaacagatgggctgtttgattatgcaatggggcattggggctacagccacctgtattatataagcgcaccagttccaagtctgaaaccaagtgccaagtctgaattattgtctagcaaggaatgctacctgctgccacatcactcgtcaacttactgcctacagcaatactggaaggtaatttttcaatatgactactgctagtgctaggtgatccaattgcttgccacccagtgaatgaatcgtccatctgttgcaaaagctggtcacactgccaagaaatgccagaaagaatcaaattcctttggaagtggctctttggaaggaatacatccatcttcttgtgatttgcgggtgtcatctcgctccatggaaccatattctacctgcgtcagcgacttatctccgatgattttttgcagcaaatcatacgcgccgcaaatgctttttcaggcggtgcgatgcgtcgatctctatcgaggcggtttcttttccgagtccgtgtgtttgtggtgaactgctccgtcgtatggctgcaatgctatgcaaaaattttgctcggttgcttgctttcgcacctggagttcttgaagaattctgtacaggtggacttttatctgaaattctctggtcaacttcatctccc

SEQ ID NO: 22949 - DNA, 1637 bp, Oryza sativa
  ref <308>: DATABASE ACCESSION NUMBER: AK099325
  ref <309>: DATABASE ENTRY DATE: 2002-08-28
tgtggtcacctgcagtttgccccacagccattccaagcacatattccctgcaccctgctagctaccttgagttgcaattcatccttttggcagtaaagttcttagtaatattacccagttgctacgtagcagctcgctgaagaacaaaggaaccaatcccacctatctgaatccacacataaacagtagattcttgttctcgcttggatagctacagcctacctctgcaggcgctatgatgaggctgaaagtgacgatactggtggtagcatttgttctcagcgccggcgtgcatatctcggcggcggcggcggccgccggccagagggaggaggtgcacctggtgccggcggtgtacgtgttcggcgactcgacggtggacgtcgggaacaaccagtacctgccggggaactcgccgctgcagctcccctacggcatcgacttcccgcactcgaggcccaccggaaggttcagcaatggctacaacgtcgccgacttcatcgcgaaactggtgggattcaagaggagcccgccggcttacctgtcgctgacgccgcagacgagccgtcagctcatgcgaggctaccgcggcgccaattacgcttctggaggatccggcattctcgataccactgggacaaccgtcgtcacgctgacaaagcaaatcgtgtacttcgcggccaccaagtcaaagatgatgtcgaacggcggcggcgatggcaacagctcgtcggcgtcggcgtcggcgatcgacgatctgctgtccaagtctctcttcctcatcagcgacggcggcaacgacctgttcgcgttcctgaggcagagcaaccggacggcgagccaggtgccgtccttctacgccgacctgctgtccaactacacgcggcacgtccaggcgctgtacagcctgggcgccaggcggttcggcatcatcgacgtgccgcccatcgggtgcgtgccgtcggtgcgggtcacctcgcaggcgggcgccaccaggtgcgtcgacgccgccaacgacctcgccagggggttcaactccgggctcaggtcggcgatggccaggctcgccggctccggtgctctcccggggatgaggtactccgtcggcagctcgtacaacgtggtgtcctacctcacggcgaacccggccgccgcggggttcaaggtggtgaacagcgcgtgctgcggcggcggccggctcaacgcgcaggtcgggtgcggggcgcccaactccacctactgcggcaaccgcaacgggtacctgttctgggacggggtgcacgggacgcaggccacctccaggaagggcgccgccgccatctactccgcgccgccgcagatgggcttcgcctcgcccattaacttcaagcagcttgtttcttcttgatgcagattacgctaattcatcttgatatatatcgtagcaatactatacacgtactcgtactattgatgatgcatgccggcagctaaagttagctataagaggaaaagaaatatttgcactcttgattctttttagaacgagagtgatagagatacaatagacgaatcacatcattttagaggcatgtaaaagttgcaaactaaggccaaatggcctgcaaataaactcttgaataaactatcaggttgcg

SEQ ID NO: 22950 - DNA, 2346 bp, Oryza sativa
  ref <308>: DATABASE ACCESSION NUMBER: AK073095
  ref <309>: DATABASE ENTRY DATE: 2001-12-06
ggattttagtctcacgaactgctgggaggctagggttcccggcggctccccttgcgccaccgcgccgcggccgtcttctcgccgccgacgctgagacaggccgcgccgccgctcctctccacgcgccggtccggtccggtccgtcgccgttcggtgctccgagctcgctcaaccagcggcgatggcgggcggcgacagggagagggatgtcgaggaggagacgaggaaccagatgatgcagaatctcttcggcgaccagtcggaggaggaggaggaggacgacgacgaggccgtcgatttcgtcgacgaggacgaccacccgcatccgcatcagcagcagcagcagcttcgccaccaggtggtggatgacgacgacgacaacgacgcccacgcccgctccggctaccactcggaagaagtggaaggtgaggctgataatggaggggaaggtgaagcggaaggagaaggtgaaagtgaggggcaagttgggatggaagaagaaagtgaagctgaagctcatcgtgctgatcttgatcaaggagaaagtgatggggaaaaggtccagagctccccaggagaacttagtgaccgggtgatgcaaaatgatgcagcaggcatggatagtgaagatgaagcctatcaacagcggccagtagctagcagaagaagaggagttgttgcctctgaatctgaggggtctgaagatgactattatgctggtcgagctcatgaagatgaggaacctcgtcaaacaaggaaagcatcaagctcgccagttgaggaggagagagatcaggaagttgtccgtgatgtatttggtgaaagcgatgaagatgaacctgctccatatcgtgatcaacaagaaattgatgaagattcccatagatcacccatggaagatgaaggtcactatgagaaggatttgcagcccgacgatgtagtggctgatgaagatatgagatatgaatcagatgaaaatcgtgaactgaaaccaaaagagaaaccagttggtccaccgctgaacctggtggttccacttaagcagccaccagctcaacccgagagaatgaatgtgatcaaggtatcaaatattatggggattgacccaaagccttttgatcctaaaacatatgtggaggaggatgtatttgttacagatgaatctgggaccaaaaaaaggatacgactggaggacaatattgtgcggtggagaaccgttaagaatgctaatggcactacatcttgtgaaagtaatgcgcgcattgtaaaatggaaagatgggaccatgcagctgctgattggcaatgaagttcttgatatatctgttcatgaagcacatcatgatcagtcccatctgtttctgaggaatgggaagggagtccttcaatcacaaggaaggctcttacggaaaatgagattcatgccatcttccttgtcttcgaaatcacatcgtttattaactgctcttgttgattctcagaataagaaaacggttaagatgcaaaaatggatcgaatctaaggatccagagagagtgaagcaggaaaaagaaagggccttgggccaaaatattcgagcccattcaattcttcaacgcaaaagagaaaaggttagccgcaagtacacacagcccgccaggcaaagaaggcagctttctcccggatttttggaagatgcattagatgaggatgaggaacctgaccatcaatatggttctcgccgaatgccagcacgtagtcgttttggggatgaactggaggctgaagcactagctgagaggcgcatagttagtgcaaagaagtcaagtatgggcagaaacattcctcgcaaaccatcctttcctgctcgtccgcctagacgacaggaaaatgaatattctgagagtgaaagggaggagtcagagtatgaaactgaaggagaggatattgagcactcaccaacccaggggagggaagatgagcttgatgaagaggatgaatatgaggaagatgtggaagaagaagcagctatgtcagatgaagaaatcgaggaaccaaaacggaggagagaatctgggggtgccagtgccagccaaaggcgcaaggagatcgactcggatgatgattctcctccaagaaaacaacaggcagttcatcgtcggaaggcagtcgtttttgacagtgatgacgaatgatgagaagaaaaaggttgcaaacaccaatatttgcttgaggattgttgtttagaaataacaaaaaaaaatgttgtcaattgttaatgtattcgggatgctgtcttgaaatcaaatgttagctgtgctaccagttttcctacactaatatagatgttatagtagtattattttct

SEQ ID NO: 22951 - DNA, 2217 bp, Oryza sativa
  ref <308>: DATABASE ACCESSION NUMBER: AK099326
  ref <309>: DATABASE ENTRY DATE: 2002-08-28
gagtgtggaagtagtagtaggagcaagaggcaaattaaggggaagctgcaggtggtagatgcgtaatgcgagcggcagcagctgctgctctcgggtggcggcgccgttgcatgcgcaagtgcttggctcgccgtctccttctcatggctacggcggcgccggcgacggctgtcttctgcaggcacctcccccggcagtcgtctgcggggagatgctggcactgacgacgccggcgccgccgtctcttctccatgcactggcctccctcaacgtcctcctcctcgtcgcctacctcctcctcttcctcctcgccaagctcgccgccggccttcaccgccgaggccatggtagctgtgacgagcaccaggtcacggagacctccgggagggaggagttcgccggcgccgacgacatcgccggagtgcagcagcagcaagcggagatgctgttctggttcgacgaggccgtgttcgaggacactgctctgcttggtggcgaaggaaaggatcagctcatgtacgacgctgccaccacaccacctacacctacacctgcacgttgcttgcaggtggagagcacctttcccatggtggaatccacccgacgaatctcgccgcaccatcgccagtgcagcttcagccatgaggagcccaaggccgccgccgccgccgccgccgccactgcgtcgagccagaaggatatcattccggccgccgtgccatcaccggagaacgttcccgtcgaagccggggaagaggacggccatggcgaacacggagaagaagacgatgaggaggagaagaggtttaggggagatgacgtgaagctgttcgtgaacagccgggcgctcgccgacacgaagaagctgcttctggagggcgccatggccgggaaaggaggagtgcagcgcgagcgcgaggaggagagcaggttgggcgcgtcgacgctgacgagcgagtcgacgtcgaagagctcggtggagtggcggagctcgacggtgaccaaggactcggagacggagtaccccttctcgtcgtcgtctcgccggagctcgtcgcggtgggagtcgtacgctctcttccgcaagtacgacgaggacatggtctacttccatcgcgtcggcgcccagaagctcaccgagacagagtcgtacaggtcgataaagtatcagccgcgatcggtgtcggagcggatcgtgcagaagctgacgccgaagccgcggccggcgatcgggctgagggacccgtacccggagctggagcgggtgtacgtggcgcagatctgcctcacctgggaggcgctcaactggaactacgccagcttccgccgccacgccggcgacatcgcggcgaggtgctgcccggcgcgcgtcgcgcaggagttccagcaattccaagttcttcttcaccggttcatcgagaacgagccctacgagtacggactccgcccggaggtgtacgcccggatgaagaactcatcccccaagcttctcctcgtcccagagttcagagatgaggaggacgagaaggacgatctgatatcggcggtgcagttcttgtacatactggaggagtcgatcagaacgttcatggcgttcctgcgtgcagacaagaggagccactaccaaatgttcagagaaatggtgaagaggaggaccagctccatggatcagactctggtcatcaccctcaagaaggccaacaagaaaaagaagagccggctcaaggacctgacgaggccaagacggtgtctgaggaggacgaagctgagggaagaagaggagatgtcaatactgctgggcttaatcgacctcaagatcgtggccagagtgctgcgaatgccggagatcaccgatcagcagctgcactggtgcgaggagaagatgaacagggtcaaagtcgacccggctcagggcaagatgcagagggacccgtctcctcttttcttccctgcacattgacagcagcatcagcagctgtaactagctagtccctgcttgtaatctactacttttttcttgcccatctcctcttcaaatcttcctttgttgatatagtgagaaaaagataaagttgcatagacgacatgagaatatgcatggcacgcagctagcctgatctagttctgtaaaaagagagtcagagatcgatgaagagatcgtgtaaaggcaatatatgtgtacttatgtatttatacatagtagataaataagagacc

SEQ ID NO: 22952 - DNA, 1476 bp, Oryza sativa
  ref <308>: DATABASE ACCESSION NUMBER: AK073096
  ref <309>: DATABASE ENTRY DATE: 2001-12-06
gatccgcctccaaaccctagacgcggcggccatggcgcggcgatccgcccctctcctccagcgcctcctctcccccactccctccccctccccctccccgccacatcctctcgccgccgccgccgtctcccgccgcaccgtcacctacatgccgcggccgggggacggcgccccgcgcgccgtcacgctcatcccgggcgacggcatcgggcccctcgtcaccggcgccgtgcggcaggtgatggaggccatgcacgcgccggtctacttcgagtcctacgaggtccgcggcgacatgccgacggttccccccgaggtcatcgactccatccgccgcaacaaggtctgcctcaagggcggcctcgccaccccagtcggcgggggtgtctcctccctcaacgtgcagctccgcaaggagctcgacctctacgcctccctcgtcaactgcttcaacctcccggggctgcccaccaggcacgacaacgtcgacattgtcgtcatcagggagaacaccgagggcgagtactccgggcttgagcacgaggtcgtccctggcgtcgtggagagccttaaggtgatcacaaagttctgctctgaaaggattgccaagtatgcttttgagtacgcgtacctcaacaacagaaagaaagtgactgccgtgcataaagcaaacatcatgaagcttgctgatggtttattcttggagtcttgccgtgaggttgcaacaaagtatcctggaattcaatataatgaaatcatcgtggacaactgttgtatgcagcttgttgctaagcctgaacaatttggtgttatggtcacgccaaatctttatggcaatctggtggctaacacggctgcaggtattgctggaggcactggtgtcatgcctggaggtaatgtgggtcaggaccatgctgtcttcgagcaaggagcttctgcaggaaatgttggaaacgtcaaagttgtggagcagaagaaagctaaccccgttgctctgctcctctcatctgccatgatgttgcggcatttgcaattcccatcattcgctgaccggctggagacggcggtgaagcgtgtcatcgcagaaggcaagtacagaaccaaagacttgggcggcagcagcaccacgcaggaagtcacggatgcagtgatcgcgcatcttgattaattgctggccggctgcgttcttttgaaacaaaattttccctttggactaggtgtctagtcccgactgattttcgtttcttatagcgttagatcatcatttcgttcgtcacagccttgtacaatcttcaggtgtcttgtgtctggtggattttgcttcggaatgatggagcaaatcaccaggaatccaggatcgatttttaacgcaatgtttttgcggtcttaactggaaataagagagaacgattctcttaactgtaacactattgcgttgattacttctacttattattacatattctgatctttact

SEQ ID NO: 22953 - DNA, 1019 bp, Oryza sativa
  ref <308>: DATABASE ACCESSION NUMBER: AK099327
  ref <309>: DATABASE ENTRY DATE: 2002-08-28
gacccgtcgtcggcggcgaccgcgggtgcccaagcccaaccccccgccgccgctcccctcgccgtccgccgacccacaccaccaccactcaggaccccctcataccaggcatggaggagagcgacgagaccgccgtggaggcggcgctggggctgagcgcctcgttcttcgtcaactcggtcctcaacgcggtcgacgacgtccgctacggggccttcgagtactgcctccaggaaggcgcccccgaggccgtcggcgccgccatggcgacccagaaggccgaggagctggagcggggtgtaatcagcattcacaacttggtgaaggatgtattggataagagaatgagcaattgggagaaatactgccttcgacattgtttcgcaatacctgaaggattcctgacacgtgaagatgatattcctgcaaaaaaatcactcaatgatgggaattctgattcggatctcgatgctgaacttgtttctcttaggaaaaaacttgaagatgctaacaatgaatctgaagaacttcaaaaagagctttcttccttagaaagacaagctgagtgccagagaaatttggattcctctatggctgaattattgaaggtgtttgaaagcaaggcctttcaagacaattttcaagatcttgtgaacgtaataccactatttcagcggaaactggaaggtatgaaaaggaagattgttgagaacattgacgatcaaattgattggaacgtcaatggacaccacaagcggttagcatcaggtttcactgccagaacagaagacagtcaagatgttgtgaatgtcttaaagaagtattagtagctcccacttttatgcgacctgtgcgataacaggacgcctgctatgtgctatccttcgtagcacgggataagctggttatatgtttggactcttgctaactgagtaccgccaatgcagatcttcaatgtaatcctgaactgcgattccttccgaacaatttgtacgtaaacgtaaagtacatgggctttc

SEQ ID NO: 22954 - DNA, 2065 bp, Oryza sativa
  ref <308>: DATABASE ACCESSION NUMBER: AK073097
  ref <309>: DATABASE ENTRY DATE: 2001-12-06
gggttgccaaatctgccatgtcgccgccatggatcccctaatcgaggacccccccaacctagcggagacgaagaagaacgagaagggaagcccaccgcgtcgccatcattaactcctcctctcctctcgtctccctcgaaagcaccaccggatccgacgaccccctcctcccctttctcccctcctcacgaaaccgcctcgccttcctcttcttttctttttcgctcgcttcgcatcgctcacatgcccctgcctgccgccgcagacggggcgccatgtcgcgtagcggggtggaggtggtcgtgagcaggggttgctccaggctcgtcctccccgggatgcagccttcctccgcctccgccgcttcctcctcctccttctcgcgcggcggacatggcggcggcggcgaccggaggccgctgcccgatggccccttcgccggattggtcatctgcgtcaccgggctatccaaagaggcgaggactcaggtgaaggaggcgactgagaggatgggaggcgagtacagcgggagcctgcatcccaagtgcacccacctagtggttcagagcttcgccggccgcaagtttgagcacgcggtcaagcatggcgcgaagaatggcctctttgttgtaacacttggttggcttgtggattgcgtgcggaggagcatgaggttggatgaatcgttatatagcatcaagaacattggggagaatggaatgccactcggggagttcaaccggcttgtcggcgctcctgttagtgggaattcttgccttccaccgatgatgtttcaggaaaaaacattttcagacacgaccgaaaagcatcggcttcagacatctagaaaagaacatgaccatgatgaatttctctttacaaacgactcgatctacattgaccctgggatatctggtgaaatgaggaagaaggtatctgatgctgctactagagaaggtgcaaaattgttggaccactggtttattggctgtcatgcgacatatgttgtgtgtgaggacgcttctgtcaagagatatgttggtcattcagacaacattgtaactccactttggatattgaaaaccgcaaaggaaaaaggtttgcagcgtcttgtccatttgtcttcggacctggctaggcaggttgccacgattcttgaaaatgcccagacatttcaagagaatagaaaaattggggatgttccttctgtcaattcaaactccagtggagtaccatcaacccaaggggagatagatgaaattcatcaagagaggcaaaaatttgttgaagtagcaaagaaaaatgtccgagatcgccgtgctcgccgtatgcagtcatgtgaagtaccaatccatccaatcacgcctgtgaaacttatggaatcaatctgttggaccgtatctgagccaactacgtccgcatgcatttatacggagttttcatggtcagacgatgcctttgagcaacaaagcactactttcttcgatgcgaatggggatggcaaggatgatcagtcaagcgatagtttcacccgcccactaagagaaagtgagaagagtgaagtgatctttaagaaccacttccttaccgtactcttccccattgatcgttttggtgagcttggaccttcctcaaggacattcttcagcaatggtggtttcacacgcatacaagtgcttgatcacatctacaacttctaccaggaaaatatgtcttccgatgagataaatgtagccctgcaaacggattcacgacatgctgatcgacttcgctcgctgtacgcaagtactgaatcagcagaaagaggttttgtaacattcaaaagaattgattttttgggaagccgaagaagttttgaggggctaaaaacgcctcagcagagagaacaatagcaatgtatatgagcttgtgattagggcataaactgcaccatactcggtgttatttagtcaaatttgtttgttgtttacaggttgatagtgatgtactaccatgtatgcacgccgaataaaattgtaggagataatgatatatttatagatcaatgaaaaagatcatgttgggc

SEQ ID NO: 22955 - DNA, 956 bp, Oryza sativa
  ref <308>: DATABASE ACCESSION NUMBER: AK073098
  ref <309>: DATABASE ENTRY DATE: 2001-12-06
gttcccaattcccatctgctcctccaactccaatccaatcgagaggtcgatctctgaatctgatctgatcaccatggtggtggcactgggtcccggccggttctacggcagcagcctcccacggccgcgcttcttctccggcggcgaccgcgtcgagccgccggtggccgtcaccgacccgctcatggcgtgggcgcacgaggcgcactggtccatgggcggcctcagctccaagcgcctccgcctgcgggccgcatcgagggctccatcgacaagctccgccgccgcgcccgccgcgacgccaggaaggcggccaaggcccgcgccgccggcatcaagccccgctcgctcgccgccctcggctccgacgacgacgactcctcctccgacgaggaagaggaggtcgaggcccagaagcagcagatcgtcgacgagccgtcggagtcggagaaggagcaggaggaggagaacgaggaagaggaagaggaggaagccctcgccaccctcgccgccgcggccaagaggaagcgggcgaggaagctcagcgacgagttcgaccgcgtcgcgaccatgcaggagggggaggccaagaagcagaagcccgcagcaacctctacaccggcgaggacttcaccgaggaggaaggccgccgaggtggctctcaccccggcgccggcgagggcgtcaccgggggggaaggctgctgccgagggggctactgctgcaccggcgagggcgtcgccgaggaggaaggccgcggcaaggaggacatcgccgaggatgaagcactgagagaggtggcctgcttaatgtgaaatcctagttcttgctctgttacattggtcgctctagagaatcgagatgtgattgatggatatgtaatgtgttatgtgtgtgtgctaagtatttagtgatgaaaccattgaaatgtgatgctaatctctgaattagtcatg

SEQ ID NO: 22956 - DNA, 1168 bp, Oryza sativa
  ref <308>: DATABASE ACCESSION NUMBER: AK073099
  ref <309>: DATABASE ENTRY DATE: 2001-12-06
gaaccaaaatcaaattgaaacggaagaaattggaatccctcttctgtaccctactctctcgctcccttccgatttcctcgagcgctaatctggcagcgaatagcagcgaatgctgcggccgtagcgagatctgtagcaaccagtgcgccttcgccgtcggcggcggctgcgggcatggcggtccagaacggcggcggcgatggcagcggcagcggcgcggcgtcggtggtcgtcaacgtgtacgacctgacgcccatgaacaattacctctactggttcggcctcggcatattccactccggaatcgaagtccatggcgtggagtatggatttggagcacatgagttcccaacgagtggggtgtttgaggtggaaccaaagaactgccctggcttcgtctatagaaggtctgttcggatgggcacaactgggatgtccagggcagagttccgctcgttcattgaaaaactcactgggaagtacaatggtaattcatatcacttgatttcaaagaattgcaaccattttacagatgatgtgagtaagaacttaactggaaaaccaatccctggatgggtgaatcgactagcaagagtgggttcctttttcaactaccttctgccaaaaagcatccaagtttctgcagttagacacgtcccaacacatcctgcattttctgatgatgatatggattcaagatcttgttctattagtggggacagtgatgtggatgagctggaccaacacctgctgtcagcaacaaccatcgagcttcattctatagaacaccaaagctagccaaaaatgatatctgacatcggcaaacttttgtgttccgtggcagcgacagttgaagacttcaattcctgtatctagcatcgaagcgcttctctcgtgctccactactgcaatgtgcaaagtcctggcaaatgttgccacctttcctggcagtgttgctagcagagacggaactgacactgagccgtcgatcctgaatccatatagcgcatgctaatatggaaatcatacctgcgatatagggcaatgctgaggcggccacagcatatgttgtaacacaaactagtgccgtatagccttaagacagtgatctaagttagtaacatcacacgaaattgattctttgtgttatattttttttggaattggc

SEQ ID NO: 22957 - DNA, 1633 bp, Oryza sativa
  ref <308>: DATABASE ACCESSION NUMBER: AK073100
  ref <309>: DATABASE ENTRY DATE: 2001-12-06
tgcgagcgtcagagagagagagagagagaggaggtggtggtggtggtcagatcatcatgtgtgattacttcttgcaacggatagagggggagcaggccgccggagacctcgccgacatcgtcctccgcgccggcggggctgctgctgctgctgttgcgggcggcggcatcccgtcgacggagtggcagctaccaccggcggaggaggaggaggaagagccgggtctcttcccgctgccgccgtcgtcgtcggatggctccggcatgagcggcgcggatgcgttcggcgacccgttcgctggcctccccgaccccttcggtggcgactacccctcctctggcggagcggcggcggccgccgacttctttgacgccgtcgtggccaaggccgggttcgtcgacgtcggtgtcctcggtggcggcggcggcggtggctgcgatggaggtggcgttgatggtggtggaggagggtcgtcgctgctgggcatgagcaagcctatcttgcctagggccgccatgcagttgccgtcggtgtcgccgagggcgatacggccgtaccccgtgatggcctgtgacacggtgaagctcggcgcgccgatggccggcgggccgtgcgcgttcgacggcgccgccgcggcagggctgcacatgtcgtcgtcgccgcgtggcgccgtcggcgggatcaagcgcaggaagaaccaggctaggaaggtggtgtgcatcccagcgcctgcagcagcaggagggaggaccagtggggaggttgttccttccgatctctgggcttggaggaagtatggccagaagcctatcaaaggctctccttacccaagagggtactacagatgcagcagctcgaaaggatgctcggcgcgcaagcaggtggagcgcagccggaccgaccccaacatgctcgtcatcacctacacgtcggagcacaaccacccgtggccgacgcagcgcaacgcgctcgccggctccacgcggtctcatcacgccaagaacagcagcagcaacagcagcagcagcggcgcctcctcagcctccaagaacaactcctcccacagcggttaccaccaccaccaccaccagaagccactcgtcaaggcggaacccaacgatcaatccgccgccgccacgaccgccgccacggtgccggtgaaagaggaggccgccatggtagggacgtcgtcggaagcattggcgaagacgacgcagaaatccatggaggatgctgctgctgctgcttcagccacggcggcggcggtggagcacagtgatctcatgcagcagatgttcagccagagctaccggccgatgataccggaggcagcggccggcggccaccacgacgacttcttcgccgacctcgccgagttggagtcagatcccatgagcctgatcttctccaaggagtacatggcgaccaattacaagccagcaggtgacccagcaggcaaggagatgaatgcagtagacaagggcttggatccagcgtacatgctggattggtcttctaccactgttgttactagagctggtgggagctcatttatgcaaggggagggaggtttatgacattttaatcactttgaaacaaaaggcaaaagctagtatatgcgaatgcaaacacc

SEQ ID NO: 22958 - DNA, 3828 bp, Oryza sativa
  ref <308>: DATABASE ACCESSION NUMBER: AK073101
  ref <309>: DATABASE ENTRY DATE: 2001-12-06
gaatgaaaaagcacactagcgctgttttccgttaaaaaaaaaaagaacacactccactccccacgcgagctacacgaatggagtagaaaacaactttcgtaccgagcccgaaccctccgagcggcggcggaccacggacgcgggagaagggcgccgagagggactcgtcgtctccacgaaggcgcggcaggtgaggggagaacgagtgggaggtctctcccgcgtgacagatgggagattagctcctgcatttgctgcttgccacaggaagcgaatgagatttgcgggcggcgatctgatatcacctgaactcagcaatcatcttccgcctaaaggctagaggcaccctgttcgacgttttgcccaggagagccttcagagtttggtcaagttactgtttacgtcggtgccatgctgtgatgatgacaatcatctttttcttgaaggattttggccaaaagggactgcacaactcggtaaaaactcaaactgcacatcacagcgtggatattgttatatgtttgtcatcacccgcagaaccacaccatataattgggatgagtggcacttcacgtttctggttgggtttctttctaccatgtcttccatgatatactgagagaaatttatataaaataaaacaattcgtccatatatcagctatgaaaatgactagtccaacacataattacaagaaccaaatgcactagctacctgtcaaataggaattcatgttacaacagtcccaggattattgctcaaatcagaacgttcatagcttcagttaagaatattggcctcactcaatactgctagagttgtatacatacacaaagtactctcagtgtcgttttctcatgtggcttccccatacaatcaagatagtcattgcaaaagaaatgccaaatcccaatgcagtgaagaggagaagtacagcatctatggatttctctgaagtgtatggtatagcgcttggctcttcagggttgtcacattgtctagataacggtagtccacacaaacctgtgtttcccaaaaaagagctattggaaaatgtggaaaactgatatgagtctggtattcttccaaccaacgtgttgttcgacaagttcaacgtcgaaagaaaattcagtgatgctagttccttggggatctctccagaaagctcattgaaagagaggtccaatgactcaagttgatctaacctgcaaaactgtgatggaattggccctgtaagggcattgtgtgacaggttaagcccacgaagcagaacaagttcaccaatggtatctgggatggcaccatggaatgcgttaccggagacatcgattagcacaaggcttctcaagatcttggaaattgtcctgtcattccctttgtatgtaactgtagcggtaaactggtatgtctgcccatggtaatattgattttccatgactaacgtgtcattatcagacctggccatcatggacttgagcatcttaaaccatccttccatcagcattccatttaagttatttgatgccatatcagcaattctgagtgctggaaattcacagctgatttgacgtcctgtgtatgaagggtccattacttgaccagtcaacttattagatttgaggacaaggacctgaagtttaggaagttgactaagccaacatgggaaagagtcactgatctgattgcttccaatgtcgaggatctccaagtttctgcaggaaactagagatcggggtatcttcccttcaatcgaattgtcacttaagtccaatgcctcaagtgcacaaccttccttgataatatcagtggtgcagatcaacggtggaacattcccagaaagtttgtttttggacgccttgaaagtcacagtttcaccaaggtatgggcccttcaatgctgttgaaactgagatcgaagtattccacataaagaggcagaaaaggatcagatccgaggctcgtaaagttattgtgagatatgttcaggacgataaactgcaagcctttccatgttttccatgcccactgaggtatagctccctggatttggttattggaaaggtcaaggctagtgatgtcaggaaggtctctcaagatatttgggaaggttgtcatgctgcgagatgctaaacttagtaattgtagtttggggaacaataccagtgatgaactattttttccttctaccacaagtagtttattgtttgagagattcaggaaagttaggtttttcagttttgagaatgaggtgagatccaccgtgccagcaaaattgttcgaatggagcaggagagtttgtagccgcgtcaaatttaagatctgtggatgaaccgtccctgaaaagttgcagttgtacaatgctaatgtggtcaattcccttaagtttcctattgaagaaggcactggtccagacaatccacagttagagatccggagaacggtgagagaagttagatttgagatccacgacggaatggttcctactagctgtaatccagacagttgtagcatatccaagtatttgagactgcctaacgaagagggcagtgatccagagaagccacttgcaccaaggtctaacttcttaacagatatgagattgatgatggaaccagggatcgtacctgtgaagtttgtattattgaggaacagattctccaagctagtgtcctgtgagaaatttggcagattaccagatatgccaggattcttggagaggttgatcgttctcaacttcttgtgctggaagatgatgggaggaaacgatccttgaaacttgtttttgggtagctgaagaacagtgagattggagaagccagccaagaactctggcactgaacctgacaagtgattatagtgaagctcgatcatagtgagtgcttgcaaggcagagaatgatgcacagatgggacctgacagtgagcaataaggtaaacttagaacctgaagctttggtgtatatttggctatgttgtcacaccatcgttctccattgccggacagatccaccattcccatatggagctcctccaggttgctgtggttttcaatcaaggtctccatgtttggcgctgagagctgccaaactgagtctgagtcgaatgtcacctgctcgtcatcgttgtattcgacgatatagaaactggtggagaggtcgaggtagaccaggttcgtaaggcggccgatgctacctggcacctcgcccgctatgttggtgtcggagagatcaagataaaccagttcggtgagctgctcgaatccggtgatcaccgggagctgggacatgctgaagtcgttaccggagaggttaaggtgcttgagtgaggttaacctgaacaatgcagggtcgacgctgccggcttgcaattggtggccgcccaggtcgagtgaggtgacacggccatctgcgccaccgcagccgacgccatcccagcggcagcagtctgtgccggcgacccatgactggaaggcagtggagtagtcgccggcggtcgcgttgaaggagtgcttcagccggagcagcgctgaggcttgatccggatgacaccgaaccggtggtactacggtgcgtgccgtattggtggtggcctggacttggaggagaatgtacatcgcggttagcagcaatgacggaagatggtgagcaactctcttggtggacgatgacatgttgatgattcaagattggctgtgtttgtctgccttgaattgtgtggataaatacaggagtactactatttcaatatatcagttgcacgttgttggtatccagtagcttttgattgtctgtgagtcaaacaaatggttcggaaaatcagacagttcaagg

SEQ ID NO: 22959 - DNA, 2615 bp, Oryza sativa
  ref <308>: DATABASE ACCESSION NUMBER: AK073102
  ref <309>: DATABASE ENTRY DATE: 2001-12-06
gacatatggccagggaagaagaaggaaacaggaaaccctcgccgtggagcctccaaaccaagcgaagcgccatggccgccggcgagcagcagccgcagcagcagcagatctccgcctcctctacatcctccgggaggctcgtcacgcctttctggaaagagaagtacgagagggatgcgaggaggtactgggacatcttctacaagcgccacgaggacagggttgcgattctagtttcctcccgccctcctcttgcatgtgatttatttagctcgtgcgagagcactgttggatgtggaagattataattggcagtgtttgtgttgcaaccctttcctttggtttcgcgttgtctcagtagtttctcgctggtcttattagttgtgatccacgaattcctgggggtttttgtgtgctggcagtggcagacagctctctgatcttcaggtgaaaacaaagtttcaagcaaatcaagaatgtgtagaccgcttcattgtactgaaaagcctagcagcagagttctaattccctatattcatgctgttttgtatcgatagcgtgttcagtttacttgttcaaattgctagctggtactgtaatggatccagatactcaattgttgaaggaacttctttgtttatagttctggtatatctctcaatgctaacaagaaatttcgtcaatattcttggtggataaatgtgatgtcaaacaatacagtgaatctggacctctggatcaaatatgccactacaacagattgttgtttctctactgcaaatgcttatggttgcttaaatttctgcttttctacatttgatttgtcatgcatttgaattttttactgttccatttggacagttcttcaaggatcgacactacttggataaagaatggggaaagtactttgagggtcaaggaggggggaagatggtgattttggaggttggatgtggagctggaagtacaatatttccattgatttctacataccctgatatttgttcacgcatgtgatttttctccccgagctgttgacttggttaagaaacataaggactacagacctgaccgagtaaatgcatttgcatgcgatattacatcagagcaactaactgagaatgtacaaccttcctctgttgatgttgtaacaatgatctttatgctttctgcagttgcacccgctaaaatgcctctagttcttcagaatgttagaactgttctgaaaaatggtggccgtgtgctttttcgggactatgcttttggcgaccttgcacaggaaagacttatgtctaaaggccaacaaataagtgagaatttctatgtcagaggggatggcacggtgagtgcatgcgagcatattacttttcaaatgagtacctgatggatttattctcaacatgtggatttactgttgaggagatttgtgtgcacaataaacaagtcgagaaccgctcacttgacttggtgatgaacaggaactggatccaagccacctttatccttggctcagctggtcttcaaggcccaaatggccagcacgattcccacacttgtgaagatgaaaaggataagttaactgctaatgcttctcaggagaagagcaccagtgaagaaattgacctttctgaggattttaacaatatgtttggaacttcacacaaccttgatgaggtgtggattacctgcaaagaaaaaggaagaacaaaaaaaaaagcccatttgtccttttcaatccatgtcattggtaagcaatacaattacccgatgactggcaaggcatgcatccagcagcaattaactgcaggctcaggtccttcggatcaaagcaaaaggtcatgacttcgaaataaaaatgctcacaaaagaacaccagcacacctgcaaattaaccggtctaatgctttgggaatcagctcaattcatgtgcagtgttctagcagagaatccttccattcttgctggcaaaagagtgctggaactgggctgtggctcggctggcatctgctcaatggttgctgctacagttgctcagtttgttgtagctactgatggagacgcagaatctctcgatcttcttagagaaaatactgcctctaacttggagcctgatttgcttaaaaagattctgatcaggaagttattttggggcgacaaagatgatctgaaggcagtcagggagctttccagcgatggagcaggttttgattgcataataggaactgacgttacctacaatcctgacgctatatttcccctcttcaagactgctagggaactaatttctaataaggattcagatgcagcccttattctttgctacattcagcgccgagttgatgaggattctatcctttctaccgcaatggcccagggtttcaggcttgtggacaagtggataaatggaattcacgagagtaatggtatcattagctcttggttctgtggtaatgatgtttgcagttctttcaggaatgcaacgctttccatactgtattttcaggtgtgagactttgatgtttagctgaatttcatgcatttcattacttggtgatttcccaccattattgtaccagatgaatggacaagttttttttgtggcaattatattattg

SEQ ID NO: 22960 - DNA, 1662 bp, Oryza sativa
  ref <308>: DATABASE ACCESSION NUMBER: AK073103
  ref <309>: DATABASE ENTRY DATE: 2001-12-06
gacccgctcagttcggccatctccacaatcccccacgccccgagaaaaccctaaaccccccaaccctcgccgccggcaaccgccgccgccatgttcggcaccccggcttcgtcgcccctatttgggaccccctccaccaccccggcattcggcgccccttcctccacccctgcattcggcacgccctccaccaaccccgccttcggcaccccttcctccacgccggcgttcggcgcgccgtcgtccaccccgtccttcggcaccccctccaccgcgcccgcgttcgggaccccgtcctcgaccccggcgttcggcgcgccctcctcgacccctgccttcggggcgcccttctcgaccccggcgttcggcgtggcgccgtcgccgtcgccatcgccgtttgggttccagcagcagatgacgccgtccccgtcgccgttcgggttcgccggtgggggcggcgggcagatcaccacccagatggcccccgtcgcgccgctcccgctctcgccctccgaccgtgacatccaggctatcgtggatgcgtacaaggaggatcctggaaaccctcgttatgctttcaggcatctgttgtttagtgttacagagccttcacaacgggtgaagccagttgcggcatctgatatcatgtgggcagaagctatggggaagcttgagggcatggatagttcggatagggagaggctgtggcctcaactcgtgcagggatttaaggatctttcctaccggcttaagcttcaagatggagttcttgtctcagattctgatagattgagcatgacacgcgacaatgttaaaaagttgcaaagacatttccaagctgacacatacccatggatccaacggctgaagcagcaagagttggttattgagagacgcctcttaaggataacgagaatagtggaggcattagagaatcggggttatcgtattccactaacgaaggaggaagctgatctgtatgaacgactggctgttatagcgaagcagctaaaaggacccactggtgatctgcacaggagagtttataatcttctttcaacttctcgccttcttgctagtgctggtggcactgctggtcctatctatattcctagctcagcgaaagttgacgaacagagtgttgctgagcttcttgaggccttacaacaacagacggaagctgttgccaagttgggcaatgtgatgaaaagagatacaagagacttggaaataatactttcggaagacacggacatggcagaagacagtgttgggagaagggcattgaagatgtataactaaaccaaattcttcattcaatgcattgacataagcaggagatccttctttggtcaagggtttagagtgtcggaaagatggcagccaaacgaacgtttgaccttaaacgtctaccgttgcaaacgactaaacgagaatttgttctgtttggaagggccatagtggaattggcggtttgtgttttggtgacggcaaaaacaagtcaccagtgtgacaaaatctgatgttggctgtggcagttgtgtaaaccacagccacctgctaagccctcttaaattcgtgagttagtcagagatcgattgcctgcatgtaacacttgtataatgacattttagattatttagatgagcgtctttgcggact

SEQ ID NO: 22961 - DNA, 3541 bp, Oryza sativa
  ref <308>: DATABASE ACCESSION NUMBER: AK073104
  ref <309>: DATABASE ENTRY DATE: 2001-12-06
gtggctgctgatgaagaggaattcatttgtttacatcttcaaaattctccaggtatgtatctcgcatcttgaattttttctctctacttcgggaccataaataaaatctgacgaaaggtacatctgtaccagctcataatccttggaagcatcggaatgacggtcttcctgcgtacaaagatgcatcgacgcagtgtagaagatggtgcgatcttcctgggtgctatgttccttggattagtcacacatttgttcaatggatttgcggagctcgccatgagcattgcaaagctgccgatattctataagcagagggacctgcttttctatccatcatgggcgtatgcattacctacatgggcgctcaaaatcccaatatcattcttagaatgtgctgtgtggatttgcatgacatactatgtcatgggcttcgatccaaacatagagagattcttccgccattatgtgctgctggtactgatcagccagatggcgtccggtctcttccggcttctcgctgcactaggaagagagatggttgttgcagacacgtttgggtcatttgctcagcttattcttctggttctcggtggtttcttgatatctagaggtatgccaagtaactcatatattgttccagtagtaacaagagcattgtactgagttctccttttgcagaaaacatcaagaaatggtggatttggggctactggtcctctcctctgatgtatgcacagaatgccatagcagttaatgagttccttggccacagctggaacaaggtaatgcagtgtctcctgcaccaactcaaacctgacaatctaagtttggatttagataactcagaagcaacctaatctttgcgcaggttgttgatccgacacaaagcaacgacacgcttggtgtccaagtccttaaggtacgtggcatatttgtcgatgcaaactggtactggattggcgttggcgcattacttggatacatcatgctcttcaacatcctcttcattctgttccttgaatggcttgaccgtgagtatcatctcagctcggagaaaatgttgagctgctgactcttggaacagattcccagaattcaccttctgatggtcagtctttttagtacattcctctgtattatggcattgaacaagatatgccattttgttgtgtccttttaacaagtatagcaaatgcaggaagaggagagattacaggagctgacaccaggaagagaggaatggtacttccatttactcctctgtcgatcaccttcgacaatatcagatactctgtggatatgcctcaggtaagcaagcattggaagcctccctgtgtgtaacaaatataccaccaaatgctattatgctaatcccgatgcacaatttttgacaggaaatgaaagataaaggtgttactgaagatcggctactgctgctgaaaggtgtaagcggagctttcaggccaggagtccttacagcactgatgggtgttagcggagctggtaaaacaactctaatggatgtgctggcgggaaggaaaacaggcggttacattgaaggagacatctccatctctggatacccaaagaagcaagagacctttgctcggattgctggttactgtgagcaaaatgatatccactctccacatgtcactgtttacgagtcccttctgtactcagcatggctccggttaccctctgaagtagactcagaagcaagaaaggttagtcaaacagcctttactctgctagctcattacacattttgcattgtgatgctgactcacttcacggatgcagatgtttgtggaagaagtcatggaacttgttgagctgacatcactgaggggagcactggtgggactgccaggagtgaatggtttatccaccgaacagaggaagaggctcactattgccgttgagcttgttgccaacccatccatcatattcatggatgaaccaacttcaggactagatgcaaggggcagctgcaattgtgatgagaacagttagaaacacagtagacacaggaagaactgttgtctgcacaattcaccagcccagcattgacatatttgaagcttttgatgaggtaagttgaagcaagggccaaaattgcacaattcttggatgcctctcatacgaacactaacaggctattcttgaacttctgcagctgtttctgatgaaacgaggaggtgaagaaatatatgtgggccccctgggacacaactcatgccatctcatcaattactttgaggtgagcctcgatacttaaatactgaagtgaacaccaaatttccaacttaagacatgcatggtaaccttgctcgctgctccaaatttagggtatacaaggagtgaggaaaatcaaggatggttacaatcctgcaacatggatgttggaggttaccaccctagcccaagaagatatccttggcatcaactttgctgaagtatacaggaattctgatctataccagtatgtttcatgacaaaagccccccaaaatgttctttttctgctttttctgtgttatatcactgattcaattgcaccattgcaggaggaataaaacattgataagtgaattaagcacacctccacctggatcaacggacctacacttcccaactcaattttcacagcccttcttcacacaatgcatggcttgcctgtggaagcagcacaaatcatactggagaaatccgtcgtatacagcaactagaatcttcttcacaacagttatagccctcattttcggcactatattcttgaacctgtgcttatcttgcctacagaaacaagagattggatctgttcaactctttgggatccatgtatgcagcagtccttttcattggaattcaaaacggccagactgtccaaccaattgtagacgttgagcgaacagtgttctaccgagaaaaggccgctggaatgtactccgctctaccatatgcatttgcgcaggtaaatggtcatagctgcatatttaaacaaaaaacaattgcagtgtgcttcctttattatacggaaaaaaatctaacaatttatcctttcaacaggttcttattgagataccacacatcttcctccagactgtcgtgtatggtctgatcgtctacagcctgattggctttgactggacagttgaaaaattcttctggtacatgttcttcatgttcttcaccttcatgtacttcacattctatgggatgatggcagtcgccatgacaccaaacagcgacattgctgccatagtctctactgcattctattgcatatggaatatctttgccggcttcctaatcccccgaccagtaagtatctgatattcattcattgtccataccaacctttaagtcttttttctatactgttgatgctgaaatatacatggctggtttgcagaggataccaatatggtggaggtggtattcctgggcatgcccagtggcatggacactgtacggacttgttgcctcacaatatggtgatatcacaaactctacactggaggacggggaagtggtgc

SEQ ID NO: 22962 - DNA, 2036 bp, Oryza sativa
  ref <308>: DATABASE ACCESSION NUMBER: AK073105
  ref <309>: DATABASE ENTRY DATE: 2001-12-06
gatctcctcctcctctgcaaatccgcgcgcgtgctcgtcttcttcctcttccttctctcgctctctctctccctcctcgaggccgcgacgcgtacgacggcaatggaggaaggccgccgtggcgaccgcgaggggaagagcgcggccgggtggaccgccctgtcgacgacgaagacgacgctggaggagaagcggcggctgcaggccaacgggagcgtcggcggcgacgccgggacgagtggcttccggaggatcgtgcggctgttcttcgcctgcatggtggccggcggcatccagtacggctgggcgctgcagctgtccctcctctcgccctactctcagactctcgggatttcccactcgtacgtttccctgacatggatctgcggaccaatcgctggatttgtggtgcaacccatcgtcggttactacagtgacagatgcaccatgaagatgggccgcaggaggcctttcatccttgttggctgcctcatcatctgcatctccgtcatgatcatcggtttctcggcggacattggacgtcacctcggtgacaccaaagagcactgcagcacgtacacgggtcctcgctggtcggccgccatggtgtacattgttggcttttggttccttgacttcgctaacaacactgtccaggggccggctcgtgccatgatggctgatctgtcagctggacaccatggccccaacgtcggccagtcgatcttctccctgtggatggctatcggcagcgtcctcggctacttgtccggcgccaacgggaaatggcacgaatggttcccatggctgaaaaccgcggcgtgctgcgacgcctgcgcgaacctcaagggcgccttcttcaccgccgtgctactcatcgtcgtcagcatgacggtgacgatgtacctcgccgacgagatgccgctggacaagcaggacgtcgacacctccggcggcggcgggtgcgccgtgttcgtcgacctcttcaagagcctcaggaacctgccccccgccatgttcaaagtgctcgccgtcacggccgtcacctggctgtcgtggttccccttcatccagtacaacaccgactggatgggacgggagatctaccacggcgagccgcagggcacggcggccaaggccgacgtgtacgacgccggcgtcagggagggcgccatgggcctgctcttctgctccgtcgcgctcggcgtcacctccttcgtgatccccaagctctgccgcaggctgacgtccaaggtggtctggtccatcagcaacttcctcgtgttcgcgctcatggcggtgatggtcgccgtcggcatggtgtccatgagagggtaccggccgtcgctcgccgccggactcaccgggccggacccgacgctcaaggccgtcgcgctcgtcgtcttcgcgctcatcggcatcccccaggccgtgttgttcagtgttccatgggccgtcgcttctgaggttactgctgaggagggtggcggccaaggtcttgccattggtgtcctcaacattgccattgttgtcccacagctggtgatcgcgctcaccgccggcccgatcgacggcgccttcaacaaggggaacacgccggcgttcggcatcggcggcgccttcgccttcatctgtggagtccttgcgctcatctggctaccaaagacaaggggtgtgtccaacgccgccgtcgtcgccggcggtcactagtgcgaaactccatcaaaggcaccacccggccggcctatcgccgatcgatgtgccatgaattgggagtgcatgagactctgaaaattttcgctacaaactcaatgttgattcgttcgctgtgttgtccttagttttttttttccctactcgttcatgtccatgtgagagtgttaagccgtagaggacaaacaggaattttcctggctgccttgtttattggcagatctcaggaaacccaaatattttaagatgaagaattgttctctctgctttagagtggtagcagcttctgaacaacgagaaaaaaaaaagaagacatttgcatg

SEQ ID NO: 22963 - DNA, 2976 bp, Oryza sativa
  ref <308>: DATABASE ACCESSION NUMBER: AK073106
  ref <309>: DATABASE ENTRY DATE: 2001-12-06
gtaattactggcagcatcttgggagggacaacttcggcatcttcactacttgttccaattttcaaagacacaagcctccttcagtctcatgcaaataaaaagggtcttagtatatcatctgtatcaacaaaccatcacaatgcaaatacaaattctgtgactgtaagtgtccctgcagcatctgatgttatggggaagatgtcagctacagatgaagcacacgaactccatggaaatagttcagggaaagttgcctctggtcagtgcataaacaacagaagaaaacaccccataaagtgctcttgcccatatcctggcattgcaagtctgagattcgatctcacagcaatcatgtctacacaaggcatggcaaacaacaatagtgataggcagttgagagatcatttttatagggataatgttaatgattctatacaggctgaaacttgcgataatacttctggaatgcatgtaatcgacagcccttctagagaatcattggaagggcgtttacttcgatttagcctctgttttctgcatttatggggtgttgatcatgagctagacaaattacttgtagatgaaatgcaagtttgcaagccagaaggctgtcatatagctacaggggtggtgggggatagaggttcatttacattgatgttcccaggaaaagaagccactctcgagctttggaaggcatcatctgaattttgtgcgatgagatcattgtgcatagtttctcttgcacaacgcatgataacattatctcgatcttgtacaaatgctagcagtgccttggcagcattttatacaaggaattttgctgagaaagtaccggatataaagcctccatcccttcagctccacgttctatccccaaacccctccatttgcagaaaaacaaagtatttgattcccagttgcctacatctgatcagatggacaatattattactgcaattcagagtgcctctgtatctagttatggacagttaaaagcggataatggagatgttgggagagaagattgtgatacttctgagataagctcatggttggaatcatttgaaaatcaagagtggctatcttggattggaggaacaagtcaggatgcagtggcatcaaatatcattgttgcagctgctttggttgtttggtacccaagcatcgtgaaacctaagcttgctcatttggttgttaatcaactaatcaagttagttatgtcgatgaatgatcgttatagttcaacggcagctgaacttctagcagagggaatggaaagcacatggaaagtatgtttaggcactgatatgactcattttttgagtgatgtccttttccaaattgaatgtctaagcagtgcaccttccaacaatgctgtctataaaactgcagttgctgtcacaatgcgggaggcattggttggtactctcttgccaagcttggctatggctgacatagttggattttttggcgtaatacaaagccaaatctgggctacttcatctgattcacctgttcatgtaatttcacttaaaactctcattcgagttgttcgaggttctccaaaggccttggctccttaccttgacaaggcaatcagctacgtcctacacactatggatccaagcaatttaattatgcgtaaagcttgcattattaactcaatgatggctctgagagaaatcgcacgggtatttcctatggttgccctcaatgaatcgatgacaagattagctgttggtgatgctattggggagatacataatgccacaatccgagtttatgacatagaaagtgtcacgaaaataaggattcttgatgcaagtggaccaccaggtcttccaagtttgcttgatggatcatcgaatacaacggcaactatactgataacagctttgagtttttcactggagggagagggtcttgttgctttttctgagaacggactgatgattagatggtggtcactaggcaatgcctggtgggagagactcagcagaagtcttactcctatccaatgcacaaagcttatctatgttcctccatgggaagggttttcacccaattcagctcgtctaagtataatttcaagcattttaggacatgataaacatcaaaactcagagaccaagacaagagaactagatgaggctgataatttgaagctgttgcttcataatcttgacctttcttaccgccttcagtgggtcagtggaaaaactattaagcttacaaggcatggtcaggagttgggtacatttcagctgtgatgaatgagtatggaatcttgttgagttgcttttgagatgatactgatgtagtgaaatatgatccaagcggctcaaaagcttagccagaaccatcatgcggacaatcatttgccatgatgtttgcatggagggatctggaaaaaatgtatctgtttcacatgctccaagtgcagcgtgctttcagggttgcagtgattttgcatgatgcaacaatgtattactccattggcagaaatataccttggagtagtaccaaccaaagtgcagttcctggaaccatccggagtttccacgagttcatgatcagctgacagattatactttgaagagttgaaattggaaaggcatttgaattacaggagtcacttgttcataaagtcgctggggcgggcatggacctttcttcatcctgcacgtcctagagaagctaaccctgatgtagtttagggacaggctgtatacatttccccaaagaggttatatatagtagatagacctagtggctttgattttgagctttaacaaaaggatttataaactgttgacatctccttattattatcgatgggtagcatgacctctgtaagatataatgtatcacgtgatctatctcaagggatgctacatttgtgtccattaggagtaaggtgtttttagcaaattttcagaggctcgcaataaattaatgatcttattagtgtcc

SEQ ID NO: 22964 - DNA, 3167 bp, Oryza sativa
  ref <308>: DATABASE ACCESSION NUMBER: AK073107
  ref <309>: DATABASE ENTRY DATE: 2001-12-06
ggtcgcggagccgtgcggggtccccctcgccctcgccccaatggccgtgcattcctcggccgcctccgacctcttgccgggatccccgggtggatggtagcaggggtggaggtaggaggaagggcgcgcgctcctggctgtctggctgcggtgcgggcaggggcatcggtagctgcggtgctgctcccttggggggtgggtttgggtggtttttggatcgtgggggagaggagccgagattctttgtgatgcactgggctcgtgttcatacttcaaactgacaaacaaaaaaggttctttaaccggcttcagcgattaatggccttcactggggaggaaaaaatgaagggttgtcgcccaaaacttttcggagcaaaggagaataaagtctcaaacagaacagacaaaccaagttgcaacaccgggaagtttggtccaagttcttctaatgctgcgtcatcttcccccctaagggcattttcaggtacactaatatctagtaaatctggctaaatgtttggagatggcccaattttaattgttagtgggctttacttgtcttatgcttttgaactaaatggaacaagaagttaagggcatgcgtctcagtcatttcctggcgcaaactcctaataatacaacaactgagcccgtcagaatatttgttgccacctggaacgttggaggaaaagcacctacagctgagctgaacctggatgattttcttccccctgatgatcattcagatatttatgttttgggttttcaggaaattgttcctctcaatgctggcaatgtgcttgtaatagaagacaacgaaccagctgccagatggcttgttcttataaaccaagcattaaaccggccagctgaaaccaatgccaatgtctttcagaatgagccatctccctctgttgattctagtgtctctcgagcttcttcaagcctcgatacttcgttctctgacctagcaaaaacatcaagtagttccacaatcttctagaagtctaatctaaaatccattagaaaatccttcatgccagtccatcgaaaacggcttaaggcctgcaactgccctgtagagatggccaaatcatcctacagggatgcttgctttggttgccccaaagcatatgcttacgaaatagattcgtcagaagaggatgaacgggaagaaaagaaagggcaatcaagggattctaatgggtctgtgcgcagtgaagtaatttctcctcccaccgcaagggatgaactaaaatataatcttatagcatgtaaacaaatggttggcatttttgtaatggtatgggtgaagaaggaactagtgcagcacattggtcatctaagaacgtcttgcatagggcgaggaattctgggttgtcttggaaacaaggtcagaagcaaagcataatatcagtttgaagtgcttttgtaagtactttttctgagtacacttcttctgcagggatgcatatcagtgagcatgacactgcaccagacaagcttttgtttcatctgcagccatttggcttcaggtcagaaagaaggtgatgaattccggaggaactctgatgttcttgagatactgaggcttacactgttttcaaggatttgcaggagaggtgtgcgaaaaatcccagagaaaattcttgagcatgaataccaaaaattttttgatggaaaataattgggatgttctctttgaaagggatcagctcaaaatcgaacgtgatgctgggagagtatttaaggggtggaatgaggggaagattttttttgctccaacatacaaatactcctataactcagatgcttatgctagtgagactgcaacatcaaataaaaagaggagaacaccagcatggtgtgatagaatattgtggcgcggggatggtattttgcaactatcctactaccgtggggagtctagattttccgaccatcggcctgtttgtgggaccttcattgttgaagttgaggtactaaacagaaaggcaaagatgcggccatcaaatgctaacatgaaaatcggagctgaagagctcttaccacagggaaacaataagggtaaaggtacaactcttcttgctcacatgccgtgatagttatctcataagcataattttagtactagctaaatacatgtgcttttaaaaaaatgtttcaaaccttaaagaagtgtataatttttaattgaacatcaattcacaaataaaaccacatgcgcaaatgacacaactatccatgtaagattttcaaatgataaaaacacgtacgtgccgcaaaaaatccaatggtggtggtgctggacaatgtgagtcaccaagcaccaccggtaccatcactagcttcttttgtgattctgaagagaaaactgaaggactgttcatatgtcaaatcattaaaacttgaaagtaccttctcaggttgtatcagacctgcaggcatctactattgttggttcatcactccaggtttaaagtgggtttggtcgttcagaaactaaaaccagttgtactgagaatcaggactgaattcatttagttcaatttctgctaagatctctctcttctggcttaatggtttgaaatctaaaaagaaaaaagctgtcatatatatattgaatcacactgaagcgtgaggattgattgctatattcgtaatttcatcttgcaggttcatcacgaagcatgaactctccaaaaatatcgtaataacctgcagaagtcagacagtttcgtttttgagtcattagcactcaggagtcaagatgtactctttggccctgtttggatgagtggtagataaatcctcctcctaacaggctcttggagtgcctgttatacatacgccttggaaggaaggtgatgattaaatttgtgcagcaaatttagttattctttccaacgaaatggttggatacatattcgacgagttgcttaccagtttactacccaaatactcctaacctagactccttgttggtagggcaaaagtgcagagtgtttttttttccctttgcaaaggttactgagtactgaccctgatgtaggcctgctttggtagtttgaggttatttacatggaagaaaaaaaatgtactgatgaacgtaatgttcacaacggttcttctcctttgtgtagattcgatctggtgcagctttcatg

SEQ ID NO: 22965 - DNA, 930 bp, Oryza sativa
  ref <308>: DATABASE ACCESSION NUMBER: AK073108
  ref <309>: DATABASE ENTRY DATE: 2001-12-06
gagctcggcatcaacacgcgccagatctggcggaagacgctctccatcctccacccgctccgctccgccgatccctccctccacgccgacgccgacctctcgggcccgttcctcttcctcctctccttcggcctcttccagctgctcgccggcaagttccacttcgggatcgtcctcgggtgggtcaccgtcgcttccctcttcctctacttcgtcttctccatgctctcgggcggacgccgcggcgatctcgacctctacagatgcgtcagtctcgtcggatactgcatgctccccatggtcatcttctccgcgatctccctcttcctgcctcggggtggcggcctcatatttggggtgggcatggggttcgtgctgtggtccaccagggtgtgcaccaggttgctcgctgagcttgcatcaagcggtgacgagcatagggggctcatcgcctacgcgtgctggcttgtctacatgctcttctcgctgctcgtcgtcttctgatgccctttttatgatcatgttcaggattcttttgccgtatgaagtggagagctgccaatctaccagtcgctggagtggtcttggtgtgttttgctggacaacagattatcacgccagttgggagattttgtgtaatgatctgttcctttttcaccccgtagttcctgtggcatggtagttttagagggatcgtacagatcttggtaaagaaaagaaaggcaagatcaagacaccgaaaatatgaagtaattaggttttgctgaatattgatggaatctggcgactttcaaactaattcgtggtctgtacgaacttgttcattgtatttacttaccacgattagttgttttagggtcatttctgcctactttgtttttacccccatcttttcttcgtttcagtttgataagagaggattgttttatc

SEQ ID NO: 22966 - DNA, 1075 bp, Oryza sativa
  ref <308>: DATABASE ACCESSION NUMBER: AK073109
  ref <309>: DATABASE ENTRY DATE: 2001-12-06
gacgacgcttgcacttacagctgcagctagctttgcccagttttgcttagcttttctctgcttccttcgatcccatccatgtccaggttgatggccgccatgctgctcggtggcgcccgcgtcgccggtaacaccaccaccgccgtgatggagcttcatcatccgaggccgtcgtacttcctccctccccggccgcggctggcggcggcgagctggagccgcctccgcctgcagaccgcgccgagatcatcccaggcgtacgacaactcgccggcggacgaccgaagggacgtcggggacaggtacagggacgccgcggaggaggcgaaggaggccaccggcgacgccaaggagcgggtgaaagggatggccggggaggccaagggcagggcggcggacattgccggcagggccaaggacgagaccaaggacacggcgtcgcgcgcggccgacgcggcgtcgcgggcgacggaccgggcgaagcacgaggccgccgacaaggcggcggacgtgaaggaccgcgccaaggacgcggcggacatggcgcagggcacggcgagggcggtgagggacaagacggcggagacggcggagggcgccatggacagggccggcgaggccaaggacaggacagtggaagggacgaagcacgccggcgagaaggtggcggagatgaccaaggaaggggcgagcaaggtggtggagacggcgcaggccatcggcgagaaggcgaagcaggcggcgcagggcgcgtggggcgccaccaaggaggcggcgcagggcgtcaaggacacggtcgccggcggcgacgtcgacgccgacgccgcgatgaaggagcaggacaggatcgcgcaggaggagaagaagaggcaggccagggagaagggcgctggcttgccttaggctaaaactgcatacttgttgcatgcttatttgtactaaaagcttttttttttagctgaattttagtcggttcagttcttttggttgaataatgttggcaaacttgagcctcctaatgtctgtaagactgtaactgtaatggaaaggaacttattgaagttattagccatgc

SEQ ID NO: 22967 - DNA, 2424 bp, Oryza sativa
  ref <308>: DATABASE ACCESSION NUMBER: AK073110
  ref <309>: DATABASE ENTRY DATE: 2001-12-06
acccatctcatcatcaccccatacctagccgtttggcccgtttcatcctcctcttcttcttcctcctgccatttcttggcatattgcgagttcttggctgccattttctgggcagtggatcggaggaggagattggggattgggcaagaattatcctggtattgtggatataagatttgcagaggaacagtgggtgggtttgtgctttcgtggtggtgggtgagtgaggcgtcgctttccggcgaggttcgtacgtgtggagtctcgcggccgcgcccgtcgccgtcagtcctcgccacgcaaccgcgccgtcgcttctaaactccggtccggaggcggctgctcccgctccttcgccggcagaggatggcggtgctcgcggcgccggtggtcgccgccgtgctgctgctcacctgggcggcgtacggcgaggcccaatacgtgctgtacaaggacgccaccaagccggtggaggcgcgcgtcaccgacctcctggcgcggatgacgctcgcggagaagatcggccagatgacgcagatcgagcggcaggtcgcgtcgccgcaggtcctcaaggactacttcatcgggagcttgcttagcggcggcgggagcgtgccgaggaagcaggcgacggcggcggagtgggtgagcatggtgagcgacttccagaaggggtcgctctcgacgcggctcggcatcccgatgatctacggcatcgacgccgtgcacggacacaacaacgtctacggcgccaccatcttcccccacaacgtcgcgctcggcgccacaagggatccgaacctggtgaagaggatcggcgccgcgacggcgctggaggtgagggcgaccggcatccagtacgcgttcgcgccgtgcatcgcggtgtgcagggatccgaggtgggggaggtgctacgagagctacagcgaggaccaccgcatcgtgcaagccatgacggagctcatccccggcctgcagggcgacgtcccggccaacttcaccagcggcatgccctacgtcgccggaaagaacaacgtggcggcgtgcgccaagcacttcgtgggcgacggcggcacgcagaatggtgtcaacgaggacaacaccatcatcgaccgccgagggctgatgaccatccacatgccggcgtacctcaacgcgctccagaagggcgtctccaccgtcatgatctcctactcgagctggaacggcatcaagatgcacgccaaccacgacctcgtcacccgctacctcaaggacaggctcaatttcaagggcttcacaatctcggattgggagggaattgacaggatcacaacaccagcaggttcaaactactcctactctgtccaggctggagttcttgccggcattgacatgatcatggtgccgaacaactaccagtcgttcatcagcatcctgaccagccatgtcaacaacggcatcattccgatgagcagaatcgacgacgcagtgactaggattctgcgcgtcaagttcaccatgggactcttcgagaaccccatgcccgattcgagcatggctgatcagctggggaagaaggaacacagagatttggcgagggaggcagtgaggaagtcgctggtgctcctgaagaacggcaagacaagtgacaagccgatgctgccgctgtccaagaaggcgcccaagatcctcgtcgccggcagccacgccgacaacctgggctaccagtgcggcggctggacgatcgagtggcagggcgacaccggccgcatcaccgtcggcatgaccatcctcgacgccgtgaaggcggcggtggacccgtcgacgacggtggtgttcgccgagaaccccgacgccgacttcgtcaagaacggcggcttctcctacgccatcgtggtggtcggcgagcacccgtacacggagaccaagggtgacagcttgaacctgaccatcccggaccccgggccgagcacggtggcgacggtatgcggcgccgcgcagtgcgccacggtgctcatcagcggccggccggtggtggtgcagccgttcttgggcgccatggacgcgctcgtcgccgcgtggctgccggggaccgaggggcagggcgtcaccgacgtgctgttcggcgactacgggttcaccggcaagctgccgcggacgtggttcaagtcggtggaccagctgccgatgaactacggcgacgcgcactacgacccgctgttcccgctcggattcggcctcaccacccagcctaggacctactagctagcttagctgcagtgataaggagatataggaaagatgaaaatttcactaaatgggaattcgtactccctgccattgtttcccttgatactatttttctctgttttggtgtatgctcgatcctcattggcgagcataatgaggatcaatttgattatgagaaattccatttacacc

SEQ ID NO: 22968 - DNA, 672 bp, Oryza sativa
  ref <308>: DATABASE ACCESSION NUMBER: AK073111
  ref <309>: DATABASE ENTRY DATE: 2001-12-06
gaagtcctccacttcccctccactcctctcccacgtccctctcctccacacctctcccctcccctcccctcccctcacctctcttcctctccccggccgccggcggcggcgtctcccggcggcgggcagcaggtggctcccggcccctccctcccagatttggccagagggcggttgggggagggcggcggggcgcggtggggcggtcggcagcatggcgcggcggggcggtcggcggcgttatgcggtgggtggaaggcggtggggcggacggcggctcccctccgtccctccctcccagatctggccggaggggggaggggggaggaggccggtggccagcgtctcggggtggatggcgggcggacggcagcggctcccctccctccctccctcccagatctggccggagagcggaggggggagattggtggccggccagcggcccgggggcagaaggcggcggcgactaccggcggtgacggcaaactccctccctacttgcctctcaccccggccctgagggggttcagagagaggctggcggcggctcggcgacaagtgctgcatccaggatggggcagtggtgatggagtagcacccttggatgatttttatttgaattttgttcatgtatggaggattgtgttgatgaatgaattttgttcatgc

SEQ ID NO: 22969 - DNA, 1428 bp, Oryza sativa
  ref <308>: DATABASE ACCESSION NUMBER: AK073112
  ref <309>: DATABASE ENTRY DATE: 2001-12-06
ggccggtgtttgttatccacatttgcggggcgcagcagcaaaagcacaagggcaaagcctcgccgccgtcgccgccgccgccgccgccgccgccgcggcgatcgccacgccatgtctccctccctcttgcttacctctaggggtacccactcgccggcgccacggccgcaaacccgtcgagcatcacaactgctcgtctctttcccctcgcgctgcagccgcttcgtcggcctccgcctcgcgcgcgcagccgccgattcgcaggggcccaacggcgctgcccctggatctggatctggtggggacggagagggcaaggcagccaatggtgccgacaccaaattgccaaagaaccggagggacatactcctggaatacgttaaaaatgtccagccagagtttatggagctcttcataaaaagagctccgccacaggttgttgatgccatgcgccaaacggtgactaatatgattgggactctgccacctcaatttttcgctgtaactgtgacaacggttgctgaaaatctagctcagcttatgtacagtgttctgatgaccggatacatgttcaggaatgcgcagtatcgtctggaattgcaacagagtttggagcagattgcccttccagaaccaaaagaagaaaatgattctgcagattatgctcctggaacccagaaaaaggttactggagaagttatccgatggaacaagactactggtcctgagaaaattgatgcagtaaaatatatagaattgcttgaagcagaaattgatgagctcagccatcaagttgctagaaaatcatctcaaggaagtaatgaactcttggaatatctaaaaactctagaacctcaaaatctgaaggagctggcaagtagtgccggcgaggatgtcgtttttgctatgaatgcattcataaagcgccttttggctgtctcagatcctgcacagatgaagacaacagtttcagaaacaagtgctaatcagctagccaacttgatgttttggttgatgattgttggctacagcatgcgcaatattgaagtgcggtttgacatggaaagagtattgggtgctgccccaaagataggggaattaccacctggagaaaacatatagcagggaggaaaggggcgtaagagtggggaagtgatgattagttaaaatctagggttactggccggccaagataactgtatttgcgtggtcatattattttgagtggaatggattacagcatttgtgcaaagacaccaatccacattttgggaactaagatgagatgctaggcatagccatttctgatatatttctcggggaggtatagacgacgagatacatagaaacaatagaacgggacctgatgctgtagttttgcaacctgactattgttggtaaaatacaatcaaggcaactcatattacc

SEQ ID NO: 22970 - DNA, 1171 bp, Oryza sativa
  ref <308>: DATABASE ACCESSION NUMBER: AK073113
  ref <309>: DATABASE ENTRY DATE: 2001-12-06
ggcaccgaagcgccgccgccgcgttcaccgttcgtccgttccgctcttccgctccagtctccaccgcacccgcccacccgcgcgccgccgccgccgccgtgcaatggaatcgaggaagccgccgccctccgccctcgtcgacaaccacgtggtccccggggacgtcgtcctcgacctcgccgagatgaccaaccagaccatcaagctcggcgccggcctgcgacaggattgcgacaccatacaggctaccagtgctgggaggctacggctttcgaagcccagcaaatactgggtcgagagctcgcagaagaggtatataccttctgtagaagatacagttcttggtgttgtggttgacaccaaaccagataacttcttggtggatataaaaggtcctaatttggcctttttaccagttcttgcatttgaaggtggtaccaggagaaatattccaaagttcgagattggtacattaatatatgcacgagtggtgaaagcaaatagcatcatgaacccagagctctcgtgcatggatgctactgggaaagcagccgaatttggtcaactaaaagatggctatatgtttgacacgtctactggcctgtcgcggatgttgttaagttctccaacatgtccaattctagaggcccttggaaaaaaactttcatttgagattgctgttggcctgaatggccgagtgtgggttaatgcaccttctccaagtaatgtcattgttgtatcaaatgcgattataaaatcagaatctttgagtggcatagggcaacgaagtatggtggaaagtctcttggagagactatcttgatgggagcggtagaagaatgtacacataagcaggtacatgaaagaagttgatgcgttttgatgtcttatatatgaagttaactggatgattccgcttatgaaacttcatagagagttttgttccaatcatacgtgatacgctggtttgtaagatgtcctgggatttgcacaaggttacttgctgatctgctggaagatgattggtgggtgatattgaatttctcagatatatggcgtgtgaaattccccatctgtataaactaacatatcagctgaactagtacttctcaaatgataatttagctcccatctttaagtgacctatgcgtgacgttgggagaatttagcc

SEQ ID NO: 22971 - DNA, 3192 bp, Oryza sativa
  ref <308>: DATABASE ACCESSION NUMBER: AK073114
  ref <309>: DATABASE ENTRY DATE: 2001-12-06
gatcagtagttaagttcatctctccatctgcacgacttcaagccatccaatgctacaatcttcagaggaaaacccaagattttcttggaatctttgagctcaactccatgagctctgtagagaacccaagcaatggcaggagcaatggccatgctcctgccaacgcttctgctgctactgctaattcggcacaagcgacgcagcaaggccaaaccgagcagaatccgtgcgacgcgggctccgaggccgatctcctgtggaagctgaggaagtacctggtgctgcttgccatcctagcagcggccatcaccttccaagccgggctagggccccccggcggcttctggcagcaggaccagcacggctaccacgccggcgacgtggtgctcaggtacagctacccgaggaggtacctcgtcttcttctactgcaacaccacggcgttcggggcgtccctcatcgtcctcatactgctcctcgtcaaggagctgagccgcgacgccatttggctccggtccctccagttcgccatggtgctcggcttgctcggcctcatgggtgcctacgctgccggcagctgcagggaggtgaggacctccgtctacatctgggctttgcttgttggcatctttgcatatatcactctccatgtcgtattcttccggcatctggcacctcaatggctgtgtgaaatattctacacgattcggaaacactggaaggagattctggggagtatacatggagatggaggaaccgataagacgggagaaactggggattctgaagacgaaacgtctggaacagaatcgcagcttcttgctggttcttgccacattggctgcaacggtgacataccctgcggggctaaacccaccaggtggattctggcctgatgacaacaagcctagccatcttgccggtgacccggtgctgcgagatcactacccgcgccggttcaaggcgttcttggtctgcaatgccactgcatttgctggatcacttgtcatcatcatcatgctgctcagcaatacggcagtggatcatgttgtcaagtcaaatgctctgcggttgtgtgtgttggtgagcctctttgggcttatgggtgcctatgctgctgggagttgcagggaagtccatacatctatatatgtctttgcccttgttggtgctgttttcctctacctctgtattcagtggatcgagcatatggtgccaataccttgcataaagagttccatggaatgggtgggaaaaaagaagacccatttacttcagaagctgggttctttcatcatgcgggggactaggaatcctactgaagaatcgcgctctactcccagagcacaaaatccagtgaacaacagaaggtcaggcacttccgatactgctaaggatgatgttgagaagttgcgcacatatcttctgttgcttggtatccttgctgccactgtcacataccaagctgggctaaatccaccaggtggcttttggcaagataataatggacatactgctggtgacccaatcttggatgccatcaatcccaagcgctacaaggcattcttctattgcaatgctaccgcgtttgtggcatctttggtgatcatcatcttacttcagagtcaactgattactgttggtgccatgaagcgtcacatattgcaaacagccatggcattagacctttttggtcttatgggggcctatgctgctgggagtagcagaaagttctcaacgtcagtgtatgtgttcatcttggtccttgttgttttcacttatttcacgcttcatgttctgctgtccatggctctcaagactcaactgaagacaaaaattgaacatgtgccaaacttattccatcgttttacgagattttgtttcagaagaactgaaggggggagtgatgatggacgaagtgattcggtggagctgccaaatgaagaaaaagatttggagaagcggcgcaagtttctgatgatgcttgcgattctagcggcttccatcacatatcaatctggtctaagcccaccaggtggcttctggagtgacaacgatcgtcaccgagcaggcgatccagtgctccatgatgagtttccaggccgttacaggattttcttctacttcaacgccactgctttcatggcatctctggcagtgattctgttgcttgttaacaagaggctgtgtgacaagggtctgaagtcctatgctttgcgcgcttgcgtgctggttgatttgattagtctcatgggtgcttttgctgctggaagctgcaggagagtgtcgacatctatctacgtcattcttgtcgtcgctgcagtatttgcatatgtcatgattcaaatcctggttctacaagttgcagaacaaaaagtggacttactgaagaagcgccgttctggttttgagagccagcaaagatccatgactctgactggtccaagctggaagcactgataagaaacgaacagaacacaaatggcgcaaagatttgatgctgattggaactcttgcagtcactgtcacatacccagctgggctactccctccaggtggggctttggcctagtgaccaaggcaaccattatgcgggagacccaatcctcaaggttacccatcctataaggtacaaggtattcttctattgcaatgcaacagcattcatggcctcaacggtcatggtcatcctccttctgaacaacacaataagcaagtacaagagatcactccttgccatgaagacagcaatggtattagacttgcttggtctccttggggcatatgcagccggcagctgcaggaagttcaagacatctgcatacatttttgcacttgtcatcgccgtgtttatctacatcgtcattcatgtattgctgtcatttgatgaggtcgcattgttagtgaaagagaagggaaagaaatggatgccatgccttaagatgtgggatcagattgaaacaggagcttcggatcaaccttctgctacgcaatcaggagctccacctgtgtaatagcatgattcattgtgccactattgtgacatttaaacaacctgtaaagcagatttgcgtttcattcttgtatagagtcatcgtgtagaattgttttctagggagcattctgagcctgtgaggtttgctgccatttctgttagcagattttggtaaaataacagaccaaacatgcctc

SEQ ID NO: 22972 - DNA, 1212 bp, Oryza sativa
  ref <308>: DATABASE ACCESSION NUMBER: AK073115
  ref <309>: DATABASE ENTRY DATE: 2001-12-06
gaagcagccgcattcacgcgcccctcctgcctaacccaccaccgctttgctcctcctccacgcttcgtccgccgccgccgccgccgccgccgtcgccgtcgccggcgaagatgatgtctggcggtggctactccgccctcgacgaccccaaggcctccggatccgtcccggcggcgacggggccagatccgccgaccatcaagttcgccgactccaacctccagatcttcccgccgtccgaggccaagggcaagatctccggcgcctaccgcccgcccaccgacgcggatgacacgttctcttcctccaagtccgggggcggcggccgaggcggcggcggcggcggcgctgggtcggacgacgccgggcagggcgggtggttccggatgttctccgtcgcggcgtacaagccctacttcgacgtggacacctccgacgtggtggagaggatcagggagtccgtcttccccttccgcggcaccttcaccgagaagacctccgagaaccccgacctatatgggtcattctggacatgcaccaccctgattttcgttgctgcatccattgccacatttgtcacctacctatcccacaaatggcataagaaggagtggaactatgatattaacctggttacatggtctgctggcttattctatggctacgtgacatttgttccccttggtctatatgtcatccttaagtacttctcagcacctgctggactagtgcaactatggtgcctctatggatactctttattcatcttcattccagcatcgctcctgtctattgtgccaatagaaatattcaggtgggtgattgctggtgtcgcggggtttatgtctgctaccttcgttgctatgaatctgcgcgctcacattgtaaattctggagagcgatggttcttgatcgttgcagggatattcttgttgcagttgggattggctgttttgctgaaactctatttcttcacgataactgtatagggaactgccatacttgcttgtattagtcaggattggatacacggtttttcaggccgaattactcccggattcgttgatgtaattttccaagtatacatccatcttacatgtgacattgtgacaaggaaaggccgcttcgttagcgtacgagacgtattacaatggcaagacttgtccatggattattacgagattaaggcttaaagaatccccttttgtagtc

SEQ ID NO: 22973 - DNA, 609 bp, Oryza sativa
  ref <308>: DATABASE ACCESSION NUMBER: AK073116
  ref <309>: DATABASE ENTRY DATE: 2001-12-06
gtcggcttcttcctccttgcgcgcagcctcgattctcgacttttcttgctgtggggagaagaatcgcgattgcgcgaggggatttcttgctgctcggagatgccgcggattccgctgatcaagttccccaagaggaatctcaagatcccatccccacccccaccagcggcgcaacctgcagatcagcacgcgtccctcttgtcccgattgggagttaaatcagaggcaccatcttcttccggggagattaaaaattaccgctttagatcagatgtgccttccccaccttcttatacggctgttggagggccagcttcactccttcctaaacgcaagccactgtcagaggaagaaattgaggctatcatgcaaggtggtatctactgatattgcatccgatgaataagataccaaaccttttaaatggggtcactagagccatgtcgatatggaccttttcgttgtactccctttttggtgtcaggaagcagctgccctgatactcctttttttgagtattgccaaaatgaccaattcgtgaaaactgaacatgcaatgcatcggttgtttgccaaaatacattgatcatggagttatgccatgcaaccc

SEQ ID NO: 22974 - DNA, 3111 bp, Oryza sativa
  ref <308>: DATABASE ACCESSION NUMBER: AK073117
  ref <309>: DATABASE ENTRY DATE: 2001-12-06
ggttctcctttccgctttacctctctcctctctcctctcgcctcgccgagccattcgattcctccgccgaatcgccgccattacgcccaattccggccgcctcctagggtttcgcccgcgctccgccaccgtcgccctccccccggcactgcgccgccttccccacgccgccctggaggagctgctctgactgcggggaggtgtaggaggaggagggcggaggaggtggtggtggtggtggtggagagagagaggagtgcgtcgccgacgaggtgggtggtggtggtgcgaggagagggcgttgatgaggttgtggtggtagggaggcaaagcagtgtggtggtcgcggcggcgggcggcggcggagatgtttttcaccaggctggatgactcgcccatgttcaggaagcagatacaatcccttgaagaaggttctgaattgctgagagagagatgtttgaggtttcataaaggttgccgcaaatacactgaaggactaggggaagcatatgatggagatattgcatttgcaagttcactggaagcatttggaggggggcataatgatccaatcagtgttgcttttggaggacccgtcatgaccaaatttacaattgccctgagagaaattggaacttacaaggaagtattgcgctcacaggttgagaatatgctaaatgacaagttgctgcaatttgtggacattgatttgcatgatgtgaaggatgccaggaagcgttttgacaaggctagccttctctatgaccaggctcgtgagaggtatttatccttgaagaaaggcacacggacagatgtagcaactgcggtggaggatgagctccatagtgccagatcctcatttgagcaagctcgtttcaacctggtgactgcactttcaaatatcgaggccaagaaaagatttgaatttttagaggctgtcagtgggacaatggatgcacatctgcgctatttcaaacaaggatatgagctactccatcagatggagccatatatcaatcaagttcttgcttatgcacagcaatcaagggaacggtctaactatgagcaagctgctcttgtagggaggatgcaagagtttaaaaggcaaattgatcgggaaagtcgttggtcaccaaatggcataaacgattcccctaatggtgatggaatacaagcaattggtagaagttcacacaaaatgattgaggcggtgatgcaatcagcttcaaagggcaaggtacagaccattcgacaaggctatctctcaaagcgatcttcaaacttgagaggtgactggaaaagaaggttctttgttcttgatagccgaggaatgttatattattatcgcaagcagaatagtagaccatctagtggttatactaaccaaagaagtagcgctccgtcagagcatggttctgggttgcttagcagatggttctcttctcattatcatggtggagtacacgatgagaaatctgtagcaaggcataccgtgaacttgctaacatcaaccattaaagctgatgctgaccaatcggatctgcggttctgcttcagaataatttctcccacaaaaaactacactttgcaggcagagagtgcgatggataagatggattggattaaaaaataactggtgtcatcgcttctttgctgagctcccaatcgcccgaacggcgtcttctgtcgagcccaaagggtagcggtcataatcgaactgccagcgaaagtagttcctttagtagctcgacagaacttgaccattccattagtgaagactgcatgctggaaaggaactctggaagtgggtattttgaccactctggcagagccatccagcatcaccgaaccagcatgaaacctgacaagccaattgacttgcttaggaaagtggtcggcaataatatttgtgctgattgtggtgcagcagagcctgactgggcatccctaaaccttggaattcttctatgcatcgaatgctctggggtacacagaaatctcggtgtgcatatatctaaggtaagatcactgacacttgatgtcagggtctgggagccatctgtaatcaatctcttccagtcattaggaaacacatttgccaacactatctgggaagatatgttaccttcatcaagcagtgttgatcatggtgataattcaagggctgatggactagaaaacacatcacataacttaattttcagcaagcctaaacactcggatcatattgctgtgaaggagaaatttattcatgcaaagtatgccgagcgagattatgtgcgaaagcttaatatggatgatagcctggtagctcaacagatgtgggaaaatgttagttcaaacaacaagaagggggtttacagtctgattgtggggtcaaatgccgatgtaaatttaacttatgggcagacatcatttaattcggccctaacccttggaaaagctctacttttacaagagcagccaacttcaccatcagatggaagttccagatgttttgatcgtagttcacttgaaaggatttctcccagggactctctttctcttgccagcacaagtgcacgtatagatgaattggatgattgtgtcgagggattgtcattgcttcatctagcatgccgtgttgcagatgtgggtatggtcgaacttctcttgcaatatggtgccaacgtaaattctgcagactctagaggtcgaacgcctcttcatcacagcatcttgaaaggacgacatatgtttgcaaagttgttgctatccaggggcgctgattcacaagccacggaccgagatggtagaacagcattacagtatgctattgacagtggaactattgacgacgaagagattcttgttttgttagaagacccaagtagataatccattagctaccaataccccttcagttcagcagagcaaagctttgtgtgctcagttgcctccatgacagagtcaaccggcacagcaagctccaagtttgtgtcgccgatgatcacaatctgtgacgagaacagtattggtgttctggagctgcattgtgccctcctcgttttccgggtctcgtcttagcgtgacgaatgaccagaccccaatttccttctggttgcagtttgc

SEQ ID NO: 22975 - DNA, 2034 bp, Oryza sativa
  ref <308>: DATABASE ACCESSION NUMBER: AK073118
  ref <309>: DATABASE ENTRY DATE: 2001-12-06
ggctttccgccggcgccgatctccatcctactagcggaggtggcgccggcgttctcctgctcccgccgcatcatcgctcaccggtgagcatcctaatccatcccatccggcctcggcctcggcctcgaatttcgtctcctcgcccgccgctttgtgccgaatccccatcctgcgagcagaggtggcgcccggcgtctgaatattttgctccttcctcctaccccgtttcaagcctttgcggcccttgcgcctctccccttgccggccggccccgctcagtcggttgcctcggactcagatcccactcgcatcgccatcctagaaaccgatgagcagcgaggccggcggcgctgcggcgagctctgcctccgcgcccccgccgccgcggaggacgcccctggagaggaccgcggacgcggcggaggagttgtatcgcctccgcgacaccttcttcccccgagaccccgtcgagaaggccgcggccctccgcgccctcgccgacgacgccctcgccgtcctcgactccctcccgccagagcaaaggaaaacaccgcaacaacgtgctgtttatgaattcttgaggggaaaaatattggatgttttccctgattatcataaggaggctgaagatcatttatccaaagcagtaaagttgaatccatctcttgtagatgcatggctgtgtttgggtaactgcatatggaagaaaggggacctggattcagcaatgaactgcttttcattagcattaagcaagggggcagacaagaaaatactatgccagctctcaatgcttgaaagaagtatggctcaaggtagtgaaggccaagcacagctagtggaagagagcattaagcatgcaaaagaagctgtaatgcttgacatcagagatggaaattcttggtataatctgggtaatgcatatctgacaagctttttcgtgagtggatcctgggatcacatgaagcttcatcattcagtcaaagcctatcaaaatgctgaaaaggatgagactacgaaatgtaatccagacctctactataattgtgccacagctgacaaatacctagagaactatgaaagagcacttcgtggatttgaagctgcagctttaaaagatcctggtcttggtgctgatacagaagttcagaagatcatcagtctccttgataagctagatagtgcaatgaagggacaattacgatccaagagattagcatcatcagtgtcttctttgagtgaagtcaacataaaatcatctcacaagaaagcaaccataggcatcctatcagagggtttgaacaagacagttgctgtgttggggaaagtcattcttttgataagacacgacaacattgctccaatgtattatttaacatgcgacttggatcagtcttatttcatactctcagtctatggtctacggaatgaagcaattaaagaaggtgatcgagtggcattgttggatccttactacagaattctggatatatcttggaaagaacagcgctatcagttcaaatcaatccgtgtggactttccagaacagattcttgttaatgaaaaagctccaccacctcatcatgttgtacgagcttcaatccatgcacacaataaaccatgactctgggcaagaaaacattttttgtgttgagagattacatcaagggagtggagggactgaggatgggaagagctgtaaggaaatgatcatatcacaattttgtgcaattttctactttgtggttctacattgtggccagttttgtcagctggtcatgtgatttgatccacacagggatgctttcgttggggttcagctgttcaaggatggtttgatttttccctttgcttagtgtgctatccattaacggggatgtactgtgttagttcgatgtaaatttgacagtacttgtaccctgtgtaatcatataggattgtcggctgctcgatgactgttgcttagtgttatgagaagatggactgtaagttcggccattcgatgaatggggcatttgtaaagcttgttgcagt

SEQ ID NO: 22976 - DNA, 1738 bp, Oryza sativa
  ref <308>: DATABASE ACCESSION NUMBER: AK073119
  ref <309>: DATABASE ENTRY DATE: 2001-12-06
gggggccgcctcgtcctccgcctctccccgccgcctccacctcctccgccgccactgtgtcgtccccgtccccggctgcctccgcctccgccttcccctcgcgcagggtgcagccgtctccgcctcctccaccgccgtcgccgtcaacgtcgctgagcaccgtctccgccgcccgcgttccgccaccgtccctccgtgccgtactaagagtaggtgtatatgcctcttcctccccctcgcgctgccgcctcggcctccccgttgcgccgtcgctgtcgccgagcaggggcttcaaggcggacgcggagaaagcgaggaggtgagtgctcctctcctcttcccttctcggttctcttatgtctgcgaggaacggtgcctcgtcgccgttgtcgccgtcgtcccgctggctggcaccgccctttcccctctccccgtcgagtcatcctctccgacgcggccccttcctcctcttcatcggatggggtgaggagctcggcagcggcaacgagttcgacctcggcagaccgggcaacgacgtatttgctattattgtgcagaagaaaggggaccgatatgtatgcaaatgcagacttgcagagagagaaagagagagagccatggcgcatcgttccccctttcatttcactttacctcttgcatttttgctgcatctctggccctcaaggcggctgctgctgcttggccggtgcgcctctttaattcgatatatcgatcgtttctttttcaatgatgccttagttttaatattttacattgtgtgtctgttaattcatcggcgatatgatctcatggccggctgcacattggctctgccagaatcgattcattcgagtattgcataagctatatatgctatggcacttcagtgatgacaaaagctacaattattcagtgttgtcgttctctcctgcaggaaaaataccaagagtgcgatgacttaccgtggcacgccgtgaaaagctgagattggcagatggctcattgggtgtgatgccggcatgtcggttctcaatattactggagtgcaaaggggtgcgagcaaggctacattggacaaggcggtgcaactatgagccgggagaatgaagatgctttcatggatatgctgcttctagatcctattgaaaatcgttataaaaatgaggaggtcagagctcaagccacgagggatctttctaagtgcattgttgaccacaggatggctgccaaatcattacccacgcctgagcaatatgctgttgaaagggagtgcactaaagccgaacaatggctatgggagaggtcacaactccaggagtccctgcccaagaatgttgatcctgccctttggtcccatgaaatcaacaaaaaaaaaacacgagttggacatgttttgtagaaacattgcaaggcacaagggttctccagcaagagcggattctagcggggtttcagatcacatgcataaaacagatagaggctagacatttctaggatttcgtaactgaacagcgttgtcaagcctgacattttgtagcaatatacagatgagcgagtttctgctgacagtcttatacgatccgactctgtaccacagtcagcccgccatcgggtgcctgcatcttgataatcccagaggtgcggttttcacttgaaaaccctactactaatcatgattgttgatgcttgtgtattcttttactgtaatcgactcaagggctcaaggctgttgtctgct

SEQ ID NO: 22977 - DNA, 2648 bp, Oryza sativa
  ref <308>: DATABASE ACCESSION NUMBER: AK073120
  ref <309>: DATABASE ENTRY DATE: 2001-12-06
gctctctctctctctctctcgctcgcatcgcctacctagacgctgccgccgtcgcctcgcctccctatcacgcccatcccctcccttcctcactctcgcgcctcgctgccacgccgcgccgacgccgtcgccccgccgccgtcgtcgccgtacgccatccccccgccgccgccgtgcatcatctggcgccggtcccccccttcccccttcttcgccctcccctcgcggcggcggcgtaaccggcgccagtatccccctcccctcgtggcggcgtcagagtcggctccggtgctcccctccctcctccatcccctttcgacggcgttggggatggtggcaacgccggtaggggtggcggtgtgaggtgcgggtagaaaggagctggtgacgggcggggaagaggtgtcccgatctgcaccgactcgatctgcgcgagccgaccccgcgccggattgagcagggtatgaggggagaggacggcggcatgggaggaggaataggacaacgccgatggagaaaggggggaggagtgagaggctgttctacaagctcctgatcgacaacgtggaggagctgctgccggtggtgtacacgccgacggtcggagaggcatgccagaagtacggcagcatctacaggcggccacagggcctgtacatcagcctcaaggacaaggggaagatccttgaggtgctcaagaactggccggagaggagcatccaggtgatcgtcatcaccgacggtgagcgcattcttggccttggagatcttggttgtcagggaatgggtattcctgtcggcaaactgtctctgtacactgccctaggaggagttcgcgcgccttgcctccaccttcacccgtctgccaccatcatcgccgccatcacctccgtcctcgccccctccctcacgcatcgtttccctctgcgcttcgccttgtctcccctgcgcgtcgcttccctccaccctcaccgcatcgcgcccctcatcattccctcgtgggtcacctccttccacatcgctgcatcttctggatttgtttgcagccgccctcttgcagatcatccctgatccattcggttagcgtcatgccgccgccggattgccccgtcgactggtttccctcacaccgtcatgcctccttgccctcatgattcacacgacgagcgagttcctgtcgatgagccagcaagatgagcattgtcgctgtcgcatcaccgctggacaagtggacaaccccaaaaccagggtatcattgtcataattagcagatttcctccaatcaaggtctcgacaaattctacatatgggctcagttttctggaaatggaagatgtgggggtggaagcaagggtagagtgatgcaaatgcttcatcgggccacgatcgtctgtcggccttctggctgtttttgcacctgtcctgtccaccgctgacggcgcaagggaacttcggtgagctgtagcaggtaagcaacaagaagcagtgatggattagctttccctttaaggcaggtaatagctgacttgagttaatttattaattggtggattactcatgcaacacctgccagtttccattattcttttatacttttttattgaaaaaaaaaggaattttcttacttctgtcaataaatataatactatggacaagcacttttgtttgattgtattaaaagaaatactaacaaatgttaatgagatataaagagaatcctcctatccagtttactccttttgttggtgctatttgattgtgacttaaacggaccgatgatgtaaattcatttgttatacacttactctactctgcacaataggtctctgattaaatgccgctgagggagggtttgttctggttgatgaattttcaagcaaatctgttaatgatctttacaaggtttctatgtgtttttatgtgttttctgtgagatctttacaaggtttcggtttggggtacaaattcacattcgatctggatttcattttggttttcaagtgaagcaaacaagccaacataaggccctgccaggtatgagtttgctgctcctactgtatgtgcatgtagcagagggcgagaaggaagagagaaaaaagtagagcaagaaaatatttaacattggaattgggagatgttagtatggaattgtgatcaaccgtactgttgtgcactgctttagctgaaaccatctgagtgacaggagaggaactggaagtcgtgcattgatacaaatgatatttttgtgatttgtagcctgagatcaaataaaatttagcaactcagccatatttcagagcctgcttcacttaggcaatgtaaacttataaaggccttcacctagccaatactatttattttatttttattctcacaatagaaatgatattgttttcgatgcccctaggtggctcacaccagtctctgccattgccagtttgggtgcctaaatgaggccggtgccgttgaatgacagccatatttccaaggactcacagctgatacactgagtgcgacaaaggtgagtcatgtgcggcaaatttgaggatcatgtatattttggtattgctggcaggcataagtctcaccattgagcgaaacaccacattcataagtttaacggctatttatctaaattcaattttgct

SEQ ID NO: 22978 - DNA, 859 bp, Oryza sativa
  ref <308>: DATABASE ACCESSION NUMBER: AK073121
  ref <309>: DATABASE ENTRY DATE: 2001-12-06
tcagagcagagacaaccagagtgacagagcagagtgaggtgaggcaaggtccccttcgtcttcaaggcaagctcagctcagagctcagatcgatcgatctgccactggagatggtgtgccaccggatgctgccgttgctggtggtggcggtggcgctgctgccggcggcggcggtggcgaccaactacacggtgggcgacgagaaggggtggaaccccgacgtggactacaccgcctgggtcaagaagcaccgccccttctacaagggcgactggctcctgttcgagtaccagaacgggaggtcggacgtggtgcaggtggacgaggtcgggtacgacaactgcgacaaggcgaacgccattagcagctacagcaaggggcacagctacgcgttccagctcaaggaggccaaggactactacttcatctgcagctatggctactgctacaaaggcatgaagctcgccgtcaccgccaagaagggctccgcatcttcttcctcctctggctccggcgactcctcctcctcctccaagtccgacaccgcctcttccaagtccaagtcttccgccgccgcctcctctctcgccaacccctcctacgccgccctcctcgccgtcgccatcatcttcctcaggatgctctgattctgatctgatctgatctacctctgctcgcctcctttcttgctcggtttgtaatttgtaagttcatttgttcttgatttctctagcattgtccggccggttggattttctttctcctagagatcgatcgaaaattattttgagatgtttgtgttgcaaagatctaccattaggtagcaagtgtgaattaagaagagtacattttttacccc

SEQ ID NO: 22979 - DNA, 1712 bp, Oryza sativa
  ref <308>: DATABASE ACCESSION NUMBER: AK073122
  ref <309>: DATABASE ENTRY DATE: 2001-12-06
ggccgccgccacccgccgcgaacgacgcgccttcccgacgccgatcgagcgcactcctccctgctatatttgggtacacggtgtagtccgatctgtttcatcgattaaccttgctcgattgattgatcccgtcccctcctttgatctgagattcagaattacttcttgtgttattgtcatctacaaaaggtgcaggcaacgtgctcgacggaatgctgaccacgagcgacatggcgtcggccgccggcggtgccagcggcaaggactggtttgactgcctccccgatgatctagtgcaccacgtcctgtccttcttgccagcgctggacgccgtccgcaccagcgttctgtcgcggaggtggcgcgacttctgggtctccatgcctcgcctcaacgtcgacgtaggtgacttccgcgacgacggtcagttcgagaatttcacggtccacgcgttgcctctcttggacagcagcgtgcccttgcgctctctccgtctccgttcttccctacactacctttctgccttgtgggtcaaccatgctgtcaagcgtaaggttgctgtgcttgagtactctgggcgtgcggaactgtgtagctctgttgatgccagcctcagcttggcttcttcatatctgactaaggtggtgctcaaacattttgattttgattatggccagttttggccattgatcgatgcatgccctgccctggaaaatctggagcttttggatgtttggaccttctactcagtaacgatctcgtcaagttcactcaagcatctgcggatcgtcagctgtttattttacaatggattccggatcaatgctccaaatcttctcacaatgtgccttgacgatgtaaatgtcaatggtcctttgggacatgattctttggtcttggagaacttgtcatccttaatgactgcttcagtcagtgtataccattgtttctatcctaaacattatgtcaaaactgagctgcatttttttcatggcctttcacatgctagaaacctaaaattgatagctccactatatgaggctctgtttgaggagggcttaccaacatgcccggtctttaacaacttaaaatgcttggtacttggtgactggtgcatggcttttgacctttatccactacgttgtatccttaggcagtcaccaatgttagaggagctctgtgtggaacttggggaggaggagtgtgagaattgcaagaacagaaaaccagctttctcatatggggaaatatcaccattttggtgtgatcgcctgaagaccatcaaaatcaaatgtaccgaacatgatgagagatttgtcgctttgctgcaactgttttgcaagatcttagtctgtattgaggaagttgacatagataggcagtgggttagtgctcagcctcccgattcgtctgagctttgaaggccacagaaaaacctggcaaatgtctaatgatttgtatccttatcatctactcccccgtccaaaaaaactaaatctcgtactagatattggtacgttgtccagattcataatattataatatgtcaacgtctaatatgaggtttagtttttttagacggagggagtagtacacaaccttgatagcactggcaggagttcgtgctaccttgcgggcttgtgatatctattttgttgccatggagatgcctggcgccatgataattaagactttcgtttgatttatgaacc

SEQ ID NO: 22980 - DNA, 1263 bp, Oryza sativa
  ref <308>: DATABASE ACCESSION NUMBER: AK073123
  ref <309>: DATABASE ENTRY DATE: 2001-12-06
gtggggttacaaggtcttctcctcccgctcgccggctcctcctcgcaccaactccggcgagcgcggcctcgccgccggcagcggcggcggagggggtggcatggaccggtggaccggtgtcctcaacgtcccgctctcccgaggtggccctcccttccgcgtcgccgcctcgctcgtccttactccggccaaaaccctcgccgtcccatgcgccaacgcgattctcttcacgggcgaccgcgtccggggcagcggcgacccggcgatcgagcggctgtcggacgccgcctacctggctcggctcctcgccgggaagctcaccggggaggccaacgcgtgggtggtggatgccgcctgcttcgctggttcgtttgcagtttaccgagatctcgttccgtccgtggacgccgtgggcgaccccgagcggtatgatcccactggcttcccggcggcggctggcgttaccatcattttaggacattgcattcgtgagatacaatctatggttacgaaggccacaatgaagggttcatcaggcaatcaaagtcctactacatcactgttaaaatactgtcctccgaagactgtcatcctggggttcagtaagggtggagttgttgtcaaccagctcgtgacagaacttgcctgtttggcctcagaatcagcaaagatatcagatgatgtttcaggatcaagcccacctcttttaactcgcaatctccttgttcctatttcagctactgagtttttgtcaagtgcgtctgaattccattatgtggatgttggcctcaatcatgctggagcgtacattaccgatcatgcagtgattaaggagatagcaaattatcttatgcacactagtaagaatctctgttttgtccttcatggtactccgaggcagtggtctgatcctaaccgctcatggatccagatggagaaagaggtaatgctgcgcttgcttcaagatgaagctcaaaggtgtgaagggagacttgtgttatcccaaaagagatattttgatggcaaacctcgcagtctgctcatgcattttgaaattttggaagtaatggacataggctgactctatgtaaacggtctgtagcttttttactcccgtcagggatatgcatagaataccagaatgtgaatatatctgagggtcttggatactttcatccgtgctgacttcacggtatcccattccataagttgttttgtgcatgagaattcttgacagaataatcaaccacagttggattcctc

SEQ ID NO: 22981 - DNA, 1873 bp, Oryza sativa
  ref <308>: DATABASE ACCESSION NUMBER: AK073124
  ref <309>: DATABASE ENTRY DATE: 2001-12-06
gcccgcatcacccccacctcgtcaggtttccgttccgcctccgcctctgctgctcctcctcctcctcgccgccgccgccgccgcgacgaggcatggagctcgcgcgatcggcctgctccaaggagcaccacaagatctacgccggctggttcgccgtcgccaacccagatggagatgggcgtgtcacgggtgctgatgctaccaagttcttcgccatgtccggcctgtcccgcgccgacctcaagcaggtctgggcgatcgcggacaccaagcggcaggggttcctcggcttcggcgagttcgtcgccgcgatgcagctcgtgtcactggcgcaagcgggggaggagatcactcaggacagtctgaagcgcgaagacctgagtagtttggatccacctgtgatggaaggtcttgacgaactacttgcgagatcaaaggctggggtaaagagagtacacccagaagaaaatggcgcccctcaggttcaagtgcattctgctaatagctggttcagttcaaaatcagcaaagaagatgcaggtccccctgactgctgttacttctgtaattgatggcttaaaaagactatacgtagaaaaactgaagcctctggaggttgcataccggttcaacgattttgcttccccgttattgacaagcagtgattttgatgcaaaaccaatggttatgctcttgggtcaatattctacagggaaaacaactttcattaagcatctgctgcaaacaagttatccaggagctcatgttggaccagagcccactactgaccgatttgttgttgtcatgtctggatctgatgaaaggactattcctggcaatactattgctgttcaagctgatatgccattcactggtcttacgacatttggcggtgcttttctgtcaaagttcgagtgctctcagatgccacatccgctgctcgatcatatcacctttgtggacacccccggtgtcctgtctggtgaaaagcagcggacgcagcgtagctatgatttcgccggcataacttcatggtttgctgctaagtgtgaccttattcttcttctgtttgatcctcataagcttgatatcagtgatgagttcaaacgtgtgattgcatctttacgtggccatgatgacaaaatacgtgtagtgctgaataaggcagaccaagttgacactcagcagcttatgagagtgtatggtgcactgatgtggtctcttgggaaagtactcaatacccctgaggtcgcgcgtgtttatatcgggtcattcaatgacaaaccagtgaatgaatcagctgttggaccaattggaaaggacttgtttgagaaagagcaagatgatctcctctgtgatctgaaagacatacccaagaaggcctgtgatcgtcgggtcaacgagtttgttaaacgtgctagagctgctaagattcatgcttacataattggccatctaaagaaggagatgcctgcaatgatggggaaagctaaggctcaacagcgactcatagacaacctgggtgatgagtttgcaaaggtccaaagggagtaccatcttccagccggagacttccctgacgttgagcacttcaaggaggtgttgggtgggtacaacatcgacaggttcgagaagatgaagcccaagctggtgcaggccgtggacgacatgctcgcgtacgacatcccggagctcctcaagaacttcaggaacccttacgagtgagcccgctgacctctcgtcagttgtaagataaagatgaccccgctcggtcgtgagtcgtgacactgtatgtgagtgacacctgatgatgaaggaatatgttgtcaaggcgagacatggacggttttctactttacctgcccatcttttgc

SEQ ID NO: 22982 - DNA, 2109 bp, Oryza sativa
  ref <308>: DATABASE ACCESSION NUMBER: AK073125
  ref <309>: DATABASE ENTRY DATE: 2001-12-06
gctacgtagaaatggagaattaccaaaatgcccccttcgtcttccatctctcgattctctctcacaccttcctcctcctccatctccctctccgtttgactctccctgatccgcggagctctcgagcgcccgccgccggcgagcggggtgcagcgccgcgcgggcgacctcctccttccacctgcctccatcatcgctgcttgaatcgatccgaagcattgtaaatggctgctgggaggggcatcagtcagcttttgaagaaagcatttcgtccatctagctcatctccgctctcttcatcctggataaatcatgaagagtcctctggcttcactggattgagagcattggctattctgggagttggtgcttctggccttttaagttttgctacaattgcatctgctgatgaagcggagcatgggttggaagccccacactatccctggccacatgctggcatccttagctcatatgatcatgcatcaataaggcgtggccatcaagtttatacacaagtgtgtgcctcttgtcactcaatgtccttgatttcataccgagatttggttggtgtggcctatacagaagaggaaacaaaagcaatggctgctgagattgaagtggttgacggtcctaatgatgaaggtgaaatgttcacacgtccaggtaagctgagcgaccgtttcccacaaccctacgcaaatgagcaagcagctcgattttcaaatggcggggcataccccccggatctcagtctaatcacaaaggccaggcacaatggccagaactatgtttttgctcttctcactggttatcgtgatccacctgctggtgtttcggtaaccctctctcatacatattgttttgttattttagtgttggtcgctacttgtaggtttcacatatgattctctgagtatctgatttgttagatttgtagggagtggagataatttggtgtgtgctctatggttttgtaacagtttatatcaatggatgcattgggcagaccatgccacacattttttactggactacgagtccttgacaatgcaatatgtgcattcattgcttaagctacatctctatccatcatgcactatcttttttcatggtgatgaatgcggtgtttcctgttctagtttagcgttcatgtttttcaaggtttctgtcctttcttgaattaatgcaacatgttatacttttttctttgttggtgctgttgaaaattccctctaggcatagttaccggctttccagatcctttcagagctttgtttttccttttagttctttctcttttactccctctattacaaaatataaggcacaactacttttcttagatgtttcataatataaggcgtgcatgcatgcatgcaattaactagcacctcttctccactaaattattattattttaactctttaattattaaaatctctaattctattgggtgtatgcattatatttattaggatgattcaaacaatgaggtgataataattgtttcttggtctttgggttaagggtgattatgccttatattttggaatggatggagtataaggttagttggaatgacgaacaccgcatagataggcattataccagcatgtaatatacaaaataccctttcttaattggttatgtactgtgtgtgcaaaaacttgtgttcttggtttgttttttttgaacaacgttttcaccaattttgttctactccgcttgaaattttggtcagtaatacatggaatcttggagtgtattgtgccactttctggtcaggaaacctggattatttcatagaacttgaaaggatctagcagcttgcaaatagtactgttgaatattctaatactgaattaaggatttaccagcttgcaaacatttccagtgaaacacatttttcgctcttggttgagatcgcctgctaaagtgcttctgttattgttactcctcctagtgcactccctaaatttgcttttgcagtgtcctaaccttctggcgttgatttgaaatttagattcgtgaaggcttgcattacaatccctacttccctggtggtgccatagccatgcccaagatgcttattgatggagcagtcg

SEQ ID NO: 22983 - DNA, 2033 bp, Oryza sativa
  ref <308>: DATABASE ACCESSION NUMBER: AK073126
  ref <309>: DATABASE ENTRY DATE: 2001-12-06
gaagcggacagaagaatttcgtgttgataaggtggtagaaacacatcgtatggtacaagatggcaggaaacaattttctgataggactagccacgctcacagattgagtaatgtttctagagaggacaaaaggcatacccgttgcagtgaaagtataccacagacccccaaggagtcacgcaagagaagcagatctaaaagatcccgtgggtcatccctctcttctgacaggagtacctcacattcaacatctaaatgttctcgttcaagagcacattccccatctcattctgcacattctagttcaaaatcatttcagccaactcagcctgaaggtttaagatcaatggcagtatcaaatgtcagtccattgctggtgtctggttcaccacaacacaacttaccatccacagcggaaaacaagaactcagattttctggtgaattctcctttggagggcaatttagattccaaaacaacaactggactcaagcatacacgtggttaccagcaagatatcaaagattcaagattgagtggagagtctccagttattccactcaggttgaaaatccaaaggaatggtgaattgcctgtatctggtaaagatgcttatctggatggttacacagagaccaacttgaataataacttggtttatgatgacaatgttgctgatggtgtgcaagttcagaagaccaattctgaggacgcttcatcagtgaagtcaagcaaggatattctggtgaaaagtgagaggagcaactctttgaagctaacaacaaatgaagtggtctctgctcttaagcacaatggaatggaagcacgtggtacagatttattgaaccaacctgtagagaagtactttggtgctgcacgcctatggccatgggaagtcatttattatcggaagcttaaaaagggtccaatttctacagagaactacgctaagcgacttgagcagaacaaagaatatagtattgtagatcggtatgtcagaagcagcagtggttggtgggagtgccactagaatgccagactggtggtatagatagatgcagttgaggctttgcgtgtatgctgctgcaggtacattttgaggatgacaaggtttgccttctaatcagtccattcctagagctccatgagtgtaagcagacccttaactatgagaattattaagtattaggttctttcattagtataattttgttgagtaagggtttgcacaattgcacctaagtagcttattctgccaccaatattatgctgttgcatggtcagtatgttttaagttgtaatgtttcaacgactcgccccagtgaggtactttggatggccaacaggtaagcaaagatgcttattttatacatgattttttggggaaaagaaacaagcctcttgtttagcagttatatagaggaaaggttctctctgtagtttatgatttccttagtactccctccctctggtttcataattcttgacattttggacaatgatatggtctccaaaatatatctttaactatgttttctctattataatatatacaataaataagtatatttttacttttattatagtacttataagacaaatctatatatgttgttttagtgtctttaaacttaatattttagaagttattgatagtcaaagttataaaagtttgatcttaaccttatcctaaacaccaagacttatgaaaccggagggagtatgactacaattatttttgtaatcaacaacttccataccccgctaatcgagctgaaatattacagtgatgccacttcgtgatagatttcatatgcaagatgtgctcccccggcttacaagcttttggataggaccaagaaattcttcgcatgtttgagtcgtcactgttatttttgtgtagctgaattggagtaggtgattgaagctttgctaactggattacctgttacttttatgtagctaccctatgaggattatgccattctggctggacacatgaactccataatatcagtacctttatttgagcc

SEQ ID NO: 22984 - DNA, 2041 bp, Oryza sativa
  ref <308>: DATABASE ACCESSION NUMBER: AK073127
  ref <309>: DATABASE ENTRY DATE: 2001-12-06
gagtagtgatcacttcctgacgagctcgtcggcgcttgctgtcaccgccgccgccgcctccgccggcggcagcgccccgatgacggcgccaccggctggatattcctgggaatccgagcaaacctcgtcggactcgtcggacgctacgctgtacccgctgctcgtcacgttcctgaagtagcagccgtcggtggcctcgagcctgtacgtctgccgcgtgccccacgtcgccgacaccgcgttcccgtcgcgcatctcgacgtcgacggcgccgctctgcgtgtcgcggagagagtaccgccgcggcggggtaccggaggacagccacctcccggcggcgatcgccgtctcgcggtactccctcgccaccgtgtacgtgacgtccgcggcgtggggcgacgtcttcgcttcgatgtccacgtagagcgggaagtcgtggtgcgcctgccgcgagtagaggacggcgccggcgaggtcggtggccgagacggccgcgtcggcgacggtggtctggttcaccgtctcggcgctgccgtcgccggcgaacgcgtaggtgttctcgaaggcgaacgtctgcgtcgcgttcgtcgtgatcctcccgtgcgacggcgactccacccacccggcggcggagatgcgcctgctcgccgtcgtgtggtagtagtaccgctcgctgaggccgtcgaaccgcgacgccgtcgtgtggctcgtgtttaccgcggctagccgcggcgcgtcgtagctgacgaggctccccgtcgtcgccgtggtcatcgggtccagccagaggtggaggttgccgtcgacgtaccacacgtcgacggcgttggtcaccgcgaacgcgagctcgtgcgccttgccgtccagcagcttggcaaggaaaggcgtcagctcgatgtcgtacgtcggcaggttgaacgagccgatgccggtgatcggccgccagaggagggggttaatgccgccggtgaagatcacggggaacggccacacggcgccgacgaggtcgccgtcgaccaggacggtgacctcgcggaacgggccgttgccgtccggcgtgtgggtgtaccagaactcgtcgtcgccgtggaacgagacgtacacctcgagaaccgcgcggtaggtgttcgacggcagcacgatgctcgccgactcgacgtcggtggcgttctggatctggaaccacagcccgtcgttcaaaggcaagcttctcgagacggggacgatgatgtcggcgggagccgtggccggcgccggttgcctcgccggcgttgggccgaagtaaagatgcagtgtgatgttggcatggtacacgccggtgtactggtcgtcgatgaggttgccgaggtagacggcgagggtggagttgccggcggcgaggagggacgcgtacctggtgacgtctttggagacggaccacacaatgccattgggcctcggctccgccgtgcagctgcggaggagctcgacgccgccgagccaaactccaaagatgcggtcgaactggacgccgcggcaggtggcgcgccactcgagaacagcaagcgagatggccggcgcgccgccgcccgccgcggcgaggcaatcgggcggggagtacgcggcggtgaccggtggcttggtgtaggtgaagccgaaggagctggacaggagcagggtggagcatgggccggagctccccggaggcggccggagcggccggtccacctcgaagtaggtagtcggcgtgtcggccgcagccgcgtcggggacggcgatgtcggcgggggacagccggagatttcgacgagaagcaatggcggctgggatgtaaaatacgaggaggaggaggaggtgaacacgggacatggctccggtcgtcgagcagaacaaggagaggcgtatagcgtgtgtactctgtactactgtgtagtgtggagctcactgccacgcgaggttcaaaacttcagatttggttcaagagtggtgatcatcttttcgtctctaggtacaagggaacaaaaaccttacttgtaagttggtccttgtgagctttgaacgc

SEQ ID NO: 22985 - DNA, 3627 bp, Oryza sativa
  ref <308>: DATABASE ACCESSION NUMBER: AK073128
  ref <309>: DATABASE ENTRY DATE: 2001-12-06
gaccacggcgacgcagaccaatgccgccgccgccgcagcggcggcggcggtggcggcggcggagagagagcgagacagcggcggtggaacgcgcaggctggcggcggcggcggcggtggcggcggagagagagcgagacagcggcggtggaacgcgctggccagcctgctttcgcgttcggccgtgcgtgcgggtccgtgggagggaggggagctggagctggtgggggagggcgaccgtgtaatggagccgtggggcgttttcaagtgctcgccaactgttcgaccttttgcctcgcagggcgtacgctcgatttctcatgtactgtaccttgaagagatgtgctccggtgtgtgcatccacggcactgaagggatcatctaagaggtaaacatcagaatcactatacaatgctctggcaagctgaatcctctgcttctggcctccactcaggttcatgcccctctcccctaccatagtcatatcaccattggcccataactccaaatctctatccaaagcacaaccatgcagcacctcctcatagaagcttctgtccatatccttcccaaagagcacattgtcttgaattgtcccagtctgaatccatgcactctgcgcaacatatgcccttgacccaaaaactgttgtttctgcaccattaatccttgggatctcccccatgatgctgtaaaggaggcttgatttaccagaaccaactggcccgcacactgcaaccttttgacccttgctgatgctcagctttctgtcaatcttaagcatgaattttgtcttcttcaagctattgtcaatttcccaaccatatacccctggttcaatttccattgcaccagtcatagacaggtccttagtcctagtgttattgtcagaacgacttggcttcccctggtgttcttctttgatgaactcttcaattctatctagggacaccttggtttgtgtgaccattgaaacgagctctgggaggttgtagattggatcttggaggattctgaacgtggcaacggcggataagactgttccagctgataatggcatctccacaagaatacatacaccaaatgtgacaaccgacaccaaggtcggtgaggcccaaaacaggaaggcaattgctgaacatgtgtagagatatttcctgagccatcccctctccacatcccttagattcagtagcttgtcaaagtaagctgtctcccatgcatgcagcttcaatatcctcatactcttcattgcttcagccatagcctttatccgtgagtccttcgcttccatgatcttcatgttgaggttctcctgtgactttgcaagtggtgtgttgctcaccataaccaaaactgttgcaaggactgcagacagcgaggccattgcaccaaggctacggtagagaatggcaagtgccaaggatatttgcaagggtagcagccaaattctatgtacgtaccagaagaattcgctaaccttctcaacatcgacatcgaggaagttcacaattttcccgctggctgtgcttgagttcttcatcagcagggatttctgatagatggataccatcagtgctgcacgcacccggaaaccaatcctgcgggcaccaaaataccattgccgctgtgaaagtgactccactgtctttgaggcaaagaaaaggcatgctagcatgtagccatggccatggcccttgtcaggattcttgtcagagagtagctccactaagtaggtgatcaagaatggccccatataggaagcaatagtgttaagccctggtaataaatgcaaagcatcatgttagtataatataaaggtcaaagggtagctccacttttgttcttccaatggctcactaacctgcaaagactccattggcgatcaaaggtgtccagacagcacaaataatggctctccgcataggcattggctcaggtttctgcttgtgaagtgtctcttgaagcaatgcataagattggtttgccgtgtcagactgtggaacagatgggatatggtcgagctcaagacgcaccttgtgtcccttctcaaagattgggtttaaccactggaatgtgaggcagctccaccacccggagttggagaacctgtctgtgctactgtcatcactgtcttctctcacaagcagcggttggttctggtcttgctggtttgctttggaaggtctcatagttactgccacgaggcagatgaatgtgcacaagggaagagaagtgaaatcgacaacagttgcagagttgaagaggtgaagcaaatgcaacgaagtgagaagtgattcggataagaagctgaagaaccaccacgagagaagaactgaaggccagttggatacaactcctgcaccttcatgtttgcagtagagcaagaagagagtcactagaagccatgagactgatttgaagatcaaatccagggagacagtttggcgcttccagaacacaagaacagaaaaacaaatatgcatcaaggagattgaagcattgcaaagtacaattatataagctggtagcaggacttccccttttctttgtgatgaaaccatgtcgccatgtccttctcggcgatgtctcttgttcagcctggcaagctctgcaaggatccaaaccagcaagatagcgaacgatgctatgcggacataatccaatactgctaaggtctccatccaatgccgaaatcaccagacggataatgggcttatggcagagagaaacagaacaccaagatgacaggaactgcactgttacattggagcaaggcaagagtctagggctaaggcaaacttgaaagagagccagcaaacaaagtgaggagtgcagagccgataagagcagaccaaaaggagaacctgattgcatatgacttataggatctggacttgggatctcctctttttaatcggacctgcaatcaactcgttcacgacaagaagtgctctgatctttaaaaagacatatccatgatttttgagattccatttccatgtccgggcctccaaggtaccttgagctgcagcataaagaaaatgtagtaactacagctgaagtgtttatccaaacgcaatggctatatctgcaacatgttatgagatgcagacagaaagtatggcaaaccgggacaccaatccaagttgcccacagagatcaaatctcgctacggcatcctgacgccggatcggcaactttggagcggcatctcggtggcagtggaaactgccaacagtgtgctgtgcagacatgcatgtgtccaccatgcgtgcacttgcatcgagtccttcggctgtacgatcgagtgcatgatcattgaactaccgaggtggccaatgcaaaagaggacggcatgtgagtagaaggtgagcgaaagacacatacatgcgtccaatttggttggttaggaccttgtggttgtggaagagaaggtagaacctagagcctggggcacacgacacctggtaggatgtttgtttttggccatgttaattacaatattattacttgataagtaaactattaataggtataggatacctgctatttttttctggatccgctactttatataagtgatgtacttgggaagaaagaatgggaaaatgagtgcttaactttc

SEQ ID NO: 22986 - DNA, 1429 bp, Oryza sativa
  ref <308>: DATABASE ACCESSION NUMBER: AK099328
  ref <309>: DATABASE ENTRY DATE: 2002-08-28
ggccgccggccaccccgccgtcgacgaaccccacccaaacctcgccggggaaccagtccaagctccgtccaaccatgcggaagaacttccgcaagcggaacctcgaggcggacgccgccgccgaccactccgacgacgacgacgcccgccgcgtcgccctggaggagatcaagtacatgcagaagctccgggagaggaagctgggcatccccgccgccgccgccgcagcgggcgcgtcgtcagcggcttctgccgacggggcctccccccgcggaagaggcggcggcggaggtgggttagcggccggaggggatgccgagaaggaggacctcgtcctccaggacaccttcgcgcaggagaccgccgtcaccatcgaggatcccaacatgctgaggtatgtggagaacgagctgttgaagaagaggggcaagaaggttgatgtgaaggacaaggaggagaaagaccaggtcgatgagctctacactgtgccagaccacctcaaggttaggaagaagaactcggaagagagctcaacgcagtggaccactggcattgctgaagttcagctgcctattgagtacaaattaagaaacattgaagagaccgaggcagctaaaaagatgctacaagagaaaaggcttgccggtaaaacaaaatcagatgctaacattccgtcgagctataatgctgactttttccatcgcggaaaagattacaccgaaaagttgagaagagagcatcctgaactgtacaaagatcaaggttcacaggctaatggaactggaggtaaatcaatgggtggtaaccatccagatggtgctggtgcagggcggagagaagctgctactgatgagttgttgcttgagcgtttccgcaagcgtgaaaaattccgtgtcatgcgcagataacatgaaatggaataggatgctaacttatgctatttcctttaaagggcaagcgtgtcagtgtgaccacatgatggccctatatacatcggttgattttggcttttgcttctaaagccagtgtccatggctcatcatgttataggcgtatcttcgaagcatttgggaaaattggacaggtcttcatgaaactgatcaatattgttctgtactgagcagcaatccaggatctcgtttctctcttttctttaaaactgctggttcaaccatggataaattgccaatgatttcagatatgcctttccatcccgatcctgaggcttaccttccatgcttatcatttctgctgcttacaccacccccttgcggcttgcaccttattactgaaaatatttcctggatataagcaagcactggccatgtaccttatgttatattttcatcagaaacactcagctttgttgatgtgtgcccttctgaaacaaggaaaagctgtcagtaaagaagttgttaatttctgctcc

SEQ ID NO: 22987 - DNA, 2480 bp, Oryza sativa
  ref <308>: DATABASE ACCESSION NUMBER: AK073129
  ref <309>: DATABASE ENTRY DATE: 2001-12-06
gactttgaactctcctcctccccgcaccgccgcatccctttctttcccccaccccttcccgctacgacaaaccatagcatatcctcgtctcaacactctcctctgcctgatcaaaaaagaaaatcaaatgcggtgagatctgcggggtcgtgatcctcaaaccatttggctctggtaactgcaactgcaaaacggcacagccatggagcagtacgaggtactggagcagatcggcaaaggagcatttggttctgccctgcttgtcaggcacaaggtggagaagaagaagtatgtgttgaaaaagatccggcttgccaggcagacagaccgcactcgcaggtctgctcaccaggagatgcagctcattgccacagtgaggaacccattcatcgtggagtacaaggattcatgggtggagaagggttgctatgtttgcatcattataggatactgtgaaggaggagacatggctgaagctattaaaagagctacaggtgatcatttctctgaggagaagctttgcaagtggcttgtgcagctcctcatggcccttgactatttgcatgcaaatcacattcttcaccgtgatgtgaagggatcaaagtataagactaggtgactttgggcttgcaaaaatattgacctctgatgatctagcatcctctgtggtaggaacaccaagttatatgtgcccagaactacttgctgatataccttatggtaccaaatctgatatttggtcactaggatgttgtatatatgaaatgactgctctgaggcctgcatttaaagcttttgatatgcaagctcttatcagtaagatcaccaagtcaattgtgtcgccattgccaactagatattctggtgcatttagaggacttattaagagcatgctacgaaaaagtccagaacacaggccaagtgcagctgaactactcaagcatccacatctccaaccctatgtgctgcaagtccatttgaaatcttctcctgctcgcaacataattccttcccatcagtctccgattgacaaggttaagaaaatgacatttcccactgagtccatgtgcagaagcaagggcaggagaaactctttgggtaatgagagaatcgtgaccttcagcagaccttctcctgaaaggaagtttactagttctattcagagtatcaaggattactcaactactcggagtgtcaaagatttatctatcgatgttagtttggtcgaggaggttagtagtaaaacaacttttaccacaagaacatcgagtattgtgaagactcccaagagaactccaagcaaaacaatcacaactccccagttagaacctccaaaggtatcttacaacagagtaaatcggagcgagctgctttcaagaacaccggtgaacagaagcgctcgggtaatccgcagagcttccctcccactcccactgccatcatccgagacaccgaagcgcggcgtcagcagcatcagcatcctcgagcagctggaatcccccgacgtatccgtgaattcgcctcggatagaccggatcgccgagttcccgctggcctcatccgaagatccaccgttcctcaagctccacggacgccgctctccaactccaacgccacagcattgcgtcatcgaccagtcgatcaccaaggacaaatgcatggtcgaagcgttccacatcatcgacgtcgatgacgacgacgggaggagcgactcgtcgtcgggccgtaacaacgccgcggcggctgcctcgagccgcgacggctcgtcggagtcgacgaggcagcggcggttcgacacgtcgtcgtaccagcagcgcgcggaggcgctggaggggctgctggagttcagcgcgcagctgctgcagcaggagaggtacgacgagctgggcgtcctgctcaagccattcggcccggagaaggtgtccccgagggagacggccatctggctcaccaagagcttcaaggagacagggctgtaagcatatgcgatcactctcaccttgctctagaaaacaaatgagcagaagcaaattaaattgtagctcaggaaagattagttgctgacagtgtgacaccatctcagtgttgcctcccccaactagcttatgaaagattattcagtgatcatctatggattaacaaggaagtagcggtagttctatacttctatgtggtgttggtctgaagcaggaagtagtagtagttcatgtttctaaccatgtaggagtacttgacaggtaaactgggcattccagcccggctgaagaatcatccagttgattgattttgtttctgtttgaatagcatttctcttgttcatgtaatcttgagttattgaaggtttagagagagagagagagagagctgcttgccttgtattatccaaagtaggaattcagacaatggccatatctgatggagacaacaagaagaatttgaggagcttgtactgtactatgcacaaagataacgttcttgtc

SEQ ID NO: 22988 - DNA, 1578 bp, Oryza sativa
  ref <308>: DATABASE ACCESSION NUMBER: AK073130
  ref <309>: DATABASE ENTRY DATE: 2001-12-06
gacgattcccgatgctcgcgaagtttcttttctccgtttctcgcctcgtccccttccacacgactctactaaaaaaactcgatcgtctctctcaaaaaaaaagactcgatcgaatgaaaagaggattttcttcttcttcttccccaatgagctcgttgagttctcgcttccatcgctactagggatttggaatacgctgcgaatgcaatactgatgtcttgaagaaaattctgaggaagttggttgcttggttcagtggaaacccggggaatttgtactgacttggggcacaggttcgcatccatctgcggtgattttgttctgcagtcctcaatgcgtggagagaatacggatgggaggagggaggttcagctgggccctcacacgattcagacacatggagttagattggccagaaatcacctgcatgattgggtcgttcttattttacttgctgcagttgtgattgccctgcatttcgctcctccatttagccggtttgttgggaaggatatgatgacttatgttagttacccggtgaaacaaagcactgtaccagcatggggtgttcctataatatccatagtttgccctgtaattatctttctatccgtttatatcgctaggagagatgtctatgatcttcatcacgcaacattaggtgtgctttactcggtgctgataactgcagttgtaactactgtggtaaagaatgcagtaggaagacctaggccagacttcttttggcggtgttttcctgatggaaagcagttatatgatcaagtgacaggtgatgtgatttgtcatggagagaaaagcttcttaaaggatggacgcaagagttttcctagtggacacacgtcgtggtcttttgctggacttggatttctgtcactctacctatctggcaaaattaaggtgtttgatcgccaaggtcatgttgccaaactttgcattatgattcttccccttcttattgcttcactcgtcgggatttctagaatagatgactatcgacaccactgggaggatgtgtttgctggcggcctactaggatttatcatggcgatgctctgttacttgcacttctttccacctccataccatcatcaaggttggggaccgtatgcatacttccatatgcttgaggagcttcaagtggccaactcccacaatgcagaaagccagcagtcagtgtgtgggcatcatgttgagctatctagactacacaatagcaggacatcaagaaatgatctggaagctggtcgtgtgtaacatccctagcatgttgaaaaccgaggaagcggcatgtacagtaagcatgactaaaccttctatgcttgtaatcaacaaatattagcaactagagctcaagcctcatactgaattatccaactatcatgtgtgaaatcataaagttagcatatgctagcgtagtcgtccccaggtctacgtctacctgttgcgtccaaatcgtttccatgtcttagtgtgttttagttgctagtggaagtactgattgggaacttattcctgagttaaaaaacgaaacataatggaggtccgaaaatgacagcc

SEQ ID NO: 22989 - DNA, 1190 bp, Oryza sativa
  ref <308>: DATABASE ACCESSION NUMBER: AK073131
  ref <309>: DATABASE ENTRY DATE: 2001-12-06
gaagagtagtggccgtgcagtgcagtgaagcccgcgccgcgccgtttcacgggtccacgacgccgcctggtggaaccggtccaccgttcacggccaccgccaccgcgggcgcagacgccgaggcgcgcgcggcctcgccggagaagaggaggaggatggcggagaaggcggtggggcacgggcccaggacgaggatccgcggcggcggcctcgccgccgcccccaccgcgccctccgccgccgcgaggaggctgtctgcggtgtcgtacacggcggcgccgaatctgaccaagaaggttcctgacccgaaggttgtgaagccagccaggaaaacgacgccggtcaagaagcggccgcaggtagatcaggcgcagaagcagagagaagagcttgccgctttgcaggagcagctgagtggcctgcaaaagaagttgcttgagaaagatgaggccctgaggtcggctgagcacttgattagccgaatcagcgcggcgaatgcagcggtcgatgaactgagagggcagcttactgagaaggaatcgcagattgaatccaccggatcagaattgcatggtgcaaagattcaattggcagagaaacaagctgcactggagaagttagagtgggaggcaaaggtttcaagtacaaaagtcgaagagctccaagtagatgtggcgtctatggatgttgaaatctctgcgttaatgaagctatttagaaaaataacagaaaacgaccgagccccttactcgagggagagagccgatgattcatctttggaatgtgaaccggttcaacttgacgatatggttggtgacatcgacatggagaagatggagcaggaaatgtctgcatacgctacagctctcgctgccgcgaaagacaatcctactgacgagttcttgaaggcagtaacagaggcaagactaagactccaagccttcgtactctaatttggattgaagcactgacatgccctgtactacctgaaggagtagctctattttgatgggccatcatgtgttatgcgggtgtcataatgcatctaaactgacagctcttgcttcctggatctcacatttcaaaaagatccatgtttgcgttctgtcggtctgggtctgtctgatgatgccactgagcttgttattgttgtaactttgtaagctaagaaccgtatgacactatgaccg

SEQ ID NO: 22990 - DNA, 780 bp, Oryza sativa
  ref <308>: DATABASE ACCESSION NUMBER: AK073132
  ref <309>: DATABASE ENTRY DATE: 2001-12-06
gaatctcatctccctcctccccccccccccctcattttctctctcctctttctctctctctcttcctcccaatctgcgaagcgagagagagagagagagagctcgaggcgagctctccccgcccttctcccaaaccctaatccttccgccgcgcggaggagagccgcgtctcgggcgcgcgcgtggaggcgtgaagcgatctgtattggtggaggggaggggaggggatggaggcgcggcggatctcggcgagcccgcggccgtgcagcgggaggagggtggtggcgaggaagaggccgaggcacgaggcggcggtgaacagcgtgcggaagctgcagcggcgggagatcagctcctgccgcgaccgggccttctccatgagcgccgcgcaggagcgcttccgcaacatacagctccaggtcgaagatgatggtgatatcctctcccttccagttgatttccagcagctatcgaatttgacctggattactgaagctctccaggaaaatccaaaagaagccttgctttccatgggagctgcagttcatctgattgtgtgtgctagcagggacttgcagttgggcgacatcaacaaaatcaatatcaggctttacaaccacaccaagactattgccttgaagaatttaaaagcggcgtatattaagaaacttgtgacagtgcgtggaacagtcttaaaagtaagtacggtgaagcctctagtgctgcagctgaatttccaatgcatgaaatgcgctacaaaattccctcgtgtgttctgtg

SEQ ID NO: 22991 - DNA, 1322 bp, Oryza sativa
  ref <308>: DATABASE ACCESSION NUMBER: AK073133
  ref <309>: DATABASE ENTRY DATE: 2001-12-06
gcccggagaaagaagagcgcgccgcgccatgtgcggcggtgcaatcctcgccgatttcaccccggcgagggtgccccggcggctgaccgccgccgagctcctgccggtgaccccgactccccccgccgccgagaggagaaccacccggaagcgcaagtccgacgtcgacttcgaggcggagttcgagcttttcgaggacgacgacgacgacgatgagttcgagctttccgacgatggcgacgagagtttggccgtgtcatgtgtgtcgtcccccaagtcgaaggcagtaccttcgttttctttttcgtcggatgtctcctcgagctccaggccgcggcggcgcgtggcggcggcggcggccggtcgtcggaaggcgagcaagaagagcaagtacaggggcgtccggcgccggccgtcggggaggttcgcggcggagatcagggaccccaagaaggggcggcgcgtgtggctcggcacgtacggcagcgccgaggaggccgccatggcctacgaccgcgaggcccgccgcatccgcggcaagggcgcgaggctcaacttcccccgcgacggcgatggctcccctcgccggagtaacgaccggccctgctggaccatcgacctcaacctccccgcggcggccgtctccggtgacgacgacgacgccatggccgtcgacgccgcagacgcagacgcaggcagtgctggccgtgcagcagcctatgcagatcaagaagcactgagcgcggcaaagtgcaagatcaagcagtgtcctcgcgacgaacagatggcgagcgccacacctgagctcatggaggaggacgcgagcagcagcagaaacatggtgcccctgtccatggcgctgcagctgcagtatgcggcgatgatcgccgaatgcgaccgcgagatggaggagatcgccgccgtggagagggacctcgagaggcgcaggaggcaggtgttcgagcgcagaggccacctggtcaggcaggcctctcttctgctcgactgacgatcttgctgaactgaactctgaatgtttgagcttgtctgaagtctgaactctgcactatgccatatggtgtttcaccttcactgtgaggctgacatgtgggccagacgtccgtttgccttgcttgcttttgagctgcaactgggcgttgtgctgcaagcctgcaaagtgcctgtgtaaagtttgtgggattgtgtgtgtggatcttgtatccttgtgactttgcaagctttaattttgtgaggaacaatagtattttagattggtgtgtaaaatatagaaataaataatagtagcaactaaattttggttt

SEQ ID NO: 22992 - DNA, 1741 bp, Oryza sativa
  ref <308>: DATABASE ACCESSION NUMBER: AK073134
  ref <309>: DATABASE ENTRY DATE: 2001-12-06
gagtattccggattttgggcccccgaacacgaaacccacccaagtcgatggaggacggcgatggggaggaaggcaccgccaagcgcgccaagctctccgccggcgacggcggcggcggcggcggcgaggaccgcctcagcgcgcttcccgacgacctgctcgtccaaatccttctccgggtagggacgagcgccgccgcgcggaccagcgtcctctcccggcgctggcgctccctctggtacctcctcccggagctcgatttcgtctccacagccgacgcccgcgccatccgcgccgccctcgcctaccatggagcgcctcccctccgcctcctcctcgtctccgccgtgggcgccaccgctggatccgtcgcggaatggctccccctcgccgcgcgccgcctctccggctatctagggcttctcaacgtggtgccgaagacgaagagagacgagggggagggcgccgccgctggagaagttcttgagctgccctgcttcgccagcgccgccaacctcgcgctggacctagggttcattgccgtcgccatgccgcgctccggcgtgttctcccggctcaccctcctctcactcgacaacgtccggttccaccgcccgtgcgacctcggcgacgccgtctcctcaccgcggtccccattcctgaagagactcaccatccagaatgcccatgggttgagcaatctcagcatccactcggagtctctcctgcagattcgtttggggggactgaaaggattgaagcagctcaatgtcgttgcgccggcactcggcgcgctatatgtgatctcctgcttctccgatcctctggctatgagtcaaccggtggccgacatctcagcccctcagctggagactctccactgggaggatgctttcgatccaagctccgtccggtttggcaacatggcaaatgtcaagtgtctgggaactcacttttatcttgcatttggacaagaggacttcggccacaatggcgattgtttaaggctgttgcagcgctttcagtttgatgccctcgaccgtctttccctcacgcttgcctatatgtcggaactaaatgaccttgaaaatgaatacttgatggaagaaatgacaatgctccctgacattatgttcctgggccttactgtattggcaagtggacatgccattggtcccagcgtattccatgttctgagaatgagcactagtataagaaggttggagctggcaacagatatttattctagtaatccgcaggcacgagctgcatgttcatcaagttgcacttgtgatcttccaccaaattggaaaactgaggaactaaagttggcattccttcatgaggtagaaatcaataacttcaggggaaccgaacatcaaattgctcttgtgaagcagctattcggttgggcagcaatgctgaaagacatgacaataaatttctgtcattcaatcactgagagcatggcaaggaaggtgtgccagatgttactaagtttctctaggccagaaatactcatgaatttttacatttaccaacaaacgacatcaggttttgtatgttccagaggacaaatgcaccgcactaaacttgttgcttgattgtactcattttgctttccagtgttgtatactttggtatgaactgtattgcatgtaaacatcaaaatggtaacagaatcctgtacaaggttagtgtcacaaattctattacccatgataaagactttttattggtt

SEQ ID NO: 22993 - DNA, 1809 bp, Oryza sativa
  ref <308>: DATABASE ACCESSION NUMBER: AK073135
  ref <309>: DATABASE ENTRY DATE: 2001-12-06
ggacggacggaaggatcgatcaccaactccaactccaactccaactcctcctcctcctcctccttccgccgccgccgccgccagagcatggaaccctccgcctccgcgtcggctgatccgcccaggaggtctccatggaggcacccctccaacgggggcaaccccaaccccaacggagacgccgtcatcgacacaactagctggcccgcgctctccgaggccgccaggaacccccccaagcctcctccttgcatcgactctccatacgagggcaagcagtcgtctcgccacaagccggccaggcgcgggggtgccggtgccgaccactccccctccccacgggatgaccgcgccaccagctgggaccatggccgccaccaccaccaccacaacagtggtggtaggaggggctcttttggcggccgcaggagaggaggaggaggcgggggtttcgacgccttgtaccgtgcccctattggcccctatgtgcgtggtgccactgcgcccccgcccccgcccccgcctcccatggccgttgctcctccccccttccttcctccgcccttacgacctttcgcggcacctctcctctttcatcacgatatggcatcgcccgtctctcctgtttccccaatctactatgttggccctccccctcctccagaagctcttaggcctttgcctcctttcccccctaccatgcttgctccacctgcttacccttactaccaccctcaacctcaacccgaccccgagcccgagcctgatgctgatcctcaacaacatcgtgccaacctgctcaaacagattgagttctacttcagcaaggataacttatgcacagatgttttcttgaggagaaatatggatgaccagggctgggttaacattgctcttatagctggcttcaacaaggtccaggaatccactgatgacctgcaatacataaaagacacaatccagtcctcatctatactggaaatgcaggatgacaaaattaggaggcagaatgattggaacaagtgggtgattcctcgagagagcaacactgacgtgctgccaagccctaacatcaacaatctgacagcacatcttggaagcgtgggtctgcaggaatcagcagctagctcaagtagcatggtggatgaaaaccatcatgagattcttaccaatggaccaacttccggtaacaaccaagcaccagtagttgaagacggtgctggtaagctctagctatgatggtacacattggctccaatctggcccatgctatgactacaagggttttgtccgagcgcgagtgacaaatgttttgcaattttttgatggcggtatgcttgcggggcgcactgactagtgagttcgtttctgggggggtttcaggtaaggttctttttgtctaccctgttattgaggtaccgtgaaggtttcagcctttcaggtggttggtaaaaaaaaaaagaagtgctgtagctgaaacaaaagacagcaaacagaaggcatatgtagaggcatcaaagaagatgaggggggtggggggagccattggacataatgaatgaaagacgatggtgcgctaagttaaaaggcactcgagtgcttaatattgcaactgctgaatggcctttgggcttgcgtgactatgggcctgaagtgtgctgtgaaccatgtcggttttctccccctgtttggatgtaaccctccaatttttaaaggaggatctgaactttctcgctcagagagtcaggaagttgacaattcgacaaggatcttttgcaactcaactcgttgaagtagcgtttgaatgtt

SEQ ID NO: 22994 - DNA, 1389 bp, Oryza sativa
  ref <308>: DATABASE ACCESSION NUMBER: AK073136
  ref <309>: DATABASE ENTRY DATE: 2001-12-06
gacggtccgggcaaatgcctctgcctgcgggctgcctccaccgactaacaacgagggcgacgggcggcggcggcgtggcgcggcgaggcgaggcgagcagctcgtcgcgacggtgccagctgggcggcgggccaggggaagccgatgcggcgagggagagggaaccatccatgccattccccaatgcattaccagtgcttgcccagcgacctttggcagcaagcaatcaacatctgaactagatggtccgttggaatcgaggaatgctttgatcagcctgtgtcatgccaatttccccttcaatgcttgtgagcctctgcagcgcctgcagtgataactttatgagaaccttctgttgtgcttcggaatttaacgttgcgcttctgaagcttgtgaatccaatgatttttgggatcagggagaagatcatcgtctgttaatggtcgctccttgggaattgactggtactctgatatcctctcccagcatttgtatgtggattcccagcatttgtatgtggatcttgggttgttcatgtgcgttgatcgggttggtgttttcagcatgatatcagtgtccccagctgacccttgtctttgcccttgatcaccagctgcatccagacttttctcctgactttctactgtatcaacaaataaaggatctcgatcatcatcttcatccagaagcgggtgtcttctttttggttttctgtcagtatccaggagtgtagaaacaaggtacatcgtcccagggacagttacaactcggaggctctttgcaagctcggcagttaccttggcggcatataacctgatagttgtatgatcatttctgctagtccagcccagcatactgattaacctagccatggtctgcgttgaagtggtcagtttctccagtagctgtgccctggtcggatctctctgcagaaaaatgtgcatcatccagatcccatacagctgtttcttggacaagtcagaatttatagaatccatggcaaagttgctgaggctgatcctctttgcagcaaatacacctccttccatgtttttctcgaaggcgtatgtgtagtatagattgacagattcaactccccattggcctgtgaatccaccacggcggacgagggttctccgagggatgaacgagaagacctccagtatgcctgcaacgatgtaaagtattccttggccaagcaccatgctatagaatatggttagagattcaccaagattttgtcggtcatcaacaccgaagtagttatgttttgcaaggcgcatccccgcgaggttgacacgcatgagtgctgctgggatatgtaagttgccaaatgacagtatgattgcgatcgcgatcataattaatcgacactctggatcaaccatg

SEQ ID NO: 22995 - DNA, 2469 bp, Oryza sativa
  ref <308>: DATABASE ACCESSION NUMBER: AK073137
  ref <309>: DATABASE ENTRY DATE: 2001-12-06
gaggagcagttagcttctccccctgctttctgctcctgacgcgagagcaagaagaagaaaaggccatggcggagaagagggcttcttcttgaggtgaggcagctgcttcgctttcctcaccccccaaatcgcgccagaattcgatcttttccggcggcggctggtggagcgcaagatcgcgctgcgcgtttgatgggcaaggcgtgttcttggtggagtttcttgggagccgcctctcgtcctggatccgtggcggccggcgacatcctgggccggggagggtttctcggatccggttcttgctaatccgatcggaatccgagcggatggggtcagcgatggatgtggtggacatcagctccgacgaggagggcttcgccgcggcggcggtggcggtggcgacgacgaccaagaaggcgtccgtcgactccctcgggtggattgcggaccttcttagagaggaggatgagagggctttgtcggatgagttcgatgatctggaggtgatgagtgagctgtcggcgccgccggtgatggcgcagcagaaggggggcaagcccgattgcggcggcgaggaagacgacgatgattgcgtggtgctggatggggatcctgatgatgttgtcgctgtcgcgggggagaaagggagtgagggagatggcagctcggatgaattgcagatcgtcgcagagaaaggcccggtagcatgcagggacttccctcattcccgccatttatgttctaacttgcccttcagcaccacttctcatgtgaagtattgtagcatgtgccactgttttgtatgtgacactccagccccatgcaattattggggtaagggcaccgagatttatgatcattgtcatgctacagataaggaaaaaaagtggaaagcaatgagacatacattcaagagcaaaggtctgccaacatctcatccagaaaagcgccagaatgtcgtatacccaacaacaacgtcatttgtacagcaagatacacagtgcgaaatttcactcatacaatcgcatatgactacttactttcccaaccaaagtcatcttgcgaatgttgtgaaccaggggttaactcaaacaagacatacatcagtaagagtctcaccgagtgtagggagaactgtcagtgcaacaagaacaactcctgcaacaagggctggaagaggtatgagcaatgctcccagcattcagattcctcaatcacgcacaagattcaaacgagtaggggctacttctccaggcatagtaactctaaatgataaccagtttggttctgctgctccgaacaatacccagttgcaccagccatcctcgccacatgcatcccagccagctcaagttgcaccaagaacattgtttggtactgttcagaaaaatccccctcagagatcgctaagtgccccaatagcgcttcaagggcaacaagatcagtcggcgtcgtcctatcaggctgcctcaaacggaacacacggtacaggaccacaattttctcggtgcatttctcttacgactcagagaacacaattactgcctgaaccagcattggatgtttacagcaaaagctggcaagacataattgatagtctggcatctgatctggaggtaccagattacaatatgggcgctgcagagtctcagcagccagacaggactatttctcaacctcttgattccattacattccagggggtaggtcttcacagtgagcctgttgtggcattggcgaacttgatgccttgtaatgggcagaatgtggccaatggcatgataggcagcaattgtcttgcacaaacaacacaaattttgcctcacctcaatcaccagcctagccttgttcccaatgaatcccatcttaataattcagtaagttccactgcggacggattactaatggaagctgctcatcagagagacacgcaaggatcggattctctagatcttctatttgactttgagtttgaggattgggattcagcagagccctgacaaacaacctccgcatttctgaaccccaaggacaataaaatctggcgtcaccgacaagctggttcgttagcttccttcctaggaagaggaagagatgttccttgtacattctgtaggttcagtggtagaaatgttttttttttccttccatgggtgcttgtttacagtagcggctatacaggccttctaggccttagattagcagttatcgctctgaagttttagggatgaagttcaattcccaaactgttgttgatcatatatctatgggccataactccataatcctatatctatggtccataactccataatccaattgccagaatgcatgtttcaggtagcatagcactgaagcaaaatcttctgagcactggtgtggattggctctagtaactgctgatccagcgaagcaatgtatagtttttgcttgataatggcaaagagtgatctgctcttgaaaagcctt

SEQ ID NO: 22996 - DNA, 1902 bp, Oryza sativa
  ref <308>: DATABASE ACCESSION NUMBER: AK073138
  ref <309>: DATABASE ENTRY DATE: 2001-12-06
gacccatcctcctccctaattactccccccatcccctcctcctccgccgccaagcacctcgcctcctccgccatggcgaccgccaccgcgtcgtccctctctctcctcttcgcccacccacactcgtccaaccccaggcccttcgccggcgggcctcacctccgccgcccgctgcgcgccgcgccccaccgcgcgcgatgcgcctccgacgccgccacgacggccacgaggcaccgccgccccgcggaggagaacatccgggaggaggccgcgcggctccgcggccccgggaacgacttctcggcgtggtacgtgccgttccccccgacgcccgaggacgaccccgacgagcgctactcgctggacgaggtggtctaccgctccagctccggggggctcctcgacgtgtgccacgacatggaggcgctcgcgcgcttcccgggctcctactggcgcgacctcttcgactcccgcgtggggcgcaccgcgtggccctacggctccggggtgtggtccaagaaggagttcgtgctcccggagatcgactccgaccacatcgtctccctcttcgagggcaactccaacctcttctgggcggagcgcctcggccgcgagcacctcggcgggatgaccgacctctgggttaagcactgcggcatctcgcacacgggctccttcaaggacctcggcatgacggtgctcgtcagccaggtgaaccgcctccgccgcgcgccgctctcacgccccatcaacggcgtcggctgcgcgtccacgggcgacacctccgccgcgctttccgcgtactgcgccgccgcaggtatccccgccatcgtgttcctccccgccgaccgcatctctctgcagcagctcatccagccaatcgccaacggcgccaccgtgctctcgctggacacggactttgacgggtgcatgcggctcatcagggaggtgaccgccgagctaccgatttaccttgccaactcgctgaactcccttcggcttgagggccagaagacggcagccatcgagatattgcagcagttcgattggcaggtgccggattgggtcattgttccaggaggcaatcttgggaatatctatgccttctacaaggggtttgagatgtgccgtgttcttgggcttgttgatcgtgtgccgcgtcttgtatgcgcacaagctgcaaacgcaaatccgttgtatcggttctacaagtcagggtggactgatttccagccacgtgtagccgaaactacatttgcatctgccatacagattggtgatccagtatctgtcgaccgtgcagtggtcgccctgaaggcaactgacggtattgttgaggaagctacggaggaagaactcatggatgcaatgtcacttgctgaccgcaccggaatgtttgcctgcccacacaccggggttgcacttgctgctttgttcaagcttcgagaccagcgcataatcgggcctaatgaccgcacagtggttgttagtacagcgcatgggcttaagttcacacaatcgaagatagactaccatgacaggaacatcaaggacatgctgtgccagtacgctaatccaccaatcaatgtgaaggctgactttgcttctgtgatggatgttctccagaacaagctgaatggtaagatctgagctttagttaaccccccatggccgttatcttgcttattgtcaccatgaactcctttttctgcatcttattcaactgcagttgatgaacttggtgtgtcacagtaatctttaatttgtagtactaggttttgaggctcttctaactatacacataagtggatagagctgttccttgtactttatatatgtatcatataatatgacaataagtggttatgccctagcacttaattgaataattgtttcgaatgg

SEQ ID NO: 22997 - DNA, 2482 bp, Oryza sativa
  ref <308>: DATABASE ACCESSION NUMBER: AK073139
  ref <309>: DATABASE ENTRY DATE: 2001-12-06
gaaaccagtccctctttccggccgcaccaccaccgcctcccctccgtttcccctccctcacttccccttccgcgactgcgagcttctccgccgccgccgccgcccccaatcgcccgccgccccgcgccgcgattgcccctcccggtgcccctcccgcaggcgccgccgattcccccgacccggggaagccccggtttgccgcgagctgcgtcgccggtgggggtttgatttggggctgatccgatcgcccccccctagatggtgaccgacgccgaggaggtctccccgacggcgtcctcgtcggaattggagcaggaggacgatgacgatgactgctacctgagcgatcaggaggacgacgccttggaggagtccgtcctccaggtgctggaggacgaacgcgacgaggattgccattggtcctccacctccgtgatcaccaaggaatccctcttggcggcgcagagggaggatcttaggaaggtgatggagttgctagggttgagagagcaccacgcgcggacgctgctcatccactacaggtgggatgtcgaaaggattttcgagctgcttgatcagaaggggagggacaggctcttctcggaggctggtatccctctccaacctgctaataatcccggctcgccctcctcaacggaggtaacctgcaatgtttgctatgacgatgtgcccctctcggacgcctccaagatggactgcggccacaactactgcaatgaatgctggacaggatatttcattgtgaagataaatgagggacaaagccgccgtatcaagtgcatggctctgaagtgcaatactatctgtgacgaagcaatagtccgtaagctagtaaatgcaaagcggccagatattgcagagcgctttgaaaggttcttgttggaatcttatattgaggacaatgatacagtcaagtggtgcccaagcacaccgcattgtggaaatgctatacgcgtcaaaggtgatattcactgtgaggtggaatgtacatgtggacgccagttttgttttaattgctcctcagaagcacattcaccatgttcctgtgtgatgtgggagctctggatcaagaaatgccgtgacgagtcagagaccgtgaattggataacagtaaatactaagccctgtcccaagtgccacaaacctgttgagaagaacggtggctgcaatctggttgcatgtatatgtgggcaagcattctgctggttatgcggtggtgctactggcagagatcacacatggtcaagtattagtggccacagttgtggtcgattcactgaagatcagtcaaagaagacagagcaagctaggagaaacctttatcggtacatgcactaccacaacagatacaaagctcacactgattctcttaagcaggaagcaaagcttaagggcgacatccaggggaagatttccatttctgaaaacaaggattccaagataaaagattactcttgggtgataaatggattaaacagacttttcaggtcaaggcgggttctttcatattcttatccttttgcattctacatgtttggtgatgagattttcaaggatgagatgacttctgatgaaagagaactaaagcaaaacctatttgaggaccaacaacaacaattagaattcaacgttgaaagactatctggtttccttgagagggattttcaaaattttagtgatgatgaggttatggatacaatgaagcatgtcatcaatctttccaatgtggttgatagactctgcaagcaaatgtatcagtgcattgagaatgatttgttgtatccactgcgtacgcctcataatattgctccatacaaatccaagggccttgacagggcctcagagctcaatgtttgttgggattcttctgaacaaggtttgcaaccaattaactacagtcaagatgaacacaagagtcagcctggtttatctggttcatctatttttggaaagcggcaacttggctcaagttctaataacaatgggcggcctcacaagcgagaaagaaatgatgcccatggtggggttgccctttttgacctcaatgtgccagctgaagtggcagacaagatatgaaacttaaataacttacagcacattccgttgcaagtgtacagctgacccgggcttcttcagctacataaaggaaaactctgctcttttttgttgcgttagagtgtcgacatggcaagtttaaacggggggctataataccaacaatagggtagcgttcacttattctcttgtaaatcatgacaagaattggtggcaatgtgcaatgtgcacgttgcatagctcttataatgctaaatctacccctcgggcaagacgatggcattttggaagataaaattttgaaatgtccttttgcaaacatgcaaggtaatgtatgaagcatattggaagtgcctgcggatgcgtagcacctggaaattaatagaaacaaactaattgagtcgcg

SEQ ID NO: 22998 - DNA, 1621 bp, Oryza sativa
  ref <308>: DATABASE ACCESSION NUMBER: AK073140
  ref <309>: DATABASE ENTRY DATE: 2001-12-06
gctctctctctctcctcctcggccgcgtaaaacacctcccaccgcctcctccaccccctcctcctccccccgcagagccgaaaccctaactccgccgatctctccaggtgcccaaggggagggaggggatggcggcggcaccgggggcgggagggcagggcggcggcgggatggacgccgtcctcctcgacgatatcatccgccgcctgctcgaggtgcggacggcgcgcccggggaagcaggtgcagctctccgagtcggagatccgccagctctgcactgtatcccgagaaatcttcctcagccagcccaatctcctcgagctcgaggcgcccatcaagatctgcggtgacatccatggtcagtacagtgaccttctaaggctttttgagtatggtggttttcccccagaagccaattatctattcttaggtgattatgttgatcgaggcaaacaaagtttggaaacaatatgcctcctccttgcatacaaaatcaagtacccggagaatttttttcttctcagaggcaatcatgagtgtgcatcaataaacaggatatatggattttatgatgaatgcaaacgccgatttaatgtgcgtctatggaaggtcttcactgattgttttaactgtctccctgtggctgcgctaattgatgataaaatattatgcatgcatggtggcctctctcctgatctgacacatttagatgagataaagagcttgccccgtcctactgatgtaccggatacaggtctgctatgcgacctactttggtcagatccaggaaaagacgttcaaggttggggcatgaatgataggggggtctcatacacttttggtgctgacaaagtttcagaattcctggaaaaacatgaccttgatcttatttgccgggcacatcaggttgttgaggatggatatgagttctttgccgacagacaacttgtcaccatattctcagctccaaactattgtggtgaatttgataatgcaggtgcaatgatgagtgttgatgaaactttgatgtgttcttttcaaattcttaaacctgctgagagaaaaggcaaatttatggcatcaaacaaaatgtgaaatggtgaagcccatttcgctcatagcgactctgaggctgtcctgtggatgcatctagacatcaacgtgcaggcgttaggcttgaagcaacattgggctaattctaccggagaagccaaataatatcatatctaacagttggtctggaaggttactcttcatggcaagtgccaattttttttccattttctgttatgatgcgtgaaactatcttgtagatgtagatatattgattatggaaggatgaagttgccaattgacctgaggcggtttccttctgcagccaggaaaaatctgaatatggagtttctgtttggtagtttcactatttaaaagcacatgtatcacttgtatggaggtaacaactttacttatgcaagcccgtgttttctgttgcttgtaagcaaaattggatgagtttttatcttgttttctatagcgtgctaatattgccaatggcaacaatttgcgaactgcaattctagaatgtactggatgattgaacctttaagcatttgcgaact

SEQ ID NO: 22999 - DNA, 2234 bp, Oryza sativa
  ref <308>: DATABASE ACCESSION NUMBER: AK073141
  ref <309>: DATABASE ENTRY DATE: 2001-12-06
gtgactccgccaccaccgcaatgccgcgccgctccgcctcccggtacgccgcctactgggccgccgacgcgctcgccggcgacgacgccctcgacttctccctcaccaaggcgctggtgggcgtctcgccggattccctcacgggcgcccccgaggccgtgcgggagcgcgtcgcgctgcggtgcctccaggaggtcgtctccctcgcctccgatggcgactacgaggccacgccgacggccggaggggtgcttagtgtggacgcctcccgctcctgcgaggactcgctgcttcaactcatccgagagattggtagctcaggaagcttggagaaggttatgcttctgccctttagtcaagatgtccagaagtttatatgtataaagagacctacattacctgaaacttcttttgaactgctcagagaagtttacccagagatcacacctgtggtcctaccatcgccagtggagcagaatggcaatgatcaacatgacaatgtcagccatgatcttgaaaatacagagaagactgggttcaatacagatggcgctcagcttcagcaagatgatctggcaaatttagtcaacgaaagtaacacaggaaatcttcagaaggatgcaatggcaactcctgattttcaccaaccatgtacatcagaaaataggtgttttgatcagccacaagaagattcaattaatgcagttggtgtcaacatcaggtctccaaaagacagtccaactaatgtagatagacacatacaagttgcagctgagccttctttagctacttctgcagatttgctgggaagtaatacaggaacaatttctgagcaggacatgatagatgatacaaccatggttcaatcgcaatctcaaggggtcaaaaatcctaatacacttcattataataatggagatgaaccacttgttgccagcattcagtcaccaaaggattccatccatgaaggactgaccatacaggcaactgtttctccagcttttgacagaagcaatgatgctttaccagcaagtacatctgaaataagccagttgcctgagtttattactgcaagggatacagtaatgaattcagagccacgtatcaacaaatctcatccaaattccccgaaacatgacactgttgatgaagcaaatcaagatgtggattatggcagtgttggtattcagaaagctgctgctttcctatctgaagatcgcaatggggctactcaaggagagaaatctgaaattaaagatccaccagaaaatactgcagaacatacaaaaatgtttgaacaagaaaatagtgtcgaggctcagttggaagtcggttgttccgacaaagttaatcaagatatacaggatgatggcaacatcatgacaaagaatatggtctgtgatgggctgaatgtgcagactgctccggaacctcatagctgcagaatggccttgcataacaaaaatttggtggccaaccatttgtccgagcagaatattggaaggaacacaactgctgttgagaaagattgctgcagtattccaacctctcctcaggttgttaatgacacaagagtgaagcaaccttcaaacaagagaaccatggggaatactgtggtagaaacatcgcatgtgcattcttcagatgatagtctcagtggcttcgcagccaccggtcttctgtcaatggctgacaaaataccattctgtactcaggatcaagatgccaacggtcctgttgagggcttgtcagaacaagatttgtgcataaagtgtggtaaagatggccagttgttgaaatgcagcagctgcttgttagcggctcatgatacatgttttggttcattagcgacattggatgattctggccagttgtattgtcctgtatgcttctatactaaagcaactgaagcatatcaaaaggcaaagaaaacgtattctgaagcaaggaaaaacctatcagctttccttggtagaaagcaattagctgagcaacatcagcaagctgcagtggggcaaagagctgccaacaacgaggatcatttgaatgggtgtaacgatgcatctaaaaggaaagataatcatcaatctgaaggaaataacctttctcatagggatgaagaccctacccggaagaggaagaagcagaagacaaatgctactagtgatgcttgcgctcaggaagtagtcactgaaaaggtaccagttgttcagaattctgatgttgcacccatg

SEQ ID NO: 23000 - DNA, 2461 bp, Oryza sativa
  ref <308>: DATABASE ACCESSION NUMBER: AK073142
  ref <309>: DATABASE ENTRY DATE: 2001-12-06
gaggggggaaagagccggatcaccacgcctcgagcacgagctcgtcaacgactccgtcgtctcgtccacctccgaattccaaattttccatacccttcctcccagtccttacacctctcgatgcaaaaaccctagcgggggaagcaccacctgcgcagccgcagcggccatggcggagccggccctgctggaccccaccgccgccttcgacctccgcctctacccggcccacctcttcgaccacgaactccctctcgccggcggcggcggcggcgacgacgacgacgacctcccgctcgacgggctcgagttcgacctgcccggcgatttctccgtggaggacttcctcctccggtctccggagcgggacgactccggcgagggctctgctgccggatccgggcccaccgcctccccgtcgtcgtccccgaccacctcggcgtccaactccgccgtcgccaacggcagcggcggcgaggtcaagcacgaggagtcggatgaggggaggagcggtgggggtgaccccaagtggagcctgaagcggaagcaggcgagccccggcccgagctcggacgcggccaagtgccgccgatccggggacggcgacgtttctccgtcggcgtcggcgtcgcggaccgctgtggattccgacgagggggggacggtgtgcgaggaggaggaggacgagcggcgggcggcgcggctgatgcggaaccgcgagagcgcgcagctgtctcggcagaggaagaagcggtacgtggaggagctggaggagaaggtgaaatcgatgcactcggtgattaatgacctcaattctaggatctcctttgtcgtggccgagaacgcaacactgcggcagcagcttagtggcggcagtgtgaattgcccaccacctggggtgtatccgccggcgccaattcccggcatgcatttcccatggatgcctgggtatgcaatgagaccccctggttcccatgtacctcttgtgccaatcccccggttgaagccgcaacagccagtgccttcatccaaagtagtgaagaaaccagagagcaagaagactgtggagaacaagagtaagagcaagaccaagaccaagaaggtggctagtgttagccttcttggtttgctgcttattatgcttgtctttggtgctttcattccagggtttaatcataactttggaatgtgtgggcagagtgataatgctatgtttaggaattttggtcagtctcatgctagggtgttgagtgtcagtagccaggataaaagtagtttgaacaatagcgacatgattggtgttgatgttggaaagatgacggggaatactgatgggccagggaagaaacatcagcctgcacacaactcaagtgagatcctccctgctttgttgtatgtgccgaggaatggaaagcatgttaagatcaacggcaacctgattattcattctgtgcttgcaagcgagaaagcagtggcacataaggcctcaaaagatgatagtgatcagtcagctagagatcacaaagagactagtgttgccatagctcgttatctttcgctgcctggaaaggatgtgaatcgacaggagacatcctcggcagatggaccattgccacaatggtttcgtgaaggaatggaaggacctatattaaattctggaatgtgcagtgaggtatttcagtttgacatttcgacggcttctagcaatcctggtggcattatacctgcatctcctgttgtgaactcgtcaagtgtcaatgctaccgagaaaatcccagcacattctgctgcttatcatggcaagctgaaaaacagaagagtcatgtacaatgaagcgattccactcaccgggaagacggcgaacaacacagagccttttaacagaacctctgaaagcagcagcaagttacctgatagcaagccagcatcatcagttgttgtctcggtgctagccgatccaagggaggctggtaatggggatggcgatccgagagtatctccgaaacccctgtccaagatatttgttgttgttcttgttgacggtgtgagatatgtcacttactcctgcacgcttcctttcaagagctccagcccacatcttgtgaactaagcggctgggttgttcgccaaaaactgacagatgaatagatttatacaatgatctgatgctgtttcctaaccaaggactaaacttcctatgcactcaggctgaggtaattcaagtttgtcgaaggttcggagtgatgagtgcgagtttagttcatgtatgcagtttttgcagtgctgtgataatcgggttcgtttgctgtacctctagctgtaacggtgatgtaatcatgtaatactgtttgatcgttgagatataagtgcaactagtaatatgggtagtcgagaacacgtgcagaatatacatgcctttttttaccttagtttcaatgaatatcataaacaaagctacagt

SEQ ID NO: 23001 - DNA, 1904 bp, Oryza sativa
  ref <308>: DATABASE ACCESSION NUMBER: AK073143
  ref <309>: DATABASE ENTRY DATE: 2001-12-06
gaccatcccatccacgcttctcgactcccagacgacgctgctgctgcctttcgtcaccccccacttctccttccccgccgccgctcgccgccatggatgaggagtacgacgtgatcgtgctggggacgggcctcaaggagtgcatcctcagcggcctcctctccgtcgacggcctcaaggtcttgcacatggataggaatgactactatggaggagattccacctcgctcaaccttaaccagctgtggaagaggtttagaggggaagacaaacccccggctcatctgggctcaagcaaagattacaatgtagatatggtcccaaagtttatgatggcaaatgggacactggttaggaccctcattcacactgatgtgacaaagtatttgtcattcaaagctgtcgatggaagctatgtcttcagcaaagggaagattcacaaggtacctgctactgacatggaggctctgaagtcccctttgatgggtctttttgagaagcgcagagcaaggaacttcttcatttacgtccaagattacaatgaagctgatccaaaaacacatcaagggttggatcttactacaatgacaactagagaactgatagcaaaatatggtttaagtgacgataccgtggatttcatcggtcatgcacttgctcttcatagagatgatcgctaccttaatgaaccagcaattgatactgtaaaaaggatgaaactatatgcagagtcccttgcacgttttcaaggaggctcaccttatatttatccactctatgggctgggtgagctgccacagggttttgctcgtttaagtgctgtttatggtggcacttacatgttaaataagccggactgcaaggttgaatttgatatggaagggaaagtctgtggcgttacttcagaaggtgaaactgcaaaatgcaagaaagttgtttgtgatccttcatacttacctaacaaggttaggaagatagggaaagttgcacgagcaattgctataatgagccacccaattgcaagcacaaatgactctcactcagtccagattattttgccacagaaacaacttggacgcaagtcagacatgtatgtcttctgttgctcatacacacacaatgtcgctccaaaggggaagtttattgcatttgtatctacagaagcggaaactgacaatccacagtccgagctaaagcctggaattgatctacttggtcaagtagatgagctattttttgatatctatgatagatacgaacctgtgaatgaaccatctcttgataattgttttgtctcaactagctatgatgccaccacacattttgagacaacggtgacagatgttcttaacatgtatacattgatcaccggaaaggctgttgatctcagtgttgatttgagtgctgccagtgccgctgaagaatattagatttcacaaccaaagctcaatcatttcacaaagatatgctttttcttggtgggtaccgcaggacagatcgtaacgagtgactggtatagttattcaaactccacgttataccgagtgttctggccaatatggcttgttgctagcagtaatatgcacaactgttggccaagatgactgaaatgatggtggtttaatttgatacttcagtaatgcaatggtgtaaacagtgtacacactacacaatgacggtcgggcgttttgtgactgatgtatcataactgctggataattttgcatgtctacttctgcagtgttgtgttctttaccttgcattttcaggtttcagttgggtgtgcctgcctccggtatcagccggtagggtagcatgagtagattttaccgagtcatgcgaatgaaaattataatttaacagcttaacctacccagaatatcttattcctggttggattaacc

SEQ ID NO: 23002 - DNA, 2202 bp, Oryza sativa
  ref <308>: DATABASE ACCESSION NUMBER: AK073144
  ref <309>: DATABASE ENTRY DATE: 2001-12-06
gggagccacctcaaaagcccccgcccatccaccgccacgcggcgatccaacccccttccccttcgccggcgcagcatcggacctcgccgccgcggcggttcttctgagcggggccggggcggggcggcagctggggattcgtcccgtgccccgtgctcttcctctgcgtgggccggggcggagggagggaggggaagtcggtggtgaggtggcgtgttgtgtggcgcagatgtgagggcggaggaatgcagaggtcgcggagagcccttctgaagaggaaggcggcggcggcggcgaaggaggaggaggaggaggcaggggtgggcgtggctaccgcggcggccgccgggaggaggcggcggcggcggctgtacggcttctccgtctcgcttgtcgtcgcctgctgggtcgtcctgctcctgctcaaccccctcgtcggtcatgggaacggtcaacgagatgaagggatttttgcggatgaaggaagctctgatccctcgtttgattctgttgagcctaccttgagcgaaggctctgttgattcagttgtacagcaggagaatggggaaaatcatgcgttgccaggtgatagctgtgctaaacccgatgaaaatcatgtgctttctgaagagacactgctggagaaagatcagctttgctccaatgatgaggcacagggtgatagcatggatgctctgcccaaggataacgttgatcagggtgagaatcttccacggacagatgatgattctgtagttcatccagagggggaggtggagagcgaaggtgttccaagaccagcaaggttatcacgagttgtccctcctggtcttgatgaattcaagacacgagcgattgcggaaagaggaaagggtgtccctagtggtcaacctggaaatgtgatccacagaagggagcctagtgggaagttgtacaattatgcctcggcagctaaaggggctaaggtcctggaattcaacaaggaggccaagggtgcttctaacatcctagacaaggataaagacaagtatctccgcgatccttgctcagcagaggggaagtttgtcattatagagctgtctgaagaaaccttggtagatacaatcgcaattgcaaattttgagcactattcttctaacttgaaagaatttgaaatgctgagcagtctgaattatcccacagatagctgggaaacactcgggagattcactgttgcaaatgccaagattgctcagaattttacttttcctgagccaaagtgggctagatatctgaaactcaacttgcttagccattatggttccgaattctactgcacgctcagtatgcttgaagtgtatggaatggatgcggtggaaaagatgctggagaacttgattccagttgagaataaaaggctggaacctgatgacaaaatgaaggaacctgtcgatcagtaaacacaattgaaggagcccactgagggaaaagaatcctcacatgaacccctggatgaagatgagtttgaactagaagatgataaactaaacggtgattcatcaaagaatggtgctcatgatcaagttaccgagacaaggccaattcaggctggcaggattcctggagatacagttcttaaggtactaatgcagaaggtgcaatctcttgatgtgagcttttctgtcttggagcggtatctagaagaactaaatagcagatatgggcaaatttttaaggattttgatgctgatattgataccaaagatgcactcttggagaaaatcaaattggagctgaagcatcttgagagaagcaaagatgactttgcgaaagaaattgaagggattctctcatggaaactagttgcttcctcacagttaaaccagctactcttggataatgtcataatcagatcagaacttgaaagatttcgggaaaagcaggctgacttggagaatagaagctttgctgtaatattcctgagttttgtttttggatgtttagcgattgctaagctgtctataggcatgatatttaatacctgtagattatataattttgaaaaattcgatagggtaaaatctggatggcttgtgttgctgttcagcagttgcattatagcctccattttgataatacagtgatgtacctatcaactccatataattgcggctgcgctttgtaattgcctgaggtgtctaattcaaaatctattacaatgcg

SEQ ID NO: 23003 - DNA, 1657 bp, Oryza sativa
  ref <308>: DATABASE ACCESSION NUMBER: AK073145
  ref <309>: DATABASE ENTRY DATE: 2001-12-06
gtggggagagcaaaggctccgtgccaacgtgcccgcggggaaatgcctcagccctcagccatagaccttacctcatggccgtcgtagcccctccttcccttgcccttccccaacctcctcagaacccaacccctaaacctcgccgctgcgctctccgccatgctctcctcccccgcggcgcccgtccccaacgacgtcacccttctcaccgtcctctccgcctgcgccgactccccgtcctccccgctcgcccgccgcctcgcgctctccgtccacgcccgcgtgctcaagctcttcccctcccacctcctcctctccacctgcctcgtgcgcttctacttcgcgtcccgcttgccccacctcgccctccagctgttcgacgccatgcccgtgaggtccgccgtcacctacaacacggtgatctccggcctcatgcggaacggcctcgtcgccgccgcgttcgaggtgttcgacggaatgccggcgccggataaggtctcctggacggctctcatcgacgggtgcgtcaagaacgggcgccacgacgaggccatcgactgcttccgcgccatgcttctggacggtgtcgagccggactacgtcacgctgatagccgtcatctccgcgtgcgccgaggtcggcgcgctggggctcgggatgtgggtgcaccggctcgtggtccggcaggggctggagcgcaacgtcaggatagccaactcgctcatcgacatgtacgcgcggtgcgggcaggtggagctcgcgcggcaggtgttcagcggaatgaggaagcggacggtggtctcctggaactcgatgatcgttgggttcgccgccaacggccggtgcgcggacgccgtcgagcacttcgaggcgatgcggagggaggggttcaagccggacgccgtgacgttcaccggcgtgctcacggcgtgcagccacggcggcctcaccgacgaggggctaagatactacgacctgatgagggcggagtacggcatcgcggcgcggatggagcactacggctgcgtggtcgacctgctcggccggtcggggcagctcgaggaggcgatgcgggtggtgaccaccatgccgatgcggccaaacgaggtggtgctcggcgccctcctcgccggctgccggatgcacggggacgtcggcatggccgagcagctgatgcagcacctgctcgagctggacaccggcggcgacgccaactacgtgctgctgtcgaacatctacgccgccgtcggcaagtgggacggcgccgggaaggtccggagcctgatgaaggcgcgggggctgaggaagaggccgggctacagcgccgtggagatcgacggcgacgtgcacgagttcgtctccggcgatcggtcgcatccacaggcggaggagatatctcagatgcttgggttgctcatgcatgagatggcagggcatgattatgaccatgtaatcgattgcttggatgggggatgaattcagaccctggagactggagaatgcagaagactgatattctgaagtcaaaagatagccgacgttagattagagaactgttgtatatcagtagttcagtacatttagctgtcctgccactatgattccccctcatctgtgtagtcacaggagtgaagtccaacatgaattgaattatcgc

SEQ ID NO: 23004 - DNA, 1952 bp, Oryza sativa
  ref <308>: DATABASE ACCESSION NUMBER: AK073146
  ref <309>: DATABASE ENTRY DATE: 2001-12-06
gacacatcatcactgggacaaccaaagaaaaagaaaaaaaaagagaaaaaaagagggaacttttcacggccgctgaagcctctgacactccactgtagtgtgtcagtactccggccacctctctcggccgttgctctcccatggcgatgatggcgatgggcgcggcgtcctgggccccgatcccggcgccggcgagggcggcggccgcattctatcccggccgcgatcttgcggcggcgaggcggcggcgtggggcggcggcgaggaggccgttcgtgttcacgccgcgtgccgtgtcggactcccggagctcgcagacgtgcctcgatccggacgccagcacgagtgttcttgggatcatccttggaggtggtgctgggacaaggctgtatccgctgacaaagaagagggcgaagccggcggtgccgttgggtgctaattacaggctcatagatatcccggtcagcaactgtctgaacagcaatgtgtcgaagatctatgtcctgacacagttcaactccgcgtcgctcaatcgtcacctctcgagggcctatggaaacaacattggtggttacaagaacgaggggtttgttgaagttcttgctgcgcagcagagcccagagaatcctaactggtttcagggtactgcagatgctgtgcgacaatacttatggctatttgaggaacacaatgttatggagtttctcattttggctggagatcacctgtaccgtatggactaccaaaagttcattcaggcccacagagaaacaaatgctgatataaccgttgctgcgctgcccatggatgaagaacgtgctacagcatttggccttatgaagattgatgatgaagggaggatcattgaatttgcagaaaagccaaaaggagagaagttgaaatcaatgatggttgacactaccatacttggccttgatactgagagggcaaaggaattgccttacattgctagtatgggaatctatgtttttagcaaagatgtgatgcttaagcttctccgtcaaaatttccctgctgcaaatgactttggaagcgaggttattcctggagcaacagaaattggaatgagggtgcaagcttacttatatgatggttactgggaagatattggtactatagaggcattctacaatgccaacttggggataaccaagaaacctgtgccagattttagcttctatgaccgttctgccgcaatttatacgcaacctcgatacttgcctccatcaaaagttcttgatgctgatgtgacagacagtgttattggtgaaggttgtgttattagacattgcacaatcaaccattctgtggttggactccggtcctgtatatctgaaggcgcagtgatagaggactctctgctaatgggtgcagactattatgagacggagacggacaagaaagccctttctgagactggtggcattcccattggtattggaaagaatgcacacatcagaaaagcaataattgacaagaatgctcgtattggagaaaatgttaagataatcaatgtcgacaatatccaagaagcttcaagggagactgatggatacttcatcaaaagtggcattgtcactgtgatcaaggacgccttaatccctagcggaacagtcatataaaggcaaccaatcaccactgtacataaggttgggccttgcagcatatggtgatctgatctccagtgcacatcaagcaatcaacttttaacgctgtggtttattccatgctgccagttcaccaagctctgcatcaacttgcaaggatatcataaaaaaaataaaaaataaaaacaggtgccacttaaaggcaccattttactgttactagtatgagcaaccgctctagagcttagagatgttgtaagtccgaaaaccgtgtctgaaatgtgggtattttgatgtgtataatctttgtccttttgcatgatc

SEQ ID NO: 23005 - DNA, 1287 bp, Oryza sativa
  ref <308>: DATABASE ACCESSION NUMBER: AK073147
  ref <309>: DATABASE ENTRY DATE: 2001-12-06
gaagagcatcaagtattcggacatgtatgagaaggtgcggaggctcaagcagcggtacgaggccactgccaagaaagttgaacacggcggcgacctaccagctaaagaggatgacctgcggatgtatcagctatcgtcggaaatctggggaaagaacgcaaaggatgctggcaattcgtcaaagaacaagaaggggcaagctaagaaagataaggtgagtggagattcaaaggaagccgccaaggaagataaggtggatgaagccgccattgctgtgaatgaaaagggtggtactctggcagagaataagaaggggaaaaccaacaagcagaaaacaggtatggaaacaaaggttggatcatctaaggaggctgctcttgctgctagtccaaccaagggtaagaagaagggaagccacaaagacaaattggatgaagaagcaaagagtggcacggcaaaggtgacctccacaattgccactgatgatgatgatggaactttgggtgggagtaagagggagaaggctggcaaagaggaattggatggggacacacatatcgtcatgccaaaggaggccaccacaactgccgctagcgatgatggtactttggttgggagtaagaaggggaaggctgacaatgggaaattggatggcgacacacacagtgttatgccaaaggaggccaccgctggcacccaaaatggtggcatcctaacaggaggggaaaatcacaaagaaaaagtagataaagatgctaatgtaccaagcatacggagggagtatgctgaattgcagagtttgtatcccaaccttgcttcctttgtgaacggaattgaggcccagcatccatgtggatcaaccttcaagagagcttttgagttcattagtgatgataaggcttgcaccctggaatccaagatcaagaagcagaagatagcggaagtgagaatgcagctccgtctagcagacacgaagaaggaagtagccaatgctttgttaggattgctggactaaaacattgcggtgctgacatcctttttgtgcgatggttgtattgaagattcaagttgcagaagatttttggcttgtggagctaagggatatgacgtgacgagttgagctactgggttttctgtctctggttctcgagagctattctgtgaacggttgtttatgtgattagatggtagtatccctttaatctatgagttagcaatggagctgatgacagtttaattaactcctgtatctatgatggcatttggctttaattaggaggtgtgcct

SEQ ID NO: 23006 - DNA, 2005 bp, Oryza sativa
  ref <308>: DATABASE ACCESSION NUMBER: AK073148
  ref <309>: DATABASE ENTRY DATE: 2001-12-06
gactctcctcgcgtttcggctggcccacgacaccgccgacgcgcgacgaacgccgccgcgccgccgcccccaaacccccaaactgctccggcgatcgtcgaactggccacgccgcccacgccagttcgcgctcacctgcccagatagtaaactatttgggttgggaatttgattcatatggtggcagcattgggttatttgtatatgataccaagcccattcaattgaaatgctccgccttatggttaaggagactatatgatgttgagtccttataagtttattggacttcaaggaagtgttaccagctgtcatgagggtcaatcctgcgctcttcctgcctttgatggccgaatatgcagcacccacatgggccatactaatttcagggttcttcatgctgctttctgtttccctctctatgtacttgatattccagcacctttcagcatacaacaatccagaggaacagaaatttgttctcggtgttatcttgatggtcccttgctatgcagttgagtcgtatgtttcattggtaaatcctgacactagcgtgtactgtggcatcctgcgtgacgcctatgaagcatttgctatgtattgctttggaagatatattactgcttgtttaggtggtgaagaaaggacaattgcatttttgaagagggagggtggcggagattctggggaacctcttttgcatggtgcttctgaaaaagggatcatacaccatcacttccctgtgaattacatattgaaaccatggagaatgggtgtgaggttttaccagattatcaaatttggtatatttcaatatgtgattataaagaccctcacagctagcctatgcctgattcttcaaccttttggtgcatattgtgatggagaattcaatttgagatgcggatacccatactttgccgctgtccttaacttcagtcaatattgggccctatactgtttggtggagtggtacacggctactaaggacgaattggcacatataaagccattggcaaaatttctttcgttcaaatctatagtatttttaacttggtggcagggtattatgattgctatcatgtattctttgggcttggttagaagtccgttggcacagagcttggagttaaagtcaagcattcaagatttcatcatttgtatagagatgggtattgcttcagttgttcacctatatgtgttccctgcaaagccctattcgctattaggtaatcatcgttcacctgaaaacatttcagtgctaggggactatgccgccactgaccctgtggaccctgatgagataaaagatattagtcggcctaccaaattgaggcttccacagttggaaccagatgagataattgtgacaaatgttaaagagagtgttcgagactttgtaattggcagtggagaatatgtgataaaagatctcaaattcacgatgaagcaagcagtgcgaccagtcgggaagcgctttgagaaattaatgaagaagaagggcaagttcgggcaaagccgtgatgacaattgggtaagtacctccacgctacagagagcaatccatgggatcgatgatcctctcatatgcgggagctctagtgacagtgggatcggtagaggaaaacggcaccgcagggacgtaagctcagctggtgttgtggacagttgggaaggcagcgaccagacatcagatgggtatgtcatacggggacgccgctgggaaatcaagaaatcatgatattcttttgtacaggagctacggaatacaagctgggttgctgactcgctggtaaattttggtgctagcgtacagctcccgtagattgcttagctacttgtgtgattgattgtttgatactgtacatggtttctcgttttctatctataggtgcggtcagagtattgtaagtgcagaattccacaaattgtgccatgcttcaaggggccaagtgtaattgagttcctttacagaagtgcaaggtattgtaccagaacacaagtg

SEQ ID NO: 23007 - DNA, 2315 bp, Oryza sativa
  ref <308>: DATABASE ACCESSION NUMBER: AK073149
  ref <309>: DATABASE ENTRY DATE: 2001-12-06
ggcttcttttcccctcctctcccaaatccaaccacaagaagaggaggaggaggccaccgttcgcatccgccggatgccaccgccgccgacgacgacgacgccgccatgaccggcgccgccgcatggccggtctgcaccatctgctacgaggacctccgcccgctctccgaccagcacctccactgcctccccgcctgcggccacgtcttccacgccctctgtttggagcaatggctggagtactgcccgggcgggaagaagaagctcacctgccccatctgcaagcagccatgcggcgccgcccacccaccgacccgcctcttcttccaatccaccggcgcgtgccccacgcagaccgcctcctcctccccctcgcggcacgagcccaccgatggcggcgccgaccgggatgagctcgccgccgaggtcgcgcggctggagcagaaggccgcctccctcggcagggtgctcgacgagcagcgcgacgggatccagaagctcaacgccgaggttgctatgtggagggagaaggcggccgaggcggaggtgatgaaggaatcggtcaggagggagaaagaatgtgttcagcatctgctcaatgcgaaaacagaggaattgtcaaggaagtcatcagaatgtggcaggttgcaggagaagggcctctcattggcgaaggaacttgcagcattgaagctgtcgacagatatgaaccttcaggaggaagagatccttaagttggcatcacttggtaaccatggaaatgctgcgaatgcggttgatgttttgacgagatctcttgctcttcggaacaagagctacaaagaattgatgatccaatgcaatgttctgggaagatcagaatctcgttcccagcagaggtttgagaaggcaaaagaactcattaagaagttaaaggcaagagtacaagaccttgagaaggaacaagaagaaaaagaaaatggtgtgattagggacctgaggtctgcaaagaaatttaaagctgaccagacaaattcaggaaataccacagttaataatggtttctcgggtcttgctgctggatgtggagattatccgatgaagctcgatgaagtggtgcaggatccatgcgacaagcctgggccatcacctgaagctaaaaatgacctgaatataaaagacaaaatggacgacaagcatgcggatgtgattgacttagatgctgatgattctgtcttccaacatgaacacaagaaaggactttctgccaaaccatttgggaacgatggtaacgatttggatttcaaaagtcggtctagtcttcaagaacattataggaaggaatccataacatgcaagacatatgtagcagaggaaaattcctttctaaaaccttccatggtaactgaaagatcagcacttcaggagagctttaccacaaacaaacttcaaagctttcaagaaactcctgttctaagaagtatgaaagctacaacttcgacatgggagaaagaaacactgacgattgatggcatctctaaacaagctactagaatggctcctggcactggaccccagcaggttcacaatttcaattctctttcagatgacttccaaataccaattagaaatcttggtggagagggaacaggaaaaagcgtcggcaaatggtgcaagggcgtagctacccctggatctctcaacacaaatgcaaataaaaggaatctgatcgccgtagggccagacggacgtgggggaaaggtcaaaattttgagagatcttggcaaattccaagatagcaagactcaagcactatggcctaaggcacagaaggttggaagcagaggtgggcaatctcagatagatcatttctttgggaagagatgatcctgctgcgcaagctatgctaatatataccactttcaaactcttgcctctgttgctgcggtcaaattctgtttggagaactatttgatgtcctgcatctgtacttgtgtagaatccattgcacttaaggtgaaagctgaatccaaatttcgcagtgtcatcactattgggcctgaggggatagatagagcttgtaaacaatgagctgtgtaggaaacctgaattcctctgttcctcagaggctcaggtggtcatgtgtaccacattgctaaacattgtgtattgatagagctgaggagataacaggtggcttagctcacttgatccacatgcaaatacattgcaagctgccctttggctaagtctgaaacctatttgggtttcattgtactgccaactactccagcaaagcaaagctgggaatcacaagaaagttggacactgggttg

SEQ ID NO: 23008 - DNA, 1510 bp, Oryza sativa
  ref <308>: DATABASE ACCESSION NUMBER: AK073150
  ref <309>: DATABASE ENTRY DATE: 2001-12-06
gtcttttgctcagtcacaggcacaactttgtgctggcatgcagctcaaggctccaacaagggcgaaatattcccaaggctttatgcccataggagaatccgacgcatactgtgctctaatacctggcttacctgaagatctcgcaaagatatgtcttgctcttgttcctcggagccagttccctgttatgggttcagtgtccaagaggtggatgtcattcctcgagagtaaggaattcattgctgtaaggaaagaggttgggaagcttgaggagtgggtgtatgtcctgactgctgatgctggatcaaaggggtcccattgggaagttttggggtgttcagggcaaaagcacagccctcttccacccatgcctgggccaaccaaagctggttttggtgtggttgttctagatggaaagcttttcgttattgctggctatgctgctgatcatgggaaggagtgtgtttctgatgaggtttaccgatacgattcttgcctaaacaggtgggttgagctttctaagatgaatgtggctcgttgtgactttgcttgtgcagaggtcaacggtatgatatatgttgctggtgggtttggtcccaatggtgatagtttatctagtgttgaagtttatgacgcagaacagaataagtggacattgattgagagccttcgccgtccaaggtggggctgctttgcgtgcagctttgaaggcaaattgtatgtcatgggcggtcgttcgcgcttcacaattggtaacacgcgttttgttgacgtgtacaatcctaatgacaactcctggggtgaggtgaagaatggttgtgtaatggtcacagcccatgctgttcttgacaaaaagctcttctgcatcgagtggaagaaccagaggtcactcgcagtcttcaacccggctgataattcttggcagaaagtcccagtgccactcacaggtagttctagtactcgtttttgtttcggcatacatgatgggaagctgctgctgttctctctggatgaagagccctgctataagacactgatgtatgatcccgctgcaccaacgggatcagagtggttcacatctgagctcaagccaccaggattatgtctgtgcagtgtgaccatcagagcctgatgctttctggcttgtatcgccttaccatcatccttgtaggatgccatccgataccactatttactgcttacaatcagagttgaactctcatttccagtgtcgtttgctcaggtattttgatatcaaataatgctccagggtgcttatgctgcattcattcgattgcagcgttgtgccaggatgcactttgtttcatgtattttactgctagttgtagttcacatggttgttgtcgttgtactggacgatgaatagctgataggctgatatgcaactgtagtgtttgtggcgggcaaagaggctaattgtcagaaaagatttgtcagctcttgctgtatgtaaaccttgttgtctgaaacattgtcattcgctatttct

SEQ ID NO: 23009 - DNA, 2704 bp, Oryza sativa
  ref <308>: DATABASE ACCESSION NUMBER: AK073151
  ref <309>: DATABASE ENTRY DATE: 2001-12-06
ggattaaaccctcgcctcccgccgccgcacgccggaggcgaccaccaccaccaccaacccccgccgctcgccgcctcctcctctcccgcggcatggacgccgacttccggttcgacccggacggctccgacgacgacggggcggcggcctcggcggccgcggggcggaggaagccggcgcagtcgccgtgggagttctcgtcctacgcggagtccgtggcggcggagcacgcgcgccgccgcaccacctccatcgacgagaagatctcccaggccctgagcggtagccgccgcggcgggaagccttctatccccgacggtgactccgagggcgacgaggatgattcggaggtggaggatgatagtgaggaggacgacaaggaggtggtggaaggggagatcgacgacgaggaggacgaggttgaggagagcgaggatgatgacgagggggtagaggtgagcgatgaggaggtggaggagttggaggagggcaaaggggaggagaagagtgacgaagtggaagagggcgaggaagggcaagatggggaagaggaggagaaagaggaaggagatgaggaagctgcagaagaggaagaagaaacggacaagaagagtggtgtagtggacccttctaaattttttgcatcttccgaaggagcgtcgttccatgcaaattcatttcttgagctgaacttgtcaaggccacttcttcgagcctgtgaagcactcggctaccaaaaaccaacgccaatccaggctgcatgcataccattagcattaactggacgggatatatgtggcagtgctataacaggatctgggaagacagctgctttctcattacctgtgctggaacgtctacttttccggcccaaacgtgtacctgcaattagggtgcttatccttactccaacaagagagttggctgctcaggtccatagtatgatcgagaaattagctcaatttactgatatcagatgttgtctgattgttggtggactttcaactaaggtacaagaggtagctttaaggtcaatgcctgacattgttgtagctactcctgggcgtataatagatcatctacgcaattcactttccgttgggcttgaagatcttgcaattttgatccttgatgaggctgatcgtttgctagaactcggtttcagtgctgaaattcaggaactgattcgcatgtgtcctagaagaagacagacaatgctattttctgctacgatgacagaagaaattaatgagcttgtgacactttcactgaacaaaccagtccgtcttgaagctgatccttctctgaaacggcctgcaacattgacagaagaggtggttagaatacgaagagcacgcgaagcaaatcaagaagctgttctgcttgctctctgtttgaagactttcaaggataaagtaatcattttcagtggcacaaagcattctgctcacagattgaaaataatatttggtctctccgggatgaaagctgctgaacttcatggcaaccttacgcaggcccagcggcttgaggctttagagcttttcaaaaagcaagaagtggacttcctgattgcaactgatgttgcagctcgtgggattgacatcgttggtgttcgaactgtaataaatttttcctgcccgcgtgatgccagaacttatctacatcgtgttggacgcactgctcgtgcaggcagagaaggatatgctgtgacatttgttactgacgatgataggtccctcttgaaagctattgcaaagaaagctggttcacagctgaaaagtcgcattgttgcagagaagcctgtggctgagtgtgcaaaattgattgaggaacttgaagatcaaatttctaccataattcaagaagaaagggaggaaagaatattaagaaaagctgaaatggaagctacaaaggcagaaaatatgatagctcataaggatgagatatactcaagaccaaagagaacctggtttgctactgagaaggaaaagaaacttttggcaaaggctgctaaagaatccacgagtcaaggtaagagtaattctggagttattagcgctcagcaagctgaagatcttcgtctgaaggagaaaaagagaagggagcgtgagaaaaatctacctaggaagaaacggagacggttagaggcagaacgggagatgttagaagatgagagcgaagatgaggaagaagctaaggaaagcaaaggtgggaaaaaagaaaagaaaggtcaatcgctagtcgatgtggcttatcgtagagcaaaatcaatgaaggccagcggtaaaaggggtgctggcactggcaaaggaaagaatgataaaaaggcaaaacaacattctggaaagggcccaactaggcaagaggagatgcaagagttgttccagaatgatatgagtgaatggaagcagggccgctccttaaagaaaaataatgttatgcgaaagaaatcgaaaaattcttttaagagcaaatccaggtacaaccgccgaaagtagaagacccgctaacttgtagtagcgtgttttcctcactgggaatttattgcattcccttgtatcaattttgaccgactgatcctgaagaaatgtcaggatatgttgtgcccatcttgtatttactagttatatacaattttctcatatcgtgcattaatcacattcgtcatgatttttaatgtaatgacctgtgaggtccatct

SEQ ID NO: 23010 - DNA, 826 bp, Oryza sativa
  ref <308>: DATABASE ACCESSION NUMBER: AK073152
  ref <309>: DATABASE ENTRY DATE: 2001-12-06
gagattccaaattccaaccccaaatcgacccaatctccggcgccccgatcaccgggagatccgggaaagcacccagaacaaccggagttgccgccggcgtaaagaggaggaggaggcggcggcggcgtcggcggccgtggcgaagtcgtcggcgtcggcggcggccgcggcggctggggtatctgcgatgataacccggtcgaagctggttgagcagctgcgcgactaccagatccgatcccaacacaagcgtgacataattggagcagtctcatggggcttgctgtgttgctttctgataatatcatcgtacatgacgttgtacttcaggcacttctggctgtccgctgttattatctcactcggtattcttcttcctgctggcctttacattttgaggcagagaaagcttgctaagaaaagagagagaagattattgctgcccctctccatgtaagagtgttggttggttccctgattttctggttaattctagccatgtagaatccacattcttggcttgctacacactcttcattcatgttactctgcctcaatatacatctcattctttagtctctactgaagtgctagaagatatatcatcatttttttctgagctcaatgttgtgcgagtatataatctccaatgcttggtgggtatagtaccatccgtctctgctacagtcttttttttcttcttcttggggttttatatgcttgcagggtgagacgtgtttgccttgggcatcacacttttgtaactgatactgattgttttgatactgaatttgtaagccatatccaccctagttacttgtactcc

SEQ ID NO: 23011 - DNA, 1831 bp, Oryza sativa
  ref <308>: DATABASE ACCESSION NUMBER: AK073153
  ref <309>: DATABASE ENTRY DATE: 2001-12-06
gacctctccctaaaaccctcccctctccatctctcctctgcttcgtctctcctctcctctccgccgctgcatcgcctccaaaaataaaaaatggcggcgattccccgggaggcatgggagggctgcagcgtcctcctcgacatcaacgacggcgaccgcctcgccttcttccgcctcacccccgccgcgacggtcaaggtggggaacaggacctgctcgctgcagccgctcgtcggtcgccccttcggctccctcttcagcgtcggcccctccggcctcgtcccctgcgccgacgccccatcttctcgcgatgatacaacgcaagatgctgctgatggtccctcgcaggatgaaactagggacaatagatctcttgtcgataataatacagcacagaatttatctagcgatgacatagaggcaatgaagagagatggtgtaagtggtgatgagattgtagaagctttgatagcaaatagctccacatttgggaagaagacccttttttcccaagagaaatacaaactaaagaaacagaagaaatatgcacccaaagtgcttttacggcgcccctctacccgaagcatttgtgagacatatttcaagaaaagcccagctcgaacagggtttatgcgagttgatgcactgtccctcttgttgtctatggcaaatgttggtccatattcggatgtccttgtggttgatatggttggaggtttagtagttggagctgtagctgaacgcttaggaggtactgggtatgtttgcagcacatatcttggatctgctgctagctccatagacattataaggatgtataatttgagcagtgacatgactaccaggattgttcaggcaccactaagtgacctctgctccttgcaaaactctgtcgatgtgtcttctggtcttaatgatagcattcagggtgaggcacaagagcccactgcagtaccagtggagaatactcagccatctgtaccacaaccaactgacacagcagtaccagatgagaaaacacagtcacctaaagaacaatctattgatatagatatccctgagcccttattggatgagcacattaatcaggatggcaattcttctttagatagtaaaggagatgaggatggaagttcaataggtcccaaatcactcaaggcaggaaaggcaccatcaccagagaggatgaaatattggagtgaacatggatttagcagtttgattgttgctgctccggggcatgatgttgaaagttttgttgctgatctgcttcccctcttgtcttattcagctccatttgctatctatcaccaataccttcagcctctcgcaacatgcatgcacagcttgcaagtatcaaaaatggctctcggattacaaatttctgaaccctggcttcgtgaataccaggtccttccatcacgaactcatccacacatgcaaatgaatgcatttggtggttatattttgagtggcattaggatacacaatggcgatgcatgtaatggaagcaagtgaatgaccaagcccgtcaatgcgtgcttctatccttggaattaaaatatggtcaccattttacacggtaacctgaaacaatagacacaattttgtagtccagagaagccaacttttatgctgaagcgacttatgtgattagtagaaattggtgcgcatatagagaataactagtgcgagttctagaagaaaatgaaatgagcatgtacaccaaatccatgtagcttacataacaatgttgtgtttgtttatcaaccaaattgaaacgcttgtggactttgagatatttgttaaggtgtgctacttactatttgtc

SEQ ID NO: 23012 - DNA, 909 bp, Oryza sativa
  ref <308>: DATABASE ACCESSION NUMBER: AK073154
  ref <309>: DATABASE ENTRY DATE: 2001-12-06
gtcccctatccgtcttcatactaacaagagtacgtacaagatttcgtatcgatcgtatagagagatcgaagtcagaaagagagaagagattataagttaatttcgccatgagcagcagaaggactagcgcagctaatcttcttgcggttgccctgctgatcatctccttgctgttgttgcctcttcttcaccttcccgttgcccatgctcgccatgttgctgtgctgaaggctactgacagttctagtgccatcagcatcagatcgggacatgtggagcccaccccggcgagcggagcagtgcagaggaggccagctagctccggtgcaagtaaccgcggcggcggcgggcggcggcggcgagcggcggcaagcagcaggagtacggtggagatgcgcgcgtcggcgtgggcgaagcaccaccgcgacgaggtcgccaggatgcacgagatgctgaagagggactacgcgtccaaggcgcgccgccgctcgccgatcaacaacggcgagccgtcgctggaggaggaggacctgccctaactaagcttcagctgcatattcgtagtgtagtgtagcgtagcttagctatagctcctctgaaagatctgaactgacacacataggtagtacatacagttattactagagctgctcttttagttagcaaattagcaggcaggatagtgtagttactcctatggaataacagcctttggtttagtatagcatccaagctggggcgtcatttgttagccctgagagtcagagagccatgaacaaacagtctgaaactgggcagttttgtccctgatgatgctcatgcttggtgctagctaaagcttttagctagcttcaccctgtaacatacataaatgtgcaccagtgtgtcaggtttgcagttttagcttgc

SEQ ID NO: 23013 - DNA, 784 bp, Oryza sativa
  ref <308>: DATABASE ACCESSION NUMBER: AK073155
  ref <309>: DATABASE ENTRY DATE: 2001-12-06
gaccctagccgccgttccagcttgcggagaagaagcgcgcgagccagcaatctcgggcggcggcggcggcgaggaggaggaagtagccggagaggagggagatggggagcgacacggaggcggagaagaagaagacgcccgtggcgctggcgcccatcgcgaagccgctcgccggcaagaagctctgcaagcgaaccctcaagctcgtccgccgagcgtctgaggccaaatgcttgaagcgaggagtcaaggaggtcgtcaagagcatccgccgcgggcagaaaggattgtgcatcattgctggcaacatttctcccattgatgtgataacacatgttcccatcctttgcgaagaagccaacattccttatgtatatgttccgtcgaaagaggatctcgcaacagctgggactaccaagaggcctacctgttgtgtattggttctgaccaagccagccaagggcgagcttgaggaagatgtcaaggagaaacttaagacggactacgatcaagttatgtctgaagttgctgaggtcacgtcttcaatgttctaagttcacacttgtacttgtagctacaaaatcagaatcaacatccacttccagcacacagccctgttttgtactgtgtcagcatgacatcaacctgtggcggatgtttttcgagtgcctgtaggagacaatagttcctctgctagattatctatcggatgttgtctttttggactaattgattccctacctggatcatatataattagctcctctataaatcattttgtgcg

SEQ ID NO: 23014 - DNA, 2467 bp, Oryza sativa
  ref <308>: DATABASE ACCESSION NUMBER: AK073156
  ref <309>: DATABASE ENTRY DATE: 2001-12-06
gatttcatcctcttcttcttcgtccccttctccatctccaaattccaacccattcctcccagatccccaatcctccaattcaccacttcgattgatgcgccaatggtgcgagagctccgcctcgactccttctacgcgcgcctccacgccgccgccgccgcgtccgccgccgacgcatcctcgccgctcctgatcctcccctccgccgccgacgccgacgccctctgcgcgctcaaggtgctcacccacgtcctctccgccgactccatccgcttctccatctaccccgtcgcgtccgccgccgccgccgcctccctcctcgcctccttctccgcatcccagccgctctgcctcctcctcatcaactggggcgcccaccgcgacctccgcgccgtgctgccccccgccgccaccgcgttcgtcgtggattcgcaccgccccatccacctccacaacctttcggcggccaacgaccgcgtcgtcgtgctcttcaccactgacgacgagcacaccgccgatctctcctacgacttcgacgtctcctccctagccgatgcctccgacctctccgctcagggggaggccgacgaccacctccgcgtcgccgaggaggacgaagattccgatgcttccgactcggattccgacggcgagggtgggaggaggaagaggcggcggctctccgacgatgcggaggcggatggcgacccggagaggctgttcgggaagctgaggagggagtactaccggctcggcaccttccacgggaagccgtcggggtgcctcatgtacgagctcgcccacgcgctgcggaagaacaccaacgagctcctctggttcgcctgcgtctccctcaccgaccagttcgtccacgagcgcatcaccaacgagcgctaccaggccgccgtcatggagctcgagcagcacatcaatggatctggcaatctcgatccatctggcgtgggcgcggtggtgacgctcaaggatggcaccaagatccgggcgccggaggcctcacgcatcgcctatgaagacgagccgcggctgatgctgctccgggagtggagtctgttcgactccatgctctgctcgtcgtatgtcgcgacgaagctcaagacctggagcgacaatggcctcaagaagctgaagctgcttctggcaaggatgggattcccgctcgccgactgccagaagaggttccagtacatgagcatggaggtcaagcggaagatgcgtgatgagtttgatcggttcttgcctgagtatgggctcaccgagttctattatcggagtttcttgagggtgcatgggtaccgctccaaggtttctgctgcagatgttgtttatggcgtcacagctttgcttgaatcactgaatgctgagtccaaggactccaaggggtcttctgctgctgagcaattctgggttgcatactctgcattgtcgctgagcaatgtcgatcagctgcggaaagggatgcagtctgcaattgagatacagagggcaatactgaggcaaggaagctcagcgattaccaagaccgggttgattcggagtgcaaagaagtttcggtgggtgaagcttgatgatccagtggatacagataagttatgccaacctcaggctcttaccaaattctgctttttcctaatggacgcactgagagagcgaggagcaaggatgaagccacttatctgcgcttgcttagcaagggagcctgagaaagtgcttgttgtgggggtatgtgggaagccaaggctgggggctgttaaggggaatgcatttggtaatgcatttaggtcagctgccgaggagattggtgcagactatttccatgacatgtttgagtcatcatggattgttctcgatgttgttgctgtcagctctttcatgattcggttaacagagaagctatgatgacatgtgcttgtctagcgctaatgattctttcagttcccatgaagatgggagcttgaggcttgattccttgattaaacactctaaaataaaggagcttgagggctggtggagtggtagatcgatctggtggtacatggcatgttctattttcctcatcaccccacatgatcttcactcagttagggatagcagcctggcaaaaattgcttgattttcagagtttacttgttcaacggctgtgttttatgtgttactgaagggaagattgtttgctgagtgtagctgctccattattagcaaatgatagatcaatagattcagatggaaacctgattctaacacacaaggggcaaggtatatttgcttgctgattttcatactagatagatggaatcgatgcttgtatttgtattcccataagcttgcagtttctattgtagggtagtgttgtaatcaatcttgtaccattgcagttacttgatatttttagtgtaactgataagtgtcttccttgttattttttgtgcagtcatcataacttcagacc

SEQ ID NO: 23015 - DNA, 1196 bp, Oryza sativa
  ref <308>: DATABASE ACCESSION NUMBER: AK073157
  ref <309>: DATABASE ENTRY DATE: 2001-12-06
gactccccccaaaacccacgccgccgccgccgtctcttccctcccttctccgccgcagccgccgtatcccccctctctctccgggagctgaaagcgcccgaggaggagatcaggttctttggccatggtgggctggcgggcggcgggcggcgctcgtgccgttcttcgccggctcagcgcggcggcggaggcggcggcgaagcaggacggccgtgtgttcgctgccagctatagcggcagcagtggcggcgtgaatgctccgtttggcttgggccaatatgcaaaccttttgagggcacaagcttttgcatccaggggagtcgcgctgaacttccatcagctgatccgcaatgctggaatatctaccacaaggaacctgcttgctgcagatgatgctatggttcctgtttcttctcctttgacacctccacttggtgatggagaacaaactgacaaaaagggagcaattgttaagcggctgaaggtccaagccatcaagaaggatatcaagcagagccccaagaaggtgaatctggtagcaaagctggttcgaggaatgcgtgtggaagatgccctgttgcagttgcaagtgacagttaaaagggctgcaaaaactgtatatcaggtgattcattctgctcgtgccaatgcagctcacaatcacggactggatcctgataaacttattgtggaagaggcttttgttgggaaaggactttacctgaagaggttgtcctaccatgccaaagggcggtgtggcgtcatggtgagaccgaggtgcagactgacagtagtggttcgagaggctaccgctgaggaagaggcaaagatcgcgaaactcagagtcagcaactataagaagctgaccagaaaggagaagcagctaatgccgcaccgtcttatcgaggttagcccgaggtgggctcgcaagaggaaagaggaggctggtgctgctgcgtagcatggcttcccatttgcaggatgtctgccttcattggccttgaagcggtgagtagccgcatatgctgaaatttacccaagaacaattgtagctctctcaagaatgaattcaaaggtctcatttgtcaggcctgtctttgttctgtttgtttcatctgtatgaaatttgtctcatgaagcataggaaactgtggcattgcccacgattctactcagaatgaataatgtcacctctg

SEQ ID NO: 23016 - DNA, 881 bp, Oryza sativa
  ref <308>: DATABASE ACCESSION NUMBER: AK073158
  ref <309>: DATABASE ENTRY DATE: 2001-12-06
ggcactcctcccgccgccgcctccgcctgcctcggaagtcacgcccctcccgccgcagcggcagagagagagagagagagatgggcttcctgtccttcgccgggagggtcctcttcgccgccgccttcctcctctccgcctaccaagagtttagtgaatttggagttgatggtgggccggccgcaaaagctctccagccgaagttcaacactattgttgcaaatatttctacccgtactggattagtggtgcctcatattgaattaaagcatattgttgctgcaatgatttctttgaagggtcttggaggtctcctctttatcctcagcagttcattgggtgcttatctcttgttgtttcaccttgcttttattacacctgttgtccacgacttctacaactatgacattgagagtgcagagtttgtacagctcttcaccaagtttgcacagaattgcgcacttgttggggcgctcctcttcttccttgccatgaagaactccatccctaagaggcagcccaacaggaagaaggcccctaaaccaaagtcgacctaaagattctgaacgtctgaagctacattgtttgcctaattgctggtgccaggggatggctctcatctgggagaaactccacagctagcatttgaggatatggcatttgtgcttgtgcatgctttaattctgaaagcatcccttgatcctgacccatttttaccggattttttttaagggcgcctccctgattacattctaatgtctgattagacgaccagattgtaccaacatgtactcccttttggttcttgattcagtttcttaggaagcaatcgttatttatgtacactccattaatttgctgggaaacatcatcttcttggc

SEQ ID NO: 23017 - DNA, 2248 bp, Oryza sativa
  ref <308>: DATABASE ACCESSION NUMBER: AK073159
  ref <309>: DATABASE ENTRY DATE: 2001-12-06
gaatggcgtcgcgctcgcgcgccgtctcctccggcttcacgaaggcgccgaccttctccgtcaccaccgcgtcgcagctccacgacgccatcgaccgcctcctcccgcggctacgcggcgacccgtccctcgcccccgccgcgcgcgcgctcgccgcggcagccaccgcctcgctgccgccctccaccgtcctctccaaccgcctcctccacctgctctcctcccacccagccaccctccccgacgcgctcgcgctcttctcctccatcgcggccccggacatctgctcccacaacaccctcatctccgcgctctctcgctccccgcgccacctcccctccgcgcgggagctgttcgaccgaatgccccagagggatcacttcgcctggtccgccctcgtctcaggttacacccgacacggccagcccgaggccgcgctcgcgctctaccggcggatgcaggaggagccggggaacgatggcgcggacaacgagttcaccgcgtccagcgcgctcgcggcggccgcggccgcacggtgcggccgcgcgggcagggagctgcactgccacgtcgtgaggagagggatcgacgccgccggcggcgacgccgtcctgtggagcgcgctcgcggacatgtacgccaagtgcggccgcgtggacgacgcgaggagggtcttcgaccggatgccggtccgggacgccgtctcctggacggcgatggtggagaggtacttcgacggcggccgcggcggggaagggttcaggctgttcctccacatgctgaggacccgaggtgttcgaccaaacgagttcacctacgcgggggttctgcgcgcctgcgcacagttcgccgtcgagagcttcgggaggcaggtgcacggccggatggcgaagagcggcactggagactcctgcttcgcggagagcgcgctcctccgcatgtactccaagtgcggcgacatggggagcgcggtgcgcgtgtttgaggccatggcgaagccggacttggtgtcgtggacggcggtgatctccggctatgcgcagaacgggcagccggaggaggcgctgcgctacttcgacatgttcttgaggtctggaattaagcctgatcatgtcacttttgttggtgttctgtcagcgtgtgctcatgccggcctggtcgacaagggcctcgagatcttccattcgattaaggaacagtattgcattgagcacactgctgatcattacgcttgcgtgatcgatctcctaagccggtcaggccaatttgagcgagcagaaaagatgataggtaatatggcagtgaaacctaacaagttcctatgggcgtccttgcttggtggctgccggattcacaagaatgttggcttggcaaggcgggcagcagaagcattgttcgaaatagaacccgagaatccagcaacttatgtaactctggcaaatatttatgcctcggttggtctttttgatgaggttgaggatgtcagaagaatcatggaatcaaagggtataaccaaaatgccggcctcaagttggattgaagttgggagaagagttcatgtgttcctagttggtgataaatcgcatcctaaagctgatgaaatctatgcacttctgaagaagctgtatgtgaaaatggtggaagaagggtatgtggcggacattgaatttgttctccatgatgtcgaagatgagcagaaggagcaggacattggctaccacagcgagcggcttgctgttgcatttgggatcattgccactccggagggttccccgatcaaggttttcaagaacctgcgcatttgcggggactgccatgctgctattaagctcatatcgcagattgtgcagagagatatcattgttagggactcgaataggttccatcacttcaaggacgggatatgttcttgcagagattactggtgacccgcacactgcatatatgaagtagttttgtctcccgattggagctactattactctttgtacggctaatgttaatatgcggcagcaactgatctgaccaaaggttttcactggttcgagtgattaagttctggaaaagaaattccttgtcaggctgaccctaggtaaacggtctcaccttttatcattcgtgcctatcctgatgaaagtttatgttatgtacgttcgctttattttattaacatatcctgtaaatatgttcattttttgtttgattgttgattgggggttagtaataaagcaatagaattgaaggggcg

SEQ ID NO: 23018 - DNA, 2853 bp, Oryza sativa
  ref <308>: DATABASE ACCESSION NUMBER: AK073160
  ref <309>: DATABASE ENTRY DATE: 2001-12-06
gacgccaaaaatggagcccaatcccccgccgccgcccgccgccgccaccgcaacctaccgccgccgcggcaagcccaagcccaaacccaagcgcaaggcagccaagcccccctcgccgtccccgccgcccaagcgccaggcccgggacgaccccccgcacacggggccactcacccgccactcgccgctcaaccctgcgccggaggatgcaccgccccagctccacgccggggagcgcgacccgcctccgcgcgcctggatagagcccgcaaagcttccgccggtgagcgaggaagtccaggccgtcctgtcgcgcggagccggcgtccacgtcgtcccctccttcgcaggatggttttcatggaaggaaatccaccaaattgaaaagcaagcattgccttcgttttttgatgggatatctttacggaggacacctgagatatatttgggaattagaaattttattatgaagaaatttcattctaatcctcaaatgcatttggagttgaaggatttgtctgagttgtcagatggggagatggatgctcagttgaaagtcttggagttcttgtcacactggggtttgatcaatttccacccttttccaccagctgtacagggggtgagtgagctggttgagagcataacaaatgctgatacagaagagaaaatttctgtagtggataaattatttcagtttgaaacattgcagtcatatctcattcctgctcctaaccaagcagaggtgacagctccgattcacaccccgagcttgctttctgagcctactctaactgaagattcgattacccaagctgagtcttctgttgagtaccactgcaactcttgctcagttgattgctcaaggaagcgctaccattgcagaactcagaaattccaggctttggtggtactagctggactgaccaggagaccttgcttcttttggaagctttagaaattttccaagcaaaatggggtgacattgccgagcatgttgctacaaaaagcaaagcacaatgcatgctacacttccttaaaatgccaattatggacccatttctgcatgatggagatgttaatgaaatatctcaggaaactgcagagcaggtctcagcagaacaaggtacttctcgtgtaactgagaaaatggaagtagaagacaaaacaaaagaaataaaaactaatgatagaaaaactgctgcaaaaccaaaattgaacttgacagaaacagaagtaaacctagacgacaatgttgttgcaaataatgataccaagaattcaggtgatatcaatgtggatgtatgtagcaatactggtgtatcaaatagatcttcagataccgaacctacaaagaaggaaacttctggggaaaacacatcaaacattgttaatgatgtcctgaaatatgcttttgaggctgttggtcacattccaaagatagagggcttgggttcatttactgaagcaggaaatcctgtcatggcactggtggcatttctatctggccttgtggatcatgacgatgttactacgttgtgctgtagttcactgaaagctatatctgatatgtctcctgctcttcaactggcaacaatgcattgttttattcttcaggatccaccaaatgacctcaaagatccaccggtcagtataagctttgcaaacacagattgtgggcaacaaaaagacaaggatgctacttcaaatccaagtgttactgacaatgatgacaatttaaaagaagagtctgctttatctgtggaagagccaaataccacatccacatcatcgaaaaacaccaggaaattatctaatgcgaaggaatctaaggatgaatctccccaagtggagcccaaacccagtagtgccaacgattgtgacaatccaatttctcaggtggcaaagagggcttctgataatataagaggacacagttccactgtgcttcctgtcagtctgaataatacaaatgaaccttgttccatatcttcccaagaggctagtgcaggaaacacaaaggatacaagtcatacagaacacatagaaggagataaaccaatttatgaggatccaccattagaaggaaaggtagagttgaacaagatcgaacatgaagtcactgacttatctgctgtacagcaacatgagtccatccaaacaagtttgaagaagggctacatacaagatcataacagtattaagaaaacagttgccgatgatgtctccgtacaaaggctacagcgggcagcagccagtgctatttcagcagctgctgtgaagtcgaaactccttgcaaagcatgaggaatatcaaatccagcgactagctgcacttgtgattgataaacagctccacaagatgcaagcgaaaatgtcagttttcactgaagcagataatttggtcctgcgagcgagagaacacaccgagagaactcggaagaagcttctgatggagaggagcgcgataatcgcttctcggatggcggcattgccacccagaccaaaccaccaacctgggatgcctgggagcagattgccggtagggtatggtgtgaatcagcatctgaggcgatcttgaggcctacttcgcacgtgctgatgacctaatgtccaccttccaagaaggatagatatagactgtagggctggcttttgtagttgtgctaatccagtaatccaccatgaccatgtgcaatatcccatgttagtatgttacaggcttaatattttgaagcgtaatattattgcctcacctagcttttagttaccccctggtagtgtagaactgctgtcacctggaatgtagtatgtattataatggtttcaagatctaggttttggtgctcctgcc

SEQ ID NO: 23019 - DNA, 949 bp, Oryza sativa
  ref <308>: DATABASE ACCESSION NUMBER: AK099329
  ref <309>: DATABASE ENTRY DATE: 2002-08-28
gatgaactcttctgatgttgtcgtctccaatgtggtcttccaggattcgccgttttggaacatccatcctgtttactgcagcaatgtggtgataagaaatgtgaccgtactagctccacatgactcacccaacactgatggaattgatccagattccagcagcaacgtctgcatcgaggactgctacatctcgacaggagatgatctgatcgccatcaagagtggctgggacgagtacggcatggcctacgggcgccccagctcgcacatcaccatccgccggatcaccggctcctcccccttcgccggcttcgctgtcgggagcgagacgtccggcggcgtggagcacgtcctcgcggagcacctcaacttcttcagctcggggttcggcatccacatcaagaccaacaccggcaggggagggttcatccggaacgtcaccgtctccgacgtgacgctggactccgtccgctacggcctgaggatcgccggcgatgtcggcgggcaccccgacgaccgctacgaccggaacgcgctccccgtcgtggacggcctgacgatcaagaacgtccagggccagaacatcagggaggcagggtcgatcaaggggatcgcgacgtcggccttctccaggatctgcctgtccaacgtgaagctcaacggcggcgcggcggtccggccgtggaagtgcgaggccgtcagcggggcggcgctcgacgtgcagccgtcgccgtgcacggagctgaccagcacgtccgggatgagcttctgtacaaattcgctgtgaactgaaactgtcaagcgtgcatgttcaggggccaagttgttctataattatcaaggcggtttttttctatcgatgaggcaatgagcgtgttatgttggtaacgcccatcaaagatatgctaaacatttaatcattcgtcagagtatatgagtaattctccgg

SEQ ID NO: 23020 - DNA, 1586 bp, Oryza sativa
  ref <308>: DATABASE ACCESSION NUMBER: AK099330
  ref <309>: DATABASE ENTRY DATE: 2002-08-28
gacgcagcaagagccgatcgatcattgtccaagtctccaagcgatcagctagctgacttgacgacgctgcgagcagcggcagcaagagagcagcagcacaaagggttcccctttcacaagtgtccggccggctgcacgtaggccatggggaagcaaatggccgccctgtgtggctttctcctcgtggcgttgctctggctcacgcccgacgtcgcgcacgcgcagacgcagatcctcttccagggttttaactgggactcgtggaagaagcagggtggttggtacaacatgctcaaggaccaggtgggcgacatcgccagcgccggcgtcacgcacgtctggctcccacctcccacgcactccgtctcgcctcaaggctacatgccgggacggctctacgacctgaacgcgtccaagtacggcaccaaggcggagctcaagtcgctcatcgccgccttccacgccaagggcatcaagtgcgtcgcggacatcgtcgtcaaccaccgctgcgccgacgacaaggacggccgcggcgtctactgcatcttcaagggcggcggcccgcgcggctgcctggactggggcccctccatgatctgctgcgacgacacgcagtactccgacggcacgggccaccgcgacaccggcgccgacttcgccgcggcgcccgatatcgaccacctcaacccgctcgtccagcgggagctctccgactggctcaggtggctcaggagggatgtcggcttcgacggctggcgcctcgacttcgccaagggctactcggcggccgtcgccaggacgtatgtccagaacgccaggccgagcttcgtcgtggcggagatatggaactccctgagctacgacggcgacgggaagccggcggccaaccaggacggccagcggcaggagctcgtgaactgggtgaagcaggttggcggcccggcgacggcgttcgacttcacgaccaagggcatcctgcagtcggcggtgcagggcgagctgtggcggatgcgggacaaggacggcaaggcgccgggcatgataggctggtatcccgagaaggccgtcaccttcgtcgacaaccacgacaccggctcgacgcagcggatgtggccattcccgtctgacaaggtcattctgggctacgcctacatcctcacccacccaggagtaccatgcatcttctacgaccacgtgttcgactggaacctcaagcaagagatcaacgcgctggcggcgacgaggaagcgcaacgggataaacgccgggagcaagctgcgcgtcctggcggcggagagcgacatgtacgtggcgatggtcgacgagagggtcatcaccaagatcgggccgagaatagacgtgggcaacataatcccgtcggacttccacatcgtggctcatggcaatgactactgcgtctgggagaagagcggccttagagtcccagaaccagaaggtcggcgctagaaacggctcgcaagctagctacacagttcttaataacttggtcgcaaaaaaaaagttcttaataatttgtacgagaaatgttcgtttctgtttgcatatatagcttatgaaatcttacc

SEQ ID NO: 23021 - DNA, 1816 bp, Oryza sativa
  ref <308>: DATABASE ACCESSION NUMBER: AK073161
  ref <309>: DATABASE ENTRY DATE: 2001-12-06
gtggcgtcgtttggatctcgacgacggccggcgccaaggcacggagggagaagaaaaccacgcgcctcttctgtgttctccggcgatggcgagctccacggcatttgcagcggcatttgcgctgctgctgctagcgtcgtcggcggcggcggagggggaggcggtgctgacgctggacgccggcaacttcacggaggtggtgggggcgcacgacttcatcgtcgtcgagttctacgccccatggtgtggccactgcaaccagcttgctccggagtacgaggcggccgccgccgccctgcgctcgcacgacccgccggtcgtcctcgccaaggtcgacgccagcgccgacctgaaccggggcctcgccggcgagcacggcgtgcagggctaccccaccatcaggatcctccgggaccgcggcgccaggtcgcacaactacgccgggccccgggacgccgccggcatcgtcgcctacctcaagaggcaggccggcccggcctccgtcgagatcgctgcctccgcctcgccgccagcggccgactccatcgccaacgacggcgtggtcgtcgtcggagttttccccgaacttagcggcagcgagttcgagagtttcatggcggtggcggagaagatgagggccgactacgatttccggcacacgacggacgccggcgtcctcccacggggtgatcggacggtgagggggcctctcgtccgcctcttcaagcccttcgacgagctcttcgttgactcgcaggattttgatagagatgcgttggagaagtttatcgagtcttctggtttccctacagtggttacctttgacactagtccggcaaaccagaaataccttctgaaatacttcgacaatgccggcaccaaagcgatgcttttcctgagcttcagtgatgacagagcagaggaattcagaactcagttccatgaagctgcaaatcaatacagcgcaaacaacataagctttctgattggtgatgtcactgcctctcagggtgctttccagtattttgggcttaaagagagtgaagtgcccctcgttttcatactagcatcgaagtcgaagtatatcaaaccaactgtggagcctgatcagatcttgccctacctgaaggaatttacagaaggaacattggcaccccatgttaaatcagaacccattccggaggttaacgatcagcctgttaagaccgttgttgctgacaatcttcgagaggtggttttcaactccggcaaaaacgttctgctcgagttctatgctccatggtgtggacattgtcagaagctggccccgatcttggaagaggttgcagtttcattgaaagatgatgaagacgtcgtcatagcaaagatggatggtactgccaacgatgtaccgtcagatttcgcggtggaggggtacccaagcatgtacttctactcgtctggggggaacctcctgccctacgacgggaggacagccgaggagatcatcgatttcatcaccaagaacaagggctccaggcctggggaagcaaccacgactgaatctgtcaaggatgaactgtgatggccacttgggggagtggggagcttcaggttaggaggtgcagtgcagctgacagcttgaggacatagctcagtactgaatttaatcttgtattcgagttccaggtttccaagtacatgtagcattaccaatggtttcatacatacatgtccccccccttttttttttttttttgcaccgctgaaatctgttattgtaacatcattacactacatcgaataatccccattttagcttgccaaacgagtaact

SEQ ID NO: 23022 - DNA, 954 bp, Oryza sativa
  ref <308>: DATABASE ACCESSION NUMBER: AK073162
  ref <309>: DATABASE ENTRY DATE: 2001-12-06
gctctccacaccaaaagacgccgcccaactcgcgaaggcggaaaaggaaaaaaagagaaaaaaaaaaaggaagaaaaaaaaataaaactcgcgcacagcaaccgaatcatctgcctcctcctcaagtagtctagtcctcctctcttctccggagtctgcgtgcgatcgaagcagaggcgcggcgctcctcctcctcctccggctccgatccccatggcgttcatgcgttcccactccaatgcatcctccggtatgggggttgctcctgacatcagggacacattccttgagcttcagatgaagaaagcatttcgctatgttatcttcaaaatcgaggaaaagcaaaagcaagttgttgtggagaagaccggggcaacaactgagagttatgatgatttcctggcatctctcccagaaaatgactgcagatatgccctctatgattttgactttgttactggggagaatgtgcaaaagagcaagattttcttcatcgcctggtctccatcaacatcccggatccgtgctaagatgctgtactccacctccaaggatcgcatcaagcaagaacttgatggattccactacgagatccaggcaaccgacccaactgaggtagaccttgaggtcctccgggagcgggctcattaaggccctggccctgatgatcgatcacctgcgaatctcaagtcaagacgcaaattcatcctatcagtgatgctcccttgcgatactattgttaataagaaagatatccatgtttcctgtaaaacgtatccccaccatcatcatcatcatcatcgtttagccttgcctgcatgattctagctgcagatggagtgttgtcggagatttacccgtatgaggtctcagagcctgtaaaacgtatgaaacaccctctcccaaactcttatattgtggtattaatatggattactgggtgtggattgtccc

SEQ ID NO: 23023 - DNA, 2154 bp, Oryza sativa
  ref <308>: DATABASE ACCESSION NUMBER: AK073163
  ref <309>: DATABASE ENTRY DATE: 2001-12-06
gacgaaatactcccctcttctttccccgccgcgtcgcgccgttcgccgcactccgccacccgctcgccttaataaggcaacggtcgccggcgccgcccgcagcaaaacccctcatattaatccatccataaaccctagaaatcgcggcgccgcaaaccccctctcgacttgagcgagcgagagatggaggaggatcaaggagggaagccacccgctccggatgccggcggcggcggcgggggaggggagagcaagaaggggagcccgtgcgaggagtgcggcgagcagccatggaagtaccggtgcccgggctgctcccgcctcacctgcagcctcccctgcgtccaatcccacaagcgccgcaccgcctgcaccggcaagcgcccccgcaccgaccccgtcccgctcgccaacttcgacgaccaccagctcctctccgattacagctttctggaggagacgaagcaggtggcggagtccgcgcatcgcctcatcggcgccttcggccgcaactacggtggattcggcggtgcgcagcttccgaagtggctcttttacctccgcaaggcggcgcagcggcgtggtatctggctccagttccttcccaggggcatggccaggagggagcagaaccgttcaaggcacaaccacagaaaggattgcatatactggacgcttgaatggaaatttaattcaacagatgttgtcctgactgaccacaacatagatgagcataccagcttgctatcatcattggaaaaacatctgagtcctggaccttggaaaaatcagctcacaccatatcgcaatacagatttgcgtgatctcaaactgttcattcaaaagtctgccaaggaatcaacttcaccatatcgccaactcaacatagaagaaccattgggtccacaactgaggagcattaaaattgtcgagtacccaactattaatgtctttcttccatcagacagttgtgatttcgaagtagaaaagtttgtcaacaagcttcctgcaagtgagaagccccctggcagctcgaccgatagcccagatctagaaggcactgagtttcatgaggaagaaatagaagaaggagaattggcaccagaaacacaagttatagacctcaaggaatgtggagcttcacatgcctctaacctagcttcagcgaaggatacaagtggatctaaggtagacaccaagagagattcttctgtgctgtcatatatacgcagtcttggattagatggtcaacaaaaagcactaactgaacgaagcaagatggcaccaaatacaacatctggggcttccaagactaaaaattgcatgaaagtctatccgatggacatggaggaaagtggggatgctggggtgatctcggagaggcagggcatagaatgtaagaaccaggcagcttcgcatcctggtaatcttacacctgtggaaggtacaaccgtatctaagatagatagcaacacagattctttagtgccgtcttccatcagtattctagcatctgatggcttcagttgtcctcaggttgaacataatcaacaaagcaggctgacgccaaattcaactcctgaagctctgaaaaggaagtcttgcatgaaagtttacccactggacaccgagaaaaatctggggttattttcagaggttcccaacttgggctttgagcaagaaatcggaaatgcttattcagatttgtttggggacataaatcctgatgatttcctcaactttgatcttgaaatgatggatgaagatgaattggcagggataacgtcgccacttaagctgtgggatgatttggaggaaggggagattccaaccgcttgatcattgtgactgtgggatgatcttaagccagtctagcaaatgagctttgcaggacaggagttctttttctctagaggcaatcagattcatctgttagcctttttcttgatgtattattcgtcagaagttttgtccaagtttctttgttcttttgcgccttgcactgcagcatagggtgcctggtgttcttcaagccaaaggtgccttttttgatagctgcagtaattttgggggtgtaaccttgttgttgctatctttcggaatggaatcaatgaacaatgttaatggatgtgaaaacatgtcagtttgttgctg

SEQ ID NO: 23024 - DNA, 1199 bp, Oryza sativa
  ref <308>: DATABASE ACCESSION NUMBER: AK099331
  ref <309>: DATABASE ENTRY DATE: 2002-08-28
gggcccatcagtcgagtcgatcgaacagcacagcaagtgagcagtgacaatggcgtctctggccgtcgtggtggtggtggtggcggtggtgtgcgccgccggtgtggcggcggcgggcaagttcgacgacgtggtggagccgagctgggccaacgaccacgtcgtgtacgagggcgacctcctcaagctccgcctcgacagctcgtccggcggcgggttcgcgtcgaagagcaagttcctgtacggcaaggcgaccgccgacctgaagctcgtggcgggggattccgccggagttgtcactgctttctatctgtcgtccggcggggacaagcacaacgagttcgacttcgagttcctgggcaacgtcaccggcgagccgtacctggtgcagaccaacctgtacatcgacggcgtcggcaaccgggagcagcgcatcgacctgtggttcgaccccaccgccgacttccacacctacgccgtgctctggaaccccagccaggtcgtcttcctcgtcgacgacacccccatccgcgtctacgagaacaagaacgccaccgccgccgtcaagggccaccaccgccacgccgccgccgccaatggcaccagcaacgccacatcggcggcggcgtccgtgccgccgttcccgtcgccgcagccgatgtcggtgtacagctccatctggaacgcggacgactgggcgacgcagggcgggcgggtgaagacggactggtcgcacgcgccgttcgtggccacgttccgcgacgtccgcgtcgagggttgcgcgtgggcggcgaacgccacggactcggacgccggcgaggtggcgcggtgcacggggagctcgtggggcaaggaggggaggtactggtggaaggagaaggacatggaggagctcaccgtgcaccagaaccaccagctcgtgtgggcgcgcgcgcaccacctcgtctacgactactgcgtcgacaccgaccgcttccccgtccagccgccggagtgcgccggacggtgaccgtcgatctcgtcgccggttaggatggatcgatggatggaactgctggtttctttcttggttagcaaatcaaatggcaggtagtttatctcagatgaacttaggtgatggtagttcatcgtaattctgtgtctctgtgggggtgtatctgtaaaaaattgttactcggcttccactgctgttctgctgc

SEQ ID NO: 23025 - DNA, 2147 bp, Oryza sativa
  ref <308>: DATABASE ACCESSION NUMBER: AK073164
  ref <309>: DATABASE ENTRY DATE: 2001-12-06
gccctcgccgccggcaccccctctcccgccgcatcccacaacacctcgctctaaaccctcgcggcggcggcggcggcggcggcgcctactccccctccccaccatctcgccgcagccggaccttcgcctcgcgctctcctccccccatcgtcgattcgcgtccaatcgagccaaggtgtaggtgttctcgtgcggtgagagagatgctggtgctgttcgagacgcccgcggggttcgccctcttcaaggtgctcgacgaagggaagctcgacaaggtcgaggatttatggaaggagttcacgacgtctgactcggcgagaaaggtggtcgagctgaaggctttcaacaagtttgagaacacctccgatgccctttcagctgcaaccctcattattgacagcaagcctaccaagggtttgcgcaaattcttgcagaagcactgtgagggtgaaacgttagctgtagctgactctaaacttggaaatgctataaaggagaagctgaaaattgattgccttcataacagtgctgtgatggagctcatgagagggttaaggaaccagctcactgaacttatatctggtttgggtgcacaagaccttggtccaatgagccttggattgtcccacagcctgtctagatataagctgaagttcagtcctgaaaaggttgatactatgatcattcaggccattggattattggatgatcttgataaggagctcaacacttacgccatgagggttcgtgaatggtatgggtggcacttcccagagctcactaaaattgtagctgataacatacagtacgcaaaagttgtgaagatgatgggtgatcggactaacgcagaaagccttgatttctctgagatactctcagatgatgaggttgaagcacagttaaaagaggcggcagtaatatccatgggaacagaagttagtgaacttgatttgctaaatatcagggagctgtgtgatcaggtgttggctctttctgagtacagagcccagctgtttgattatctgagaagcaggatgaacactatcgcaccaaatttgactgcacttgtgggcgaattggttggtgctcgacttattgcacacggtggcagtttggtaaatctggccaagcagccgggcagcacaattcagatacttggtgcagagaaggctttgttcagagctctcaagacaaaacatgctacgccgaagtatggtctcatttaccatgcatccctaattggtcaagcagctccaaagcacaagggaaagatttctcgttctcttgcagcaaaaactgctcttgccattcggtatgatgcccttggtgatggtgaagacaactccattggtctagagagtcgagtcaagcttgagacgcggcttcgtgttctcgagggtaaagaacttggcaggtctgcaggttccactaaaggaaagcccaagatagaagtgtatgaaaaggaccggaagaagggtgctggggctttaatcactcctgctaagacatacaatcctgcggctgatctggtacttggacaatccactgaagaaactccaaagaagcctgaaggtgcttcgaagaagaggaaacatcaagagacggagcctgcaccagcagagaagaccactaaagaggatggtgaccaagaaggtgaaaagaaaaagaagaaaaagaagtccaaagagagcgaggaatctcctgcggccgatgctgacggtggcaagaaaaagaaaaagacgtccaaggagagcgaggaacctccagtggccactacagaaggtgagaagaaggagaagaagaaaaagaagaaatctgattcacaagatgccgaggatgttgccatggaaaccgaggagtctggcaagaaagagaagaagaaaaagaagaaacaccatagcgatgaatgaaggatacactggagaaggacatgttatcttgagtagcatagggttgaagaatcgctgctctgtagaatgcaacattccgagtttttccatgccggttagttgtaggataggcatcaagtttggacttgttactcatggatcttgtattcaattgcctactgaattttggaattggagagcatatgatgcttttgctcattctatgtgaactaaagtttcttgtccttttggctggcc

SEQ ID NO: 23026 - DNA, 2514 bp, Oryza sativa
  ref <308>: DATABASE ACCESSION NUMBER: AK073165
  ref <309>: DATABASE ENTRY DATE: 2001-12-06
gagtgctccgtcgatctctcctccgccgccggcaatggcgtctccgcggcggcgctccctgccgctgccgctcctcctcctcgtcttcccggtctccctcttcgtcgtccttctcctccaccaccgctcctcgatccccgcggcggagctcctctccggccccgggccggacccgcgccgcttctccctcctcatcaaggtcctcgcctacgaccgcccggggccgctccgccgctgcctccgctcgctcgcagcggcggactacgccggggaccgcgtggcgctccacgtcctcgtcgaccacccgcgccccaacgcatccctcgatgcgtcgcgcgagatcctcgccgaggccgacgccctccggtggccgcacggggagaagcgcgtgcactaccgcgccgccaacgcggggctccaggcgcagtggatcgaggcgtggtggcccggctccgacgacgagttcgccttcgtcgtcgaggacgacctcgaggtgtcgccgctctactatcggttcctcaagcggctggtcatggcgtactactacgaccgcgagaactacagcccctacgtgttcggcgcgtcgctgcagcgcccccggtttgtcgcaggtaaacatggaaacaagatacagctggatagtgaaactcaccttttcttgtaccagatggttggtacctggggccaacttctcttcccaaaaccatggaaagaatttcgattatggtatgatgaacacaaatctaaaggaatcaaacctattcttgaaggcatgaaaactacagggtggtataaaaagatgggggagagaatatggaccccttggttcattaggtttgtccactcctgtggatacttcaacttctacacgaacttcctgaaggaaagggccctcagcgtctctcatagggatgcaggtgtgaactatggaaggagtgttggaccagattctacgttgttagatgggaagaatctggatttcaatctatgggaattgcagcctctaaacaagctaaaatggtacgatttctgctttgctgaagttcttcccggaagagtcattaggaaattcagtgaacttggttctgtgctcaagtcggtgcaattagaaaacaatgttgtgctgataagtctatactcactagaacagagaattgcaagaaacttgatttgctatcttgagaagtcagggatgcggaactacattttccttgttgacaatacagaatttctggatgaccttgctcatagaggacatcctgtcattgatgctatcagtttgctccagcgcatcaaaatgagtagttctatatactcagatgactttgttaaggaaatagtggtcaaagcttatgtgataaaaaattgcttggacctgggctacaatctttgggtattaaatgggaatacaatttctcttggcagtaagttaaatgagccatcagatcaatcagttgatttctttgctgcagaatctgtagatttgatgtttctgaggggctcacagagctctaaaaaaacttggaatgaacttgatatattgagaatggctgatgggatgatgtcttcaaaaagcggcttttcttcttctcttgagcataagaattttgtccgcgtgctcactggagtgttgggaaacaatggtgctgtgaggctgggaaaactggatgaagaaattatggctgttgaattagggcctaacacctcaaacagatcattgtcagaaggtcactgtaaagtcttattctggtctcatagtatgacttcagattcagttcaaagtcaacttgaaaatagaggtttatggttaattgactcagattcatcttgtagtgctgttgtttgtggccaaaaacagaagtaatattgtttgttgttgcaaatgttcttttgttaaacaatggcaacattaacgggatctaagccaaggtaactcaaaggtattatgagagaggtgaacctgccctgggaacttacccaaggaaacagtgatagcattcttctttgatgtcattttggatcatcctcatggtattcaatgcagatttttgccagaaaatattgattacagtggagtttttgtgagaccacatttgttttgtagctctgctctggtacagattatatggtatccacgggtatgaactccattaagtcttccacgggtatgagcactcggtgtgtgtgctgtcttgcagtcttgctgatgagggggaactattcagttagctatgtttggctgcgaattcaactcattaatatggttttggagataattttctctggtatgctccacgtggatagcagcattccaaccacaacctgacagtcctcagatcattggatgctaacttggtatgctttttctgtccaaagtaacagtgaattctctgttctaaacatgtactatcaatgttgtctgtatttaagtcattcaaattgtggacaactgtggggtaaattttactgagatttgcacagatagataattttctctctttttttcatttggtc

SEQ ID NO: 23027 - DNA, 2177 bp, Oryza sativa
  ref <308>: DATABASE ACCESSION NUMBER: AK099332
  ref <309>: DATABASE ENTRY DATE: 2002-08-28
ggtgggagagagaagagagttttgtagcgagctcgcgcgaatgcgaagccaaccgagagaggcattcaccaacgagcaagaggggagtggattggttggttaaagctccgcatcttgcggcggaaatctcgctctcttctctgcggtgggtggccggagaagtcgccgccggtgaggcatggggatggaggtggcggcggcgcggctgggggctctgtacacgacctccgactacgcgtcggtggtgtccatcaacctgttcgtcgcgctgctctgcgcctgcatcgtcctcggccacctcctcgaggagaatcgctgggtcaatgagtccatcaccgcgctcatcatcgggctctgcaccggcgtggtgatcttgctgatgaccaaagggaagagctcgcacttattcgtcttcagtgaggatctcttcttcatctacctcctccctccgatcatcttcaatgcaggttttcaggtaaagaaaaagcaattcttccggaatttcatgacgatcacattatttggagccgtcgggacaatgatatcctttttcacaatatctattgctgccattgcaacattcagcagaatgaacattggaacgctggatgtaggagattttcttgcaattggagccatcttttctgcgacagattctgtctgcacattgcaggtcctcaatcaggatgagacaccctttttgtacagtctggtattcggtgaaggtgttgtgaacgatgctacatcaattgtgcttttcaacgcactacagaactttgatcttgtccacatagatgcggctgtcgttctgaaattcttggggaacttcttttatttatttttgtcgagcaccttccttggagtatttgctggattgctcagtgcatacataatcaagaagctatacattggaaggcattctactgaccgtgaggttgcccttatgatgctcatggcttacctttcatatatgctggctgagttgctagatttgagcggcattctcaccgtattcttctgtggtattgtaatgtcacattacacttggcataacgtcacagagagttcaagagttacaacaaagcacgcatttgcaactctgtccttcattgctgagacttttctcttcctgtatgttgggatggatgcattggatattgaaaaatgggagtttgccagtgacagacctggcaaatccattgggataagctcaattttgctaggattggttctgattggaagagctgcttttgtattcccgctgtcgttcttgtcgaacctaacaaagaaggcaccgaatgaaaaaataacctggagacagcaagttgtaatatggtgggctgggctgatgagaggagctgtgtcgattgctcttgcttacaataagtttacaagatctggccatactcagctgcacggcaatgcaataatgatcaccagcaccatcactgtcgttctttttagcactacggtatttgggatgatgacaaagccattgatcaggctgctgctaccggcctcaggccatcctgtcacctctgagccttcatcaccaaagtccctgcattctcctctcctgacaagcatgcaaggttctgacctcgagagtacaaccaacattgtgaggccttccagcctccggatgctcctcaccaagccgacccacactgtccactactactggcgcaagttcgacgacgcgctgatgcgaccgatgtttggcgggcgcgggttcgtgcccttctcccctggatcaccaaccgagcagagccatggaggaagatgaacagtgcaaagaaatgagaatggaatggttgatgaggagaatacatgtaaaatgtgacagcaaaagagagaaggcaagttttgggtttgtagagtttggctgctgctaatgagttgttgatagtgcctatattcttcagaacttcagatggtgcctcaccaaggcctaagagccaggaggaccttctgataatggttcgggatgattggtttgttctgtcaggatgaaccctagtgagtgacacagggtgatgtgctccgacaacctgtaaattttgtagattaacagccccatttgtacctgtctaccatctttagttggcgggtgttctttcctagttgccaccctgcatgtaaaatgaaattctccgccaaaatagatttgtgtgtat

SEQ ID NO: 23028 - DNA, 1145 bp, Oryza sativa
  ref <308>: DATABASE ACCESSION NUMBER: AK073166
  ref <309>: DATABASE ENTRY DATE: 2001-12-06
gtcaagtcgtctcctcttcttcttctcttcttccttcctctcccaacaccaaaacccaagaaccccacaagtgcgggcgaggaggggagggaggcattaatggagccctctaccaagcagctcctccccatgcctcagcaagaccccaactcgccgtcgtcttccacctcgtcgtcgtcgtcgtcctccacctcgccgtctcacccgcaccaccgtgcaccacttccaccgtcgcctaggcccgtcccccgcaccatcgagaccacccccttccccaccaccttcgtgcaggccgacaccgcctccttcaagcaggtcgtgcagatgctcaccggcgccgagcaaccctccaagaacgccgccacagcagcgacagcggccgcggggaacagcagcgccgccgggattggtggcgggcagggggcaaacgggccgtgccgtcccaagaagccggctttcaagctgtacgagcggcggagcagcctcaagaacctcaagatgatcgcgccgctggcgatgggggcgctgccgtcgccgaccggcaggaaggtcggcacgccggagatcctgtcgccgagcgtgctggacttcccgtcgctcaagctcagcccggtcacgccgctcaccggcgagcccttcaaccgctcgccggcctcgtcctccgaggacgccgagcgcgccgccatatccgagagggggttcttcctccacccctcgccgcgtggcgccgagccgccgcgcctcctcccgctcttcccggtcacctcgccaaggatggccgcgccttccgagtgagtgacccaaaagctcccgcctttgcgcgcgcctcaactatatcaagtaatcgacgacgagtacaactactgctactaccgctctcgctgtaccgtttctcttcgcagttctagttttgtggttgttgttcttgatctgctgctgctgctgctgtaatttttgcccccttctcgaaatgaagaagggagtttcttttttttcttctttggagtagtgaccagtgagcgattgtataatccgagctctagatttcggcttcggtttcttgatcgctcgctggggactccgaaaggatggatcaatcgattaattaagcttaattttgagcttggtgttctaactcccttcct

SEQ ID NO: 23029 - DNA, 1135 bp, Oryza sativa
  ref <308>: DATABASE ACCESSION NUMBER: AK073167
  ref <309>: DATABASE ENTRY DATE: 2001-12-06
tactcgacactactcgagctcgcgagcggcgagcccaaaacctgacaaaccacacgcccacctcgccatggcgcggcacctcgcgccaccaggaagcttccaccgcctcctcgcctcccggcactacccgccttcctccccggcaccgccgccgcgccctctccttctcctccccaaaaccctaataccgccggccgccgccgcaatggaattccctcgccgcgggcggcgcgacgtcgccgccgcctccgccccggcatcctcctcgccggagaccgaggtagcgccgggggcctgggggaaggtctccgccgtgctcttcgacatggacggcgtgctctgcaacagcgaggagctctcgcgcctcgcgggcgtcgacttatttgccgagatgggcgtcgacgtcaccggggacgactttgttccttacatgggcacaggtgaggctaatttccttggaggtgtagcgaagttgaagggagtgaaagatttcaacgctgaaagtgccaagaaacgtttttttgagatatatcttgacaagtatgcaaagccaaatgctggcattggattccctggggctctagatctcttaacagagtgcaaaaatgcaggtttgaaggttgctgttgcatccagtgctgataggattaaggtggatgcaaatttggcagctgctggtttgcctctgtcgctattcgatgccattgtttctgctgatgcatttgaaaatttgaagcctgctccggacatttttttggcagcatctaaaaccctaggtgttgacacagatgagtgcattgtgatagaagacgcacttgctggagttcaagctgcaaaagctgccgaaatgagatgcattgctgtgatgactactctggaggaagatgcgttacagcaagccagtccctcactcatacggaagaatattggagatatttcaattagagatattttgtatggtggttctaatgcttaccacagtatgtagttcaagcaaagtttatttcaataaaataatgcatctcttgtatttgaaactggaaagaaaaaaaaaatctgcatatcttgttgtgcaaaactcattatatttgctttgtttcattggtttgaataagacccctatcccatttccttg

SEQ ID NO: 23030 - DNA, 2671 bp, Oryza sativa
  ref <308>: DATABASE ACCESSION NUMBER: AK073168
  ref <309>: DATABASE ENTRY DATE: 2001-12-06
ggttgggcttgaacccagtccccacagttcccccctccccatcgacctgcgggctgcggcggcgctccagcagacggcggcggcgccgccggtgccggcgccaaaatcaacccgacttccaggctcccagcgccactgcgcgtggctgccctggctctgagcgcatccagcggttgagctcgccctgccccgaccccgcgctccgccgcggatctctagaaacgccaccacgacgcccggcgatggtttccacggcagattgcttccccctccctgacatttgatgatggaggccctggctctttcaatggcgcatggataggaggaatatgcaacaaaaggaaacttcttactggcatttgtcattgacaaatagacaatgcattgtcttgcaaaatatccatcagaatactgacccatgaaaaggccaatgggagtatctgactgactagtgcagctaggagtacagtacagtaggagatacaccacagcaacgactgaacaagttctcgcaggagttgtccagggacagcagtggtgccagcctttctcctgcggccatctctcaaacataagtcatcctttctggcggagaggcgaccctcacaggtgcggtgtttcatcatatgagctagagtgtagcagtggcaaggccaccatccagatcaatacaggaacatactatgtcactagcatcaactacaacgattcgtccttctgggtcgtggacgccaacctgcaggatgcaaacagcaactgccctcttcctcgctccaatcatcgtcctttcatttgggggattccagggcccaagctacaccagggaattgactcttcagggaatatggtgggcgacctttgtcaattgttcgcaggcagtgaagaacaataacaagtacatacatgtggattgccagaacacgagctcttcatttgtctatgtgctgaatgtcgcaccatattacgctcttatggaaaatcttgagccttcttgcggatacttggccatgattccagttagttggactcctgccagtggtaaaaaataccaatattttgctgagttgatgaggaagggattctctgttcgctttccttttgtcttagatcatccgactgcatttgagctaatcaagcagtgcctaaaccggtcaattcgtggttttcgtgaagaaccattctccactactgcacatgtcaaaaatcggattgcggacattgtttttgtggacttgatcttttgggcatgcataattggcaaaacgagccaaacatcagattattttgagacaccactctatatggtggagatgcttcatgggaaaagaatattttattcaggatttgtcctacaatttgtcatgtggacagtaaagtggatatatgtcatatgcaggtttgtgttggcgccactggcactattgacttttcttgcacaaagatactggaaaacaaggatcacaatcgatgcagttgagaagtttctgcgaatgcagttgatgcttggcccgacgaggtacacctacacagatatcattgcaatgacaagccatttcagagacaagctaggtcagggtggttacggttctgtattcaagggtgtcatactcccgggtgatgtttacgttgccatcaagatgctagacaactacaattgcaacggagaagagttcatcagtgaggtctccaccatcggtagtatccatcatgtcaatgttgtgcgtctggtggggttttgtgcagaggaaatgaggagggcactagtgtacgagtacatgccccatggatctctcgacaagttcatcttcgcacctgaaaagagcttctcctgggacaagctcaatgagattgcactgggcattgctagaggaataaactacttgcatcaagggtgtgatatgcagattctacattttgatatcaagccacacaacatccttcttgatagcaatttcgtcccaaaagttgccgattttggcctcgccaaactatgcccacgggacaacaattatgtgccagttagcgctgcacgaggaacagtaggttatattgctcctgagatgatatctcgaagcttcggtgtcatatctagcaaatctgatgtttagagctttggaatgcttttgttagagatggctggagggcgaaggaactctaagcagaacatgtcaagctcaacccaggtgtattatccatcattggtgtataatcaactcattcaacaagagatgggtgagatcaccaataccttgaatatgcatgagctggaaaggaagttgtgtgttgttggtctacattgcattcaggtgaagcctcctgatcgtccaacgatgagtgaggtcatagaaatgcttgaaggtgatgttgatggtctgcagctgccttccaggccattcttctgcgatgatgaacccctgcccctgttggtggattcttaccgtttctcctctgagctaactgaaatctcagaggaggatggctgaagcttatgcatgtgctttgatgccaaaaagtcaaggtactaagttggttgttgttttttctcagataaggtggtaggtaggttgtaaaactgaggctacatattgttgtaaacagatgtttcatcgcattgttgtaatttgaaagtgattttttttagggaataacagagtataaagctgggacgagt

SEQ ID NO: 23031 - DNA, 2039 bp, Oryza sativa
  ref <308>: DATABASE ACCESSION NUMBER: AK073169
  ref <309>: DATABASE ENTRY DATE: 2001-12-06
ggagtagaattctagaagaaggagaaagaaatcgaaaggcagcagctgatggttgcatgctgtgcgtcgctctcatgctcaaaaggtcaacagagttgagtccctcagctaaggcaggcaagcacgagagtcacagatacatatcccctttaatctcctctcccaccaatcctttgatccattcatcccaacttcttccatagtacaaatctcttgctcccctccctctcatctcctatctgtatctatttctatctctctatctcgtatctccttgaagaagaacagagagaggattgggaggagtagtaggtagttgatttagttttgaggagccggagaggagagcaggtgtcctggttcgtgattcgatttcagctgttctgatcgcttcttgtggcttctgtgccgtgctggcctctcgttcttgagcctttgtcgattcgattcccgcgaaaaggaggcgtctttttgtgagttaggtgtggtgcttcttgggctctactacctccgaggtgaaggtgttgttgttggtggtggtggattttcgccatggggaattgctggggcgccaagatcagctcggagagcccttgccgcagcgcctcctccccttctggggggacatccaagtatgctagcaactccagtgtgtctgcagcctcggtgccgccaacaccacggagcgaggatgagatcctggaggcagcaaatgtcaaggcctttgccttcaatgagctgaggactgccaccagaaacttccggccagacagtgtgcttggtgagggaggctttggatcagtcttcaaagggtggatcgatgagaagacgctcgcaccaactaagccaggcacagggatggtcattgctgtaaagaagttgaatcaggaaggccaccagggtcacagggaatggctggctgaagtgaattatcttggacagttgtcacacccatatcttgtaaggctcgttgggtactgcgtcgaagatgagcagcgtcttcttgtttatgagttcatgccacgtggtagcttggaaaatcatcttttcaggaggagtacgcattttcagccgctctcctggaaccttcggatgaaaattgcccttggagcagcaaaagggctcgcatttctccacagtgacaaggttaaagtcatctaccgtgatttcaagacctctaatgtccttttggatgcgaactatgatgcaaagctctctgattttgggctggcaaaggatggaccgactggtgacaagagccatgtctccacaagggtgatggggacttatggatatgctgcaccagaataccttgcaacaggccatctgaccaccaagagcgacgtctatagctttggagttgtgctgctagagatgctatcaggacgacgagcactggacaagaaccgcccaaccggggagcacaatctggtggagtgggctaggccatacctgatgagcaagcggcgcatcttccgcatcctggacgcccggttgggcgggcagtactcccttgccaaggcccagaaggctgcaacactggcacttcaatgcatctctgtggaggccaagaacaggcctaacatggagcaggttgttgctgtattagaacagctccaggattccaaggagacaggggcaaatcctcagctgcagaagaagtccagcagcaagaacgcaggcagcaatggatcgaaaccgtcatcgaaggggaagcccgcaaatgcgaggctggtttaagtgaacaatcatatatcatatgatcagatatagatctgttgagatgagtagtgtaggctcttagagggacctgtaaagaagaggagagttgtgaatccttggtgcttgcctgttttagttgtttttgcagcttctagtcagagtcttgtctgaagtaaaaagtatgtggtcgcctatatctgcatgcattcagttcagtgcattgtggattgtacagtttatatctagttctaatgctgcgaaatttttgttcgaggcaacagatgtgcccagatccagtttttcctgatttttaaacc

SEQ ID NO: 23032 - DNA, 1814 bp, Oryza sativa
  ref <308>: DATABASE ACCESSION NUMBER: AK073170
  ref <309>: DATABASE ENTRY DATE: 2001-12-06
gatcgcatcgcacattcgcactcgtctcgtcttactcaccccgcacgtttccacttcccctctcccccacctcaccaacactcctcgccgtcccaccaaaccctactaaccgccgcgcgcgagagggtcccatccccgacttcgccgccatggccggcgctcccccgacggaggcggagaaggagtccctcgtcacctccttcctcgagatcgccgccggccagacgcccgagacggccacccagttcctccagatgacgagctggcatctggaggaggcgttgcagctgttctacatcgacggcgaggccgcccttgcggcgcatccggccccatcgccggctgctgcggcggaagcggcggcggcggcggtggcagcagctgctgaggtggaggacgcgatgaggttcgctccgcccccagctgctgcactgggtgatggaatgctgcagggacttggggaggaagaggatgtgcgggcaccgctgcccacaaagcgggagactctctacggcgatgcccccatggtcgtcgttcggcctaattcaacagttgcatttcgtaactttgaagaggagtcaaggcaatctgctgtttgggattctgagcagaatgctgcatctagttctcgtgataatctggcggcattgtatcgtccaccatttgctttgatgttcaatggacccttcgacaaggcaaagttagaggcttctgttctggacaagtggctcttgatcaatttgcaatcgactgaagagttcagctctcacatgcttaatcgggacacttgggctaatgaggctgtggctcagacaattcgatcgaactttattttctggcaggtttaccatgacaccagtgaggggaggaaggtatgcacctactacaatttggtctctgttcctgccattcttctgattgaccctatcactgggcaaaaaatgcgtgggtggaatggaatgattcacccggaccgtttgctggaggatttgatgccttacctggacaaaggtccaaaggagcaccatgcagctcaacctcaaaaacggccaagaaaagttgatcaggaaacttctatcggcaaacaaggtaaaacccctgtacccgtagtagccacagaggatgaagacgaagaactagcacgggcagtagcggcttctcttgaggagagtaaaggctctgacactagtgaggaaaagattgaacctgaggtagaaaatgagcctagcctgagtgctaagctgaactatcctcctctccctgaagaacccaaaggaagtcgggagcttttgtgcagagttgcaattcgcctacctgatggtaggaggatccagaggaatttccttcacacggatcctattaagctcctgtggtcattctgctatcctcaagtggaggacggggataagaaggctttccatttcgtacagcccattcctagggcatccacaaacctggagtacgagagtgataaaactttcaaagaagccgggttggccaactcgatgatcaaccttttgtgggactaaaagcctattttatcaactcatgttatttctttattggctccaagtcaagattatcgagtgattttctgtgagggttcataattgcttctcttatttttctttttccctcctggtgcttggagccaaatgacgaatctggtttctttggtgtggaaatgcccatattccttttgtagtggttcctagtatgtttatagaactcttgagtaggtttactcaagttctcttttaatgcatataatattattatacctgaacagatgctgataaaatcttgttcttctt

SEQ ID NO: 23033 - DNA, 1617 bp, Oryza sativa
  ref <308>: DATABASE ACCESSION NUMBER: AK073171
  ref <309>: DATABASE ENTRY DATE: 2001-12-06
gattccaccaaaacccccaaatccctcgtctcgtttgccgccggcgatggcggcggcggcgccgcccacaggcaagaagcgtagattcgagcggtccagcagccaggagccacccgggagcggcggcctcgacctcatcagcggcctccccgacgccatcctcggcgaaatcatctcgctcctccccaccaagtatggcgcccgcacgcagctcgtctcccgccggtggcgccccctgtggcgctccgcgcccctcaacctcgatgtttacgatctctccggccaggaacggaagcgcgtcgcccttgcctccaagattctcgccgaacaccctggccccgcccgccgcttctccctccactgcttccgcctccgcggcaggcacgccaagctggacggatggctccgctcccgcgccctcgccgatctccgggagcttagtttcagctacgaggtggagcgcgaggcgcaggcgcaggcgtacccgctgccgccgtccgctctgcggttcgcgcccaccctcgtcgtgctttacctcagcagctgcggtttccccgacgagatgccgccgacgctgcatttccctcgcctcaagcagctcacgctgtgcagcgtcgctatctccgaggacgccatccatggcgtgctgtcacgctgccctgcattggagagcctgctgctgcaggggaatttcggcgttcgccgccttcgcatcaactccgcatctctcaggagcttcggcttctattcgaaatcctggggcttctcttctgcatcttggaatggatttgctggtgccgagttgcaggaggtggtcatcgaggatgccccttgccttgaaagattactgccactttgtcccaatgatggcgtggcggccatccgggtgatcgcggcgcctaaactggagataatgggaccactctctgatggcatatctcaactccaccttggaacaacgatttttcaggaaatgactgctgtcagccttacaacctcaatgcgaagtgtgaaggttttggttcttgattctgatggccctaatctggatgcagttgttgacttcctcagttgcttcccctgcttggagaggctgtatattgcttctcaaccgtttaaggttattaaaaatacgcggaggtatgacccgctaaatccaatagaatgcattcagttccatctcaaaaaagtggtgataagaaattatggaggaaggaggtcagatgtcgactttgccaagttctttgttctgaatgcaaaagcgctaagagaaatggagttagctggccttaacaattgcaatcagaaatggttggccaatcaacacaggcggcttcaattagaaaagaaagcatctcaaaatgctcaatttacatttaaaactacccatacgagtgatttcagtatgaacaagcacacccatgatttgtcaatatctgatccctttgataggtctttatgaccatgctgctctcggatatgatacacatgcagtcttgtattatgttcaaatgttatatttgtaccttctcttgtttggattttagtgtcgtactatgtcagcaagttaatgagttatctttatttaaagccgcaacctagtaagtttttaccacc

SEQ ID NO: 23034 - DNA, 1471 bp, Oryza sativa
  ref <308>: DATABASE ACCESSION NUMBER: AK073172
  ref <309>: DATABASE ENTRY DATE: 2001-12-06
gatcccgcgaggcagccgcaactcgccatcaccacctcccgatccgcgcgctttctctcccgcgccccctgcggatctgccggctctggaagggcgagagggcgctggagtcgtctcggcggcgctagggttgaagctggtgggggaaggaggaggaggggcatgaggattagcgagctgggagagtgtgacggggtgcggtcggaaggggaggaggagcagcaggtggtggtggaggaggccagcgtccgcggcggcgtggtggtagcgcggctgagcgcgaagcgtgcgctcgtcggcgccggcgccagggtgctgttctacccgacgctgctctacaacgtgctgcgcaaccggttcgaggcggagttccggtggtgggaccgagtcgaccagtatattttgctaggtgctgttcctttcccaagtgatgttccacgtttgaagcaacttggagttcagggagttgtaacattgaatgaggcttatgagaccctggtcccaacatctttataccaggcccatgggattgaccaccttattattcccacaagagactacctgtttgcaccagccctccaggatatttgtcaagccatagattttatccaccggaatgcatcagaaggtggcattacttatgttcactgtaaagctggaagagggcgtagcacgactattgttttgtgttatctgattaaatatcggagcatgagtccagaagcagcattagatcatgtccgatccattaggcctagagtacttttggcaccatcgcagtggcaggctgtcaacgtttttagtaccctcaccaccgggcgtcttccaatacagagtaaaaacctgggccattttctagaagccggggatgactgcatcaccaactcagaaattgatgattactactccatggagcttgattacgaagatagtggtttacccctttgtcaagtaatgttacccaggccaacgagccctacagtgtgtactgacgcagtactcataacagaagcggacctcgagggatatgatacttatgccgataccaggaaggacgttgtgtcgttggaagtgatagtcagccggaagcccatcatgagaagactatcatgtctctttggatctctgaaacttaccaacaattgtgagccaaccccaagccggtttgctgaggttcgggcctgctaggtaaaccagcaggcttttatgcagttttcaatgctgtgaatcaagggtacatagtagtagataataataggcagttagcctgttagacatggtagaaacagtgatgtttctactttctcttatcgcggcaatgccaccgggaagaaaatgtgtgcatagtgagtttggagagtgtagagatgtggatgtgcggattgtccttgttttttaaccctgaaaacgtgagatttcacttaatggttgtttctccgatcggaataaaaagatgtccatgttccatgtc

SEQ ID NO: 23035 - DNA, 1015 bp, Oryza sativa
  ref <308>: DATABASE ACCESSION NUMBER: AK073173
  ref <309>: DATABASE ENTRY DATE: 2001-12-06
gggggtctcgccctcctcgcgatcgactcccctcgccccgactcaccgccggtctcctcccctccgccacagattcatccctccctcctctttgcaattccaccatcctctttccagaggggctctcacccttgctccctcccctaaccctaatctcgcccgcgcccccaccagcttctaccgctgaccgtcgcgccgtgccgccccgcctcgccctcttcaaccgccgaccgtcccgtcgccctgcatcttgcccgcgccgccgccgtcgtgttatcccgccaccgcagaattagcatggatcaggcaaaagggttgacgtgctccagtgtaagaattgcttgagactcggttgtcaagagcgctgctttgacgacttcctcctcggcctccgcctcaactgccaccgccgccactgccgcgtcgtccgacaatatttggttcatggtagcacatgggtttggtaaatctatcccaatgaaaaatggtggtatttgatcattcccttcgttccttttctatagctttggttaaccttctgggtgaggtgcactacaattccttgtatgacattgaagtcataaaatttgatggaataccaatgcctgttgcggggtaatttgccctcaatctgaggtattgccatgagtattatcattttctccctgtaaattgcaacaaggtgttttattaaatggctgcttcgttataacatggtgttctgttcatgtgaacttgtgaaatggctgagaagttctttttagctaaagtgcagtagttgtgctatgttgtgaagagtgaaatgaagtattagcaaaagggtgagacatgggttaaagttccagtgatatgaaatcgttcatccctgtcttgattcctggaagatgatatttttttccaagtagctttgatgaaatgtagcaatgagtaaatgaccaaaattgtaataatctttgtatggatttgaacaccatcgatatgattttttaaatgaacttcttgtgttataaatggt

SEQ ID NO: 23036 - DNA, 3146 bp, Oryza sativa
  ref <308>: DATABASE ACCESSION NUMBER: AK073174
  ref <309>: DATABASE ENTRY DATE: 2001-12-06
ggcctgctcctccctcacgcgcgccggcccgcagcccgctccctcgcccttctcctcccctcgcatacgccgtcatcgccgtcgtcgccgccgccgccgtcgctcggtgccctctccttcatgctctccatcctcggctactcctcccctcgctttgcgccattgccgcctcaccctcctcctcttatcatcgcagtgccgacgccgtcctccttgccggtggatcagcgaggagcccggggctgccagatccgaagaccccgacctcgctggtggatctagcagcctggaggaaagggacgcaagccatagcgaccctcttcccctctttcatctctgctccgccatcacatctctctcgatcgacctatccgcgccgcttggttgttgcaggtttgtctcgatggccgtcggaattgatgatctcgaccagaagtgaaggctgccacccctgctctcttctcctcttcctctccggtcctccactgctcctctcgaccctcttcctcccgctctccgcgccgctcggtggcagatccaaggggctatttggtctcctatgaggaggacacatgaacgctagggtgtgggggctgaccgatggctaggaggctgggaaggagaagctagagccagagtggcgcggctcagaccccaaagccacgacgacggcagggcagcgtcgactatggctaggtacagtgacgacgactgcaacagcttggttggtcctgctctttttttcttcttcacttctttttttggttcactgggagaggcaacccactactgatgggcatttgaactaacatggcatctctcctggagcaactgtcagtacttgcattgcagtcaaattggcgaatccagagtaatttcccattttgtctcaacgatatgctttgtgcttatttcattgtgatgtctaacatatgttcatgctccatctcaacctgtcaggaagtataccctgtgcgacattctaattatgggtctcctaattttcatatccaaaaatagaagtatgaagctgtgctaggtctgctcacaaatggttctttgtggagcatatcagtatataggtaaattgtgctttagattttctccttaaatcatatgaaaagtctatatatgcttcttcattgcgcatgactgttgcagtactgatatgaccctttgccatggactctctgcgatcttcccattgtatggagcacaagaataacatatacgccagatatttaatctatagaaacttcaatgttgcactttgtcttcagaattacctattgtctaaatataccatgtatccagctgtaataccaattatttacttacattttatagaggagtttatcaaaattgttctaagataatataatatggcaggatatttttatagtttcatggaggtttacacatttagtaccatagctttcgttttactaggctttctcaatgtttccttaaaggcatgagatcattttttttaaacatgctgctgatggcaagttagtttttctatgtaactgcggtgaactgataccagtaatgtgctcatccaatcgttaaagaaaacttgcgctgagttagtgatcttaagatagtaactgtcatacaaatgaccttttgttaggtgcagcattgtttagactttggaggattcaactcttttgaacttatgtgaatggaagtatctaatactacctgagtacctgttcagtcaagaaaatcacatgcaaggtattttggatcttgataggttctacacaaactaatatctagcttttggttgatgagaatttctgctccatactgaaggagtttgttgttgtagttgtacatatcctggtggatgggctcacgtaattttctggagcctcaaatccgcaattacattgtcaaattttgactgactgccatgcttgactgattctttacctcatgcacgtgctctatggacgctgtaaccttttggtttaagtgcattgctcaggtgctcctgacgacaggacttcgttgtacacaattgtgcaaatttgagtggatgagcttgtgtaatcctctgaaactcctattacagttccagattttgacctgcagttatttttagtaatcatttaccttatgtcattattttctttgtatgtgtatttttgcagacttgcaggaccattttctattttcttataagcaaaaagtgaaagaacaagagtgacccacaaagcatggctttcattattgaatcagaaagtgcaaaacttaatattcacattgtagagagcatatttgaggttgaaagattgtacagctgcattcgtgtagaatcgatttgctatagaaagaaatggtttgtgggtcacagtttagttggaccaacctttttctcattagtcaccttacaactcacaaggagcaacacgtagcagtatagcacttttttagaggaaccatttcttctgtttgatgcgtgcacactgtacggctatgataaatcttaaacgggtgacaggtaattggatgcacactgtactcttgatttgtgcagctatcctttctttccaacgagtgtgaatcaatcccttcaaaatttcttctacctatgtacgtattgatgtagttgcgatccaatttgtacttttttaattgttgcatgctctatgtatgtacatgctttttatttcattcaatttggtatatactatgtgagcacaaaatgcattcaagtaatatttagtcagtaggtctcaactcttctctaaaggacgtaatgaattggatttgtatacttgctctgttttcatctgactaactctggatttgtatactttgctctgttttcattaactctgaaacatccttacaatgcaggtgccatatagtgtcgataattcaggaagggaaagctatgtggacaaaaaatgatgtcctttttagtgttccatggtagtttatttatttttactttttcaatgatcgttgtgacaaacatgtaaagttatctaatatactccatagtgtgtagggctatgtctcttggtatgagagctgcttttgcttagcacacgattttacacatagtcatccgatcaaacgaatcaaaatatatttggatcttacctatatatacatgtatatcattttcc

SEQ ID NO: 23037 - DNA, 1746 bp, Oryza sativa
  ref <308>: DATABASE ACCESSION NUMBER: AK073175
  ref <309>: DATABASE ENTRY DATE: 2001-12-06
gggcggcggcggcggcggctttccacctccccgccggcttcgcgctcccaacctcgccgtcgttcgtcatgttccggctgcgctcctccgctcgcctgctgagagagctacgggaggcgtcgcggtcgtcggggcgccgccgggaatggctctccggcggcgcagtagcctccgccgcgcggacgacctcgctcctgcaccctctgcccgggctcgacgtcccgcagtgcctccccgaccagctcggcgtccagcccacccgcgtcaccacgctccccaacggcgtccgcgtcgcctccgaggacctcccgggcccgtcggcgtgcgtaggggtgttcgtggattccggctcggtttacgagacggcggagacggccggcgtgtcacacctgctcgagaggctgtccttcaaggacacggcgcaccgcagccacctgcagattgtgcaggatgtggaggccaccggaggaaacatcggggcgtctgcatcaagggagcagacggtgtacagctacgagactctcaaggcctacttgccgcaggccatcgaggtgctcatcgactgtgtccgcaatccattgttcctccaagacgaagtcgagcgacaggtggcctttgccagagaagaagttcaggagctacagaagaaccctgagagatttcttcaggaatcacttaatctagttggatacacaggtgctcttgcaaatccactagtagcccctgaggagagtctcacacgaatcaatggcagtattattcaaaagttctatcacgagaacttcactgctgatcgcttggttgtagcagcatcaggtgttgatcatcaataccttttagatgttgcagagcctttattgtctgattggcacaagggctccccagtggaaaggccagagtctaagtatatcggtggggattttagacatagagcagactcagagatgacccatgttgctttggctttcgaagtgcccgggggctggcttgaagagagagatgccacaattatgactgtagtacagactttaatgggcggtggtggttcattctcttctggtggtcctggaaaagggatgcattcacggctttatctgcgtgtcttaactaaataccacacggtcgaatcattttcggtatttagcaatgcatttgatagaagtggcctctttggtatttacttgaccacgccttcagattttgttgcaaaggctgttgatattgcgacaaaagaactgattgctattgcaacacctggacaagtgacagacattgaattggcacgagcgaaaaactcaacaatttctgccgtgctgatgaatcttgaatccagggtaattgttgcagaagatatagggaggcagatattgacttatggttgcaggaagcctgttgaccattttcttcaatgtatggacgaaatgactctagatgatataacagcttttgccaagaagatgttgtcttcaccacccacaatggctagttggggagatgttgataaagttcctccatatgaatttgtttgcaagaggttttgaagttctccgacacaatgatcagtggtggacatgaagatgggattttgtttacaatgttgtataatccaattctcgctatatttgggccttatcttagaaattgccctcgttatacacatcacctgatgagattagatttttgctatcatcttcaaacagcatatatcttgtgaaagtccaggtcaaacggaggtgaaagttttgc

SEQ ID NO: 23038 - DNA, 2576 bp, Oryza sativa
  ref <308>: DATABASE ACCESSION NUMBER: AK073176
  ref <309>: DATABASE ENTRY DATE: 2001-12-06
gtccaaggctccaaacctcccttcccctccgcagctccgccttacgacgccatggccgtcgcctcgctgtcgccgccgccggattgagggcgccgccatcagccggccgcgtcgctgctcttcgcgtgctcctcgcaacggggggcggcggggtccgtccaactgccgctcctaccacctcttcatcagcagcagcaacgcccgctttctccgccaccggcagccgaggcgccgcctcctccgcccacatcgcagcgttgacttctccaggttggctcgccaactccatcggctgtagacttccagccttccagatggcaagtgccttgacgggagtgatgacatccgtcatcaacaagctcactgctcttcttgggaaggagtacatgaagttgaaaggagtacagggggaggtggagtttatgatagatgagctgagcagcatgaatgctctccttcataggctggcggaggaggaccaacaccttgatgtgcaaacgaaggagtggcgtaaccaagtgcgcgaaatgtattatgacattgaggactgtatcgatgacttcatgcatcaccttggccatactgacattgctgagtctgcagggcttgtccataggatggcccaacaccttaagactctgagggtgcgccaccaaattgccaaccaaatcgagaagctcaaagcacgcgttgaagatgcaagcaagcggcgattgaggtataagcttgatgagcgcaccttcaatcttagtactgcaggggccattgacccccggttaccttctctatatgctgagtcagacgggcttgttggaattgaacaaccaagggatgtggttatcaagttgctaacggagggagagggtgcatcatcgcagaagctaaaggtgatatccattgtgggtcctggaggtctaggtaaaactacacttgcgaatgaggtgtttcgcaaactagagagccagttccagtgtcgagcttttgtttctctgtcacagcagcctgatgtgaagaagattgtaagaaacatatactgtcaagtcagccagcaggagtatggtaacatagatatatgggatgaggaaaagctgataaacgcaacacgagaattcctaacgaacaagaggtactttgtcgtcattgatgatatatggagtactcaagcatggaagaccataagatgtgctttatttgtgaataattgtggaagcagaataatgacgacaacacgcaatatggcaatagccaagtcatgttgcactcctgaccatgatcgtgtctttgaaataatgcctcttagtatagataactcgaagagtttgtttttgaaacgaatatttggctcaaaggatgtgtgcattcctcaattggatgaggtttgttatgaaatattgaaaaaatgtggcgggtcgccattggctattattacaatagctagcttattggctaataaagctaataccaaggaagaatgggaaagggtgcgtaattctatcggttcaacactgcaaaaagatcctgatgtagaagagatgagaaggatattatccttgagctatgatgatcttccccaacatttgaagacatgcttactgtatctaagcacatttccagaagattatgagattgagagggatcgactagtagagaggtgggttgctgaaggattcattattacagagggggggcatgacttgaaggaaataggagactgttattttagtgatcttatcaatagaagcatgattgaaccggtgaaaatccaatacaatggtcgagttttttcctgccgagtccatgatatgattcttgatctccttacatgcaagtcaactgaagaaaattttgccaccttcatgggtggccaaaatcagaaattagtgctacagggtaaggttcgtcggctctctctcaactattacactcaagatcacatcatggttccatcaacagcaatcatcacacattgccgatctctcggtatttttgggtatgctgaacagaagcctcctctttcaatgtttccagttcttcgtgtacttgatatagaaaatggtgaagatatggaaagcagctataccaaacacataaggaagctgattcagttgaagtacctgcgactgaatgtaagaagcgtagctgaacttcctgaaaaacttggagagctacaacatttgcagactcttgatctcagacggacaaacataagaaaattgccagagagcttcgttcgtctgcaaaatttgacatatttgcgtgtcaataatctggatttgcctgaaggaattggacatctgcatgctctgcaggagctaacagagatcagaatcagccaggactgcttggcatcttccttgttggagctaagaaatctgacgaagcacacattgactacaaagttttcgccgataatttagtgtcatcgcttcgcaaactgggcagactcaaccttcgaataatgtgcatcctgggttattatgcgtgttccatagagttcttgttggattcatggttcccctcccctcatctcctccaatcatttgcgatgggcatgaactatcatttccccagagtcc

SEQ ID NO: 23039 - DNA, 2293 bp, Oryza sativa
  ref <308>: DATABASE ACCESSION NUMBER: AK073177
  ref <309>: DATABASE ENTRY DATE: 2001-12-06
gagttcacacatcatgtttgttgtgacaatgttgcagcttctcctcctactcctcctactcctctccatttcgcttgatgtttcacacctcattgctgaagcagcagcagcagcaaagccacctgtgtccttcagcttcaacttctctgatccatccacctacagcctagatgacctcctgttcgaaggcgacgcggccaagccgaaagacgggctggtcgacctcacctccggccgcagttgttatccctattgccccgccggccggatgtcgtacgctcacccggtgcagctctacgacgacaccaccggcggcgaaaaggtggtggtggccagcttctccacgaggttcaccttcacaatcagacccatcgacgacggtatcagaggggatggtctggctttcttcctggccagttacccatctaagctgccggccaactcgttcggcggcaaccttggactcatcaataacgggacgaccaccgccttcggttcggaccgattcatcgccgtcgagttcgacacatacaacaacactttcgaccccaagagcatcaaccacattggcattgacatcaactccgtcgtcagttccttgaacaccacactcttgcccaacttcagtctgaacgggacaatgacagcccacatcgaattcaacggcataacgcagatgctggtcgcctcactgtggctcgctggccgtccatggtctgcagcgcctgattatcaggtgagtttacgactgccagatccgatcacgtcgttgctcctgccgcaggtggccgtgggttttactggagccaccgcggacctcaaggagctcaaccagataatgttatggtcattcaactcaactcttacgctagtaaaccaagacagacgcaataaggcactgctttttggaggaccgatcatcggaggagctgttgcattggcgttagtgctgtggttcttgatctcttgtttgatgcagaagagggtacgtaatacctttggaaagggcacaggcggcgccaggcgattcgaatacgacgatttggccatcgcgactggcaatttctctgatgatcgcaagctcggagagggggcctttggggtagtgtacagcggattcctgaagcggttggagcgtgaagttgctgtgaagaaaatagtgagggagtccagccaagagcataaagacttcttcgccgaagtcagcactatcagcgaagctaagcacaagaatctcgtcaagttttttggttggtgctgccggggacacagctggaacattctccgtttcatgtgcagctgtttatggagcaacaataataaggagctcttccttgtatatgaattgatgaaaaatggcaacctcaacgactacttgtacaagagcgagtcagcagcagtactttcatggcaaacaaggtataaaatagccaaggacattgggtcaggcctgttgtacctacatcacgagtgctacccatatatcatacacagagatatcaaaccaggcaacgtactcttggacgacgatttcaacgccaagctcgctgattttggtctgtcaagggtcgcgaacccgaacaatgcaacgctgaagacaactgccataggctcacaaggatacattgatccacagtgcatgaaggatggtgaggtcagcttcaaccgtaactccgacgtgtacagcttcggcattgcccttcttgagatcgtctgcgcgaggaaacacagggagcagatctggggcctatacaaaagcggcggtgatgtcgtcgaggctgcagactcaaggctagccattggtgttgatggcgctgaaaggagggagatggagcgtgccatcatcttagggctctggtgctctgtcttcgagactaaacaccggcctaccatgctccaagcaatggatgtcctggagcgtgatgcgcagttgcctgaccttaacttaatcgtcaactctaatttatcttcaacagacgcatcgtcaagttcgccggtcgagaagagatatgactctgaggaggcaccgctggttgcaggcagctcttctagccagctagctggtcggtgagcatcatgcttgtcaaacaagctgagacaacaaaattcaataagcctggtgtatcaccaagacttccattctcacgagagctgcttagtgctgactgcacattctcatgttgatcagtttatcatgtaattgcctttttcaagaaacttataaacgaatagactacctaaatttgctgcgttgctttgtacgtagccagatatattaaacttatttcaaagt

SEQ ID NO: 23040 - DNA, 1848 bp, Oryza sativa
  ref <308>: DATABASE ACCESSION NUMBER: AK073178
  ref <309>: DATABASE ENTRY DATE: 2001-12-06
gggcgtcctcactcgctcctctgtactgccgccgcgccgctgcatcctcgccgaagtcgtcttcttctccgtccgccgccggagccgaggtccccttccgccgctgccggatcctaccatccgtcgcggccggcgctcctcctcctcgctcgctcgctcgctccggattactgccgacgcgccgccgcatcctcgccggagccgaggtccccttctgccgccgccggatcctaccatccgctgcggccagcgccgagggcggccccttccgccgccgccgccgacgcagtcagtgcctccctctaccgccgcctaggcccccgcctccgtgccgtccgggagcaggagtttcggcagggtcgtgtggtcgccgtcgtgccgccacagatcgagactcgctgtcgccccgccgcaaatgcctctggatctcgcctcccaccacagccacgtgatcttctctcccaccggccttccactagctgcctgcacctcctcagtcgggtagccgccaccgacccttgcccttcgctgccccgtcatcacggtcgtccaagccgcgtgccgccatcgccagccatccttcttacactcacagaatgtagcgtatcttagcagatgccaatgtgaatgcagtgacatatgtgggcttcagtaattaggaggaaccaaatagcaaagaaggctcctaagctcctggtgcatattttcagttatttcattttctggatctagcttgattgattgacttgaacattccatttttccaggtgacatatatgaggttatgctcctataggttgatttcatatttttttcccctgtgaacgcaactgacctctcggtcaatagttcttccttactgtgattcatgtgcttcaagttaatagtctggttctttcaaaatgagcagatcagtgcttcttgaggtattctactaataacctttgcctttggttttactcacactctgtgagtgtgtaaaagtagctttccactggacttccttgatttccatggatatgcagttagacataggtgtgtgacgcattaacgtgtctttctgcaggttggcacttgataattttgtattgtaatatataaataactcagttgcgcaggtgattaatggttgacagaaaattgccttcaatttagttccgtcaataagatactgtgatctaactcaattctcttccatgcctgacagcattgattcttgctgtaaatttgtatttctctacaaatcaacttttattgctgaaaaaatattcacttcaaatacatagatgtgctttaatgactatttatgatgaaattcattcaaagctttggtttgccatcgtttggccaccagtttttaattccgattgctacagaggaattcgctgttagtttttatttgctatgcttgtttctaatttaccttgcagttgcaattacggagccctcaccaagaacggcaacaacagcaggcaaagctcaacagatttgggtttggcgctgcaagctggaagaagtaggcgcatcaacagcataatcctttcagttttgggatacaagatgcgagtgctcagtcacgaaatgctcttggccaatcaaagcttttccaaatatgtgaggtaaggaacagatggacatggaagaattggaggtaaccaatattgttacgcatatattttcctatctgaatctgttgtagagaatggcagatttccttctcacaggcataattgcagacggtcaatactttgaaagggtagcttcggttagaggtttgtagtacctttgctagcatttatctactcatcttggagatattagttaattgtgaatcgatgagcagtggtc

SEQ ID NO: 23041 - DNA, 2507 bp, Oryza sativa
  ref <308>: DATABASE ACCESSION NUMBER: AK073179
  ref <309>: DATABASE ENTRY DATE: 2001-12-06
gatagtcactactcactacactaccagttggtgtttgttctgagcattattggagtgtcagggaagggcatgtgcttttgttggttgctgtaggaggaggcagccatccactgggcctcactctcctcttgttgctgcctcctcctcttgttactgttcagtctcaggctctcaggctcacaggtggggttttgggagatactagttaggagggaaaggttgccatcttgtgtgtgttggatctttaatacaacggggataacgattctctctcagctaaaggaggtgagattcttggtttcacatcaagtattattgttctttcttttacttccttcaaaatagtttctttgctttttatttcatatatggtttggtttatttatgctccccaacaagcaactggttcatgtgcggtaacaaggagcaaataatgcagctctgattgacttggggtagttgttgtggtgatagattggaaagggtttaaatagcgggtggttgtggtgatgaatgggggccagccttgatggggttgatgctgtcgtcttttaggtcggggaaacaagtgggataggatctccctcaagtcgaggtgagtgagaactcagccaagaacaacaatggagtctctgttgctttagttctgccagccaattggtttcaactttcaacgctgctacttgttattcatcacctcctcggatcggtttgatttatgctcaaggttgtgctatgcatggtcatgctgattgagggcaagatttgcagggagaggaaggatccactgtgtttcttttctgggagaaaggaaagttgagatttgcaatatatacaagtgtgagcagcagcagttgagatccttaattcagccatggcttcttttgggatgaactggaatcagaagagccctgtgttttgggactgggaaaatccagcgcctttcggtccgaatacaatggaaaatcccaagagcatacctcaccctgaaccaagaggtgtagttgtcgcggccgcaaatcatggatccaccaattcatccggtggcacgttcacttctagctcggagctagccaatggttcatcgaagagctccttgtcagcgtcgttcgattcctcatccaagctggggaacagcttagagttcaggtttgcttctgtcaaagggcatggcaagaacatgtgcaaggatggcgaggccggtagagttgaagactcgggcacttctccagctgtggcagttagccatggtgagccggtaataggactcaagttagggaagagaacttactttgaaaatgtttgtggagggcagaatgtcaagagctcctctgcagcttcaggtgtgacttgtccatctactgtggtcaagaagatgaaggtgtctcagcagagcacacaaagctcatactgccaagttgaaggctgcaaagtcgatctgtcctccgcaagagaataccatcgcaagcacaaagtttgtgaagctcattctaaggcaccaaaggttattgtttctggtctggagcgccgtttttgccaacagtgtagtcggtttcatggtttagctgaatttgaccagaaaaagaaaagttgccgcaggcgtctatctgatcataatgcacgaagaaggaaaccgcaacaagaggcaatttcatttggttcatcaaggctcgccacgatgttttacgatgcaaggcagcagacagatatttactttggccaatctccttttggccaagtgagaagcaatgcaatttcttcatgtgacaacctgggaggcttcaaatttacagaagcaaaactcccctggatgaagccaatgaaaactataggccttgaggatctgaatttctctaccctgcagatgccaggcaatgttgtgtcgcatacggtgcatcatcatgattttgatgggctcataccattcaagggaaacaccccgaaggtcctcaaccaaggtgtggatccagcctgtgccgtcgtgtcctccaactcgaatggagccccggatcttcggcgtgctctctctcttctgtcaagcgattcctggggcccggccgacgttcaggccggctcccaggtgcatcccggtggagtgatgccgcccctcgccgttgccgccgccaccgtcaccgccccgacgaaccctgtcagtgtgatgcatgctctgcacccgtccaccggaggaggaggattctggcaagacggcgacgacccgcctccgctcgatcatgcctcgcaggctcaggcgttcatgcatcctggcaatggcagcagctccggctatggccatctgcactgattctgctgcatctatttggaacgggttgatgactggttactccgttcatgatcttaccctgtcagtgatggactctgaataatttgggggcgaattgtcctgcaaccccaggatttattatttctatttttgaaaccaaaccaccaggatatttgccattggatgagaagtgttcatgatcatgaaatgatctgttttgttccac

SEQ ID NO: 23042 - DNA, 1482 bp, Oryza sativa
  ref <308>: DATABASE ACCESSION NUMBER: AK073180
  ref <309>: DATABASE ENTRY DATE: 2001-12-06
gatcgaacccaaattccgaacctccaatcgaattcctccgattccccggcgacgcagaacccgatgctctgccaacaagcggtgccaatccaccgcgggcgcaggagcgcccggcggcggtggccgctggccgtccggcggccgccgtcgccggctgcccggctgcttccggagtcgtcctcaaccacagcaggtgcccttgacctccttcgctacgggcggaacttccgtcgagcctcgccgccgccgcgcccaccgttggtaaattctgctgagccttcgtctgcacaagtgctgcgagaaccagatgtttccttctctgtggggttgctcagtaatacagcatcgaaagaaccgataactgcacacacctcttcctcttcctctccacttactgtgcagcatgacgacactgaaacttcgacgccatcacagtgctgcctgtggtcatctcctgggtcatccattttggtcaggagacctcgtggttggtattttgtattctacatcaggatggatcctggggggtgtttccacatgtatcccgatgtgggttgtgggccatatcagagtctgtcagaagttgatgatgctataaaccaacatcttcatgacctgcggattccagaaatgggtgaggagcttgataggctccctctaatggagaagatgatacggcaagcgatgtactggcctgacggcaagcggaaacgttgcaagtcagctgggtattttgaaaaagacaagtgccatttgatccaagctttagtggagaagtataatgaggatcataatcttttgggggattttgcgtatgaacttaaggattttttgcaacatggagtaatttatgaggatcaaaggcagtaccaccatttgaatttcactgcgaaggtgaaaagagctgatgggtgtggtgtggagaacctattctttgctgaaatatcacatatgcaaggagaatatgaatgggtggtcagctgttgctgcataattaaacctagtgctaacggtcattgctatggctgtaggaataatggttatgttggcatgaagcaccctaacaatgatgcatacagtggtggtcatttggatggatatttaccttttggggtcaattcctatgcgcgcaataatgatgaggaactcagtgtcaaggatgaggaagatatgctaagacgtatgtacaagggcctagataagccaggcggattcaagagacccatccctaaatttgcaacacgaattgtgtggaaaactgaggaggaagctggtgtggaagctggttgaagctggaaccttgcatttttctactagatgtgttaggcaaatgtgctatcgtatacattcatgtaacacaagttaaacttatcaccatcgaacttgtccaccagtgccccagcagtagaagcgcatcttatcacaattggtggtaaatttagtggaatggatgaacatccacgctaatggttgctgaaagct

SEQ ID NO: 23043 - DNA, 964 bp, Oryza sativa
  ref <308>: DATABASE ACCESSION NUMBER: AK073181
  ref <309>: DATABASE ENTRY DATE: 2001-12-06
gatcgtcattcttatcctcctacttccgttacctttatagttcgcgtcctccacctcctcttcccatctcgcctcacgccatttttcattgctgcgtatcgtcgatcatcgttggtccgtgcgttcgttagtgtcatccgtgtgcgggaatggaagcgtacatgttgttctcccggagggaagggatgatcaggtgcgacgagcaggaggaggacatcgggtgcccgtctgagtcggagctgtcgctctcgtcgtcgtcggaggggatggagctcgccgacgacgcgtgctcgtcggggtcgtcatcgtcggcggcgggccacttcgagatgtcctcgctcatgacggagctcccgctcaagagggggctctccaagttcttcgacggcaagtcgcagtcgttcgcgtcgctggcggcggtgggcggcctggaggacatggcgaagccgatgaggaagcgcctcaagacgtcgcgcagctgcggcgtcgggctcgggctgcaggacgcgcaccgccgtggccgcctctcgccgcggccgctctgcggtaatgccagcgccgcgtccttcaagaaggtgtccaagggaggacagctgtccgtgctcggcgcgagcaggaggacgcgttcgccggcgacggcggcgatctcgccgaggccggaagggatgcccgggcaagctctgttatttgcttaggagatttgcccgcgaggttcgtgtacgcactcatgtcaagcatcatcatcataagcactaagcagtactagtagtaggtgacacggttgtaattacagttttgaagtgaaaatgaccaaggaaatgttgtgaaatggacgatgttcctttgccccatgggctatgtaaatatttcaagacttttagagagatttggggtgaaaatgtctcgaatagtggccgcagctgctaaatatcgtgtgaaaaaataacacagcaagatcagcctg

SEQ ID NO: 23044 - DNA, 2373 bp, Oryza sativa
  ref <308>: DATABASE ACCESSION NUMBER: AK073182
  ref <309>: DATABASE ENTRY DATE: 2001-12-06
gactctcaccggccaccgcgcgctctctctctctctctcccccttctcccgcaagattcttcccccaaatcccacccgatccaccgccgccgcccgctcgccggagtcccatcgctgccaccgccgccggagccgcggcccgacgcccgccgggcctgcttgctgtgtgtgtgaggaggtggagttgctcgcgctcgttcccgcggccacctccgcctgctgctgcttctgcttccgctggcattgcggggaggtcgtgtgccgggggacgtgggggctcgtgttggagcgcggctgccggtgaggtggggggtgcggcgcggcgcggctcgcgcttgtgcgccggtggcgcgggcgcggggggaagcgtacgggggagggggagtgtggcggcggcggcgcgcggggtagggacgggcgccgccaccaccaccggctcgttcgctggcaggcgctacgcgtccagatccgtacgccggttgttgagaagtgaagatgtcgacaggtgaaaccctgcgtgcagagctatcatccaggacgccgcctttcggtttgaggctatggattgtgattggaatcagtatttgggtggtgatcttctttatactaggtttcatgtgcctctggtccatataccgaaggaagccgaagaagtcctttgataagattccagtatctcaaatcccggatgtttccaaggagattgcagtagatgaagttcgtgagcatgctgttgtcgaaaacttccgtgtgcaagaaagccacgcgatatcggtgcaggagaaacattacgagaaagattcagggaaaatgctggcacacttggttaggagtaaatcgagtgatgccgataatttgagccaatgcagctcggtgtaccaatgtgatagggctggtagctcgtattctggtgatgaaggcagctcgggcaatgctaggaggcacttttctcaatatgcaactgtctcagcatcccctctggttggtctcccagaattctctcatctgggctggggtcgttggtttactctgagagatttggagcatgcaacaaatcggttttccaaggagaatgtcattggagagggtggatatggggtagtttaccgtggtcgactcataaatggaactgacgtcgcaataaagaagcttcttaataatatgggccaggcagaaaaggagttcagggttgaagttgaggctattggccacgtcaggcataagaatcttgtccgccttctaggatattgtgttgagggaatccacaggatgcttgtatacgaatatgtgaataacgggaacttagaacagtggcttcatggtgccatgcgccaacatggtgttcttacctgggaagcccgaatgaaagttgttcttggaattgctaaagcgcttgcttatttacatgaagcaatagagccaaaagttgtacaccgggatatcaaatcaagcaacatactaatcgatgaagaattcaatggcaaactttctgattttggcttggctaagatgctgggtgcagggaagagccatatcacaactcgagttatgggaacttttgggtatgtggcccctgagtatgccaacacaggtctgttaaacgagaagagtgatgtctacagttttggtgtgctattactggaagcagtgactggtagagatccagttgattatggccggcctgctaatgaggtgcatctagtggagtggctcgaaatgatggttggcacaagaagatctgaagaggtagttgaccctgacatggaggtcaaaccgaccattcgggctcttaagcgtgctctcctagtggcactgaggtgcgtcgacccagactctgagaaaagacctactatgggtcatgttgttcggatgctcgaggcagaagatgtcccatcccgtgaggaccggaggagccggaggggcaacactgccaatgcagataccgagtccaagacaagctcaagcgaattcgagataagtggcgatagaagggactcagggccatcagcaaggtttcaaccctaagaagacggtgatcatagtcaagaacaatggcttcaaaactctatgcagtaacatggtggttggcagagaaaaaggggtatttctggagggcattgcattttgtattgtaggtctgcatggcggtagagactggagagagcacagtgtctgatgatggatacccggagacctgtaattcccattcagtattctgtttgctagtcaagcagcttgtacagatcgttgtctgttccattttttcattcttctggtttttttgtttaggaggctcttggattaccagtacgaaccgctgtctcttttctagaatcaccaacatggaacctatcaatatttactactagtact

SEQ ID NO: 23045 - DNA, 2735 bp, Oryza sativa
  ref <308>: DATABASE ACCESSION NUMBER: AK073183
  ref <309>: DATABASE ENTRY DATE: 2001-12-06
ggtcctccctctctcttccccgcgcacgctacgttcgttcgctacgcacagcgcccccacgccacgcttcggttcttctactggtgcacagcacaaccggggcggtgagcttgatgcatggcggagtcgctgggactgggagcgctctgccgcggcgggggatggtgctacgccgcgatctggcgctccgaccgtcgcgacccacggttgcttacgatcggtgagttccacagtgaagatggtaccagaaatgttgttgagaagatgcttaatcaggtccatgttgttggagaaggcatcatagggagagctctagtaagtggagagtgccaatggatttctgatacctcctttagttttgcccagacaagtgatgcagataaccaagacttatttcagggctatacttggtggcagcatcagttcctgtgtggaataaagactattgcagtaatacctattgcagatcttggtgtcgcacagtttggttccatgcaaaagatttctgagtgcttggagtttctggatcaagttaagggcatattttgtcagagggaaatcgttccgtgggatctttctgctgaagaaattcaaagaaatgttctcccatgtcatcagcaatttcaactcagctctctaagtagtgcagatggtcttacaaatatcaagactgacccagaaaacaagaaacttctggagaactcagcaagtgtagagtctctacgtagtttagcaagtttttcaagcaaatactctcagagttcttcaaacggtttcacctcctatgaaagctgcaacagtatgaatcctcatatagtggccatgccagtgaactccaaatcaataaatacggtgagagcatttaatagtaccggaaaattgctgcagcacaatattggttcagaaaacccactacagattaaattctgtcaacatcctgattctaatctggcaagtgcaacagacgtttttttaagtttgaacaatcttccgagaatagagaacgagatatcatgcccacctaacaagctaggatattgcatacaaagtgagaagccatatagttttcagagttcattttcatcttgtttttctgtgggtgatgagctgaagccaattttatttgacagtgccacttcttttgttcagaatgacttaatgcaagagttcaatctcactggatttacttctcaggctgattctgcggttcatgagttacccaaacaaattctaggggaaacagctactggagcattatattctgacagaaaaagtaacaatggaagttctgatttgctggatggtacaatatttgatccctttgtgcaagaatggtgcgataacaatgccttactagaaggaaacactccccattttggtgccactaccgccgattctgttacagaacatgcaagcagttatccattgtcagttgaagagaggagcttgttttcagaatctgtctttgaggaactacttggtgttagtggcaatgtgaatacggatgcaccgggtgattcagctgtggtgatggctggtgatccattagtcggccttgtctcaggctgtcaattgccaacgtacactcttcaggactctctttcagtgtgcaagccacaacaagaaccatcactggatttcccttccggtagcgatacgtctgaacatgtgccaaatggatcatcaaagatgatcccactgtccctaggggcgttgtccatggacgattgttgcagtttgaacacggcacattccaaggtcagccaggttaaaaggcctgaggaagtgaaggtagtgaagaaaagagccagaccgggtgagagcacacggccaagaccaaaggaccggcagcagatacaggatcgtgtcaaggaactacgtgagatagtcccaaacagtgctaagtgtagcattgacgctttgttggaccgaacaatcaaacatatgctctttctgcaaagcgtaacaaagtatgccgagaaaattaagcaagctgatgaacctaagatgatcagcaacaaggatagtggcgctgtcctgaaagagaactcaagtggtgttgtcttgaaagataactctagtgctggaagcaataatggtggtgccacttgggcctatgaggttgcaggacggaccatggtttgcccaataatcatcgaggatctttcaccacctggtcagatgcttgtggagatgctttgtgaggaacgcggatttttcctggagatagcagacacaattcggggatttggactgacaatcttgaagggcctgatggagctccgtgatggcaagatcatggctcgatttctcgtcgaggcaaacaagaatgttactaggatggacatattcttgtcactcgttcagttacttcagcaaaatagcctcaaccgatcctctgaccagatatcaaaggtcattaggaatggggttccatcgtttgcagagcatcagcaatctccaatatcagtgccggttggccttgcagtagatgacagattaacagtgaccacagacacttggattagatcagattaggaggcatcaactgaaaacattcagattgctgattgccgctggaagttgactaccaaggggtaaggtttgttagatatgataagttttgaggatgtaaaatatgtgcattgcatcattaagagatattctctccatttagtgttggtcattccaagatgtacaaatactaaacaaatttaggaatcaggcttgtaatc

SEQ ID NO: 23046 - DNA, 1884 bp, Oryza sativa
  ref <308>: DATABASE ACCESSION NUMBER: AK073184
  ref <309>: DATABASE ENTRY DATE: 2001-12-06
ggcccagactctagtcgagttcagcacttcagccccgccgccgtctccgccgctcaaagcgcccaaaccaaaatcccctagatttccccacgcccccgcctccaaatctctcgacatgtcggagaagaagcgccgcggcggggcaggcgcgggggccgcgtcgggctccgcctccaagaagccgcgggtctccacggcggcgtcgtacgccgagtcgctccgctcgaagctccgccccgacgcctccatcctcgccaccctccgctccctggcctccgcctgctccaaatccaagcccgcggggtcgtcgtcgtcgtcgtcgtccgcctcgaaggcgctcgcagccgaggacgacccggccgccagctacatcgtggtggccgaccaggactccgcctccgtcacctcccgcatcaaccgcctcgtgctcgccgcggcgcgcagcatcctgtccggccggggcttctccttcgcggtgccctcccgcgccgcctccaaccaggtctacctcccggacctcgaccgcatcgtgctcgtccgccgcgagtccgccaggcccttcgccaacgtcgccaccgcgcggaaggccaccatcaccgcgcgcgtcctctccttggtccacgccgtcctccgcagggggatccacgtcaccaagcgtgacctcttctacaccgacgtcaagctcttcggcgaccaggcgcagtccgacgccgtcctcgacgacgtctcctgtatgctcggctgcacccgctcctccctccacgtcgtcgcgtccgagaagggcgtcgtcgtcgggcgcctcaccttcgccgacgacggcgaccggatcgactgcacgcgcatgggcgtcggcgggaaggccatcccgcccaacatcgacagggtctcaggcatcgagagcgacgctctcttcatcttgctggtggagaaggacgccgcgttcatgcgtctcgccgaggaccggttctacaaccgcttcccgtgcatcatcttgacggcgaaggggcagccggatgtcgccacacggctgttcttgcggcggcttaaggtggagctgaagctgccggtgctggcattggtggactccgacccatatgggctgaagatcttgtcagtgtacatgtgtggttccaagaacatgtcatatgacagtgccaacctgacaacaccggatatcaagtggctcggagtgcggccaagcgatctggacaagtatcgggtgccggagcagtgccggcttccgatgactgatcacgatatcaaggtggggaaggagctgcttgaggaggactttgtgaagcagaatgaaggatgggtgaaggagctggagacgatgttgcggacgaggcagaaggctgagatacaggctctcagttcatttggtttccagtatctcactgaggtctatctacctctcaagctgcagcaacaggactggatttgaggaccctttctatgctagatgaataggtgaattttcatgcatttatttgactactgcgctgtgcactagatttatttatttaaaataaggtatttttgagaatcagtattcccatgggccatggctagtcgaagtcaaaaggtagctccaaaatgttcagtcaaaatgcatggttaactaatttctatgttagattaggttctttatgttaggttctttaggaagtattgcacacccctgactgagagtttgtaggatcaaattgataagggtgaccaagattgcctcgtagtaccgtcagatgtggaaatcttcttctagcattatgtatttgaacagcagctgctgtgtgtattcactaatttttaagaacatggaaatgcttacttcagcatgtattcagagcaggtatagtgacaggaaattcaaatgttactgtg

SEQ ID NO: 23047 - DNA, 1340 bp, Oryza sativa
  ref <308>: DATABASE ACCESSION NUMBER: AK073185
  ref <309>: DATABASE ENTRY DATE: 2001-12-06
ggcggcgcgcggcggccggcggcgagctcggatccccacctccacccctcccgactcccacgccttcctcctccactgcgacctacggtgtaggcgcattccgcctacgtggcctcgcctccgcctccggttcctccgccacgacgtgtccgcgtcccgtccactcgcccgatgaggaaatttcccttctgtactgtttcgcacgactcttccgccgacgaattcccccgcttccccatttcgtctcgcggtgagtttttggtagtttagtttgatacaccacttcgtttgataccctcggcgaccgcgcggcggccagcgggcgcatccatggcggcggcgggatccataggcgtgtacagggcggtgttcgcggcgctgggcgctctcatgctgggcaccctggtgtacacctgcgtcaccgacggctcgccgtttcgcctcgagctgctcaccccgtggttggtggcaacactgattgatttttatgtcaatgtgactgcgatttcgacttgggttatctacaaggaagtaaattggattagttctttcttttgggtagttctgttgtactgttttggcagtattgctacatgtgcttatgttgttgtgaagctttttgaaataaaaacttccggaccttcacaagatccacttgatcttttattcctcaggcaaggagatctatccgaaagaaagtcctcttttgtcataattgggagaattattttcagcattttgggggcaatgatggctgcagtcgtaatttatactgtcatcactgatggactacctttcaggaaggacttgttgaccccgtggatggcggcaaccttaattgacttctatataaatgtcttcgcaatatcggtatgggttgctcacaaggagtcaaactggatatctactgccatctggatatgcttgttaatatgctttggaagcatcacgacatgtggctacattgtcatacaacttttccaagtgtcgtaccgagacccaatctatcatgtgccattgaactctcataacaagtatggcattgttccctcccactaatccctgatcttctccaagccttgttagcttgtggttgtctaaactttgcttgacatatggtcatttatctggtatttatatgtctgaaatgtaggaagatttgaaaatatcattgaagagttatgttattcttggtatacaataatattacctcaataaatggtgtatcgtctagacaaatagggaattctcggtgtaattacatatcattctcagtgtaatgacataactttggcaatttctctacaaaaggaccagactatatgcagtttgcagctcct

SEQ ID NO: 23048 - DNA, 2141 bp, Oryza sativa
  ref <308>: DATABASE ACCESSION NUMBER: AK073186
  ref <309>: DATABASE ENTRY DATE: 2001-12-06
gatccgatgccgtcgcgacagtgacgcctctctgctcccttcgcttcgcccacagagacacagtgctttctccctctcgaaccttccgcctccttctagaaccttccactcccgctcctcgtccgggcaaggaggtgccgcctccctccgcctcgccggagatggcgacgatggagaacgtgatcgtgctcgtgaaccgcatccagcgagcctgcaccgtcctcggggaccacggcggcggcgacggcaccgcctccctccccacgctgtgggaggcgctcccttccgtcgccgtcgtcggtggccagagttccggcaagtcatcggtgctggagagcatcgtgggccgcgacttcctgcctaggggctcaggtatcgtgacgagaaggccgctggttttgcagctgcacaagacggaggacggggtgcaggagtacgctgagttcttgcatatgcccaagcgccggttcaacgattttgctcttgtgcggaaggaaattcaagatgaaactgataggctgacagggaagactaaacaaatatcacctgttccaattcatctcagcatttactcaccacatgtggtcaacttgacattgattgatctgccgggtctaactaaagttgcagtagaaggacagcctgaaagcattgtccaggatattgaaaatatggtgcgctcatatgttgacaagccaaactgcatcatacttgctatatctcctgccaatcaagatatagcaacatctgatgctattaagcttgctcgagatgttgatccaactggtgaaaggacatttggtgtgttgactaagcttgatttgatggacaagggaacaaatgcacttgatgttctcgaaggaagatcgtacagactgcagcatccatgggtcgggattgttaatcgttcacaagcagatatcaataagaatattgatatgattattgccaggcgaaaagaacaggagttctttgcttctagtcctgaatattctcatttatcaagcaggatgggttcagaatatcttgccaaacttctttcacagcacttagaggctgtgatcagggcacgtattccaagcattacatctctgatcaacaaaactattgatgaacttgaatctgagatggatcacattggtagacctattgcctctgatgctggggctcaactatacctcgtgttggagctttgccgtgcatttgagaaaatatttagagaacatcttgatggaggacggcctggaggtgatcgaatttatggtgtctttgataaccaactcccctctgctctgcggaagcttccatttgaccgctacctctctctgcaaaatgttaagcgtgttatctcagaagctgatggttatcaacctcatttaattgctcctgagcaagggtaccgccgactgattgaatctgctctcaattattttagagggccagctgaagcttctgtagatgctgtgcattatgttttgaaagagctggtaaggaaatccatcggtgagacccaggaattgaaaaggtttcccactcttcaagcggagcttgcggctgcatgctttcatgccctagagagattccgtgaagatggacgtaaaaccactgtacgactggttgatatggagtcagcatacttgacagtggagttcttccgcaagcttccacaggaagtggacaagactggaactgggaacccttccactccttctgttgatcgttatgctgacgcgcacttcaggaggattgcttccaatgtgtcctcatacattggcatggtatctgatacattgaagaatactatccccaaagctgttgttcattgtcaagtcagggaagctaagcgttccttgcttaactatttctatacccaagtgggcaggaaagatgctaagcagcttgcgcaactccttgatgaggatcctgctcttatggagcgaaggcagcagtgctttaagaggcttgagttatacaagtctgccagggatgagatcgatgctgtgtcatggtcacgttaaaggtaacattctgtttgctttgcaatttgacatgcagaattaatagccagttgatctgcacttctcgtgtcaaacatttgagattgattactaattgttgtgctatatatgagtcttgattgc

SEQ ID NO: 23049 - DNA, 1085 bp, Oryza sativa
  ref <308>: DATABASE ACCESSION NUMBER: AK073187
  ref <309>: DATABASE ENTRY DATE: 2001-12-06
gaagcggcttcgtctcctctcctcctccggcgacgcgatcgagaagcggcgccggattttgccgccggcgacgcgcggctgagggggcggcgggaagggggtgggggtggggaggagggattccgcaaccccgcgcccatggcaggaagtaatccaccacccaaaccatgggaacgtgctggaacttcatctggtccagcgcctttcaagcccccatccgggggtagcactagtgatatcgtcgaagcttctggcacagcaaaacctggggaagttgtttctgccgcagagagcaatgttgcttccaatgtgaacagcaccatctctaggcctgtgcccccacggccttggcagcagcaaggatacggaaattcttatggaggttatggctccagtatgtatagttcgcttggtgggtttggtggaccttatagtagcggcggactttacggaaataacatgtattcaagttatggaggaggttatgggggtatgtatggaagttctggaatgtacggtgggtccatgtataatagcgggatgggaggtccctatggtggctatggtatgggcatgggtgcttacaaccaaggtccaaattcatttgggccaccagcaccaccccctggtttttggatgtccttcctgcgagtgatgcatggtgttgtgaatttttgtgggcgagttgctttcctttttagccagaacacacaggcattccacatgtttatctcagctcttttgcagctatgtgatcggactggaatgctttatggtgaacttgcgaggttcgttctacgcttgcttgggatcaaaacaaaagcaaagaagggtggggttcagggcgcagaaacttcttcgtttgaaggtccagggcatcattttgctgaggcaccaaaagctaacaactcctgggacagtgtctggactgatgatggtagtgggaagtaaggcaatgtttgtgcagagtgagtgttttgtgagagaatcatgatgagtttgtttatgggggagaaataatctgttgacatctgttcatatgctatttgcatttgaatgagagagaaaaaaaagaagtaatcact

SEQ ID NO: 23050 - DNA, 3638 bp, Oryza sativa
  ref <308>: DATABASE ACCESSION NUMBER: AK073188
  ref <309>: DATABASE ENTRY DATE: 2001-12-06
aggtctgctctcctcaatcctcccccactccttgggtaaatcgttagcctagccgccacccgtactgagcgctccgccatggcgctcgtctgaacttcccctttagcgcccgccatggcctgccgccccatgtgagtaatgcggttatgtgtagcagggtagttttttcctattgctggagaagatcctccacttaaatggagaaaatcgacggggagatcgctcttttgttgctggatttctgtttattccgatctgttagactgctagtccctaaataggtgtagctttcgtttctgggcattctatttttcatggttgcggcgtcactttcatatctctttcacccatgaatcgactccgatagtgtgtgttactcgtaacctgtactactgcatttccattacatctagataatcagaaccgccactcaagtttcagtagtttggtcttgtaatggtggttctaattctgttggttgactgctctctgaaattaattttattcgtttagttattattatgtgatcttgaggtgtaggttcatgacttcatgttaagtagctcccaattattcttcattcccccctcctccccctgaaaatcttgttctgaattccaatagaaaagttattcttcctttttcccctgaaaatttcgttctgaattcccaataaaaaggttataaatttatatgcatgaagttcatcgagttgttctgaaaatcttacagttcgttatcaatacaaagactacttcaagtccaacaagcaggattctacctgatgagctcatcaagttgcacgggttcacaactcttggtggcaaagggccagcatatgacggaagagagagtctctataccaatggttcacttccttttgaatcaaaggagtctgtggtcaaagtatttgatccagaaaagaatgctaaagaaagggcgcaaaaggaatttaagatcacaattgaaattgttggcaaaacaaacttgtaccacctccagcgctttctgctcggaaagcacaggggcatagcccaagaaatcatccatgtttttgatgttatcctcagtgataaactttctcggaatcatgtcacagggcccagatcctttctttgtactcagattggtcaccagggttacattggtgatggacttgactcttggagaggttaccatcaaagcttgcgcctgagaaagatagggatttcactcaatacggatatgtctgcagcatcctttatgcctgtgagaattatccaaattatagatgggttcctgaacataagttacacctcaagacctttgttagagcggaaccgtgtgcagctaaagaaagtattatgtcatgtttgcattgaaacaaaccaccatgatgaccaaatcggaagatataagataacagggatcaccccctattcctatgagcaataacatatgtcctgttggtgaggaaggaacaacaatgactgttcttcagtacttctgtgatatggagaaaacaggtgtgcctagtgttggacattggaacatcgctgaagagaaaatcattaatggaggagctttggataattggacttctctgaatctttcacgaatgcgcccggaggaagtacaaaggttctgcagcgacctgattcagatgtgcaatgccactggaatgtccttctatccaagaccagttgtggacttccggtcatcacatcctaacaacatacagaatgctctgagggatgttcacaggcccatgcattcctatgttgattgtgatgagaatcatttttatgctgatgctcattgcaactgtaccgtgtctgtggtcccctcatcatcgaacgacaaagttgctgtggaacaggaggaattacaatttgcctcaacccctggcaacagtggacagggcaaatttcaggttggtttcctgctgaacagacagacgatactagtagatacagaaaatgacgactcagtttctgctgttatccagcaggcaattgaaaagacaaattattggccaaaggatgtgtattacacatactccatgggcatgattgacaaaaagaagatggtgaaggaatcacatctctataaaggttctctcatatttgtcaattccagaagccggggcggtggagagcctcctgctggttgcgagaggattgttgatagaatgattaaggcaaaccaaattcctctactggatcatatccatagtgtgaagggggcatgatccctgggctgaatggtttgagcgtgtgaacttaccaagatcccttttaacatcttcacaagaatggggtggtgtacttttgcaagatgcagcagctaaagttggacagatgttggctctctgtctggaaagggcccattgttctgggaaatgttttggtggctttgacatacgtgatgtctattatatagagtattaccagttgattgacattaatgcccccatgacggatttcacaagtagaagatatataaatgattggttatcgttcaataagattattgatgaccactttagatacactgatccaacctcaggttatctatcatatacactgtacgtggaagattttatgttcagaatatctttacttgaagatgtgccatctactggacgttcttggagggaaagggctgtctttttcaagaatatcagccttgaatcatcagagaggagagtccagattgttgaaggacttgtggggttttatcgtgaaagactcacttcagacagagaattattcgaggaggtattgcaggattgtggctattggaaaagacaaacaagaacggtgcctcgtatgatttctgcgttgacatattctgtaaagaatgaattgcaggactgggtacctgctaatcattactttgagaattgtgggtattcccagctttatttctgtagatgtttctttggacattatacagtaccaggaaggatcacgaagaaggaactggatacagctgtaggcatacttttgccaggtcatatcccaagggctcaaaaaagactgatggtcaactatgagaagacccaagtagatgctgcagtattgtcaccatcaggaaatactgcaaggttcagtgtgcatcatatttttggcattggttctgttggaaatgacctggctctcccacaaataaaaaaggctcttcctccctcgcaaagaaaaaggaaacaaacttgtgacaagtaagtctaactagcctactatacacatgtagctgcttctctgcaaacttcccgttggtagcagagagctctgatggcagcagcgggcaagctgtggaggtgcgttaacttcccaaagatcaaaggttcccaactgcttatatgatgagatgttggcgattcccatagagatgtggttgatgaagtttagttgaagattcccaactgcttataagacttctcttgaactggttgctggtagttttttttttgctgctcgttgtagtagattgtcagtgagcttctgtggtatgcaaggcactcagcttgacacaatgcaactatgccaagtatgttaagttcccagtagttttgttatctaacctttgttctctgtatgatatttgcctcatcagctgctctgctcaaaatgcttccttttatatttgtagttttg

SEQ ID NO: 23051 - DNA, 2037 bp, Oryza sativa
  ref <308>: DATABASE ACCESSION NUMBER: AK073189
  ref <309>: DATABASE ENTRY DATE: 2001-12-06
tacagtgagctcccctctccctctctcactctaccaaactgcagaggagaggagaatggcgatcgctctccgattagcggccgcgccgctccgcctccgcctcgtctcgccggcccctccggcgatcggcggcgcgggagatggaggacgacgaggaggaggaggagcagctcgtatcggtgtcctgggcagggctcgctgccgccgccgccgcggcggaggcgggagactggaggtggcggcggcggccgccgatgactccgctcgctgtcgggccaagggagtgggcgccgccgccgccgcggcggaaaccctaggtgggatcggggtgggaggtggggaccagctgagcgtggtgatgaagttcggggggtcgtcggtgtcgtcggcggcgaggatgcgggaggtggcgggcctcatcctcgccttccccgaggagcgccccgtcgtcgtcctctccgccatggggaagaccaccaatctcctcctcctcgctggtgagaaggcagtgggatgcggcgtgatccgtgtttcggaaattgaagagtggaatttgatcaaagatctacacattaaaactgtggaggaacttgcactgccaagatctgtaatacacactatgctggatgaactggagcagctcttgaaaggtattgcaatgatgaaagagctgacacttcggaccactgactaccttgtttcatttggggagtgcatgtctacacggatttttgctgcttatttgaacaaaatcggagtaaaagcacggcagtacgacgcatttgatattggtttcataacaacagacgatttcggaaacgcggacatcttggaggcaacttatcctgctgttgcgaagagattacatggagactggattcgtgatccagcgatacctattgttactgggttccttgggaagggctggaaatcaggcgctgtaaccactttaggccgaggtggcagtgacttgactgctacaaccattggtaaagccctggggttgagagaaattcaggtatggaaagatgttgatggtgtactgacctgtgatccaaatatctacccgaatgcaaccactgtgccatacttaacatttgaagaggcagcagaacttgcttattttggtgcccaggtattacatccacaatctatgagacctgctagagaaggtgatataccagtcagggttaagaattcgtacaaccctaaagctccaggcaccctgatcactaaacaaagagagatggataaggttgtgctaactagcatagtgctcaagtcaaatgtcactatgttggatatagtaagcactcggatgcttggtcaatttggttttctggcaaaggtcttctctatattcgaagatctagggatatctgtagattgtgtggctactagtgaagttagtatttctgtgtcgcttgatccatcaaagatctggagcagggaacttattcaacaggaacttgaccatgtagttgaagagcttgagaaaattgcagttgtacatctacttcagcagagggcaataatatcactcattggaaacgtacggcgatcatctcttatactggaaaaggcctttcaagtgttgaggaaaagcggggtgaatgtccagatgatctcgcaaggtgcatccaaggttaacatgtctctgattgttcatgatagcgaggcaaagcagtgcataaaggccctccaccaggcgttcttcgaggacgatgtcctgacagaagtcgaggaagaagcccttcacatgagctgatcagcttagtccgtacaaccccagaaaaacaaatattgcaacctggagcaggttttctagcatcgcctccagttattttttcactcgtatgaccagcattcgatgcgttgtttcctcgctagttcaggtggtttagtttgacatttggtagctcgatctgttttttaccaggatgcaaaacgactggagcatgcgtcacaagttcctcgcttgaatgtgctttcactttggatctaaagtgccttaaaagtattaaaaaaacttgatct

SEQ ID NO: 23052 - DNA, 1490 bp, Oryza sativa
  ref <308>: DATABASE ACCESSION NUMBER: AK073190
  ref <309>: DATABASE ENTRY DATE: 2001-12-06
gagaaacggtcaacccactttcccaccctctccattttttacggatctggcggcgcgacggaggcgaggaggagaggcgatggttgcggtcgatgcagcagttcaacagcggcggcggccgtaccctatggtcaaggagtggcggcgtccaggcgacgggcggcgtggaggaggcggtgacgacggcatcagggtgcggtggggcagcggcgggtgacggcgacagccctcggcagcggcgggcggacgacgacggcctgctacgggctcgtcaggccatcccccgcccggatccggcggcaacacccgtccctcgcggcagcgtcgggtgacggcaacggcctgcggcagcggtgggcggctcgggagcaaaaccctagctcctgccgtcgccgccctccttccctcctctcctccacattcccgtcgtcgaagcgcgtctccaggagagccaggcggcgagtcgggatgtcggtggcggggccgtcttctctgccttcccgcgccggtggacgaggaacaggaggggatggggccggcacgtcatccggcagcggcgccgcggtgatccggtcgctgctccccgcccgctgttgctgctgctgctgctttcctgtcttcttgctctggtttttcccctctcatggcggttgctctgtctagagactactcctcctttggaatccttttcagttttggttggattaattggagttcgctttgctgcgcgattgcaattgttcttgattgatttgcttggctcagaatagtccaaggctctgtccttgtttctcttcgcatactgattcctggttaagaatggtcttcgctttgtgcactcgttcttctgtctccacgaagaaaattggctttctcaaaaacctgcaaaactggaaacaataaaaacgaaacgaattgcatatgattattatgttgctcgcaaacggaatagattgaatcagcacgattgatggatacagtacatagtccttgcttgtctctgactttgctctctactaataggtacagatgagcctgggaagcaagtcgatctggagtgctgtcaagatcaagaacatcagcaagtctaaatgtagcatttaagggtgaaggttggatcctcggtggagcatgccgatgctaccgactccaccatggatgtagctggcagtgggattttgacgtcgaccgtgagtcttcggcaccggcgatggtatttggcgagttgggatgtactcgcttcatctcaatatgtagcaacctcttccagatttgtagttctagtattggtttaatctcatcctagattgtaacatattgcgacggagggagtagtcattggttacaatcttcttgattttttttatcaaaatgaatatgtgtatgtctatttcccatctgtaatttttattggtaaggaaccagccaacaccgtaatattgtattcatgttgtgtaggatatataatttgaaaaaaaaaaactcttctc

SEQ ID NO: 23053 - DNA, 1253 bp, Oryza sativa
  ref <308>: DATABASE ACCESSION NUMBER: AK073191
  ref <309>: DATABASE ENTRY DATE: 2001-12-06
tattcttccgagccccctcttcgccatttcgcctgctccgtgatcgccgtcgcgcaccatttcgccgccctgccccgccccagcaacgattgcgtgcgggatctcaaaccctagggttccctcggcgctgacgggagcaacctctcgccgccgacgccgctatcgcccggcagattcgttgacgatggggcgctcacggccctcgcctccgcctcctcacgcgagcgaggccagagacattgacagcaagagtattggccccagcagtaatggctctgatgatgagaaagtgaactggaaggctctaaaagatgtcacatacaaagagtgttttattcattctggtttgaagatcttatccattctctctgatatccgtctgcatccccacgagcggtggaatatttgtcagaaggtaggatcgagggctgcaattctgcaaaatcttgtcaaccccattgaggtgttcgtagatgatgaatgtgctgggaaaccagctccccaagtgccaaagagttcaaaaccatctattatgaagcttaggcaagcaacaagcagaaacctcaagcgggaaattgaactgcttatggagaacccacagcgcaacttccctctaaccaacttctgtcttgacccctcaaagttgattaaatctagcactatggtttcccctgtcatttatgcgcaacgtcgcctgtcatatctgatgaatggcatgggaagacaacaagctctcggtgatgcaatgcaagcttggagacggccaaccacttttaattttctggatgctgctctgccttctttaggcatggaaattgaatctgaagaagcaatcgagggtgcatcaaattttcagcttgagctaaagagaagggggatgttctccagcgctctcctctacgcaagaaggagattgccctccgagtcccaattgccttgttcatcaccatcacttatgcaccaagcaagcgtacgcaacaaaggctgtttgttttcaggcagcgctcttcaaaagaatttccatttatggattgcacgaggtctcaggttgctacgctgatctgactgcgcgataactttcatatgccgggaattcatgcttaaatagccaattaagcctgatcagaatgtaacaaaattcttgtggcaagttgacaacttgctatcctgctgaacaaatattatcctcagtattgtcgtcctgacttgtgggtgaattcgagagcattgatatgatggaggtaatttggttc

SEQ ID NO: 23054 - DNA, 901 bp, Oryza sativa
  ref <308>: DATABASE ACCESSION NUMBER: AK073192
  ref <309>: DATABASE ENTRY DATE: 2001-12-06
gttacatgacaacaggtgtttaccaagtgacaatgctgacaaacttgtgcatgctgagaacaccagcgaaatcattcccattaggttcttcactgaacccaaatatcatttctccaacagtatccaagggcatggtgtgctcatcattcctcaataacccagaatccatcgcattgtaacgctagcaattcaaacaagccaagccaatgcaactgctccccgtgcttgaccaccgcataagtaaggcaggcagccatgacagagctcggtggctggcaacccttcttcccggaggggcttaagactcgcgcctcgcctcatcagcttccccgcgctgcgcgagcccagcgaagagggcgttgaagcgggcgacggtccgcttcggcatttcgtcgaacaccctgcgcgcgaccccgaggcggaggagctcgcgagttcggcgccagctcgtagcgtaggcgcaggaggagaaagcccgaattggcgaggcgggcgtggacctggatcgtggaggcttcgtcccgggccggagctcgactaggtgaaggccttgagcaagcagggttaggtgaaggcgggacggaggctggaggagtaggcggtgagggtttcttgtcggagacgagctctgatgatttctttccacgaggaggaggcgatggtggccgcggggcgtctgccattggagacgcgagcgagctcgcggagatgctgctcccatggcgtcaatggcggcggcggcggcacggcaacggttcgcgtgggaacttcgaacggggagataaatttgcagttatggggctgcagaagttataaatttcatatactagatacttttgcatcttgtcagtgaatatattcaatttacatataagtataagaggagtatttgatttgaagc

SEQ ID NO: 23055 - DNA, 1219 bp, Oryza sativa
  ref <308>: DATABASE ACCESSION NUMBER: AK073193
  ref <309>: DATABASE ENTRY DATE: 2001-12-06
gacctagtggcatcacccagcactccagcagcattcagcttcccttcctctccccctctctttgttctcctctagctcatccccatacccaaacctccatcagatcacaacttcgctagctaactagagagcaaaggccgggcagtgcaggggggaaaaaggaagagagccaaatgggcaacatgctgccgtgcttggtccaaggcaggacgaccctcccggccgccatgaaccccaagcagaggctctactccctcaagctcctcgtcaaggccctccacaagctgaagaagaagatgatgatgaagcctaacaagggcaagaagatcggtagcagcaaaccgtcatcgccggcggcgccggcggaagcagcttcagccacagcggcggcggtggcaggaggaggcgtagaggcggcgatcgggagcagtaagcccaaggtgagcccgcgaagagcggctcaaggtgggcaaaggaagggcgtggtgcgggtgaaggtggtgctgacaaaggaggaggcggcgcggctgctgtcgctcaccgtcgtcagcgccggcgccggcgcaggcggtggccgccggaagaccaccgcgcagatcatcgccgagatcaagaggatggagatacgccgtgccatggcgacatcgtcggcggcggtggcgtggcgcccggcgctcgcgagcatccccgaggagcagcaccaccactcgccgcgccgtagcctcggcgtgcagcaggtggcgtagaggtcacatactcacatgtttatatgtgcctacatgctcgtgtgcacgtacgtaggatgatcgtggtagagatgggtaatcaaacacacagagagaggacgagaagggtctgggttgagaggcgagctaggccggcgacgacgacggatcgacggccatgtacatgctccccctcccatgcacgagctccggccggcggcgcagcgaggcgccgccgtgcttgctatacagcttcccttttttgaagcttaattacctcgaggggtccctcctccatcgccctgcgctggccatctcatatgttaattagtgaccaccaaatgaaatggaaaatggaatgtaaaagttaatccccttccttgatcatatcgtacgatctttcggctgaatgcttgtaagcatgcatgcatgttcgagatgttaattaattccttcgagcaatttgaaagaaagaaatttccttggtggaattc

SEQ ID NO: 23056 - DNA, 1030 bp, Oryza sativa
  ref <308>: DATABASE ACCESSION NUMBER: AK073194
  ref <309>: DATABASE ENTRY DATE: 2001-12-06
aaaaaaattacggaagtggccatgccgaagcccacgcgcgccgtcgaccaccggcggcggaggagcgggcgagctccggcgatcgccgccgtcgccgttgccgcggaggatgatggcgaggagcaccatctcaatccgttcttggacgccgccccgtcgtcgtcttcgtcgagagtccagttcaggaaggtggcgtcgcgcgcggtgtggctggaggaggctggtgcggcggaggttgtggacagcaagggcaagctctggctgaccaccggtgtcaaccgggacggcaagctgtactacaatgtcgaggagattgggttcttggcagaaagaggggcattggttcttcttgattacgagggtgaaacaattggaatggaggaaatctacggaaagattgctggagggaaatatgggtgctcctgggatgccttccaagcttacaagcacttgaagttgctcggctatattattggacgatatggcgttccctggacagttaagcgtagccatacttacagcgtcactgatgcctccacaagtgtggttgaaactgatcagattcagagcttaaatagagtcggtggtgcctccaatgacataactaaattgctcaaggaaatgtgcatagatgatatgcatccatcctttgaagtgtatctaccgaatagcaaatttaagaagacatccccaggagaccctagtttcgtcctatgcctattaagcaacaaaccaccatcaagggaagaactagaaaccgttgaaaacaagtttgagggcattcctctgaaattttgccatgttgacaacggacgggtcagcttcctctcctccaacaaagctgctctccctagtttgccctgatgagatagcagcaggagaatctgttactgttagttttttctgcttctgatcttgtgacgtacatcacttggtattagatgcaattctggtgttcttgtataacttcagatcagcattaacacttacggaggatttttcagaggaattattaccgtgttttgtctgc

SEQ ID NO: 23057 - DNA, 3335 bp, Oryza sativa
  ref <308>: DATABASE ACCESSION NUMBER: AK073195
  ref <309>: DATABASE ENTRY DATE: 2001-12-06
gagccgccactctctctctctcgttttgccccaatatcaataccatcgccgcaccgccatggcggcggaggaggtggaggcggcggcgatcgacggatccggcgaggaggcgaagcggaagagtggtaagcagaggggatcgggcgccaaggggaggcgccggaacggcgaccgggctttccgcccgccggcgatgaggccggaggaagaagggcgcggtgttgcgacgaggcccggggcgctcagggaaaggaagccgccgcccaacgccttcaacgcgccagacgatgatgaggatgtcgagaaaactgatcaacttctcgagcctctcaacaagcccaaaagacgtgatgcagggaagaagagaggacccagaaaaaagaaagtggatcaagagaacatccaaacccacaggcataacgcaaatgcagtaaaaggcaagatgttagtcaatgataaggtttcgaagactgaaaagaagcgtaagagaggagacacaggagccgcagaaaataatgggaaagggaagaaaatgttgacaggtgaaaacgccttaatgtgtcaccaatgccagagaaatgacaaagggagagtggtctggtgcaagacttgcaacaataagcgcttttgtgtgccatgcattaatcaatggtatcctgatttgcctgaaaatgaatttgctgccaaatgcccttattgtcgcaagaattgtaattgcaaggcatgcctgcgaatgagaggtgtcgaagagcctccaagaaaggaaatttttaaagaaaatcagattcgttatgcctgtcatgtgttacgcttgttgcgtccttggctgatagaactgcgacaggagcagatggcagagaaggaattagaggctaagatacaaggtgtttcagttgatcaaataaaggtggaacaagctgtgtgtgatctagatgagcgtgtctattgcaatagatgcagcacttctatagttgattttcatagaagctgcaagcactgtttctatgacttgtgcttgacctgctgccaggagcttcgcaaaggtgagatccctggaggagaagaggtggaaattttggatcctgaagaaagagacaaggattatgcttttggtaagattctgtcagatggtgagaaccaaagggactctttgaagtgtcgcagcgacacccaaaacagtgagtcaaacaaaggcatggcttctgacgaaaaccaaaagaaggctctgttactttggaaagcaaacagtaatggtagcataccttgcccacgaaaggaaaaggaagactgcagtttttcatctctagatctgaaatgcttgtttccagagaagttgctccctgaattagaagatagatctgagaaggtcttctggagtgaaacatttgcaaaagaactaggtagaacaagtgagctgtgcccttgttttgatcactcaggcaagataagaagtgacagcaagaaattacgtcaggctgcaaatagggaggactcgagtgataactacttatactgtccggtggccactgatatccaggacgctgacctgttgcactttcagatgcattgggcaaagggcgaaccagttgttgtttcagacactcttaagctaacttctggtcttagctaggagccgatggttatgtggcgggcagtacgagaacgaaccaaagggaaggcagaagatgagcagtttgctgtgagggcagtagattgcctcgactggtgtgaggtggaaattaacatacacatgttttttatgggatatacaaggggcagaactcatcccaggacctactggcctgagatgcttaagctaaaggactggcccccttctagctcatttgatcagcgattgcctcgccatggtgctgaatttatcagtgcattgccatttccggagtatactgatccacgatatggtccgctaaatcttgcagtgaagcttcctggtggtgtcctgaagccagatcttgggccaaaaacttacattgcctatggattttctgaagagttgggcaggggtgactctgtaaccaaacttcactgtgacatgtctgatgcagtaaacatcttaacacacacagcggaagtgccctgtgagacttatgatgctgttcagattaaaaacacgcagaaaaagatgaaaatgccagatgacatggaaatatatgggatgatagaatcaggcagtgaactcaagccatcagcatgcccagttgaattggggaacaaagctgttggtgaagcaccaaaggcctcatgcagcaaagaaaatgttcataccttgaaagacaagtctaatggtttggatataaacgcttcaccacctgatgatgctggaggtgatgccagggatgaagcattgtcctatgaatctgtggtacatagtgatgtagctcagtgtccaaaccataaccatgagaccaataattctgatgatgcacgtattggagctcagagatgtcaaaagaaagctaaaggtcgtcctccgaagacaggttcaggggtatcagagcaccaggaaagtggtggtgctttgtgggatattttccgaagagaggactctgagaaattacaagacttccttaggaagcatgcgccagaatttcggcacatccactgcaatccagtgaaacaggttattcatccaattcatgatcaagctttctatttaactgcggagcataaaagaaagctgaaggaagaatatggtgttgaaccttggacctttgaacaaaagcttggcgaagcagttttgattcctgccggatgtcctcaccaagtcaggaatttgaagtcctgcatcaaggttgcactggactttgtttcccccgagaatgttggtgagtgtgttaggctgaccaaggaatttagacgacttccatcttcccacagggctaaagaagataagctagagatcaagaagatggctttccatgctctgaatgaagttctaaactttctggatcctccttcctcagaagggtcgaaagaagcggcggagaagcctcgaagggggcgtggtcgcccaagaaaacactagctgcaacaagtgatgacttgatttgctgcgtccggctccctctctgatcatcttttgtggtgatgagtgggctaaaatcgttcatgcattttggaggaaggggaggaatcttgtgcatgtcaaaatgtggtagcaatagcatgatcgatgtaggtaggctgctaatgctaatcagttaatggcttgatacttttccttttggcttgaacaactaactagctgtctgtctgtctgtttgacttgtgttaagtggattcagacatgtaatctggtccatggtttcagctgt

SEQ ID NO: 23058 - DNA, 2157 bp, Oryza sativa
  ref <308>: DATABASE ACCESSION NUMBER: AK073196
  ref <309>: DATABASE ENTRY DATE: 2001-12-06
gagccgccgccgccgcagcctcctcctctcgtcttctccttcgaggtcagcttcagatcttctctcttctccatatttgcgcttgttcatgttcgttcgtagctgcagatctggtttagtaacgtgaggtttcggtgatttcgagctggggcatgttgtgttcgcccattttttgtaacttttttctgtgtattcatctcactgcaatgatcttcgtctgctgttcgttgacgcgacgataaacttgatttgtcagtgaatcatctgcataggttgaaaattatcggcagaatcggacgatgaacttgatttggtgcagaatcatttacataagttgaaaattatcggtggaatcactagaaggatttttatctacaatccgttcgcatagatctctttccgtgtttctgtaattttttttattctactactgctgagtaggtgttatcgtctgtacccggtttggttgggtcgattactgcgcctctgtgcaaatcatccgccgattagctgcgttagcacttttatagctgcccaagtttgatctgtgagcttgcctgctatatttatttagagttgtaaattatacacttatctttgtttctaatatttgtttcgttctgtgctgcagttgttagctccctccttattcaaccatgggtaaggagaagacgcacatcaacattgtggtcattggccacgtcgactccggcaagtcgaccaccacgggccatctgatctacaagcttggaggtatcgacaagcgtgtgatcgagaggttcgagaaggaagccgctgagatgaacaagaggtccttcaagtacgcgtgggtgctcgacaagctcaaggccgagcgtgagagaggtatcaccattgatatcgccctgtggaagttcgagaccaccaagtactactgcacggtcatcgatgcccctggtcaccgtgacttcatcaagaacatgatcacgggtacctcccaggctgactgtgccgtgctcatcattgactccaccactggtggttttgaggctggtatctccaaggatggccagacccgtgagcacgctcttcttgctttcactcttggagtgaagcagatgatctgctgctgcaacaagatggatgccaccactcccaagtactccaaggcccgttatgatgaaatcgtgaaggaagtctcatcctacctgaagaaggtcggctacaaccctgacaagattccctttgttcccatctctgggtttgagggtgacaacatgattgagaggtccaccaaccttgactggtacaagggccccaccttgcttgaggctcttgaccagatcaacgagcccaagaggccatcagacaagcccctacgtcttccccttcaggacgtgtacaagatcggcggtattggtaccgtgcctgtgggtcgtgttgagactggtgtcctcaagcctggtatggtggtgacctttggtcccagcggtctgaccactgaggtcaagtcggttgagatgcaccacgaggctctccaggaggctcttcctggtgacaacgttgggttcaacgtgaagaacgttgccgtgaaggatctgaagcgtgggtacgtggcctctaactccaaggatgaccctgccaaggaggctgccagcttcacctcccaggtgatcatcatgaaccaccctgggcagatcggcaatggctacgccccagtgctggactgccacacctcacacattgccgtcaagtttgctgagctggtgaccaagatcgacagacgatccggcaaggagctggagaaggagcccaagttcctcaagaacggtgatgctggtatggttaagatgattcccaccaagcccatggttgtggagaccttctctgagtaccctcctcttggtcgttttgccgtgcgtgacatgaggcaaacggtggctgttggcgtcatcaagaacgtggagaagaaggacccaaccggtgccaaggtgaccaaggctgccgccaagaagaaatgagcatcgttgaagtggtggttatgctggctgcatttgagatatcttagcgttcgttaagttttgcccacagccatggcactcgttgcatggaccgttaatatctgctcgcaatgtgcactatgttagtcgtttaaaactcgtttatttctattcggtt

SEQ ID NO: 23059 - DNA, 2075 bp, Oryza sativa
  ref <308>: DATABASE ACCESSION NUMBER: AK073197
  ref <309>: DATABASE ENTRY DATE: 2001-12-06
ttcggagagtcgagtcctcgtctcggccaaacaaaacactcgaacaagagtctctcagccacggagtcgatggggtctcgtcctcgcgtcgccttcctccaccaccaccaccaccaccaccaccacctcctcgccgtcgccgtcgtcctcctcctcctcgcgcgcggcgccgagccgatcgccgccggcggtggcgccgccggccggcacctgacgacggaggagcggtggatggaccagcgcctcgaccacttctcccccaccgaccaccgccagttcaagcagcggtactacgagttcgccgactaccacgccggcggcggcccggtgttcctgcgcatctgcggcgagtcctcctgcaacggcatccccaacgactacctggccgtcctttccaagaagttcggcgccgccgtggtgacgccggagcaccggtactacggcaagagctccccgttcgagagcctcaccacggagaacctgaggttcctgtcgtccaagcaggcactgttcgacctggtcgccttccgccagcattaccaggaaatcttgaatgctaggtacaatcgatcatcggggtttgacaatccttggttcgtcttcggggtatcgtactcgggtgctcttagtgcatggttcaggctcaagttccctcacttgacatgtggaagccttgcgagctcaggggtggtgcttgctgtgtacaatttcactgactttgacaagcaggtaggggattcagctggccctgaatgcaaagctgcccttcaggaggtaactagacttgtcgatgaacagcttcggttggacagccgctctgtgaaggttttatttggagcagagaagttgaaaaatgatggtgatttcctgttcttcctggcagatgcggcggccataggattccaatatgggagtcctgatgctgtatgctcccctctaatcaatgcgaagaagaccgggagaagtttggtggaaacatatgctcagtatgtgcaagattttttcattagaagatgggggacaactgtatcttcatatgatcaggaatacttgaagaatacgactcctgatgatactagttctagactttggtggttccaagtttgcagtgaggttgcctattttcaagtggcacccaaaaacgatagcattcgctctacagagatcaatacagggtaccatttggacctatgcagaaatgtctttggtgaaggtgtttatcctgatgtgttcatgacaaacttgtattacggaggcacaagaattgctggtttgtctctctagctagcttttattctctgtatattagcattttttttgtggaatcattggcctatccatgcctgcgaaatggaatcaacaatttcagcagtccagctgccaccttggtacggtctgtaaatttcattgtacactaaccgtaagcatactgcatactatggttgtgctgctttctagataccagatttttatcgctgctggatttcagattttctcactgttgtcctgaatgctaaattgatactcacatttttttcccgattttgcatgaaaaatggtgcagcttctaaaatagtgttcacaaatggctctcaagatccatggcgccatgcctcgaaacagaaatcgtcgaaatatatgccatcatacataatcaaatgtagaaattgcggacatggcactgatctgagaggatgcccccaactccctttcaggattgaaggtgacccttcaaattgctcatccccggcagccgtgagcacagtgaggaagcagatcgccagccacatcagcttgtggctatcacaatgccaagaaccaacaagggcatggtgatgatgactcgggagtcggggctacaataaacacagttacacagaccaatctacggtatccattgatctactctagtacaattaaggtggtgtttgaatgtcctgaagatgaaggttaagtttttcacgcaaaacgaggtggtaataacgtgtgattaattgagttttaattattataaacttgaaaattggattaatctgatattttagaacaactttcatatagaaagttttcgcacg

SEQ ID NO: 23060 - DNA, 1234 bp, Oryza sativa
  ref <308>: DATABASE ACCESSION NUMBER: AK073198
  ref <309>: DATABASE ENTRY DATE: 2001-12-06
gatcacgtcactttcacagatcatcatcctgatcaatcgaaacagaaactgtatctagctagctgcctatcttgatcgccagccaagcttttggaagactcacgcaacagctagctagctagcacgaagcagatagagtcgtcactgagcaagcaagcaagaagagtgatcgatcgatcgatcaatggcggcgagccttgctgggttggcattcctcgccgtcacgtcggccgcgctgctgtcgccgctcgccgtggttggccagctgaggacggactactactccaccatctgccccaacctggagaccatcgtccggagctccgtcaagcagtccatggccgcgtcaccgatctccgcgccggcgacgctcaggctcttcttccacgactgcgccgtcaggggttgtgacgcgtcgatcatgatcgtgaactcgaacggcgacgacgagtggcggaactcagacaaccagtcgctgaagccggaggggttcacgacggtgctcaacgccaaggccgccgtcgacagcgatccacagtgccgctacaaggtgtcctgcgccgacatattggcgctcgccgcaagagaatccgtctaccagagcggagggcccaactaccaggtggagctggggagatacgacggcagggtgtcaaccagagacagcgtagtgctgccgcatgccaacttcaacctggaccagctcaacgctttcttcgccggcctcggcctctcccagactgacatgatcgctctctcaggtgggcacacgttcggcgcggcggactgcaggttcttccagtacaggatcggcgccgacccagccatggaccagggcttcgcggcgcagctgcgcaacacctgcggcggcaaccccaacaacttcgcgttcctcaacggcgcgacgccggcggcgttcgacaacgcgtactaccggggcctgcagcaaggcagggggctcctcggctccgaccaggcgctgcacgccgaccagcggtcgcgcggcaccgtcgactactacgcgtggagccagagcgccttcttcggcggcttcgccgccgccatgaccaggctcgggagggtcggcgtcaagacggcggccaccggcggcgagatacgccgcgactgcagattcccgaattgatcggctaactcgcaccgtacgtgcgtgcacggtgcactactacttgtacatgcaaacattcaatcttgctcggttcatggacttcttact

SEQ ID NO: 23061 - DNA, 2368 bp, Oryza sativa
  ref <308>: DATABASE ACCESSION NUMBER: AK073199
  ref <309>: DATABASE ENTRY DATE: 2001-12-06
ggaccgcctcctgccccgcgccgcgccgcgccgcttcttccggcgaggccgccccgccaccaccatgctcgcctccgtccgctctctccgccgcctctcctcctcctcctcgtcctcgtccttgtcccccgcctcgctacgccgcctcctcctcctcctccaccgcccgccgcctccgcccccgccccctcggcctcctctcccgcccttccaaaccctagcccgaggcatcctgccgcgcatcgcggcgcggcctgtgccccgccgcttctccaccgcgtcctgctcctccacgctcttccgcgtgggggaatgcggcgcccccggcgccaccgccatacccgaggcggagcgaggcgaggaggaggagcgtgagggggaggatggaggcgaggccgacgcggcggtggaggtggcggcggggaggcatgacacggacgcgtacgcggcggtggagctggcgctggactcggtggtgaaggttttcacggtgtccagtagccccaactacttcctgccgtggcagaacaaggcgcagcgcgagagcatgggctcaggatttgtaattccggggaggagaatcatcacaaatgctcatgttatagcggatcatacctttgttctcgtgaggaagcatgggtcgcctactaagtacaaggcagaagtccaggctgttggccatgagtgcgacttggctcttctgaaagttgatagtgaggagttttgggatggaatgaacagtttggagcttggagacattcccttcttgcaggaagcagttgctgtggttggctacccgcaagggggggacaacatttctgtcaccaagggtgtggtctctagagttgagccaacacaatatgcacatggtgctactcagctcatggccatacaaatagatgcggctatcaacccaggaaacagcggagggcctgcaattatgggcgacaaagttgctggagttgcttttcaaaatttatcaggggcagaaaacattgggtatattataccggtgcctgtaattaaacgtttcatctctggagtggaagagagcggtaaatattctggtttttgtacccttggaatatcttgccaggccacagagaatattcaattaagagagtgctttgggatgaagcctgatttgactggagtgttagtgagtagaataaatcctctatctgatgctcacagagttcttaagaaagatgacattcttcttgagtttgacggtgtgcctatagcaaatgatggcacagtcccatttcgaaatagggagagaatcaccttcgatcatctggtgtccatgaagaagcctggggaaatggcggttctcaaagttctaagagatggcaaagagcatgaattgaatgtcactgttagacctttgcaacctttagtccctgtacatcaatttgataaactacccagctactacatctttgctggttttgttttcatcccactgacccagccttatctccatgaatttggagaagactggtacaacaattcgccacgccgactgtgtgaacgggcactgagagagcttccaaaaaaagctgctgaacaactagttatcctatctcaggttctcatggatgatattaatgttggttatgaaaggctcgctgaactacaggtaaaaaaggtgaacggtgtggaagtagaaaatctgaagcatctgtgcagccttgtggaaagctgcactgaagaaaacctgagatttgatctggacgatgagcgggtgatcgtcctgaaatatcagaacgcaaagctcgccacgtcccggatcttaaaacggcacaggataccgtcggccatatctgctgacctcgtcgacgaacaggcgactgacgacggtgaggaggcgactaatggtgagatcgaggcatcatgcactagctaacattgttttgcatacttagctaggcaattacctgcggaagaatagatagatattagcacggttcaatttccagagacagacgcagtgaggcgaggactgcccggagcactgcgctggttgcagcggctcctgttcggccgtctcagttttgacgtgaggggtgggtgctccggtttccctcagcaaataagaagtgaagaacccaagttcttcagcctcatgatatgttgtaacacaaattatcttccccatttcttcccaatatttctcattctttcaccaaaagtgccgtggcacagtcacctcatattgaactcagattatatatatcatcacgaaacagagcatatgaaacaggagttacaaagtttacagcacgatgaaaatccacaataagtttcttatgtactttcttggtaaattatcacccttgctgttaatccctccatttcatattat

SEQ ID NO: 23062 - DNA, 2533 bp, Oryza sativa
  ref <308>: DATABASE ACCESSION NUMBER: AK073200
  ref <309>: DATABASE ENTRY DATE: 2001-12-06
gactcctccacgccgccgcagccatgtcgcgccgccaccacctccacctccccctccgcctcctctcccgcaacaacccctccgcgcctctcttccgccatgccttctccaccctcgacacgccggaaccacctcccccggagaccgaggccgaggccgaggctgtgccggaggtgacgccggcggaggcggcggcggcgacccccaacccgccccgccgcgaggagcccctccacgagaccatcctctacatgatccgccgccgcccgtggaccacccgcctcgagaactccatccgcctgctctccccgacgctcgccgcgccgctcgtccacggcgtcatctccggggccgccgccgccggccgcgccgacctcgccctccagttcttccgcttcgcctaccgtcgcgccggcttcagccccgagccagccaccttctccctcctcatcccgatcctcgcctcccaccgcatgctcaaccacgcccgctgcatcctcctcgacaccatgccctccttctccatcgcccccgaggaggccaccgtcgccgccctcatcgccgcctacggcaaggccaacatcccgcaggaatccgttaagctcttccgcttgatgcccgacctcggcatcgcccgcaccgcgctctcctacaacgccgtcctcaaggccatcctctgccgcggccgagaggccatggccaggcggatctacaacgccatgatcgccgacgccgtcacccctgacctgtccacctacaacacattgatctgggggttcggcctgtgcaagaagatggaggcagccttgagggtgttcggggacatgaaggatcacggggtgacaccggatgtgacgacgtacaacactcttctcaatgcttgggttcgggcgggtgatctggagagtgcccgcaaagtgtttgacgaaatgccaggagctggttttgcacaaaactcggtgtcgtacaatgtcatgatcaagggatatgttgaagcaggtaaggtggaggaggcagtggggctgttctcggaaatgggggagaaggggttgaggttgagcgagaagacgtttgctgctctgatgccagggctctgtgatgatgagggaagggttgtggaggcccggaaggcaatggatgacatggcggagcggcggctcactccaaaggacaagtcagtgtttttgaggcttgtgacgacgctatgccgagcgggtgacttggatggtgcgttggatgtgcaccagaagagtgggcagttcaagcatgttcttgtggatccaagacagtatggggtgctgatggagagcttgtgcgcgggtggaaagtgtgatggtgctgttgaggtgatggatgagcttcttgagaaggggacactgttgagcccaaagagccctgtgcttgaagggccagcttataatccagtgattgagtatttgtgcagcaatgggaacaccagcaaggctgagactttcttcaggcagctgatgaagaaaggcgttgatgacaaggctgcttttaacagtcttatccgtgggcatgcaaaggaaggtgtgccagaagcagcacaggagattcttgccattatgacacgccgtggtgtccgtactgaccctgaatcgcatgcactgcttgttgatagcttcctgaagaagaatgagccagctgatgcaaagacggcacttgacagtatgatggaacaagggcatgtaccgagcccatccctgttcatgtctgtcatggtagcgcttttcaacagtggccgggttcagactgctagcagggttatgaagagtatgattgagaagggggttacagagaacatggacatggctcataagattctggaagctctcttcatgaggggccatgtggaggaagcaatcggccgtgtcaatctgatggtggaaaatggatgcttgcctgatctagataagttgctgattgccctctgcgagaatgacaaagtgatggaggcacataagttggctgattttgcattggacagggactttgatgtcagcttctcaacctatgacagagtcttggaggccctgtacactgaggagaagacattgcctgcatactccatgctttgcaagatcaagaacaaaggaggtgtcgtggatcaaaagggttgcgatgccctgatggacagcttaaaagctggagggtactcaaagcaagcagacattttgtctaggatattggcagagaatgcatcatcaacatccaagaggggcaaacgggttgccatgggtgcgtagcggtttatccattcatgagaagatagtactatcttccttttgaattgaagagcagtgttttatttcttttgtttttgcttgctgagctattggccaagtggtcttttttagcctgggagacaacatgggcaggtacatttaccttttctttttttagaaaccccacatttagttatgtaccatgccttagcaaaagaaaacatgtttaataatcaatgaagatgtacttgctatgaatttcattgagaaattgagctgccatgact

SEQ ID NO: 23063 - DNA, 731 bp, Oryza sativa
  ref <308>: DATABASE ACCESSION NUMBER: AK073201
  ref <309>: DATABASE ENTRY DATE: 2001-12-06
gtgacaagagagaagctccactcttctccaccccaagagaattgaagccaagcatggagaatggaggggaagaagatgacagagcaagccgatgcaagaggattaccagagaatcagatgcaaccaagaatggtgcagcgaccaagctgcaagctttgaggctcgtcgaggacctctccctcccttctgtgcaggtggtggtgatgagcgccaacatgggctgttcgcactgccgacagcgggtcacaaaggttgtctccaagatgaacgggttgctagattacatggtggattttgggaagaaggaggtgacagtgagagggacgatggtgcacaccaagaagaagaggaagcaacacaagaagaagcatgaggaaaacaagaagggaatcgctgcaaactgggagaagaaatcgtcttctcagagcaatgacagcgccaggacgctggcctggtttctacgatgctacagttcatagcaactactactatctagtgcatactatagtctacatatagtgttacttatatactactaatatatatagatatatctagaagctatatagctgctcgattaattgtttatttttctctttagtttcttcttgcaatttctttctttctcatgttttattatttttctttttgattgaaaataacgtatgatggtaggaaatgtgtatattctgcccataactgtgcattataaaatcctctatttgcaaggt

SEQ ID NO: 23064 - DNA, 1303 bp, Oryza sativa
  ref <308>: DATABASE ACCESSION NUMBER: AK073202
  ref <309>: DATABASE ENTRY DATE: 2001-12-06
gtagccacaacggccaagcagaaagtgcaattagcctgcaggcagctaatcagtagtagcttgctagccatggcttctgcaactaattcttcacttagcttaatgctgctggtggctgcagctatggcgtcagtggcatcggcgcagctctcggcgacgttctatgacacgtcgtgccccaatgcgttgtccaccatcaagagcgtcataacagccgccgtgaacagcgaggctcgcatgggggcgtcgctgctcaggctgcacttccacgactgcttcgtccaagggtgcgacgcgtcagttctgctgtccgggcaggagcagaatgctggcccgaacgtggggtcgctgaggggattcagcgtcatcgacaacgccaaggcgcgggtggaggccatctgcaaccagaccgtctcctgcgccgacatcctcgccgtcgccgcccgtgactccgtcgtcgcgctgggagggccatcatggacggttctgttggggagaagggactccaccactgcaagcgaggccttggcaaataccgacctccctgccccttcctctagcctcgcagaacttatcggcaatttctccagaaagggactcgacgcaaccgacatggttgctctctcaggagcacacacgatcgggcaggcgcagtgccagaatttcagggacaggatctacaacgagaccaacatcgattccgccttcgcgacgcaacgccaggccaactgcccacggccgacgggcagcggcgacagcaacctggcgccgctggacacgacgacgcccaacgccttcgacaacgcctactacagcaacctgctgtccaacaaggggctcctgcactccgaccaggtgctcttcaacggcggcagcgcggacaacacggtcaggaacttcgcgtccaacgcggcggcgttcagcagcgccttcacgacggccatggtgaagatggggaacatctcgccgctgaccgggacgcaggggcagatcaggctcagctgctccaaggtgaactcctaattaaggagtagtatgacgggatgcgttcgttgctggaagcaaatcgtgtcgacgacgacataaacgggccacaccacatatacccatatatgtagtataaccacaagtataggtacggtggtgttgtactagtacacgtaaagtatatggcagccagctcgctctggcaatccatcaagtgtatggagcagagcagccatggcattagcacctagtataccaaaataaaagctcctcatgcgaaggcatgcatggaggattaatgaactgttaccttcac

SEQ ID NO: 23065 - DNA, 3958 bp, Oryza sativa
  ref <308>: DATABASE ACCESSION NUMBER: AK073203
  ref <309>: DATABASE ENTRY DATE: 2001-12-06
ggcgccgccgccgccgccgccaccgccaccgccgccctcccactcccactcccacttccaccccatccaatccgccgccgtcacgaccgtcgccgctgcagtcgacgacgacatggaacgcactgaggaggaggaggcgcccgccgccaaggaccccaacgcgtcgctgccgtcgccgacgtacaggtcgctcgccgcgcccgtcaccaagcccgtcgacaagttcgcgctccttcctgccttcctcaaggttagaggcctcgttaaggagcacatcgactccttcaactacttcatcaccaagggaattaggaacattgtcaaggcaaacaatcgcatcgaagcgcgcaacaacccctctatttttcttaggtacaatagtgtaagggttggtgtgccctccgtacaagtacaatacatcgctgaaaaaatcacgccacacttttgccgccttaccgatcgcacatactctgctcctgtgttggctgatattgaatacacagttggaaagcagtatgagctgaaaaggaagcctaatttcatcattgggtacttgccaattatgcttagaagtcatgcatgcgttctgaatggaaaggatgaagctgaattagcaagatatggtgagtgccctcttgatcctggtggttacttcattgttaagggaaccgagaaggtcattcttatacaagaacagctatcaaagaatcgtattattatcgacaccgatagtaaaggaagggtgattgcatctgttacgagcagcacacatgaaataaaaagcaaaactgtgatttttatggagaaggagaaaatttatctacagttgaatcaattcactaagccgatacctataattgtggttatgaaagcgatggggatggaaagtgaccaagaggttgcacaaatggtcggaagagatccaagatatggagatctcctatatccatctattcaggaatgtgcctttgagagaatctatacacagaagcaagctctgcagtacatggatgacaaggtgatgtatcctggtgcaggaaatcagaaggaaggtcgttcaaaatcaatcctccgtgatgtttttgttgcacatgttccggttgaaagcgggaatttccgaccaaagtgcatatacacagctgttatgttaaggcgcatgatggatgcaatcttgaatgccgacacttttgatgataaggattatgtaggaaataagaggctagagctgtctggtcaactaatatccctgctttttgaggatttgttcaaaacgatgaactccaatgctgtggagcttatgaacaaaacaagtgaaaagatccattctagcccattggatttaagcctgcatataaaggaaaatatcataacccatggtttggagagggctatttccacaggaaattgggatattaaacgatttaggatgcatagaaaaggtgtatcacaggttctttcaagattatcctacatggcatctttaggctatatgacaaggataacaccacaatttgagaagacccggaaaacaagtggacctcgtgctttgcagcctagtcagtggggtatgctttgtccatgtgatactcctgaaggggaggcttgtggcttgacaaaaaatttagctttgttgacccacgttacaacagatcaagaggaaggcccactcatgaatctctgttatagtctaggtgtggaagatttatcacttctgtctggagaagaaatccatgcatcgggttcgtttttggtcatgttcaatgggttaatactggggaaacacagacaacctcagagatttgctaatgctatgagaaaattgcgtcgttcgggtataattggagagttcgtaagcatttttgtaaacgagaagcagcattgcattcacattgcctctgatggcggtcgtgtctgtcgcccacttataattgctgataaggggataccaagagtcaaagagcatcatatgaaacaattgagagatggtattcgttcgtttgatgattttctgcgtgatgggttgatcgaatatcttgacgttaatgaagaaaacaatgcattgattgccctgtatgagcatgaggatcaagatgatgttcaaagaagcagtatcacacatattgaaatagagcccttgaccattttaggggttgtagctggacttattccttacccacatcataaccagtctccccgtaacacttaccagtgtgcaatgggtaagcaagcaatgggaaatatcgcgtataatcagttattccgagcagattctctactctatttactagtgtatgcacagcgtccccttcttacaacaaaaactattgagttggttggatatgataagcttggggctggacagaatgcaactgttgctgtcatgagttatagtggatacgatattgaagatgcaattgtaatgaacaaatcatcccttgaccgaggttttggtcgttgcattgcaatgaaaaagtacactgtgacaaaggagaagtatgaaggtggttattcagacaggatcgttaagccccagagggataaagatggtgctctgttaaaacagaacatgcgggcattggatgaagatggatttgctgcaccaggtctaataatacgcaatcatgatatctatgtgaacaagcaaactcccagaaataccaagagagattctggtgctcatttaacagacagggactataaggactcgcctgctgtctacaaaggtgttgatggcgagaccactgttgtagatcgtgtaatgctttgttcagatacagatgagaaattaatcatcaaatgtattatccgtcacactaggcgtccagaggttggtgacaaattcagtagcagacatggacagaaaggtgtttgtggtaccattgttcagcaggaagacttccccttctctgagagagggatatgccctgatttgattatgaatccccatggatttccaagtcgaatgacaataggtaaaatgattgaacttcttggggggaaggctggcgtatcttgtggtcaatttcattatggcagtgcatttggggaaccaagtggtaatgctgataaggttgaagatataagccgtactctggtaaagcatggcttcagctataatggaaaagatctcttgtactcaggaattttaggccatccttgtcaggcatatgtattcatggggccaatctactaccagaagttgaagcacatggttcttgataagatgcatgctcgagctagtggaccacgagtattgctgacccggcaacctactgaagggcgaagtcgtgatggaggcctacgtcttggtgagatggagcgtgactgtttaatcgcatacggtgctagcatgctaatctttgaacgtctactaatatctagtgatccatatcaagtacaggtttgcagaaaatgtggcttgttaggctattacaatcataaactgaaggcttcctactgttccatgtgcaaaaaagggagaaaatatggccaagatgaggatgccgtatgcttgcaagcttttattccaggagctgcaagcaatgaacgttgttccacgattgaagttaactgaaggataacttgaaatacgatggtcaagcagagctcaagcactgttggtacaagcttttgcagcaagaaggcaagctgtaaacatgtcgacgacagcaatgaacgtctgaacctatacatcattcaggagtcgggatatgtttggtttctgtacagaagagaggtagcttagatttctttcttcatatgagggagacaaaagtgcaaggaagaaagagaagcataccaaccaatagcttcacatgagctgtacagtggaaacgctttactttgtatgctccaatgttaatttgcttccttcctccttatctaccatcgtttccttgtatgcatccatagctttcaggaagtcaatatatcaaaaaagaaaaaaaaaagctttgcg

SEQ ID NO: 23066 - DNA, 1701 bp, Oryza sativa
  ref <308>: DATABASE ACCESSION NUMBER: AK073204
  ref <309>: DATABASE ENTRY DATE: 2001-12-06
gacgctcaaaccttgaatcgccgccgttgttagacatggcggccgctctgcgcagaaccgcggctcccatggcggcggcggcggtgttccggctctccgcaccaccgcgccacgccgctcgcctcgcgcggttcctcggcggcgcctccgctgcttcctccgatgcggcggttgcttcgggggagttcgtcccgtggcacaacggcgggggcgtcttgcacagggccgcgtccgttgaccccaccgcggtggtggaggccggcgccgtcgtgcactccggcgccgttcttggcaaggatgtcgtcgtcggctcgggagccgtggtcgggccctccgtgtccatcggtcagtcaaccaggatctggtacaatgttgttttgagcaattgttcggtgggcgagttctgcactctccacaatggcgcctgcattggtcaagatggttttggtttctttgtgggggatgatggacaggttaagaagaaactgcaggctagtactctctaacaacccttttcttagtaaacgttctgtgaagatgatgagttagtagtttccaaatggaagggcagtgaaatggttagctgaaatattctaggatcgcaaagagggttcattttgtattaaaaggataaggaaatgctcagtccttcatttgtcacgttcacccaatgtgcttacctggtatcagagatacagaaaaaagaaactgagaaaatgccagtgacatgggagaagtacttctgatacaaatgtttgatgactatcactctcatagactgtatttagatgttttgttttggattcaattgaaacatcatatggctatatgttgaaaagctttatgcttctccagatgttgcatgtaaaaattggaaatcatgtggagataggtgcaaatacatgtattgacagagggaggtaatttgtcagccttgaaatggcaaatgttcctttggccactccatggttgatttaaatataccaaacattttgtaatatcagctctttctttgtgaatatatgtttggttgaacctaacccgcgagcggaaattttcatcattatttactaagtgcagttggagagatacagtaattggagatgaaaccaaaattgacaatcttgttcagattggtcacaatgtagtaattggaaagtgttgcatgatttgtggacaagcaggaattgctggttctgcaacattgggggactatgtaaccttgggtggtagggtggcaattcgggatcacgtctccattgcttcaaaggttcggcttgcagcaaatagttcggtgacaaaggatattcagaaacccggtgactatggcgggtttccagcagtccctataaatgaatggcgccggcagactgcaaacttgcgcatattttcgaagaaagatggtggtagaagatagtatgtacacaatcctgtgacgccaaaacaaaatgatgtaaccatatttttttagcagatgtatagacttgtagtttgctctgtgaagctgatgcaataccccattttgtctaatggaatcactgatatcttttacctcaacatctgagatgacccaacttgtagaacaagggccgccatattcagccatctcagtatttgaaatttgatttgttatcttctggtttgtatcaacaacagttctggaaggccattttttattgtcagatatgtaatatgttaagc

SEQ ID NO: 23067 - DNA, 1754 bp, Oryza sativa
  ref <308>: DATABASE ACCESSION NUMBER: AK073205
  ref <309>: DATABASE ENTRY DATE: 2001-12-06
gacggctgcttgcttttgcgcaagtttcaagcgatgcgccaccgcgtcggccccgccgccgccgccgcggcggcgctccggcggttctcccacctccgcccgccggccccgccggacccgaggctcgccttccttcgctcagagtttgatggccgtgagcccggccgacagccaccgtcaccggaaacaagagaggagccaaaaggtggcgagcgcgcgcgctcgccggtggccgtggatatcgcgcacccgtggccggagtgggtggcgctgatggagctcctccttcagaggggccacctcgacgcctccgtgttcgccggcggcgcggctggctcgccgtccaaggattccaacgttatccgcaccgcctgcctccggtttgggcgagagcggccggagcttatcaggcatctatcaagatgggatatccaggttgctctccggtatgggtgccccagcattgacaggaaggttgttaattctgggaagcgattacgtgctcatgtaggccttgatgaaggagaggtctgcagccaatgcaatttaaggggtggatgcgagagggcatatgtaaaggctcggaaggaggaaattggaagaactgtggatgttatgcgcatccttttgacttatgggcttgacacagttactggcaatgtggagaacagagcatgtctaaacaaaaccgttaaagaatccattaagagcctacttaatgagattgttgggttcgattccatgggtcctggttccagcactgaaaagcccacacaccgtatgccaaaaggacaatcttctattcctatgaagcagggtgattggaattgtcccaaatgcaacttcttgaactttgcaaagaatataaaatgtttacgctgcaatggagaatttgaagagaggtatcagctgctccatgagaaccaagagcatcttcctctcaaaaagggtgattggatatgcaaaaggtgcaactttttgaattttgcaaagaatacaagatgccttcagtgccatgagaaaccaacaaaccgtcaactcaatccaggggaatgggagtgtgtctcgtgtaattatttgaacttcaagaggaatgcattctgtttgaaatgtggttggaaaagaccaaaatcattgaacaaccaagacagtattgaatcacaacgtgacttagatgataataagcattctgctatttcatttatccaagatggcatccaatcgaggaggcaaattctgcaaaataaggctccattgtctgacgaagattcagacttctggagctccgaggaggaaggggcctaccacagtgacaaaaacattcccccaataaagaaggattacaagttccttgaaagttttcccatcattgggggtaggactgctatgtctcaagatcctcttgagagggagaaatggaaggacgaaatgtccaggagaaacaaagggctcctaacagaagtatcagaagaaagtaatcggccttcgtgccccgttcgtattccgagaagcattgagcagattgaatctggtgacgacgacgacgacgacatttcatcatggttttctggtggtactagtaatattaacatgaaaaaggcatagccagatttctgtaaacgctagtatctgcacaatttcatctgtaatatttacagtgtaggcattcagtaagaaaaaatcatgtctcgcaaagaacttcagtattgtacttctgctatgatctgtcttggcaaataatatactatgatttt

SEQ ID NO: 23068 - DNA, 1460 bp, Oryza sativa
  ref <308>: DATABASE ACCESSION NUMBER: AK073206
  ref <309>: DATABASE ENTRY DATE: 2001-12-06
gaaaagaagtacagggtctacaacttcaaggctgctctcaccagcaagcagctcgtcgagtacatcgtgctagacatcgagcacgagtcaccagagattaccattgacggatctcgctaccagttggcttatgcccaggtcgcccgggtctccgactttgggaaaaacgacaccatgttcaccgtgcggactcatcttggccacctgctgaatcctggagaccttgcccttgggtatgatctttatggtgccaacttgaatgatgatgacatggacacagctatgatgcgccacagtctgcctgaagtcattcttgttaagaagagcttcgccaagaggccacgcacacgccgatggaagctgaagaggcttccaatggaggaagatgctgtaaataaggccaagggggagctagagaagagggctgatgagtatgaggagtttctcagggacttggagcacaactctgatattagattccagattgatctatacaaggatgaggactacaggtcggagatggcatctactattggtgatgatgttcccactgtgccgattgaggaactaattgaggacctaagtcttggtgatgatgaggaggaggatgaaggtggggaaggcaaccaacatgctgttatggtgggatgagttaatatgtttacctgtgctgtgcttctgccttctggtgatggttgctgccaaccgcagatcataggtctgaactgcatctgtttaatccgtataagttttgttctcccctttacttctataagttataagttttgttgctaaattgtttcaacttttgctgtttctcatgatagatgttgtatcaccttatcctgtatctggtgttgcagcttggcttaaattatatttctctattcttattgtctgtgatatgttgttttcttgccatagtgtggctgatcacaacatatcttaaaatagatgcattgtttgatttccaaaacatctagtttggtgtttagattgtgccagattcatatttttactatatgtttttagtccccattatgtggtttgcaagcgtggaatatgattgtggatttatgctgagtcatgactagagaattgtaggtatgacctgaaaacgtctgccatgttgagtgtcactccaataaattgattaaaaaactaataaagataagtgtagtataatatcatacccaggagccatgatgagacaataatgtgcatttttagtgattgcaattcaactgctgctgttttatcaggcacttcattcagactatgcctacatcgtgcaataagaggttagatgtagagttgatggacagaacagatggtgctccactaataagcgatgagtactggtttggtaaaactttaataagttaagaattttacggatcttttttttcttttactttcacaaggtggtgctgttctcaaacctaatgacttataatcgt

SEQ ID NO: 23069 - DNA, 1166 bp, Oryza sativa
  ref <308>: DATABASE ACCESSION NUMBER: AK073207
  ref <309>: DATABASE ENTRY DATE: 2001-12-06
ggctcaccgcgcgcgaaccttcctcggactcggggcgtctgtcccctgccgccggcgattcgatcgcgcgggcggggctgtcgcgtctcgccgccgccgccgcagctaagccagcgcggcgatggattcgtctcggcccaggagggatcccatcaagtcccgccgccgtcccgactggagagaggagcttaggagcaattgtctgaaaagaattaaagaggagagagtccagtttctttggaagaaaaggatcgatgggccacttcctgctagtgacatgataaaagtcgaatctgcagtcagggatattatctctgatgaattacagaaactcaaacagcatggagatggaaaagcggaggaagaagctgatatgatatgggaatatcaaggaccacagacagctaaacctgttgagactgaaagtgaagatatattacttgaaatggaaagacttctttatgaagatatgagagatgaagccattcagatagaagtggaggccctcgatgaggaagatgaatacttagctcaggcttttcttgaacatatgcagttaactgataaggaggcaaatgctaagctctggtgcccagtttgcaaacaaggggaactacgagaaacacataatctcgtatattgtaccatgtgtaagctacgcctagaccttggagaagataagattaacctggaattcttgcgagaaagattggctaatgtgcatatggatcacttggatagaggatgcaaatcagcacccaagttctgtttgcagactatgtttgagttgactgcgctctacatacaatgcgaagaatgtaacacttttgatgtcgtgatataaatagctacaatgctgatgaagaccatattacggagagaagggaggatgtccatactttcagaagttctttctccccgtttactgttagatcaacggcgaacttatccttggaagaggatgtacatcaactaggtagggctctgtccactttttgcgttgaggtgatcaaactgtgactcttccatgtatctcttttttgtttgatgtctttcttcacgtaaaggtagagtgcagtgtaattaaccagatgagcttggtcaatattttgttgccaacttacatgaaagtcagtgaactcgctgaaccgatatggatatgggct

SEQ ID NO: 23070 - DNA, 1834 bp, Oryza sativa
  ref <308>: DATABASE ACCESSION NUMBER: AK073208
  ref <309>: DATABASE ENTRY DATE: 2001-12-06
gaccagaattccgatcgccaccccgcggttctgctctcgccggccgaacaacgcgtgctcacgctcgccgccgccggtcgccgcctccaaatcgtcgccagagaatccgcgtcctccccagatgacgctgcgcacgggagaagcaacgccgcctccccaggcgcatgccgaggaggagccggggcgggggaagcgccggcgcgtcgtcgcccgtgagacgaggctgcagcaggaggaggaggaggaggagggcgcctcatccgagccggagacagaccgcgccctccccccgccacccccgccactgcagaggagcccgccgccaccgccgctggggcggaggccagggctcagctggccataaacattcgccgtatgcttgctgtcgaggcagagagaaggggccgaatcgctgaacgaattggagttcaggctgagggtccaattctcactctggaggatacattttgtgatattgatgatggtagtgctaaaagccaagttgctcgaaaggttgctttgggtgtttcacagtcaattgtcagtttatcttcctttgcaggtcgaaaaaggatacgggtttgctcaggatttgtgatacggtggaacgatagtaccagcattggtacaatattaacctcagcagcacttgttagacctccatgcggagatgatgtcagggtggaggtctttctacctagtggggatatatctatttgccagatttccatggtagatttccatcataacatagccttagttgaagtcacatccaatttcaagcttcaagaggctgttatccttaaatatattatcgacaagggagatgttttagcccttggccgttcttatgaaggtggtcttctgatgtgctcaaggggagaaataagcaacagagccagcatatttgagtgttcagaactgttagtatcaagttgcgagataacaatggctggcaccgggggaccccttgtaaattataatggccatgttgtaggtattaacttctttgaagagaaccaaacgccatttctttcgatggcaattgttttcaaatgcttggaacatcaccagatatttggaagaataattcgaccttggattggattctggttcacctctattcaaatggttccgcttagtcatctagagcacatatacagaaaattctcggatgttgataatggcctatatatttcaaatgtggctgagggatcacccgctgatattgctggaatatgtcagggtgatattctcatgaaatgtggtgggaaattcctctctactgcccctgagttcggtgcaatgttgatggataaatgcaaggaaactatggaagagtatgaccaagaaaccaatggtgatttttcagcgaaaaggataacagttgagattgttataaagcgagaaaatgatggaagcactatagagaaaactatatctgctggtttgatagaagagtttaactataacaggtggcctacaccgatccctagctataaggtcagacgagatactattggaaggtgttaagagccttagaggatgtggccaggttgtggtcttgtgtgatgtctgtgtggctcgtgatctgtattgcaaaagtttgtggctgctaaatcctgggtgatgcagccaagttttggcggcatgatacttgtgttgtgcttgtgcgtctgtgatcgatcatttcccaaatttcatagattactttcaaatacatgtctgtgctctgctctcttcgcagagaaaaagggatgattcccaagtttgtagagtactaaggctgtgtttagatataaagtttggatccaaacttcagttcttttccatc

SEQ ID NO: 23071 - DNA, 3890 bp, Oryza sativa
  ref <308>: DATABASE ACCESSION NUMBER: AK073209
  ref <309>: DATABASE ENTRY DATE: 2001-12-06
ggtagagggctttctgaaggcaatgcaaaaacagatccattcagctggaaaacgtggttttttttcgaagaaatctgtgggaccacatgttcgtgaaaagttcaccttggaagatatgttgtgcttccaaaaggatcctattccaacgtcattgctaaaaataagtagtgaccttgtaagccgttcaattaagttattccatgtcatactgaagtacatgggcatcgattccccagcaataataagtttggatgaaagaattgaacttgttgcaaagctttacaagcatactttgaaacgttctgaactgagagatgagctctttgcacagatttcaaaacaaacacgtaacaatcccgacagggcttggttaataagagcttgggagcttatgtatttatgtgcgtcatccatgccaccaagcaaagatattggagcatacttgtctgagtatgttcactacattgctcatggcgctacaactgattctgatgttcgagttctagcacttaacacactaaatgcactgaaacgctcagttaaggcaggccctagggttacaattcctgcacgggaggagatagaggctcttttatccagccgtaagcttacaacaattgtttttttcttggatgaaacttttgaagagatcacatatgacatggcaacaactgttgctgatgctgttgaggaacttgctggcattatcaaactttcagtatattctagtttcagcctttttgaatgccgaaaggttgttaatggatccaagtcttcagatgttggcaatgaggagtacattggtttagatgataacaaatatattggtgacctcctatctgaattcaaggcagccaaggatcggaacaaaggagaaattttacactgcaaacttgtatttaaaaaacgcctcttccgtgagtccgatgaggctataactgatccaatgtttgttcagctatcttatgtccagttacaacatgattatattttaggaaactatccagtaggtagggatgatgctgcacagctatctgctctgcaaatattggtcgaaattggctttgttgacaatcctgagtcttgtgttgaatggatatctcttttagagagatttctacccagacaagttgcaattacaagagccaaagcgagactgggagcttgacattgtctcacgctatcagttaatggaacatctgtcaaaagatgatgcaaggcaacagtttctcagaatcttaaggactcttccatatgggaactcagttttcttcagtgtccggaagattgatgatccaataggacttttacctggaagaatcattctgggaataaacaaacgaggggttcattttttccgtccggttcccaaggaatatcttcattctgcagaactgagagatatcatgcaatttgggagcagcaataccgctgttttctttaaaatgagagtcgctggtgttcttcatatctttcagtttgaaactaagcagggcgaggaaatatgtgtagcacttcagacgcatatcaatgatgtgatgctccgcagatattcaaaagcacgctctgctactagcgcggtttctcaaaacgatgtttctcaaacatataaaccaccgaatattgaaatatatgagaaacgtgtccaagaactgtcaaaagcagttgaggaatctggaaggaaagcagatctgttgaatgaggagttacagaagaagacaaaacaagaaagagatatgcaaaaagaattagaaggtctgagggataccttgcaatctgaacggcaaagcattaaagaagtaacaaatgatcttgataaactaaaatccctttgtgatgaaaaggactcctctttgcaggcttcactgatggagaaaactagactggagaccagattaaaaagtggtcagggccaagaaagcagtaatagaacaggagtatcaggaaatcattttgagagagatactctcccaactgtaggcactgtcaataatagcattgagatgttagcaaagcttgaggaggagttaaaatcctgtaagaaggagcttgatgcatccaaggaattatcaaagaaattaacaatggaaaataatctgcttgaccagaaggttcaaaggcttgaaagagcaaaaagtgaagagaaaagtaatatggaaagagtttatgaggatgaatgttgcaagctgaaatctcgtattgctgaattggagcaaaaactggaaagcagaacacgttccctgaatgttactgaatcgactcttgccttaagaaatgctgaggtggatacattgcaaaacagtctcaaagaacttgacgagttacgagagttcaaagcggatgtggacagaaaaaaccaacagactgctgagattcttaaaaggcaaggagcacaattgattgagcttgaaaatctttataagcaagagcaggttctgagaaagcgttattataacacaattgaagatatgaagggaaaaataagagttttttgtcgtctgcgtcctctaaatgataaggagctcattgaaaaggacaagaatattgtttgcagccctgatgagtttacagttgcacatccatggaaagatgacaagtcaaaacaacatatatatgaccgtgtttttgatgctaacactacccaagaagaagtatttgaggacacgaagtatctagttcaatcggccgttgatggatataatgtttgtatatttgcttatgggcaaactggttctggaaaacttttacaatttatggatctgaaaacaatcctggtcttaccccaagggctacctctgaactttttagggtgataaagcgtgatggtcacaaatattcattttctttgaaggcatatatggttgagctttatcaggataatcttgtggacctgttgttggccaaaaacgcaacacaccaaaaattggaaataaaaaaggattccaagggggttgttactgttgaaaatgtgacagttgtgaacatttcaagttttgaagaactgagggctataattttaagaggttccgagagaagacacaccgctggaacaaatatgaatgttgagagctcaaggtctcatttaattctttcaatcattattgaaagtaccaacctccagactcaatcttatgcaagaggaaagctaagtttcgtggaccttgctggttctgagagggtgaaaaagtccggctcagcaggaaaacaactgaaagaagctcaaagcatcaataagtctctttctgcattggctgatgtgattggggctttatcttctgatggacaacatataccttatcggaaccataagttgacaatgctgatgagtgattctcttggaggcaatgcgaaaaccttgatgtttgtgaatgtctcaccagcagagtccaacctggaggagacttacaattcactcatgtatgcttcacgagtgcgttgcattgtcaatgatacgagcaagcatgttgccccaaaggaaatcatgaggttgaagaagttaattgcttattggaaggagcaagctggcaagcgtagtgaagacgacgacctggaggaaatacaggaagagaggacaccaaaggagaaagcagataatcgcttgactagctgagaacaaggtaccatcagaattctatgcccctggttgcatccttgcaccgtctgcagaggtgactgatgttgatgatcattttcgactcgccgacgccgacgtgttcaccaatcacccgctaacagaaccttccggtatgacctaacaatgttgtacaccaattgtatagtaacagattatattatggcaatgatgcctcttgtacaaagggaaccgtagcacacattcataggagaatcagatggtggaagagttattagaactaagctcctttttgtcc

SEQ ID NO: 23072 - DNA, 909 bp, Oryza sativa
  ref <308>: DATABASE ACCESSION NUMBER: AK073210
  ref <309>: DATABASE ENTRY DATE: 2001-12-06
gactctcctccccctcgtatcgctcgggagcggaggtctcctcgcccctagagcgccgccgccaccgccaccgccgcggccgccgcggcggggacttgccggtgccaagtccacacgccatcgtcgctcgcacccttcccgcgcagggatttgttcacgatggcccgcttgtatgttggcaacttggatccccgagtgacttccggggaacttgaagatgagtttcgtgtgtttggagttctgcgaagtgtctgggttgcccgtaaaccacctggttttgcatttatcgattttgatgacaagagggatgctgaggatgcactccgtgatttagatggcaagaatggatggagagttgagctctcacggaactcaagtagccgcggaggtcgtgatcgacatggtgggtctgagatgaagtgctatgagtgtggtgaaactgggcactttgctcgtgaatgtcgtttgcgtattggtcctggaggtctgggtagtggaaagcgtcgtagcaggagtcgcagccgcagtcgcagccctcaataccgcaagagcccgacctatggtagaagaagctacagtcctcgtgatcgctctccaaggcgccgcagtgtttcaccagttcgtgggcgcagctacagcaggtcaccacgtggccgaggtggttctccttatgctgatggaagagatggtggcaggtaccgccgtagcaggagctagaccctgatgcctgtgcttgaccgtctgctctttggcttgcatgtcatgaatgctttaagactggcatcaactgattgacttcaattaaggtttactactttatctgccttgatatttcagcctcttatttctgacgttaaaaaacttatgggatggatgtaatatgcaactaagacatattacctttctact

SEQ ID NO: 23073 - DNA, 2411 bp, Oryza sativa
  ref <308>: DATABASE ACCESSION NUMBER: AK073211
  ref <309>: DATABASE ENTRY DATE: 2001-12-06
gccggctcgatggccgccgcttcgccgccggcggcggcggcggaggtcgttgtatccctccactctgtcccagccaactaatagcgtaagagacaggagaatcgcggcgcggagcggcctctataggagcaggcagcgggcgcctcatcgtcctccgattccattccgccatggtcgacgacccccatcttcctcctcgcctgcggcaagcaaggaggatgcatattggggattccaactcaaactacaagagcagggatttgaactgttctatgtgaaatttatgcaaaaattcgtatggaactctactgttccagacagtttggcattagctccggattgggattattcatcaattcgttattcctttcttgttcaattcctaaccaatcaatcagtcatacttgctgcttattttagcaagaagatcacagagctcccttggtttggagcacatgatgttgtggtcggctccagcaatctcctcgacttccgtgcccgggctcaacgtgatcaaataacgatgcagctccttgatgtcatcccccatgcctatcaggcacaccctcttcaccgaaccatagttggcactgacgaggcggcaaacacggccacggcgatcttgtccgggaacctctccattgcgagcgcgatgcttaggccgccgaagctgtgccctacgaggatcagcctctcacccgcaggagccacagccactgtgtcgaggagcggtcgcgactagtcctcgaaagagtgcacctcgtcgatgcgtgccgggtgcacgccggacgcagcgaggtcgagtgccgtaacacggtgcccctcagagcggagcatggtgaccaccttgtaccagcaccatgctccatggcaaaggccatggacagggatgaaatgcttgctactgccaccgccgctgccttccatttcctgctcccgtggactgagtccatctcttctaggttcggtcatttgcatacactggagatggcctaagctagatgtgctgctctctcggatgctcgggatcactcactcttggcaggtcctatattatgaggcatcaaatggcttacaagagcatgaaatatttgcaaaattcatatgaaactcaattgttccaagcagagcctgcattagctctggacaggatttattcatcattttttttcttgcccaatttctaaccaatcaattagtcatacttgctacctatcttagcaagaagatcagagagctccctcggcctggagcacatgacggcgtggtcggccccggcaatctcttcgacttccacgcccgggctcaacgtaatcatgtaacggtgcacctccttcaagtcatcctccatggccatcaggcacaccctctttaccgaaccgtagttggcactgtttgctgatcagtgatcacctcggggatgatgcgcttgccgacgcacggcacggccgcggcgacgaacacggccacagcaatcttctccgggaacctttccatggcgagggcgatgctgaggccaccgaagctgtgcccgacgaggatcagcctctcgccggccggagcctcagccactgcatcgaggagcggctgcgagtactcctcgaaggagtgcacctcgtcaacccgtgctgggtggacgccggacgcggcgaggtcgagcgccgtcacgcggtgcccctcggagcggagcatggtgaccaccttgtaccagcaccatgctccgtggcagaggccatggacaaggatgaaatgcttgctgctactgctgctgccctccatttcctatggcctaagctagatgtgcttctctctcttatgctgtgactgtgagcctgtgaggtcaatcactgttggcaagtcctatattatcagatttcatcaattattggcacacaagatcaaacaaagcaatgagaaccaaacttctattatttatacttgtagcgatggactgtaagtaggcttcatgacgaagaagcactgattatttccaaactggcatttttctactcgtatttgttggctatcttgatcagaatgtcgcagagttccctgggcttggagttcatgacggcgtggtcagctccggcgatctcctcgacgtccgtgccagggctcatcgccaccatccaccgctgcatctcctcggtgctggagctgtcagccttggcgatcacgtacaccttcttcaccgatccatagttgccattggtgagcaagctctcatctttcatcaccggatcatccatgaactgattgccaggtctcaccagcatcttcgccagtgccagatcctgaaatgtgtggtagtagcatttttttaatggaaagatgattacatgggcatttgacacaacagtgtaccgatgtgacaggtgagcaaaacccctaattttggaaactgattaatt

SEQ ID NO: 23074 - DNA, 2535 bp, Oryza sativa
  ref <308>: DATABASE ACCESSION NUMBER: AK073212
  ref <309>: DATABASE ENTRY DATE: 2001-12-06
gccccaaccccacgcccgatggatggtgccgccaactcgccctctcgctgcaagacgatggtggcgccgtctccattccctcgccctctctctgaaggatggtggaggcgccatctcattccccggccgtgccctctcgccgcaggcaccatctccgttcccttcccctcacagtttgggtgtcgccgaatctcactggaattggttcgccaccttagggagttgccgggactggttcgtcacctctgtggcctgacgatctgctacccacgcactctactcctccccaggtcaactttacactccatttgcctaatcctcttaatcgctatgatcaatccagcctgcttgcttgtgctgattccatattcgctgttcaactcctctggtgaaggcatcagcagacacaatttggaagcaaagaaaaaagggagtgcaggctagaatgctagattattcagtactaatgtttaaacatcaccgcccaggtacagatcaaatcctctccttctgtcctgcatatattgtatatgaattgaatatattgatattgttggagagacgagggattgcagttttcaggttgctcacatcattctgttgattgcttttatgtctacaaaagtttaaggattactgcaccagctgtctatgcgatacgactaatatcttttgcactgtaatagttaactgattttcttggtcatctgtatatgtttatgtacactatatgaatgtcgtgctaaataaaaatagctttatataggagcaacaaaatttttctatgaaaatattatagaaaatggatttgaaatgtatattgttatggattgtgtttctcaaccatcttctcctaacagtatctgtgcccctcaccaatagcctgcctatacaggctcactacaatggcccacgagatgccatggccacatgtgtggcggcgatggcagcatccaggcccacatcaaggcctgcgccgcgctgagagccatctccgttgtcaccgcacataacaccattagttcaggtatgctgccgaatttcctccttttcagtttgctctcttcggctgattggctcaatgattaggctgccagtaaatttctctttaacaaaggccttctatatgcttggtcaaattcttagcggcaaatctaagtttattctccaaatacatttgttcctgcaacttttttaattataatgtcctatattttttatgtcagctaacttctgcgtaaaaaacatttgttcctgcaacttttttaattataatgtcctatattttttatgtcagctaacttctgcgtaaaaaacttttcactaataatgatagaatattgaagatgacagtgcaccgtctatgtcaattaccaaaaatgtacaggttaaatatgtgtacatggtccttcataattgcatcctgatgtacatcggtacacgtaaatgccaattgtttctggaatcttaacaaatttggtctacaagaacatatgctttaaaaaactgttctttattattatcaattacgctcatttgggattgtacataaatgtatatcatatagtactacatggtagatgtgattttctttctcaagatatatacttcaaaatataaaaagttagttggagactacaagttttgatgttctttgcttagttgtccttttctgcaaaatgttattgtgtgaattgtgaagtaatgtcagtgttccttcattgtacaatactggtaataatatgttgtgagcatgtcagtgagttttcttgctgtcacctttctatgcttctgtttttaggtatggatgttttcttattgtcttttttggatgatatatgtggtcttcatatttcttatcagattatttaggtttagttccatgatagcatatcatgtttatgctatcagaaggttttacctcaagttctttcctctccaacaaatcatattttatttgttaattcgtcgtgtgctaattctgtacacagaatggcaatatacacatttgcattgatgatattctttgtcgatcgacaatcttatattggctattgtgatgcatacatcatcagaaattctctgtaagcctgacaatcttggcatattacacatatatttggatcatgcaattaattttctatgagacaaacctcaggatctttagggctcagaatagatagatgattgtgccgatattaaggtaatgatatgatttgatggtgcaggtcttttagcttcgtatctggaggaagctcaattattctatgaatcatattgtcaccagtacattgggtcaatattgggtctataagtcaagtcaaggcagtgatcacaaattatgttgtacatctagcaaccaaatatttatttggctcaattgaagatttcagtatttgtaagaactttactagaccgcgattactacatttttaaattcagtgcaggccctatgtataacaagctaacatttttcttatgctatagccatttctatatctgctactattatttaatattgaatttttgctttgc

SEQ ID NO: 23075 - DNA, 1420 bp, Oryza sativa
  ref <308>: DATABASE ACCESSION NUMBER: AK073213
  ref <309>: DATABASE ENTRY DATE: 2001-12-06
ggcgctgcatgccgccccgcgcggggacacttgtcttcttcccaataaacacacccacgcacacaagaaacctcacggaaagcagagcagcaacccagccagcggagggtcaggactctggagcggagcaagaagcagattgctgtgcaagccgcctcctcctcctcccccctgcctctctctcctcgcccttcttaaccccgtctcgcgagagaggagaggagccaccaccaccgcctcgacgccgagaaccagcctcgccgtgacccccggtcgccagggacaggttactctcatctttggtgcttgtgaacaagacgacagccaccgctcatcaaagagcaagccatggaggaatccaatgatcagggccttgcacagaagagcactgcccccactgggttcttcagggtccccggcctctttgtgaggctgagcagcaaaggattgaacgcagtggacactgattctgcctggagcccaacctctccattggatttcaagaacctgtcatcgagcactggaagcacaaatctcaaatcctctgggctactgggtgtcgaggctgatcagaagttcagaactaaccctcccagagtcggcctcggcctcgtcgacgccctcaccgccgacgagagctcctcgtgcttgggtgtcacgagctcgtttcttgattccatcaggccatttcttgagctcgggttgccgaaggcggcgagtgatgctgcaatgcagaagaacggttcaggtagcgtcactctggacgagattgcagactttgctctgtctgaagagtacacctgtgtgatcgagcacggcccgaacccgaggacgacgcacattctgggagacgagacactggaggtgtgcaagggtgtcccaaggagttccaagaagtcaatcttcaccatcgagcccatcggcgagctgccgtcgacgctggcgtgtgctgtttcccgctcatgctgctactgcaggaagaggctgcagcaggacagggatatctacatgtatctgggagagaaggcattctgcagcaacgagtgcaggagggactacatcgatgaggagatcgaggaggtggaggagctcatgatgctggattctgccggttcttctgccctcttggcttggtgaaaatcggcagtagatgactagaagtagtagtagtagtgctggtgagtggtggtgcaggaaagcgactactacctcttttggatggagattcaggttttggtagggaaaggaaggaaaacatgcttcccgttctagtttttctgaatggagaagtttttaatttagccggtttgtgcaaacagaagtgcaacggctaaatgattttcatggattgtgtggggattccccattttgcctgtaagacgagcaaaccccccataatttcacagcaaacagttctccc

SEQ ID NO: 23076 - DNA, 1173 bp, Oryza sativa
  ref <308>: DATABASE ACCESSION NUMBER: AK099333
  ref <309>: DATABASE ENTRY DATE: 2002-08-28
gactgctgcttgcacaggagagggcagagagagagagagagagagagagagaagagggcggctgcggcggcggcgcgcttcgctcatgcagggcgagtaccaccgctcctccagcgaggactcggctgcttctgctgctgctgctgcggcggcggcggctgcggctatggctcctctcgccgcggctgcggcggcggttgctgccaaggaggagcaggcggcggcggcggcggtgctgccgctgcagcagcagcagccgaggcggcagtaccgtggcgtgcggatgcggaagtggggcaagtgggtggcggagatccgggagccgcacaagcggacgcgcatctggctggggtcgtacgcgacgcccgtggcggcggcgcgcgcctacgacacggcggtgttctacctccgcgggcggtcggcgcggctcaacttccccgaggagatctcctcgctggcgtcgctgtccgagggcggcggcgcgagcgagccccgcgagcccgacggcggcacgctgtccgcggcctcgatccggaagaaggccatcgaggtcggctcccgcgtcgacgcgctccagaccggcatgatggtcgcgccgacgacccaccaccgcgagcggcagaagcaccaccaccaccaccaccaccaccacccgcacctgcagccgcacggcgaggagcaacaccaccaccacgagcagaagcaccagcggacggcgtggagcggccgcgccaagaacccggatctcaaccaggcgccaagcccggagaactccgacgccgagtagaagccaacaaaaccgcctccgcgcggcaagatcgatcaacggcttcgtcaacatgcagccagcgtatgatcacctccaccacgtacgctcgctgcatccatccacctaccacctattcgtccacccctcatctccacctcggcggcggcggcggcggcttcgtggcgagatttttcgatgcggttttggataagaacaagggaagggcagcgtcgggaggagggcggtggagacgggggaggaggacgccacaagtggcggtctttccaaatgtcaaaaaagacagctgtaacagtgataaaacaagtcatcctctctgtttttttttcctctctctcttctccgtgttattatcgactagataagcagcgattaattaatccgtc

SEQ ID NO: 23077 - DNA, 1806 bp, Oryza sativa
  ref <308>: DATABASE ACCESSION NUMBER: AK073214
  ref <309>: DATABASE ENTRY DATE: 2001-12-06
gttaacccccatggccgcctcctcttccttcctcgccgccggccgccgcctgatccgcctcggctgcggcaggctcctccccgccggccacgcgcgatcccatggctccacccctgccctcattcgagccgccgccgccgcctcctcccccgcctctcctcgcggccacagcggggggaggaagccggcgcggcccccgagcctgcagtccacgctgtggccgctgggccacccgggcacgctcctggtgccggagatcgagcggtgggcggccaagccaggcaaccgcctccgccacgtcgagctcgagcgcatcgtcaaggagctccgcaagcgacgccgccaccgccaggccctcgaggtctctgaatggatgaatgccaagggacatgtaaaatttctgccaaaggatcacgctgttcacctggatttgattggtgaaattcatggaagcagtgcagccgagacttacttcaacaacctgccagataaagataagacagaaaaaccctatggtgcacttcttaactgctacacacgggaactcctggttgaaaaatcgttggctcattttcagaagatgaaagagttgggttttgtgttttccacactcccctacaacaacatcatgggtctgtatacgaacctagggcagcatgaaaaggttccttcagtaattgcagagatgaaaagcaatggtatcgttcctgacaatttcagctacagaatatgcattaactcttatggcacaagggctgattttttcgggatggaaaacacccttgaagagatggagtgtgaacctaaaatcgttgttgattggaacacgtatgctgtcgtggcaagcaactacattaagggcaacataagggagaaagcattctctgccttaaagaaagcagaagcaaaaataaatataaaagattcagattcctataaccacctgatttccttgtatggacatctgggggacaaatcagaggtcaataggctgtgggcgctccaaatgtcgaactgcaataggcatattaataaggattacactacaatgcttgcagtgctcgtgaaacttaatgagattgaagaagctgaagtgttgctgaaagagtgggagtcgagcggaaatgcatttgacttccaagttccaaatgtcctgctcactggataccgccagaaggacttgctggacaaggctgaggcacttctggatgatttcttgaagaagggaaagatgcctccttcaaccagctgggcaattgtggcagctggctatgcggagaaaggtgatgctgcgaaagcatatgagctgacaaagaatgccctatgtgtatatgctccaaacactggttggatccctaggcctgggatgattgagatgatacttaagtatcttggagatgaaggtgatgtcgaggaggttgaaattttcgttgatctgctgaaagttgctgtgccactgaactcagatatgactgacgctttgtcaagggctcgaatgagagaagaaaagaaggttaaagatgcagtgtaagcactatgatgaagaagataatgtttcacgagctctcaaggctgctctttggtctgcactgacactttgttcttgctgcatttcttcttctcgtttttttttcttttttaggagaatgtgggtgggggatggtaaccaaaatgagatattatctgacatacagtagttctggtaacattgtctgtacctgagtacctgagtgaacttgttatcactcgattggtcactttaagtatgttgctgggattctcagcaatagttatattgcttgagtt

SEQ ID NO: 23078 - DNA, 1474 bp, Oryza sativa
  ref <308>: DATABASE ACCESSION NUMBER: AK073215
  ref <309>: DATABASE ENTRY DATE: 2001-12-06
ggctcgctctcacccgcccacggatccgatccgcctccactccctcccccaccggcgggcggccgcccgagcggcgcggtgctcctcctccctcctcgtcgtcgtcgtcggcgccggcgatggtcgtctgcaaatgccgcaaggcgacaagggtttattgcttcgtgcacaaggttcctgtctgcggcgaatgcatctgcttcccggagcatcagttatgcgtggttaaaaattatgctgaatgggttgttaatcctgattatgactggccacaacactgttcatcttgcaattctgttctggaagctggaagcgaagaaactacacgattgggttgcttgcatgtgatgcacacaagatgtttgatctcacacatacaaagttattcaacccaaactgcaccagctggatatgtttgtccttcatgttctacacctatatggcctccttcaactattaaagatactggctcgcgccttcactctaaactaaaggaagcaatagcccagactggattggagaagaacgtatttggaaatcattttgtgacaatgcctaaagctgatactcgcacccctcctgcttttgcttcagatcctcttaaacgtgtatccatttctggtgatagagaatcaaatggtgcaaacataatcaattctgctatagatgcaaatgtgcaatctggtggaatgtattcttctgctactgtgggatctgggacacctagtcacgttgaaccagaaatagttgaaatagatggtccaagtccaataacaactcagttccctgaacaggagtccaacttcatcagaagtcctagcccacatgggccgagtgccatgacaagaaaaggtgctaactatgttgagagacaaaattcagagatttcttattatgctgatgatgaggacgcaaaccgcaagaagtataccaaaaggggtacattccgtcacaaatttctaaggatgctgctacctttctggtccagtgcattgccaacactgccagttacagcacctcctagaaaagagggtgatgctccagagggccgttcacgacatcaaaaatcatcaagaatggatcctacaaagatcttacttgcattggcgatcatggcatgtatagcaacaatggggatactttattaccgtttgacacaacgcagtctttccgagaactttattgaggatgaacctcaatagtaccctgaggttgtcaatcttgcagttcattcctggtgctatgctgctgattccaagggttttataccctccttgtatttcttttcttctccctttttgtggggctttcttggtggctgagatgggtagttagatactacataagaattatagtagactgcttccatatgatgattgatgtgcatgtttatgtaactataatgctataaaatatcctctttgttatttacacctgatgagaaatcatagaaattgccaccatttgtttatct

SEQ ID NO: 23079 - DNA, 1082 bp, Oryza sativa
  ref <308>: DATABASE ACCESSION NUMBER: AK073216
  ref <309>: DATABASE ENTRY DATE: 2001-12-06
agacctccgactcgccggccgaggccgaggagcggctcgcggacatcaagaacgcggtcggcatccccgaagggatctccgacgaggacgaagttgtagccgtcgtccacaagagcaggggctcccacggcgagggtgtctggagggacctgctgctccgcccgacgccggccgtgcgccgcatactcatcgcctgcctcggcctccagttcttccagcaagcctccggcatcgacgccgtcgtgctgtacagcccgcgggtgttcgacaacgcgggcctccactccgactccgactccatcggagcctccgtggcggtgggcgccagcaagacgctcttcatcctcgtggccacgttcctcctcgaccgcgtcggccggaggccgctgctcctcaccagcgccggcgggatggtgatctcgctcgtcacgctggcctcggcgctgcacatgatcgagcaccgcccggagggccaggcgacggcgctggtgggtctgagcatcgcgatggtgctggtgttcgtggcgtccttctccatcgggatgggcccgatcgcgtgggtgtacagctcggagatcttcccgctgcggctgcgcgcgcagggatgcgcgctcggcacggcgatgaaccgggtcgtgagcggcgccgtcagcatgtccttcatctcgctctacaaggccatcaccttcgccgggagcttctacctctacgccggcatagctgcggccgggtgggtgttcatgttcttcttcctgccggagacgcaaggcaggagcctggaggacaccgtcaaactcttcggcggcgatgaacgtgacgcgaacggtactgtgggaagggaagacggccatgggcagaacaagtccactgagttgactactcagcagtgagccagtaaccagtgaggactactagtacagtagtacatgatctactcagcagtgaccagtgagggctactagtacataccctccgtaggaaatcgagtcaaactttgaaaatatagatcataagtaactcttaagttgttgagtttgaaaatgtaaaaattatatgaataggtttatcttgaaaatactttt

SEQ ID NO: 23080 - DNA, 1744 bp, Oryza sativa
  ref <308>: DATABASE ACCESSION NUMBER: AK073217
  ref <309>: DATABASE ENTRY DATE: 2001-12-06
ggatcttgttcttctccacaatggagtttcttgatatgacttgccgaaatagcagtcgaaaagggattgggggatttcgatgtccgagagccaatttcgcataggatccggcccggccgaccgagcgccttcatccatatttatatatctactagtatagaagaaacacaagaagatcgccaacacatctgattccgatctcatccacaagcgcccgcttcaggtcatccatgaagaacaagaagggaagtcgccgcaaccgcaacaaatcagcagcatccactggttccctaccactaccagtggataggctctctaagttacctgacgatgtcctgctcaacatcctggaccgtctcaacacccccgacgtgctggttccttcttcaacggttctcgttttgtctctttgcctcgtcttattcaggccaacagcgccgtggctgatgcaacagacaatgtcctcagtttcagaagccaagacgtccctcttcaccgactcagcatatgtttctacttgaaatactacgactgtctcaccatcggcaaagctgtttcccaagccatggccacctacaaccaaatcgacagcgtcgagttcatcatcttgacggagctgcagccagagtgttacaccgttgatgatttccgccgtaatgggaagcagttcatgacctttcttggttcttatcttgatgcattcgccggccttacacagctcttcatccagaacttgaggcttgctgaagctgacattcccaacatcctctccacatgcaaacggctgcagtatctgtgcatgtcggtgtgtgattcagaggatagcgtgttgcagctgcagctggaacacccgcggcttgttgagcttgacatttacgatgcaggtttccacctagtcgacctcaaatctctacccaacctcaagcggctggtttttggtatgtgggtctctcccggagaacccttgtcttttggcaacgtcccaatgctttcaagcctaagcctcaacaatgtaagcgcgggatatcagaaggttttcaggttaagtcacttccttgctaatgtccccaacataagcaacctgcacctcagcttcgcaagtgaaaagatttgggttaagccagagtgcccaaaacttctggcgcctgttctccagaaactgcgggttttgaatctggatagactccccgagggatgtgatatagcttggacaagattcttcctcgaggcagcgcctaacctgaagatgtccatcacagtttgggaccattggtgtgacatggagactgacagcgtggaacggggaagaactgggttaccgtgacaaaacaaacgtggagtggcaaagctcacaacctgatggtttcaagcatcacaatctggttaagctcatcatctacggttttcaacctgatgacaacttcgttggatacatcaggtgcatgatggaagccgcggttaacctagtgaggatatccctgtacgacaggaggttctctgattgctgcagtgaccttgatcccaagatcaagatcaaagttgctctgtcaagatttccgcggaccatcaagcagcaggagttggtgaggaggaaaattacagagggattcgggattgcttcctctgatataattcgcttccggtcttaaatctgaatttactatgcgcaaaaatgtaaatcttggttttgctatacagtaatacatattgagttttctgaatattcgggttcttttttttcacc

SEQ ID NO: 23081 - DNA, 2224 bp, Oryza sativa
  ref <308>: DATABASE ACCESSION NUMBER: AK073218
  ref <309>: DATABASE ENTRY DATE: 2001-12-06
gaaatctcgcttcccaaggaaaccgtgagagatcagacgccgcgcgccgcgctcgagctcctccaattccccacgccgcgatccattccgaccagctagggatctcgcgcttctccttctccttctccgatggggaggccgcggaagccggcgaagcccgcggccgcggcgtcctcctccgcctccgccgccgccgccttctcgatcggcaactgcaaggtggagatccacgggagcagcctgaggtgccagtccacggagcaggaggaggaggagctcaccatttctgggcccaggggcgcgaagatcgtcgtgtctgtcgacggggccaagagttcttcagttggtgacggttttgatttcatccttctcagtccgagtgatgtcaatgagcgaaacaaggcattgcttcaggaggtactattgctttataagcaagaactcccaactatggattatgctgctaacactggaaggaagtcagggtttctcgaaaaatgcgtgacaaatgggaagtacaagactctagttctgagctctactgcaggttatgaagaggtaacagctgccttatcatatcagctagtgccggctgacacacagtatgctgaaatacctctggcagtcgtgagacctccttatcaacgtgtgggtataggtcagctcttgtacaaggagcttagccagaggcttcgaaatgttggcgtcacaaccatattctgctgggcagataatgtctcagaaggattttggcttaaacagggttttgaatctgttggagaggtagatactaaaggcaagatttgcagaattccagtaagggccgatatcaagagggcattatgctttccaggtggttcaatgcttatggtttcacatctgaaggatttgccagctcctcaaaagagtttactttcatctcagcaaacatatcagtttcacacgtttgcaccagatagcatctctccaagtgataccggtacttcaactccctcctgtgaaaaattgcttccgcagacagttgcatgccacaaggtcagcaagactgcagcagtggaaaaaaatgaagatttccatggtaccggaggatgttcattttctgaccaacaagaaaataaacgtacacatgaaacctcatcatcttcactaaagtcaaaaagagtaagatgttcccaacattctgaccatcaccaagacatgaatcaaaatgagatctgtggcaaacccctttctataagcaacacccccatacatgaaaattcagtgcatctgatgcccaacgaactttctaatccaagcatggtaggtcatgttaaaagcaaaatatcaggagatgcaaaggccaatatcagttccaatggaagtccttctgttatgctgatgaatattgccgatgaaacaaagaagacacaacttatagaggtagttgagatgcttggcggagtagtcacttgtgaaggaaattcatgtactcatgtcattactggaaaagttcgaatgactatgaatttctgtattgctttgtgctctggagcctggatagtttctccaaagtggctgaaggaaagcttcaaaaaagggaaatttgtaggagaagcagaatatgtttttcaagatgatgaatttaaggtgaaatacaagtctgaactgagagatgcagttgtgagagctaaagagaggccttgctcattattttctggctacactttctgtctgacgaagaacatccagccctccgtcaatgttctctctcgcatcattaaatcttctggtggcaagctcatcaataagctggatgacataactcagcccttgaagacaatcttcttagcgtgtgaagaagatatggaacttgcattggatgctgcaaaaagaggcatcaaaacattcagcggtgagtggttcttgagctgtgtcatgacacaagagcttgaccttgaggcccctcagttcactgaatctctctgatagtaggcctgtagttttagtcaatacagacttcatcctaactgatacctcgttagttggaactgtaaattattcttttggtatctgaacggttaatgtttatgtgtaaatatgaacattatatttttttagacctctataaactatcgagctatatttatgctcggaaactttggtgcaattgttgtatgatttgaatgaatattcttaagttctaaccgggctaatctggtaaatataaatgcaagaagatttc

SEQ ID NO: 23082 - DNA, 3994 bp, Oryza sativa
  ref <308>: DATABASE ACCESSION NUMBER: AK073219
  ref <309>: DATABASE ENTRY DATE: 2001-12-06
ggccgatgtgtcagtccctgatcatccgccccgcgaatcgacctcccactcccagcatctcgctccccctccagcttgccgcagcccgcagcgcgagtcctcccccgatcccctttgacctaccgcggcgccgcccacctgcgccggcattccgatcggctaccacccgccgccaccaccaccaccacaagtgccggcggcggcgggagcatacaaggccatgaacccatgatggttaaactcctcccttggcctcttcgattcatcccctcgcctcgcgcaccgatgggggaaggggcagccgccaccgtacacgttctgctggctacgcgagagtcgtcacaggaatatattaggagtacgatcataatgaagaataccaacagcaccaaaccaaagatatagatggatgttttcaggtgctgagtgcttccagcagcataggcacacaaaagcgcaaacatgcctaccgcagtgcaaactgagagagcataacttcgtatggctggcctgtacaggttcggattcacaaggagtataattagggcaatcgatgacatgaagctcattgaattgcagtagaagaaagccttataacggcgtggatagttgtaaaagaggacagggtcacctgcatggtgccccaaactcatcatccatcagccaaaatccgcctggtggggtcaacccagcttggtaagtaagtgtcacacacaagacagcaaaaaggagcaacctcttgcgtctcttgtcctcaagtttccggtccttctccctgccttcctttcgtatgtcttcatcttcgagcgtgacaaacagaacatgaataaccacatagattaggacagctccagccaaggcaatgacataaatggatgtggttacatctcggcagctcccagaagagtatgcaccaatgaggccaaacagatccaatatcatggcaaactggagtacgcggagcttgagtataggcttatactggaccaagatgatgatgaccaaggacgctgcgaaggctattgagttgcagtaaaagaataccctgtaacgttctggttgcatggataggagtattgaatcgccagcctcatgtccgttccagttgtcctgccaaacaccaccaggagggaccagctcctgcttggtatgcgacggttgctacaagggttgaaagcagtacaacaagagattgagccttatccataaaatctgcatttcttgtgttcttctgtgctccagcattgcttgtcttcgtctcttcaccaccattggttgtggttggctgtgctctagcattgcttgagacagactctgcaccaccattgcttgagacagactctgcaccaccattgcttgagagagactctgcaccaccattgctgcaccaccattgcttgtgtttatctgtgctctacaattgcctgtgctcgtctgttcttcaacattgtttgacctggtgattcatgagccattgagcatgcaaatttaagatggaattacagatggcaataatatttggaagcagaaaaagcattcaatacctgtcatttgaatatgtctgacaggatataatcgccttgaggacaataatgcatgcaagaacggcaagaaccagactgcccacatagatggtagtgtcacattctcggctgcttccggtggcataggcccccgcaagaccgacaaaagcgataaagatgtatgctttgagcacaaaggtccgtactgggctggttttgttctgattcttgcccttgagtagtgggatgacgagctgcttgtctaagagcagcataatgatgagcagggacatgacaaatgcaatagcattaaaggtgaagaatgccttcaggcggatagaatggtgttcccgcatgactgggtcacctgcaatgtggccctccttgctgctgtcccagtagccaccaggcgcgctcaacccagccagcacaccccggctggtcccagcagcataggcccccacgaggccaagcagatccagcatcatggccacccgcagtgggatcatggagatccatagctcttccttctcgtgtacgacggcaaggatgaggatgaggatgatgaccacaatggacaaagcaaatgcagccgcattgcagtagaagaaaacaaggtaccggggatagtacgtatctcggatgatggactcaccggcgaggtgcccggcctcggtattctgccagacaccccccggcgggttgaaccccgcagcatatgtcaccgtggccaccataatggccagcagcaagagctggggagcaatgacagaaaggaggtgcctcaaggcgtcaatgactctatgccaagcaggtgcttcaccatgcatacattagcttaatggaggctggccatgggcagacctttcttccaatccttcttctcatgaatctgtctacgatcggtggaggcacttgcgtattttatatggtcgtctgatacggacttatctatactttatttgacctgaaagacttgggagttttggtgttcttctgcaaagatatactactttctggagtctactagatatccaactcccaagtcaagatctgattaaactgttggcacgtttctcttgctactgttttgcaggttgaaagcttctattgtagcaacggctactccgctactggctgctcttttttactgcgaggcaagtcacacaattcctattaacccaactgtgaactatcatgtttccattccggtgctctatttcagtatatatgctagttgtaatgtttatgatagaaaggacacatatggaagtgtttcttaatttgaacttcgagaatgccatcaaaattcatgtttgataaaatgcccactgtcttaaacttcagctttacaattaatggtgaaacatgagccatgcatgtgaatagagtttgatatacagtccacgtgtagttgctttctgtagctgtgtccttttttacagctgagatgtgctacccaacattggattccacgagtttacagtttgtaatagtccaggttccaacactgtaaagaattgagatggacctagtcatcatatccgatgcatatagcagtacattgccttgagtccttgtctttggcgagagtagaattctttagattacacgataatcatgcaagctggatctgtcatgtaaatttaattaagctcgatagatatgtgaagaattagctggaacaagtaccttaacaaaaggtagcaagaatagaaaatagaaaattggtccggagaatattggtgtaactataaaatagttctggatagaaattaataaagagactcactaagaaattattttttggatatatattactccttccgttcctaaatatttgacaccgttgacttttttaaacatgtttgaccattggtcttattcaaaaaataattattaattattttcctatcattgggttcattgttaaatatacttttatgtatacacatagttttacatatttcacaaaagtttttgaataagacgaacggttaaacatattgaaaaagtcaacgacgtcaaatatttagggatggagggagtataatattagaactcgtgattacctgaactaccttttcaactgtctgactgataagaaaggagttgtttgtgaagttgtcgttttcatacggagtattctgaaatatgtgtgatccctaacagtaacaacgtgttattactagatcacagtgacatagaaatctaattgctcttaaacgaggtaacagcatagtactagctagtaaaattttattccttgtcgtgcgagcctgccagtaggtgtaaatttttattgcttgttgtattactgcacacaggattcacacccgcctgagttctcccccaggccccatccatcctcagatgatacctgaactaattaaattttatacataagcagtagtcgttcttaatctatcttatgtagtatgaaaacctgaactttggtccaatgcccactc

SEQ ID NO: 23083 - DNA, 3425 bp, Oryza sativa
  ref <308>: DATABASE ACCESSION NUMBER: AK073220
  ref <309>: DATABASE ENTRY DATE: 2001-12-06
gaggaggccgcgcgcgccgtcgtcatcgtcgtcgtcgctggcggcggtcgaccatggaggacgcctacgccaagtccgtggccgaggtgctcgcggcgttcggcgtggatccaaccaagggcctctccgatgagcaggtggagcagcatgctaggctttacggcaaaaacgagctgccccaagaagaaagtacccccttctggaaattagtgttgaagcagtttgatgatttactcgtgaaaatattgatagcagctgctgtgatatccttccttttggctcgaatgaatggtgaaactggattggcagcatttttgaaaccatctgtcatctttctgatattagcagcaaatgcagccgtgggtgtgattactgaaacaaatgctgagaaagctcttgaggagttgcgggcttatcaagctgatgttgcaacagtgctgcgcaatggttgcttttctatacttccagcaacggagcttgtccctggagatattgtagaagtgggagttggatgcaaagttccggctgacatgagaacaattgaaatgttaagtcatcaattgcgtgttgaccaggcaattttgacaggggaaagctgttcagtggctaaagagcttgaatcaacttcaacaatgaatgctgtctaccaagacaagacaaacattcttttctcaggtactgttgttgtagctggtagagcaagagctgttgttattggtgttggttctaatactgcaatgggaagtatacgtgatgcaatgctgagaactgaagatgaagcgaccccattgaagaagaaacttgatgaatttggtacttttttggcaaaggtgatagcagggatctgtattcttgtttgggttgtaaatattggacacttccgagatccttctcatggtggttttcttaggggcgccattcattattttaaagtagctgttgcccttgctgttgcagccattccagaaggtctcccagctgtagtaacaacgtgcttagctcttggtaccaagagaatggctcgcctgaatgccattgttaggtctcttccctctgtagagacattaggatgcacaacagtcatttgcagtgacaaaacaggtactcttacaacaaacatgatgtccgtatcaaaggtctgtgttgtgcggtctgtgcaccagaggccaataactgatgagtactccattagtggaactacatttgctcctgatggttttatatatgatgctggtggattgcagctggagtttcctcctcaatcctcatgtctccttcatatagcaatgtgttcagctctttgcaatgagtccactttacaatacaatcctgataaaaaatgttacgagaaaattggggagtccactgaggttgctctgcgtgtactggtggagaaggttggccttcctggttttgattcaatgccttcagccctgaacatgcttaccaagcatgagcgcgcatcatactgcaaccgttactgggaaaatcagtttagaaagatatccgttctagagttctcccgagatcgcaaaatgatgagcgtcctttgcagtcgaaaacaacaggagattatgttttcgaaaggtgcccctgaaagtgtaatggccaggtgcacccatatattgtgcaatgatgatggttcttctgtacctttgactatggacattcgtaatgaattggaagctagattccaaagttttgcaggaaaagataccctaaggtgcttagcattagcattaaaacgaatgccagaaggtcaacaaagccttagctatgatgatgaggcaaatctcacatttataggattggttgggatgcttgacccaccacgagaagaagttcggaatgctatccactcttgtatgtctgcaggtattcgtgttatagttgttactggagacaacaaggtaggtgaaaagtcttggtttaaatttgcactgggatcttggctgtgtacatccgtttggatgtagaggccggtttaatccattatctaaaaaaaaaaattgcactgggatcttttactacttggtgagaaaatgaatatttgctattttagtccactgcagaatccctatgtcggcaaataggtgcttttgagcatttggaggactttacagggtattcttatacagcatcagagtttgaagggcttcctcctttagaaaaggcaaatgcgttgcaaaggatggttctgttctccagagtggaaccttctcataaaaggatgcttgttgaagctttgcagttacacaatgaagtggttgcaatgactggtgatggcgttaatgatgcacctgccctgaagaaagcagatataggaatagcgatgggatcaggaactgcagttgcaaagagtgcttcagacatggtattggctgatgacaacttcgctaccattgttgcagctgtttcagagggaagggccatatataataacaccaagcagttcattcgctactctgggtaaacctggttaccgatgggttgcctgcaactgcgattggtttcaacaagcctgatagcaacatcatgacagtgaagcctcgtaaggttaatgaagctgtggttaacggatggctctttttccgttatttgatcattggtgcctacgttggtcttgctaccatagcggggttcgtttggtggtttgtttattctgaagatggtcctaggttgccatactcagaattggttaattttgattcatgttcaactaggcaaacatcatatccttgcagcatctttgaggatcgccatccatcaactgtttcaatgactgttcttgttgttgttgagatgtttaatgccctaaataacctaagtgaaaatcaatctctccttgccattcatccatggagtaacctgtggcttgttgggtcgattgtcctgacaatgcttcttcacatatctgttctgtatattgaacctctatcagctcttttctcagtgtctccattatcttgggctgagtggaaagtcgttctttatctctcctttcctgtaattttgattgatgaggtattgaagtttttctcaagaagctcccgaggtcggagattccctttaaggttacggagacgtgagatactaccaaaagaatcccgagataattaattttagatctcggcacacatactgagttggacacagcacaatacgggaagcttgacctcttggctgattttggctaatgattatgaacttggaggctgacaaacattgtaggaattttttcatacctctttgtggatgaccacaaactgttattaacgggggcttcagaatacgtttgtctgtaaaaaaacatcgagaagtttcggatgtatgttgtaggatctctagatgttatttatagacagcacattcctatttgtaactaatgcgtacgaaatatgatctatatcaactgtattgccccc

SEQ ID NO: 23084 - DNA, 2155 bp, Oryza sativa
  ref <308>: DATABASE ACCESSION NUMBER: AK073221
  ref <309>: DATABASE ENTRY DATE: 2001-12-06
gaataaacccatcctgtattagcagattggtaatagcagaaggaggtggcccaatcttaaattcttaattcaagtgtctgggcctatttgggcagcgagatatgagtatcaaaagcagcgacgggaagagccccatagtggttggcccttggggtggcacaggaggatacccttgggatgatggtgtatactcaacggtacgccaggtcatcatcacccatggtgcagctattgactccataaggattgaatatgatctgaaaggaagttcagtctggtcagagacacatgggagcaccgatggaggttctgaaacagataaggtgaagctagatttccctgacgaaatccttgtgtctgtaagtggctattacgggtcagtctgtggaactccagttatcataagatcattgacatttcaaagcaatcgttccatatacgggcctttcggtactgaagatgggacacctttctcactcccagtaagcagtggtaaaattattggttttcatggaaggtcagggtcgtatctcaactcaataggcttttatctgaagcaagtgaatgtttcagatcgatcaaattctccagtcttgcctcagagtagaagtattacaagtgcatataacaaaaatggttatagctttcctgagggtgcttcaggatatgacatggtccttgcagtgagagataggggtgacagctatgctgtttatactagcaattaccctaatcagcagtatacaaatccatccccagattacaatgatggaatccgctggaataaggtgccacaaactagtccatcactgcagatggtatcttttcctagtggttacggagatagaggaggtgcagctctgagtagccacgagacctatggtccttggggtggaagtggtggcaccatgtttgatgatggcatgtacaccggtgtgtggcagatcaatttgactcgtgcagtgggaattacttctataaaggtactttatgatcgaaatggccaagcagtgtggggaaacaagcatggattcagtggagctgtttcaccagacaagatagtatttgattttccctcggaggtcttgactcatataaccggctactatggcacgacaatgatcatgagtccaacagtggtcagatcactcacattccacacaaacaagcggagatacggaccatatggggatgagtgtggcacgtatttctccaccagtttttctgatgggaggatagtaggattccatggtagggagggatggtacattgatggcatcggggtccatgttcaggaaggtaacttggttgcaccgcgagttagtagtagatcaacgattgagatgaacccctctttgcgctacgacatgcttgcacaatcaaggagtgaaacatacaatgaggttccttatagcatggtgaaagaaccagttccaatggggccagggccatggggtggcgaaggaggccggccatgggatgatggtgtctacactggtgtgaagcaagtctatgtgatgagaggcacctttatcggctcgatacagatcgagtacgacaggggtgaccaatccgtctggtctgcaaggcatggaaccagtggccacataacccataggattaaactggactacccacacgaggtcctgacatgcgtatacggctactacaacaccaacagggaggaagggcccagggttctgaggtcgatcaccttcatcagcaaccgagggaagtacgggccattcggagaggagttcggggcatacttctcgtcggcgaagacggaagggaaggttgtgggcttccatggccggagcgggcaacacctggacgccattggggtgcatatgcagcactggatgggagacaggaggcctgctcccaagtacgtgctatcaaagtacctcttctgattgagctatggatgaaaacttgaattcctttgaaacaaaaagtgaatacttgaattacatgtagtttagccaatagtcatatagataacagatgggctggtttcgatttgagctttggaggctgtaacattttgggatatggaacagtttaagcctgcggatgagtccgttccttgtactcaggcaggcaggcatatacttaatgcatgacgatttatgagtaaattcaaatgaaattc

SEQ ID NO: 23085 - DNA, 2548 bp, Oryza sativa
  ref <308>: DATABASE ACCESSION NUMBER: AK099334
  ref <309>: DATABASE ENTRY DATE: 2002-08-28
gtatcgtgcgtgtgcgctgcttcttctctcaagtggtggaggggaagaggagcacaaggagaggcagacggcgataagtcgctcgctcgccaattcgccatgatcgggtggggctccgctaccgtacacgccccggaggaagcccaggccccgcccatgctgctgagctcgtgatcctgcgctcctggccacaggctgcgattcggcgttggggtttctggtccgaggcggccatcaagatccgtgcttcttgtcctttggcccgggcggagtggtttctttcttgcacgggacgtgctcgacggaatgcctgtgaggggaattcgctcgctgtgagttgggaggggtggtagctgtgcttgcctgcttggtctggtcatggtggattgagtgcttgggggtggtgggatttggtccctgggcatggccggttcggagaggaccgtggtttggttcaggagggacctcaggatcgacgacaacccggcgttggcctccgcggcgagggacggcgctgtgctccctgtcttcatatggtgccctgcggatgaagggcagttctatcccggccggtgctccaggtggtggctcaagcagtcgctcccccacctcagccagtcactggagtcgctcgggtgcccgctcgtgctgatccgagccgagagtacccttgaggctcttctgcggtgcattgattctgtcggcgccaccagattggtttataatcatctgtatgaccctgtttctcttgtgcgtgatgacaaaataaaaaaagagctttcggcactgggaatttccatccagagttttaatggtgatctgctgtatgagccatgggaaatttatgatgatagtggacttgcatttacaacctttaacatgtactgggagaagtgcatggaattacctattgacgcatcaccgtcacttgcaccttggaaattggtgcctgtcccaggtttggagagtgttcgtagctgttctgttgatgacctaggacttgaatcaagcaaggatgaggaatcaagtaatgctttgctaatgagggcctggtctcctggttggcgcaatgcagaaaagatgcttgaagaatttgtctcccatggtctcctagaatactcaaaacatggaatgaaggttgagggagctactacatcattgctatcaccatatcttcattttggtgaggtgagtgtaagaaaagtatatcaacttgtaaggatgcaacaaatcaagtgggaaaatgagggaacatctgaagctgaggagagcattcacttcttcatgcggtcaattggtcttcgagaatattcacggtacttgtgttttaacttcccattcacacatgaaaagtcattgctggggaacttgatacactacccttggaaagtagatgaggagcggttcaagtcctggaggcagggaatgacaggatacccattggtagatgctggcatgagggaactttgggctaccggatggacacataatcggataagagttatcatttcaagttttgctgtgaaatttctacttatcccatggacttggggtatgaagtatttttgggatgtgctattggatgctgatctggaaagtgatattcttggttggcagtacatatctgggagcctgcctgatggccatgagctcagtcgtcttgataatccagaggttcaaggtcaaaagtatgacccagatggtgtatatgtaagaacttggatacctgaactagctagaatgccgacagaatggattcatcatccatgggatgcaccgagctgtattcttgaagttgctggagttgagctggggtttaactatcctaagccaatcgtagaccttcacattgctagggagtgtttagatgattccatctccacgatgtggcaattggatacagctgagaaacttgcagaattagatggtgaggttgtggaggacaacttgagcaatatcaagacttttgacatcccaaaagttgttttgagggaaacatctccatgtgctttgcccattgatcaaagagtgccccatgctagcggcaaggatcataatttaaagtcaaaggtattgaaggcctcaaatagaagttctatttgtgttgatatgatcaggtcctcaaagatggaagcaacgagctctgtagcaaactcaccggtatcaaggaaaagatccttttgtgagactgcatttcatgtcccatcttattcatcttcagctgaagtgcattcgcatattcaagatcatggtggttccttagttgggccttcaagatatctcctgcaggaagcaggtagaaactatgttgatgaggtagaagatagctctaccgcagatagtggttcgagcatttcaagacaacgaaaagccgcatagttgctctgcttgacaaggaagggtgaaggtgtactcaactaagggtgtgtaggagtaaaacttgtgtgatcataaggaaattttgtacattctgtaatctgtttatttttgctttttgtgacacattctgtaactagctgagaactgagctgacacggtttcctcgccc

SEQ ID NO: 23086 - DNA, 1769 bp, Oryza sativa
  ref <308>: DATABASE ACCESSION NUMBER: AK073222
  ref <309>: DATABASE ENTRY DATE: 2001-12-06
ggggttgcgttccgcgtcgccgtggttgctccggcgagaagcctcgtcgccgtcgcgggcgccgccttctccgccgtgaacgcgcggtgcgcgtggtgcctggaacaggcggcgctcgggcggagctgcacggggacggtcctcggcgacgcggtggtgggcgccatggcgagctcgtggaggctgctgctgcaggggatcacgtcgctggtgttcctgtgcgcgcgtggcgccgacgagtacgtccggccgccaccgagcccgctggtgctcacggcgcacggcaagccggcgtcgcatcctcagcaggtgcacatttcgatggtgggggagaagaacatgaggatttcatgggtgaccgacgacctgaacgcgccgtccgtggtggagtacgggacgtcgccggggaagtacacggcgtcggcgaccggcgaccacaccacgtaccgctacttcctctacaagtccggcgcgatccaccacgccaccatcggcccgctcgaggcgagcacgacgtaccactaccggtgcggcaaggccggcgacgagttcaccctcaggacgcctccggcgaggctgcctgtggagttcgtcgtggtcggcgacctcgggcagacgaagtggacggcgtcgacgctgtcccacatcggcggcggcggcggcgactacgacgtgctgctgctccccggcgacctgtcgtacgccgacacgcagcagccgctgtgggacacgttcgggcggctggtgcagccgctggcgagcgcgcggccgtggatggtgacggaggggaaccacgagatcgaggcgctgccggtggtggggatcgcgccgttcgcggcgtacaacgcgcggtggcggatgccgcgggaggagagcggctcgccgtcgaacctctactactcgttcgacgcggcgggcggcgcggcgcacgtggtgatgctgggatcctacgcggagttcgaggaagggtcgccgcagcgggcgtggctggagcgggacctcgccggcgtcgaccggcggcggacgccgtggctgctggcgctggtgcacgcgccgtggtacaacacgaacgaggcgcaccagggcgagggcgagcggatgcgccgcgccatggagagcctcctctacgaggcccgcgtcgacgtcgtcttcgccggccacgtccacgcctacgagcgcttcacgaggatctacgacaacgaggctgacagccggggcccaatgtacatcaccattggcgacgggggcaacagggaaggccttgctctcaagttcatcaaggggcacaagtcggcgcacctgtcggagttcagggaggcgagcttcgggcacgggcggctgagggtcctgaacgagacgagcgccgtctggacgtggcaccgcaacgacgaccagttcgccaccgtccgcgacgaggtctggctgcacagcttggccgccggcgagccagctgctacagtagcctccgccgccggcggcggcggcggccatccggccgacgagctgtaggctatatatatctcacactgttaagaatgaatggaagaaaaggaaacttcaccacatttagcattgtcttttattttttttctttttcatcagccataaacattgtccatttgtccttgtaaatcaatcgtgatatcgtgtgtttcagctagtgtacagtgtttttcttgtgttagacacgtggtgaaatagaatttcagtgtacaaggccaacactgatgggctcatcttttcgcttatactatttatacttatcatcc

SEQ ID NO: 23087 - DNA, 1321 bp, Oryza sativa
  ref <308>: DATABASE ACCESSION NUMBER: AK073223
  ref <309>: DATABASE ENTRY DATE: 2001-12-06
gtgacaccggagagactcaccgcggcagagttgagtactcgccgacgacgaggccggcggctgcgcgccacctcgccgtttccctctccgccgcatccacacgacgacacatggcctccgccgccgccgccgccgaccccggcgcggcgtacaagctcctcctctcctgccccgccggcctccccagatcccgcgtttcggttaaatttgatcagtcattcgatcggattccccatccggatgcagccttggaagaatcaataagtgtgatatggaaccagagacttaagcagaacccgtcgtcgtacagcggcacaaaatttcggtatggaggacacgctgtgcactacaaagatgaaccaaataaggagtattgtgtttcacttcatttgggtctcacagattacagcacatttgtgggaacaaatcttaatccattgtgggagaaatttttggtcccatctgaagatgattctgtgcattgccaacacatgtcgaatccactgggaaatggtgcaattgttcaaacatctgatgaaaagatcatcgtattgcaaagaagctacaatgttggggagtttccaggttactttgtttttcctggaggacattccgagccacaagaaattggaatcttggcacatcaaactgatgaaaaggaccttgctgttctcaacgaaagagtttcccaagagatgtttgatggaatcatccgtgaggtagttgaggaaactggagtgccttctaattcactgacagagcctgtcttcattggaatttctcgccgggagatgaatgttaggccaactgcattcttttttacaaaatgcaacatagattcaggtggagtgcatgaattatattctagagctcaagatggttttgaatctacaaagatgtatgcagtctcagaggaagagctactaggaatgaccgaccgaatgcctggttgccaccgtggtggctttgctctctatgaaatgatgaagactgctgccaaaaaatcatgaaaatgaacaatagtgatattgaattcttctctaatatcataaaataaacagggagagagattggcgtcacaagaaaacaatacagtagttactccttttctctggagctgatgcattttctttccccttgttgcactgagagtttttcagtacaagtgcggaagaaataagttcttatttacattctcaatttatttttttatttttttatcctacattctcactttgttgcttggaattgatgttgtaattgagaccatcgcactcgtgacatgatttctatctaatcaaaattctttcagtttcagatg

SEQ ID NO: 23088 - DNA, 1465 bp, Oryza sativa
  ref <308>: DATABASE ACCESSION NUMBER: AK073224
  ref <309>: DATABASE ENTRY DATE: 2001-12-06
gtttcgagcgggacgtgctcatgtcgctgcgacacccgctgctcccctccctccgcggcgtcctcgccaccgacgccgtcgtcgggttcgccatcgaccgctgcggcggcggagacctcaactcgctccggcgccgccagaccgagaagatgttctccgactccgtcatccgcttctacgccgcggagttggtgctggcgctcgactatctgcacagcctcggcatcgtgtaccgcgacctcaagccggagaacgtcctgatacaggacagcggccacatcatgctcgtcgacttcgacctctccacgaggctcccgacgccgccgccgccaccggaggagcaggacgcaacgattgctgattccatgccggagcctccgcccagttcaccgtccccgaaccgcgcgaagggcaagaggcaaccgggggcggcctcgtgcttcccgttctgttcggtcggcgccacgaagccggccgcgtcggcggactcgccgtcgccaacgtccacctcgcgcacggcctcggcgtcgtcctcgtcctcatcctcgacggccaccaccgcgtcgtcctccaccgccgctggcgtgcggtcgccagcgaagtcgaactcgttcgtgggcacggaggactacgtggcgccggagatcatcgccggcagcgggcacgacttctccgtggactggtggggcctgggcgtggtgctctacgagatgctctacggccgcacgccgttccgggggctgaacaggaaggagacgttctaccgcgtcctctccaagcagccggagctcgtcggcgagaagacgccgctgcgcgacctcatcgcccgcctcctggagaaggaccccgagaagcgcatcggcgcgcgcgggatcaaggcgcacccgttcttcaacggcgtcgactgggaccgcatcctccgcgtggcgcgcccgccgttcatcccgcccccgccggaggacgaggacgaggccggcgaggtgctcgacgtcgagaaggtcgtcaacgaggtgttcgcggccaatgacggcggggccgcagcgggtgtggtggagaagccttcgccggaggcaggtggaactctggccgtcggcgatggcgagcagaggagagatccgtccaaagaaggcgatttctccgtatttttctgagcgtatttattgagttcttttttagcgttctctctcttaaaaatggaaaattacatagctattttggttttttctatggactagaattattatgggggtctctattagtaatagacataattaagacaaagtacggcgcggtggagtacataaatcgactttgctcttgtgtttaatggagtacagtctgtatagtatttttcccctttcccttttattttcttctttgttggatacatttcctcgtgcaacgatgcaagctaggggattactgaagagtgtacataaggaatgatgaacagcaaaattggcct

SEQ ID NO: 23089 - DNA, 2632 bp, Oryza sativa
  ref <308>: DATABASE ACCESSION NUMBER: AK073225
  ref <309>: DATABASE ENTRY DATE: 2001-12-06
ggcctgagtcgcctctccctcccgagtctcctctcctctcctcctcctctcctctctcgtgctctcgcaaaaccctagcccacctccccctccacccacatgcaccgcggcggcgaccgctccaccgacccctcctccggccccgcgcccggttctcgcggcggcggggacggccgattcggccgcggcccttctcgctggtcgtccggcggtggcggcggcggtagcggcagcccaccccaccgcttctcccgtggtgggggtgggggcggcggcgacggtggcggaggcggaggtggaggcgggaggttccacccgtaccgtggcccgtcggaccactccggcggcggaggctacagaagcggcggcggcggcgagtacggggagccgggtagcgggccgagacaccgctacggcagtggccgtggtgaccactcagatcatgataacagaaacaactatgttaaactttttattgggtcagttccaaggacagcgactgaggatgatgtacgtcctttatttgaggagcatggagatgttgttgaagttgctttgatcaaggataggaagactggtgaacagcaaggttgttgttttgttaaatatgctacttctgaagaggctgagcgagccatcagagctcttcacaaccagtacactttacctggggcaatgggccctattcaagtcagatatgctgatggtgaaagggaacgccatggggctattgagcacaagctgtttgtcgcatcactcaataagcaagctactgcgaaggagattgaagagatttttgcgccgtatggtcatgtggaagatgtctacattatgaaagatggcatgaggcagagccgaggttgtggctttgtcaaattctcatcacgagaaccggcgctggcagccatgagtgctctgagtgggaattatgtaatgagggggtgcgagcaaccattaataattcggttcgctgatcctaagagacctagacctggaggatcaaggggtggtcctgcatttggaggtcctggtttcagtccacgatctgatgcagctcttgttatcaggccgaccgccaaccttgatgaaccaaggggtcggcatatgcctcctgactcttggcatccatcaagcccaaggtcagcacctcatcagtttaataactttggatctgacaatcctatggctccgaaagggagtactgttacatcaacaacagatacggccacttttcgacctcagatgttcagcggaaatggctctttgtcaagccaaacagctgtgccaagttcgtcacatatgggcatgaaccctcctcccatggcacaaggccatcatctgggaggccagcagatcccacctttgcaaaagctaccagggttgcctcagaatttccctgttcaattgcagaataatcagctgggacaacccttgcagggtcctgctcaacagattggtcagcttcaagttccacaatctatgggtcctggttcttttggccagaataggttatctggtcagcttcctgtgtcacagccgttgatgcaacaaaatgcttccgtcagcgctgtgcaggtgccttcagccgtgtccaattccatgcaagctattcccgggcaacagcatcttccctcaaatgttgcaccacaaatgcttcagcagccagtgcagcagatgccatcgcaagcaccacaattgctactccaacagcaagctgctttgcaatccagttatcaatcttcacagcaggcaatttatcagcttcaacaacagctgcaactaatgcagcagcagcagcaatcgaatctaaaccatcaacaacccacacagggtcagccagtgcaatctagtaaccctggtgccccaaatgccattattccatcaaacattaatacaattccccagcaggctacttcacctgcagttcctttaacctgcaattggactgaacatacgtctcctgaaggttttaaatactactacaatagcataactcgagagagtaagtgggataagcctgaagagtatgtgctgtatgagcaacagcaacagcagcagcaacagcagaaactacttttgcttcaacagcacaaacaaaaacttgccatgcagcaacttcagtcaccacctcaggctcagacacatccagcaatgcaacctgtccaacaaattcctcaggcacaacaaggacagcaacaaatgcagatgaaacagcaggaattgaattatactcagctacagactcctggtgctattgatcccagtaggatacaacagggcatccaatctgcacaagaacgtgcttggaaaagttgagactgaaggtgaatgataaattggtaagctgttactcggaaatgagctccactcaacctgctgcctccatcaaatgccttgacggtgcctgatgcctgagtggtggccaagcggccatgccgatcgttgtaactctggatatagcttagattgatgtctaaaaagttgtagctccaatccgtgtaaaatgtttgcagtctaggccttgtaccgctgtaacatttctgctgattagaatgttcgctttccttgcataggcaactgccagaggttcgtcgctagtatgattttgggcatttcatgacatgtccccagc

SEQ ID NO: 23090 - DNA, 558 bp, Oryza sativa
  ref <308>: DATABASE ACCESSION NUMBER: AK073226
  ref <309>: DATABASE ENTRY DATE: 2001-12-06
ggttccggttaaatatttaggttcatggtgagctcgcagcggtggatccagcagccccaataaaagaaatcaggtgttgcgcatggcggaccaagatcggccgcccatgggagattgtgctctgcatctacgacttcccccaacatcgccgttctccatgtacaaaacaattccaattcaatcatgtcctccggcatttgttcttgatacatcaaagaaaattgtctattttggatagagcatgttcatcccggcctatcctctctagctgggccacatgatggaggcaccggacgtcaccctccacacctagtatatgcaagaaacaaacaagaaatcattttttgagggtgttcttctagatgcttataagtgattgcaatttttcttccagtggaatcaaaggtgtgttttagggttataagtggttgcaatttttattgttcctgtgcaatgcaacacttaataacaagtgattggatcatagggttgctgcttgcaccattttgtattgctatgcttgtttctctcccaacacaataaccccttatggaattc

SEQ ID NO: 23091 - DNA, 2264 bp, Oryza sativa
  ref <308>: DATABASE ACCESSION NUMBER: AK073227
  ref <309>: DATABASE ENTRY DATE: 2001-12-06
gggtagcaagtgagcgcggggagagagacagaagccggcggcggcggggcgagatggggaagaagcagaagaagcccaggaaggggaaggagaagacggagcggaagacggccaagggcgaggagaagcgcgcccgccgcgaggcccggaaggtcggcgaggaggacgacatcgacgccatcctcaggagcatacaaaaggaggaggctaagaagaaggaggtacatatagatgagaatgtccctgcaccatctccccggtccaattgctcgcttacaataaatcccctgaaagatacagaattggttctgtatggaggagagttctacaatggcagcaagacctttgtttatggtgatctttatcgctacgatgtagagaaaaatgagtggaagttggtatctagtcctaacagtcctcctccacgaagtgctcaccaaacagttgcctggaagaataatatatacatgtttggtggggaattcacttcgccaaaccaagaacgttttcatcattacaaggacttttggtcattggatctaaaaacaaatcaatgggagcaaattcttgcgaagggttgtccaagtgcacgttcagggcacaggatggtcctctataagcacaagatcgtgctatttggtggtttttatgacactcttagggaagtgagatactacaatgacttacatgtttttgatttaggtaatttcaagtgggaggagatcaagcctcgccctgggtgcttgtggccaagtccaagaagtggctttcagctaatggtataccaagatcagatatatctgtatggcggatattttaaagaagtagtttcttctgacaaatctgcatcagaaaaaggaacagttcatgcagatatgtggactcttgatcctcgtacttgggagtggaataaggttaagaaaactgggatgccacctggccccagagctgggttttctatgtgcgttcacaagaaaagggctgttcttttcggtggtgtggtagatttggaaattgaaggggatgtctttatgagcatgtttatgaatgagctctatggtttccagctggacaaccatcgctggtatcctttagagctcaggaaagacaagcctgctaaaaataagacaaaggacatcaaaagaaaagaaccatcgaacaatgtggaagataatcttggtaatgaggaggatgagatcatggaggactcagaaactactggagggcaatccgaagtccatggggtttcgaatcacttgaccaagagtctaaccttaaataaagctggctcaggcaatagctctgatattctctctgattcgacaacacaagaagtactcccagaggcagtgaaacccggtggtcggatcaatgcatgcttggctgtagggaaagatacactctatttatatggaggaatgatggaattgaaagatagagaaattactcttgatgatatgtattcacttaaccttagcaaactagatgagtggaagtgtatcataccggcatctgaatctgaatggctagaaatttctgaagatgaggatgatgaagatgatgatgatgatgataatgagaatgatagcgaggatgacgctaatcagaccgatgaagatgatgaagagtctgatgaagatgccgagaagaatgtcgatatgtccactgctgtatcgctaataaagggtgaacgtaagaacttgcgaagaaaagagaagcgtgctcggatagagcaaattcgggttatgctcggtctttctgattctcaaaggactccaatgccaggagagtcactaaaagatttctacaagagaacggatatgtactggcagatggctgcatatgagcacactcaacacactggaaaggagctccgcaaagatggttttgatcttgccgaaactcgatataaggaactgaaacccatactcgacgagctggctgtgctcgaggctgaacagaaagctgaggaagaggctagtgcttccactagttccaagaaagacacgaggaaaagcaagcagaagagtggcatgagatagctttggttcgaaatatcgaaatagagagtggtttaggccaatgctttaagccatctgggattttttcctttctgagccattggtcagctcggtcgattaatccacacgaggtgcctataactacctgtgtaggttggcttaatccatggttaaaattttccaacgtactgtatttgcgattcctcggaagcattcatggagagattgtacacagttctatcc

SEQ ID NO: 23092 - DNA, 1221 bp, Oryza sativa
  ref <308>: DATABASE ACCESSION NUMBER: AK073228
  ref <309>: DATABASE ENTRY DATE: 2001-12-06
gggcaaccacccaagaaaaagaaaaacagaggagtcgaagaaaaaggatagcttcagtaaagcctagcaaagcgcccatcagaaaccctagcaggagcgccgccgccgccgccgccgcccgccgtcgtcatcctccctctcgccctttcaggtccccagcccgccgcgccgcggatcgagtcgccgtgtgaagaaggccagcgtcaccatggcggacgaggagcaggtggagaggaaggaggaggtctccgagcttactccttttgacccaaccaagaaaaagaagaagaagaaggttgtgatccaagatccatctgatgaggtggataagttggcagagaaaactgagagcttgacagtcgctgagactggtgagccaagttttacaggcatgaaaaagaagaagaagaagcatgtggagcatgatacatctcttactgaagctggagatggtgaagatgctatagatgatcaaatcggagaggatgaagaaggagaagggattgtgcttggaggtgcaactcgatacccttgggaaggaactgacagagattataaatatgaagagctgcttggcagagtatttaatatcctgcgtgagaataatcctgatcttgctggtgatagacgaagaactgttatgaggcctcctcaagttcttagggaaggcacaaagaagacagtttttgtgaacttcatggatttgtgcaaaacaatgcataggcaacctgaacatgtgatgatgtttttacttgctgagatgggaacaagtggatcccttgatgggcaacaaagattggttataaaaggaagatttgctcctaaaaactttgaagccatacttaggagatatatcaatgagtatgtcatatgcaatgggtgcaagagtcctgataccatcctttctaaggagaataggttgttcttccttcgttgcgaacagtgtggttcttcaagatctgttgctcctatcaaggctggattcgttgcccaagttggtcgtcggaaggctggaacctaagttaaacgtccaccctgctcagagcctcggatacactccccaatcatcgctacaaaaacctaatttgccgatttacaacaattattgtccagttttcactgtgtctacaccgttttgtgtatttgtgaccgtaactctgcttccaactctgctgtgaatttcagttttatccgagaccatgaggatcaatgtttgcggcc

SEQ ID NO: 23093 - DNA, 3324 bp, Oryza sativa
  ref <308>: DATABASE ACCESSION NUMBER: AK073229
  ref <309>: DATABASE ENTRY DATE: 2001-12-06
gatcggcgcgaccgcgcatcctctcccgcatctccctctcttccgcattcgccgtgcctcctccgcatccctcccctccgcgtcaggatcgagcgccgcctcgcgcaggggttcaccggcctgctgcaggcgcagccgccgcagttcccgtggccggcggcgtcgcacaagcggattcccttcgagatcgacctccccgtggtccccttcggcgcctcccggggtgcccgggccgggaaggagttcttcctcgccgcggccgtcgcctccatcatcgacatcggcaggaggccaccggcgccagggaggtgattctgccactccgcgcctcaccggtctccactctccatctcgccgccgccaccacgtccgccctctgccgcagatagaggaggccttgatatgtcagttaccggattcatggccattgttccacaccctaggaattatttgaagggcaatatttttatgaagcttaaagattgaatttgaatccatctgccctggcttgaagtacaatccaaatattatggtatatcaacagcagcttcagtctgggacagagcaatacaaggtcctccctgtaagtttagtatgaacagtgcaatcaaatttataagtcttccctatcaaaatttcagtatagccccatttgtgctggtctgattaattatctttgaaatgatattctgctttgagattaaattacatgtaactaacttgctttgataccttcacaagtcgtgaaatggtttagctgtacttccatgtttgggttacttgtgtaatatttggtaggctataaacccattcgttgtgcctttttttttattatattgctcaataaagatagtcaatcaatgtgttgtaaataataagggaattggcttgtatcatttgtttcttctatgctcaagatcctgaactgttgtgcatgtatcatttgttgccactgagtcattatttggattcatcagagaacatccatcattttgattaccagactatggactgatttatgccatgcttgctaattgatagagggacatttgctacttctgcatataggacagataattaaactttttgtgcgctgaaatgctctttgtacggtgagtatatgacacgctaaagatgactgaaattaaacttaggatacttctgtttgcaactataagacatgagttcttttgctatatttctggataggtggagtaggttttatttttaagagtttggtctgtggattttcgtctgccgatgagtctccaatgtttgatacagtgtagcccatgagcagctgctgttttctgattttttttttcaaggtaatgtagctgctttgtgtatatgtgtttgtccaatagtgcctgccattccctttggatggtttgcattgcagatgaattacgattgccatctcatgttgctatggcactatgctaagtgaatcttgttcacttcctttattcaagcacaaggaatttatgtatgttcattatgaaatctgtaagttagataatgaacatacataaattcactagctgttgtgttatcacattgattgtaacatcaaaacaatcaactactagaaaatactaaagtttctaaatggttatcagaacacactggaatttttttatgggcttactgttccacactgcattccttcacaattgaagtttgccatctcttatggcactcttttagcttgataatctgaaaaaatagatgactaaatctatagtttccttttatccaggaggagatttggcttttcagtatgcttcagtaaggatttagcagatggcaatctttgctggtatgtagagtatttcattaggctaatcgcctatttgttgatgatcataattggcacataaattgataaatttgtattgatgattctactcattttaaatgttatatggtagcatcctttgtttgataaggaaaaatcagtgttctttgcatattcaattagagaagagcatgaatactgttgttactctaggaagaatgcttatattatgaaaggagcgctaacattgcgttgagaaaacaacaggtgatgttatctttttctgatttccttatattgcagtctgttagcaaggagcatcaagagttcctcggccttgtcgacaaagagattgaattatattatatactaatggaattccgccggcggtgtgaggcccactcagagtaggatttggagggtgcagaactgtttttgcattgccaatgaaaggaggaagaccgcctcaaagagccttgtccccatccaccaacatggtcatgataatcgttgacatcgaccaagatctctccagggtaagtagaacagcactaaaattaggattagcatttctagacaccatgttatttcagaaattgattagttggaatcttgtattcattttgctagcctgagtgcctaacttagtggaaatatattggaaaagtttctccatggcagattgaggctgttatttcctgtagatttaggtttcgctgtaaatactgaacaattattgcaattttctatttgtattgagtacttgggtggttctttctatcaaccaaatcaatttttattcatcagtgtagactctttgaactgcaattgttgtgctgctgatatgtgttatgtaggctgcagcagaaggtcaattttcccttttgtgaggtgccataattttgaaaatatgttaattttgtcaattgcttgatattaagtggagtatctcctttgtatgcaccaaccaattttggagctccagacaatgaaacgatagcttcataatatccatgaaaaagtgctattggatgaatccagtaaagatgtgttttctctggcattttgaatattgaagtgtgctgatgactttgtaattactaataatgatgcaatgcataaattctatggccggttctgttacttctttttatttggacgtaatttgcttgaaagatttttgatgtggctaaaggagaaatttttttaaggcatttggtttctcaggagtttaggagttggaaccatgcaaacatgcctcatgctaatgtcttcctgagctttcagaaatcgaagttatttctagcttaagatgatgttggagctgatcctggtgctgttagagaggccaatctattcaggtccagcagtttacatcaagatgatgttctttctagcgatgcatgtagtgaccattgatgtttcgattgcttgaggcgaccctctttgtaattgtgaaaaatgtggtgttatgaaacaaaaatatagatttacatccaggagataaaattattttattctgt

SEQ ID NO: 23094 - DNA, 1934 bp, Oryza sativa
  ref <308>: DATABASE ACCESSION NUMBER: AK073230
  ref <309>: DATABASE ENTRY DATE: 2001-12-06
gaggccgccgccttcctcgcccgcttccccgacgccgaggacgacgccctcgacctcctcctcgacgagctcgacaaggagccgctgcagtcgtcgattcttgaccgggacgcggtgcggcgcgtggtggcgctgctcgtcgaggcggacgaggcggtggatgcggcgtctccggcggccaccagcgcgcgctcggcgctgcgggtggtggattcgttcgtcgtgccaaggttccactacgatccgatcaagaaagtcttctacgagcataccagcagattagccatacatggagaagctggagataaagcagccctgtacagggacaggtatcaggttctgcttcagaggctagctcgtgatatatacttctctaagccagcttttgacactgttatgaccgaagatgataattgtgagataacttctattcagtccctaattgggtgcactggtcggagatggattatgggggtcatatcacagttggaggaacgtcaattctacttggaggatcttactggagctgtgccaattgacttatcgaatgctaaaatcacttcaggtttcttcgttgaaaatactgtaattgtagcagaaggggaattgctttcaaatggcattttccaggtaaatacatgtggattccctcctttagaggatagagaagcatcactttcgatgcttatggggctagatttcttcggtggaggtgtcataccaactgaagaaacagtaaggctatcaaccttagagaagaaggccatgaatgatatgtttgttatactttcagatgtttggcttgacaattatgagaccatggagaaattaggtgttgttcttgatggttatgatagtctagaagcagttccttccctttttgttttaatgggcaatttctgctcccggccctgcaatctggcattcaattcatttgaagaactcagattgcagttcggaaagcttggtgagatgattgcagctcgatccaggttaaaggaacacagtcgctttttgttcattcctggtcctgacgacgcaggcccttctaaagcccttccaaggtgtgcacttccgaaatatctaactgaggaactgcagaagcacatcccaaatgcaatattcgtaagcaacccttgcagggtgaagttttatacacaagaaattgtatttttccggcaagacctcctttataggatgcggcggtcttgtctgattcccccaacaacagaagaaacaagtgaccctttcgagcatctggtagcaaccatcacccatcagagtcatctttgcccattgcctcttacagttcagccaatcatatggagctacgatcattgccttcgactctatcctactcctcatacgatagtactgggcgacaagagcgaccagaaggccttcaaatacacaggaataacttgcttcaaccctggttcttttgctaacgatagcacctttgcagcttaccgtccttgcactaaggaggttgagctttctgcattagaaagctaatattaaagagatcaaaatgaggctcaccaatttggccaatttggtagcctgtaccatccaaactagcattctccaaatcttcgatgaactgcctatcgccttggacatcagcctgatatttatgacttggacatacaagttaaggtggaggccattttcatgcaagctaattcgaggagatgacataacatgcatgacgccatggttggtgtttctctcaagcaaactgatgctgacatttagatggcatcatggtagtggttttcttataacaaggattgaaattatacttagcatagcagaatatttgtgatgtattttgcttaagccattctactttgaaatatctaggcttaaattgttgtaaaccaaggtaacaaaagtgctgctttcttgttccttcaaaggtttaatctccc

SEQ ID NO: 23095 - DNA, 2862 bp, Oryza sativa
  ref <308>: DATABASE ACCESSION NUMBER: AK073231
  ref <309>: DATABASE ENTRY DATE: 2001-12-06
gatcctaattcctaaaccctaacacggaaagccagctctcatctccaaactaatcaggcccatggtaacatctgcctctatcctttactttgtgattaatccgtgtgatgtgcccagtgattttgatcatctaggaggttttttagggtcggattttgggttcatggtgtatttttgagggtttcatgggggacttttgatccggcggggtcttattcggattttggcatttcccgtgcgatgtttcagtagttttgatccgctttcttttggtgccccttgtggaaatttgacggttcatcgggtatccgcgagtccttgcgatgtgctagtggttctgatgcggtgaggtttttagtctccgtatttttgagtacattggtgaatcatgtgtcagtggtgttgatccggtttggtatctgattttggtgttcgttgtggaaatttgagggttcatcagggtccgctaggtttttggttcggattttggcatttctgccttgctttgcgatgcaatccgtgtgatgtgctagtggttttgatgccgtgaggtttttagtctccgtattttttagtacattggtgaatcatgtgtcggtggtgttgatccggtttggtattgaattttggtgttcgttgtggaaatttgagggttcatcggggtccgctaggtttttggttcggattttggcatttctgccttgctttgcgatgtaatccgtgtgatgttgctagtggttttgatgccgtgaggtttttgtgtcggattttggggttcttgatccggttctcaaccaaggtctcgttcctttattatccgaatcaatgcgatttgctcttagattttctttttaggattttgggtgttcaactgggattttgatacgcccaggtttctgtgttcggacttttgggttcatcggaggtggcaggcttggcagaacggccaactactgagattttagctgtgaagattgtctcatcttagatcccaactcgattatgtgtgtttaagggtgtacccatatttgtttggtttgattatttactatccaactggatgacatgagaactttcataagtcatgccctttttacattttgtgttgtttcattgcaatatccttgtaaaaatatgtcgtggcactctcatgtttaatgagatttattgttggtggctgattgctgtttcccttctttttccagagccgaagacctctagttggctttagcaatgtcatcaaaaagctcgccaagggaactgactggaaagaagaaactgactaaacatgacgatgaagcattaaggtttattgagctggctgagaatggtaccgaccccgcaactatcgatgcatccgaaggtatgtagaacctaccatttacattgtcattaccaccttttttttctgtttcttaacagccaaggtatgcagaattggcaaagaagccgttatgcacttacacatataggacactttttcgcacttttaactacaaagggatgcatgtgctgcatcactctgccaagggtgcacatgttactcttactcatcatttagtggagtttttgggcattgatgttgacaaaaaggatagcacaggtaggacgattcttcatattgctgttccgagaaacagcggagggtatttgggccatgtccttgcaaagcttgaacctagcattgacatgaaagataatcttggattaacaccgcttcagctatctattcttcttggcaaatatgctgcgatgcaaaaattgatagactttggggctgacattcatatccattctctttatggaggaccaattcacgcagcagtagcactggatgatgaaatggctcttgaagctcttatgagaaagaccaatacacgtcttttgctatgatgtgttttcacataatatgaatctagtgttttcacataatgtgtctttattaataggtggatgatattattgatggaggtataacacccttagcatgtgcggcatacaatggttcagttaaagcatgaaaacgttggtgcaggctggagctaatgttcagatttcaaagccaatcggcaaagctatagtagctgacctcacttcatctgaatctatggttcagattctacttgattctggtgctaatgcagacgcaattgatgaggtcatgtttgaggacccacccatcattgctgcagccaaaaggaaacagatgaatgttgtccaacttctattgagttcttccaccccccatcgaaggtgttgactggagcttgaatggtataatagcatatacagaatctgttacgtttaaagcagaggacgatgtccatacagcagcaagagttactgcgctgcgtgagcgcatgtttaatgctttggaaaacataaactacttgctagctgatatttgctgtaaagcgctgagaaatgatgtgagtacaacagagtgggacaggttgaggaatctcaatctgctttatctttcacacagtttccatggtcagaaacctgtcctgtcatctgacgccattgttaatatggccttggtttatcaaaaacaggacaagggcaaggaggttatgtgtttgaaggcagcgttggcgctgaaccctcaaaatgagagagctgaaagtcttttgaggtaagtttgttaagcctttatgtgcttgaccccttgcaaaaaatttgaagtggaagtggggtaatactgttaagccttttggggtaatactgttcctcaaatggaagtgggacagagaggctctcttttatataaaacaaatttttgtttaatctgcatgcaaacagctgacagattaattcttcagaaatgaatgaggcggctgaagttggatttcaacctct

SEQ ID NO: 23096 - DNA, 1378 bp, Oryza sativa
  ref <308>: DATABASE ACCESSION NUMBER: AK073232
  ref <309>: DATABASE ENTRY DATE: 2001-12-06
gaagcgaattaagcacacatcaattgaccaaacctatctctctatctctctcgagctagcgagctctaggtgttcgacaccgaacaaggcagctagctagtggcgatggacggcggccacagcccggacaggcatgcggcggcggcggcgggggagccggtgaggtcgcggtggacgccgaagccggagcagatactcatcctggagtccatcttcaacagcggcatggtgaacccgcccaaggacgagaccgtccgcatccgcaagctgctcgagcgcttcggcgccgtcggcgacgccaacgtcttctactggttccagaaccgccgctcgcgctcccgccgccgccagcgccagctgcaggcgcaggcgcaggcggccgcggccgccgcctcgtcgggatctcctccgactgcttcgtccggtggcctcgcgcctggccacgccggctcgccggcttcgtcgctcgggatgttcgcgcacggcgccgccgggtacagctcctcgtcgtcctcatcgtggccgtcctcgccgccgtcggtggggatgatgatgggggacgtggactacgggggcggcggcgacgacctgttcgccatctcgaggcagatggggtacatggacggcggcggcggctcgtcgtcgtcggcggccgccggtcagcatcagcagcagcagctctactactcgtgtcaacctgcgacgatgacggtgttcatcaacggagtggcgacggaggtgccaaggggaccgatcgatctgagatcaatgtttgggcaggacgtgatgctggtgcattcaacgggtgctcttcttccagccaacgagtacggcatcctcctccattctctccagatgggcgagagctacttcctggtcacgaggtcgtcttgatcgagttgagcgattcgtcgattgattgatcgatggcaacgtacgtattgtgtcagcaagatttaggtaccccttgtccgttggatcagatcgatatgcaagcaacgcatgctttgcaggtgccggccggttaattacgcgatcgatcgagctagcagatgatgaatgctgcacgtacgcatggcaattgtcactgcgacgagcctgcatatatatgaacgatccattgatcgtcattctagcgaccaagcagcacgatagtacaagtatatactatacaatgcaattgcagcgacgaactagttaattataatacagataatgcatgtgtacttctgtggccatacatatatatatagagagagaggggattaattactatattcgtttttcatctagctggtcgatctctgtgtgtacttgtatgtatcccgttctcgatctttatatcagaatattttatatatgtatattttacaattat

SEQ ID NO: 23097 - DNA, 1159 bp, Oryza sativa
  ref <308>: DATABASE ACCESSION NUMBER: AK099335
  ref <309>: DATABASE ENTRY DATE: 2002-08-28
ggctgctgcttccgatggcggcgcctccgcttccccgcgcccccgtctcctcctccgccgccgccgcgtcgccggggggccgcgctctcctcctcctccgcgtcggcggaggaggttccggaagatgcgctggcgtggcggcggcggcggcaccgggttggcggcggccgttcccggctgcctccgtcgcggcgcgctcggctggtaccacgccgggagaggtcgccgtcgatcctaaggtcgaagcaatactagacagtgtgaagtgggacagtaaaggcttggctgttgctattgcccaaaatgtggatactggagccattctcatgcagggtctgccaacaaagaagcccttgcaacaactatatcaaccaggaaagctacattctatagccgttcacggtcttcattgtggacaaaaggggagacatcaatgaatttcatcaatgtgcatgacattttcttggactgtgaccgtgattctataatataccttgggaagccagatgggcctacttgccatacaggggcagagacttgttactatacttcagtctatgatgctctacaaggttcgaagcccaatcaagataggcaggttgtctcaactctgtactcacttgaagatacaattagtagacggaaggaagagatagttactgaaggaagtggcaagccatcatggacaaaaaaactaatacttgataaccggctgctttgctcaaaaataagcgaagaagctggagagctaaaccaaacactgcttgagaacgaggacgagagccgcacaatcagtgagatgggtgatttgctataccacgcgatggtgctgcttagggtcaagggcgtgaggatggaacaggtcttggaggtcctcaggaagcgattctcgcagtctggtattgaggagaaggccagtcgcaacaaatcttaggatattactcacagagtggatgggtttaccagtttgcttatgtcgtatcggcattggtgccaagtgtgtaccattgagtagtttggtcttcttaattagaccgaaggttgtgaattgtgattatgctttaattgttctccaataagacactgagcaaatacatgtctggaatttgcagtgctgttcttgctgtcgccaataaaataataaaatcagctcataagt

SEQ ID NO: 23098 - DNA, 2341 bp, Oryza sativa
  ref <308>: DATABASE ACCESSION NUMBER: AK073233
  ref <309>: DATABASE ENTRY DATE: 2001-12-06
gggaaatcgcaagaaggcacgtcccccttctagaagcttccgctagcttcccatcggcgcggggggaatggacgacgacgacctcggctacccgcccggcatggccggcctggacgcgatggccggcctcggtggcctcggcgggatgggcggcctcggtgggctcggcgggatgggcggccttggtgggctcggcgggatgggcggcctcggcggactgggcggcttcggcggcgggggcatggaggacctgtacggcggcgggggaggtgcggggggggaggagggaggggaggggccgtacgcggcggagatggaggtcggggaggagaaggagatcgggaaggaggggctcaggaagaagctggtgaaggagggcgaggggtgggagcgccccgacgccggcgacgaggtccaagtgcactacacggggacgctgttggatggcaccaagttcgattccagccgggatcgcgatgctccgttcaagttcaccctgggccaaggccaagttattaagggatgggatttgggcattaagaccatgaagaaaggtgagaatgctattttcaccattccaccagagcttgcatatggtgaggatggctcccctccagttatccctccaaatgccacgctgcagtttgatgtcgagcttatctcctgggaaagtgtcaaggacatttgcaaggacggtggcatcttgaagaaggtactagctgaaggcacgaagtgggagaacccaagagaccgcgatgaagtttttgttaagtatgaggtgaggcttgaggatgggactgttgtagcagaatctgatggtgtcgagttcaccgtgaaagatgggcatttctgtcctgccatatccaaggctgtgaagactatgaagaagaatgagaaggccctcctcacagtcaaaccacaatatggcttcggtgagcaaggcaggtcagccgctagagatgaagctgcaataccccctaatgctacattgcacattaatcttgaattggtgtcctggaaggcagtcactgagattggtaatgataagaaaatcctcaagaagatcctccatgagggtgaaggctatgagcgtcccagtgattgcacacttgtcagagtgaaacttattggaaagttagaggatggtaccatatttgtcacaagaggtcatgatggtgacgagccattcgagtttaagactgatgaagaccaagtggttgaagggcttgacaaagcagtacttagcatgaagaaaggagaagttgcattggtgactattccaccagagtatgcgtttggatctgatgaaacaagacaagatttgtctgttgtccctcctaattcaactgtttattatgaggtggagcttgtgtccttcgataaggagaaagaatcatgggacatgaaggagaatactgagaagattgaagcggctgcaaagaagaaagatgaagggaatgcttggtttaagatggaaaagtatgccagggcttctaagagatatggaaaggctttaaacttcatccagtatgacagctccttcagtgaagaagagaagcagctgtccaaaccactcaaggtgagttgcaagctcaacaatgctgcatgtaagctgaagcttaaagactacaaggaagcaaaggaactgtgtactgaggtcctggagcttgacagcatgaatgtgaaggctttttacagaagggcacaggcacacatgtatcttgttgactttgatttggcagaactggatatcaagaaagcactagaaatagatccagacaacagggatgtgaagatggggtacaggaggctgaaggagaaggtcaaggagcagaagaggaaggaaacgaaattgtacggcaacatgatttcgaagctaagcaagcttgaagactcggaaaccgaaggaggcacaactcaggcgccaagcaagaagcatggcctatggccactcaccgcgctgctgagaaggctgttcacgaggagtgacggtagcaaggagtcgatgctgtggctggtgctgaggctgctcattccggtggtgctgctggtggcggtctgtgtggctttctacatgcgcagcggacctcctgaagtagactgcatcaactgttaaattcttgtatattgtcgtctactttacatccggctgtagaggtccgtctgccagctgtgcttcacaatcggagtcgactactactgttcacggtaagttatttccgtggctgctgttgtgttcaatatgtatagaggacaggcaagcattgcatcagctgcacctgtgagctagacacgttcgagtgattgaaacatacaaaggaaaaaatgatactgaaagttc

SEQ ID NO: 23099 - DNA, 1715 bp, Oryza sativa
  ref <308>: DATABASE ACCESSION NUMBER: AK073234
  ref <309>: DATABASE ENTRY DATE: 2001-12-06
gacctgttcgaccacctgacacgcctgccatgcctcccgccctcacctccaaccccccctccttccgccccctctccacccctctaacccgccgccgtgccgccacaaccttcctctgccgtgtcggccctggcaagccttccaaggacaccggcgcggatgacgagccgaagaagaggtcgttcttcgccgatttcggtaagctctcggatggaaggtcgctgataccggccttcccgccggccgcggctgggtctctgttcgccggcgggagggggaggaaggacccgcagacagtgttcgtcgcgggcgccacggggcaggcgggagttcgcatcgcgcagacgctgctgcggcaggggttcgccgtgcgcgccggggtgccggacctcgcgtccgcccaggagctggcgcggctcgcctccgcgtaccggctcatttcccccaccgaggcgcgccgactcaacgcggtggagtccgatttcgaggaccccgaggcgatcgccaagtccatcggccctgcaactaaggtggtggttacagtcggcgcagctgagaaggggcccgacggcggtgtggtcaccaccgacgaggcgctccgagttgtgcaggctgctgaccttgccggcgtgacacacgttgtggtggtgtacgacctgggggccggtgaccccagtggtgagtcgacgtacaatgtgctcgacgggttcacgtccttcttctcgaacctcttctcccgtgtgcagtccttgccactaaacgagttcttggctaaggtggtggagaccgacgtcaggtacactctcatcaagacgtcactcacagatgactacagccctgagagcacctatggcttggtcctggccaaagagggcgcgtccagcactacttcctcaacagaaaccggcaaggtgtccaagttgcagattgctggtcttgtggcagatgtcttctccaacgtggcagtcgcggagaacaaggttgtccaagtttccactagctcatcagtaacatccaagaccatagaggaggctttctcagctatccctgaggacagtagaaggaaggagtaccaagatgctgttgcaaaagcacaggcagaagaggagactcgggcttcgcagcgaactcgtcaggcagaagaggacactactacggtcaaagccggggggaagaagacgccctctgatgaggcagctgcaagtgaggcgcaagcttctctggagaaccttctgagcagagccaaagggttcggcacggacttctcatgggagaagctcagcacacaacttgcaggagtggccactcaggactcagacgaggtggaaccaaaagcgcagatcgccaccgtgagaggccaggcaaaagcaaagaagctggcaccacagagagctgttgtgaagcccgcggcgcagaagacaagaccaacgccaaagcagccggaatccaagccggatgtgaggcccgtgtttgggggactcttcaagcaagaaacaatctttgtggatgaggactgagctaatgcagactctgccatttttcttaatcttttgtatgctatatctatgaagctcttggtgtattcttggaaagtgaatgagtgacagttgtataaaattggctgcaaaaccgtataacattctctgcaggtgagaattgttcgcttatttcggaattctctgaacttccaatgattgcgcggcgccacgccgcac

SEQ ID NO: 23100 - DNA, 922 bp, Oryza sativa
  ref <308>: DATABASE ACCESSION NUMBER: AK073235
  ref <309>: DATABASE ENTRY DATE: 2001-12-06
gttttccttgccaaatcccatctccattttcctctctttctcgttgcgatttgagaattcaccttcttcttcctcctctcgcctcctacctcttgctgcagcgcacggcgccgcgccgtcatctcgtgcttgtatccttgttcttcatcttctctcaccttcccttgagaagatttgttattactagtttaatatttctaggaaagaggagaagaggagaggagaggagagggtggtaacgcagcgttaggtgggggcgtgctagggagtcaagaacagaaggaagggaggcccaactgctccatcctccctttccccaaatccactccttcctttcgatttgcctccttccttccttggttcattcattgatttttgcaccgcatttgaggaagaatgtgcccgctgagggtgatcctaatcttcctctccgccaccatcgccggattcttcctcatccggggcctcaacgccgatcccgacctccacgacgatgccgacgcctccgaatccccaagggaaaggccccccgtgcccctccattccaaggttgggtcggctttgaaaacaggattctggacgatggtggacatggcaagtgggaaatacctttggcgcactcttgtttcaccaccaacaaaatgtgaatctgagaaggcccagtgatggagttctgatatttatatcattgttgatttgggaatagacgtaacccctattgtggttagattctgttcttgaagtgtaatatgatggcaactgtaacatgaggattacatcttgaagtaaatgtacaaattagttcacgtttgagccttttcgtgtaacctaaaacaatgagtggagaattgtattaatacatgagatttggactgaagtttctgaatacaatagttggacactattctttattttcctgttg

SEQ ID NO: 23101 - DNA, 2433 bp, Oryza sativa
  ref <308>: DATABASE ACCESSION NUMBER: AK073236
  ref <309>: DATABASE ENTRY DATE: 2001-12-06
ggtctgcccagtggctggttgcgaccttccgctctgatggcgatggcaagcaaatccctttcaggatccaggggcatctccatctagggatagtagagtttgacgccagctccggatcggctgttgcggaggaggagaacggccaccgcacgttggtctgctgctctctctcttcgtgcttggtccctggttcttgacggatgcgtagcttctttcggtgttgggtctccggtaccaccaagatggtaaccacgctaatcagtaagcttgagcctggtcttggcaacccaactattcgtcttcgtgtatcaaggttctgggaattccgcgaccaaaatgatgaaaatattctgtatcatcttggcctggttctggttgatggcacgggggccagcattgcagctcagattatgcctccattggatgagctctttgcccctgcaatcactgaaggcaaagtgtatgacctcacgttctatcgtgtaaggcagtgtaccagccagtataggccagttggcaatatgcagtcgattgccctcacaaagtggtctacactggaagagtgtactgatgtgccagagaatttccctaactatgtttactctctaacgccatatgaccagctaaggggacgagtgaacaggaaggactctttcacagatgccattggaatcattactgagataacatcagtgacacctatccaaacgcgcaccaaggatggtgaaagtctgaagaggagcatctacattcgcgatgccgagttagcccttcttctctgttttttaatatgcaaaaagatatttacttcagttctctaacatttctattaacagtgtatcagcaacaccaactaactaccaccaaatattactccccctttcaatatacatgctttccacatttatttttttgctaacatcacccaacaaccactcacgatgccataaactctttatgtaatgatactatgtctgctgcatagcaatgtgacaataaatgttgcgctatggggagatcgagccacaacattccctgcagatgaggtgattgaagctggcaaaaaaaaatccacagatagtgatctttgttggcacgcttgtgaggggctttggtaggaatgtttctttgtcaggtaactctgcctgcaaatggtacataaaccttgacaaaccataggtgactgccttgaaaaacagcatccaaggaaactatgagccaataaaatatactgatctacccgccccatctcaggctgcaaacaatgcagaacagaagacggtcattgagattaaagacctacacccttttaagttcaagaagcatcagttcttagttactgtcgtcataaaaaaggttaacgtggatagctcctggtggtacactgcttgtgacacatgcaacaaaacagcaaaacgttttggaaatggatacaggtgtgcagatccaacatgcccaccagttgttttggcttcgcctagattcaagctcaatgtgatagcaggcgatgacacagctgattcttcattcattatctttgggcgtttggcacaacgcctcattggtcgttcagttgagacactgttgcagcagaatccaagtaacactggttgcataccaaaggagatcactgacctacttgagaaagaatttacctagaatgtcagcatcactgagaacactgcttctactggtactgttgcattccagatgaataggattcttggaggtgctaacaatcacacccttgccctgttacaatccccatctgcatctcaagcatcttctctcccagcttccatggctctatcaccaactccatcagttgggcttagtgatgcacagactggaccagctagcccatccactgctatatcaaaacacaaagacctggaaatagagtctgcttcaaagaccactacagaggttcaggatgaagaggaaatagaagatgaggatgtcgatcacctcagcctcacacagaaagctccttcttctagcactaaacaaagcacttctaagagctacaaaaaaaggcctaggccatctcctggcacaggtgctgcgaagaagctattcaaagacaatcctggcaacgatgctggtggcagtgccatcaaccaagcctgatatgttatggaccaaacaagcttacttttggatgccacagttgctgcctacaccagacagctcttcagtgagaggagaagaaaatcagccgttctgtagtgcctttgcaaactgtcctattattatactggtgtcctgtgtttgacaccgtttccactagacttattcttttgcaaaaagacttaatgtgaactggcactgatcatgtaactaggattctgcattatcatagttatactatgataatcctgaatactggttgttatttcacggcgattaatttacctccgaattatcagtcgc

SEQ ID NO: 23102 - DNA, 2538 bp, Oryza sativa
  ref <308>: DATABASE ACCESSION NUMBER: AK073237
  ref <309>: DATABASE ENTRY DATE: 2001-12-06
gcgaggaaggaagccgctgctgacatgtgacaccgtgtttggcatcacaccacttcactccactggctcagtggctgcctcactcactcaccaattcaccattgctagtgcaagagctcgcataaataggcagagctgctgctcctctcctctccctctcagcctctggaggaggaagagaagaggaggggtctctgcttcatctttcttcctgagctggcttctttactacagcagccatggctaaagagtatcctgcctcccccaaagctcagcagctgcaagaatccaagaagcagcggctcacctacatcctcgtggtgagcgcgctctgcgtcgccttctacgtcctcggtgcgtggcagaacaccacagtgcccaagccggcggcgagctcggcgatcaccaaggttggctgcgacccggcggcggcggggcagtcctccgccgtgccgtcgttcgggtcggcctcgcaggagtcactcgacttcgaggcgcaccaccagctcagcctcgacgacacgggcgccgaggcggcggtgcagccgttcccggcgtgcccgctcaacttcagcgagtacacgccgtgcgaagacaggaagcgcggccggcggttcgagcgcgcgatgctggtgtaccgggagcggcattgccccggcaaggacgaggagatccggtgcctcatcccggcaccgcccaagtacaggacgccgttcaagtggccgcagagcagggacttcgcctggttcaacaacatcccccacaaggagctcagcatcgagaaggccgtgcagaactggatccaggtggacggccagaggttccggttccccggtggcggcaccatgttcccgcgaggcgccgacgcctacattgacgacattggcaagctcatctcgttgacggacgggaagatcaggacggcgatcgacacaggttgcggggttgctagctggggtgcttacttgctgaagaggaacatccttgcaatgtcgtttgcaccgagggacacccatgaagctcaggtgcaattcgcgctggagcggggtgtgccggccatcatcggcgtgatgggaaagcaacggctgccttacccatctaggtcatttgatatggcacattgttcacgctgcttgattccttggcatgagtttgatggaatatacctagctgaagtcgacagaattctaaggcccgggggatactggattctctcgggtcctccgatcaattggaagacacactacaaggggtgggagaggactaaggaagacctcaaggaagagcaagacaatattgaggatgtcgcgaggagcctttgctggaacaaggtggttgagaagggggatctctccatctggcaaaagcctaagaaccaccttgaatgtgccaacatcaagaagaagtataagacaccccatatatgcaagagtgacaatcctgatgctgcctggtacaagcagatggaagcatgtgttactccattgcctgaagtaagcaaccagggtgagatcgcaggtggagctttggagagatggccacagagggcattcgcggtccctccaagggtgaagaggggtatgattccagggatagatgcgagtaaatttgaggaggacaagaagttgtgggaaaagagggtggcgtactacaagcgcaccctacccatagccgatgggagatacagaaatgtcatggacatgaacgcaaacttgggcggatttgctgcttctttagtgaagtaccctgtgtgggtgatgaacgtcgttcccgtaaattcagaccgggacacgcttggagcaatttatgagcgaggattcattggcacgtaccaggactggtgtgaagctttctcgacgtatcccagaacctacgacctgttgcatgctgacaatttgtttagcatctatcaggacaggtgtgacataaccaacatcctcttggagatggacaggatcctgaggcccgagggcacggcgatcatccgcgacacggtcgacgtcctcaccaaggtccaggcgatagcgaagcggatgcggtgggagagccgcatcttggaccatgaggacgggcccttcaacccggagaaggtccttgtggcggtcaagacatactggactgctgatgaatcagagcagcactagcacactgcacacagcacagaacacaggctcggctacctctctgaagactgaagaagtctgaacccccgattgttttcagagctgtgatgatggcatcggagttttgccatttcggtgtaacataacagaagatatcatctggtcacttgttttcttcctcctttcgctaattctttctatatcaaaggaaaagttatggatggtttttggggtgagattgggcatggttggatgatacatgagtttgttagcaaggggaagaaatgcaaatcttgcataggttcctgccccagtttcacgcatggagcagacagcagaggataggttttttagcttgtaatatgatggcgtccaagtatccaacagacactgttaatctatattgaggttaact

SEQ ID NO: 23103 - DNA, 2098 bp, Oryza sativa
  ref <308>: DATABASE ACCESSION NUMBER: AK073238
  ref <309>: DATABASE ENTRY DATE: 2001-12-06
gggtcttgcgacaccaccgattgttcggcttgcactgacaccaccggaggctgagagcccgccaacggcgaaggagagttgcaccggcgcgtcgctgatgctgggagaggccgcctcaccgtggagcctggccagcgcgggcgcggccgtggcgctgctgtggctgtgcgcctggacgctgcagtgggcgtggtggacgccgcggcggctggagcgggccctgcgggcgcagggcctccggggcaccaggtaccgcctcttcatcggcgacgtggccgagaacggccggctcaacagagaggccgcgtcaaggccgctgccgctcggctcgcacgacgtcgtcccgcgcgtcatgcccttcttctgcaacgtcctgaaagagcacgggaaactgtcgttcgtttggactggcccaaagccattcgtgattatcagagaccctgacttagcgagggagattttgtccaacaagtctggcaatttcgccaagcaaacgaccgcgggtattgctaagttcgtagttggcggagttgtaacgtatgaaggtgagaaatgggcaaaacatcggagaattctcaaccctgccttccaccaggagaaaataaagcggatgctgccagtgtttttagcatgttgcaccaaaatgatcactagatgggtgaattcaatgtcttcagaaggaatatctgagttagacgtttgggatgaatttcaaaatcttactggagatgtcatctcaagaacggcatttgggagcagctaccaggaggggtggagaatttttcagttacaagaagagcaagctaaacgcgtacttaaagcttttcagagaatctttatcccaggctactggtacttaccaatcgaaaacaacagaaggatcagggaaattgatcaagaaatccgcacaattctgcgaggaataatagtaaaaagagacaaggcagttagaaatggtgaaggtagcaatgatgatttgttgggattattggtggaatcgaatatgaggcaatcaaatgaaaaagaagatgtgggaatgagtatagaagatatgattgaggaatgcaagttattttacgctgctggttcggagacaacatcaatgttgctcacttggactttaattctgctaagcatgcaccctgaatggcaagagcaggcaagagaggaagtgatgcaccattttggaagaaccacaccagatcatgatggcttgagtcgtctaaagattgtaacgatgattctccacgaggttcttaggttgtacccaccggtggtattcctccaaagaacaacacacaaggaaatagagcttggtggcatcaaataccctgaaggagtgaacttcacattgcctgttctatccattcaccacgatcctagcatctggggacaagatgcaatcaaattcaacccggaaaggttcgccaacggagtctccaaggcaacgaagtttcagaccgcgttcttttcgtttgcatggggtcctcggatctgccttggccagagctttgcaattctggaagccaagatggcgctcgccaccatcctccagagcttctccttcgagctctcgccgtcatacacccacgcaccacacaccgtgctaactctccaaccacagtacggttctccaattaaattgaagaagctctagtgatctcggtcgaggagaacataaagctaccccgtacatgctgaaatctaaatctatatgaataaatttcataaaactacatgtattttaatcaaattatcacaaactacagatttaacacaatatttattagagaactacaaatttagggccaagtacaaaactatagatttaatactagagttatcacaaaactacaggttttatagtttaaatctctgccactaatgttacgttagagttataaatgttgcaagttttgtacttaacatggtgccaacaatgtagttttgtgataattttattactaaatatgtactccctccatcctaaaataagcgcacccatgagttttttgtgtctaactttgatcgcccgtattttttttatgatcagtacttttattgttattatattataaaacatgaatggtacttgtcg

SEQ ID NO: 23104 - DNA, 661 bp, Oryza sativa
  ref <308>: DATABASE ACCESSION NUMBER: AK073239
  ref <309>: DATABASE ENTRY DATE: 2001-12-06
gggattccacaggtgtgtgcccctctcctcgtccttccccatgggtggtggtgagcttgggcgagcctcgcaggctgtatgtggtggtgactcaggcgaggcgcgcgggtgaagctagggtgaggcgtgtgggtgacagatctggtagcggcgacttggttcgatagtggattcgtcggcggacctcgcgcgaggcacatgggcggcggatccggtggcagcgactccgttcagcggcggatccgatggcatcgagtctcgcgggcggtggagctcgagctgggcatgcgggcggcggatgcgacgacgacgacgacttgtgcgggatggtggatccgatggcaaggcattagcggtagtccggtggcagcaacttgcgtgggtgggaaggtacaagcggtagttcggctgatccagtgacaacaaaccgtgctccaacgaggcgtgcgtcctctgcctctcttttttttttctcttttctatttgttctttccgttctcttccggatccatgttggtatgatgcaaatgatttgatttgtattttgtgtttgatctatggaaatgggcagggagctagggttcctaggagagcaatgatgcagatgatttgttttgttttttgtgtttgatatgtgaaagtgggcagggagttatggggg

SEQ ID NO: 23105 - DNA, 971 bp, Oryza sativa
  ref <308>: DATABASE ACCESSION NUMBER: AK073240
  ref <309>: DATABASE ENTRY DATE: 2001-12-06
ggccagtcgccacatctccctatcgtctccgccgcaagcccgcaagcgaagatggcgacgccggcgaacgccaccacattctccggcgaggtgtgggcggagctccgcctggcggactccagcgacgtgccccacatccacgccctcatccaccagatggcggagttcgagctcctcaccgacctcttcgccgccacccacgagctcctcacctccacgctcttcccctcgccgccgcgccctcccttcacctccttcaccgccctcatcctcgacctctccccgtccccgctccccgcctccggcccctccaccatcgcctcccactgcctcgacctctccgcgtccccgctcgccgacccggaggccgccgccttcgcctcccctcgcggcggcgggcgcgtcaccgcgggcttcgtgatctgcttccccaactactccaccttcctctccaagcccgggctgtacgtggaggacatcttcgtgcgcgcgccgtggcgccgccgcgggctcggccggatgatgctgtccgcggtggccggcaaggccgccgagctcgggatggggcgcgtggagtggtgcgtgctggactggaacaagaacgccatcgacttctacgaggggatgggcgccgaggtgctcccgcagtggcgcatctgccgcctcaccggcgctgcactcgacaagtacaaggggaaccaggaggaggggggaggcagcaaggcggcggagtagatcggccatggatggaaacgtcgattcttggctgtccaatctcgagtgagtgattagtgataataaaggtagtggattttggttccacttatctgctccttgtggtgatgtatttcttgatagtgattcagtgcattggatcggttcttcattgctatgaattacagtgatgttttagcttgattatgtcatgaacttgatctgaaacatttcggtatcaaattcttgattgaacc

SEQ ID NO: 23106 - DNA, 894 bp, Oryza sativa
  ref <308>: DATABASE ACCESSION NUMBER: AK073241
  ref <309>: DATABASE ENTRY DATE: 2001-12-06
gggcgacacccgacttctccttctcctcttcccccgccgtcgtggaagggaggagagcggcggcgccggccaccggccaccggaagggttcgggagtggtggtgttgggtagtgaagtcggctgcggcgatgttgtccaggatctcgcagctcggggcgcggcttctgcgcgagaacagagctgtagggaatttggcaagcagtacaaccagctattatcgaggtcaactcagccgacgttttgtcccaacgaagaacatcttattctccacagcaacaactagtagtgatcgtgacgatggcagtcagagcaaggagaagatctctgtaacatttgtgaacaaggatggcacagagcagacaatcagtgtccctgttggaatgtccatcttagaagctgctcatgaaaatgacatcgaacttgaaggagcatgtgaaggttcacttgcgtgttcaacctgtcatgtcatagttatggatgtaaattattataataagctagaagatccaacagatgaagaaaatgatatgcttgaccttgcatttggacttacagaaacgtctcgtcttggctgtcaagtgatagcaaagccagaacttgatggcatgcgactggcattaccagcagctacacgaaactttgcggtggatggctttgtaccaaaaccacactaaaagactgataactgagactgagaagtgagaacacaggttcttacacagcatcatcaattttgtagcccaacacttgtaacttaaacaacagcctttggtgttatgaggcttttgtgttccagagaggatttgttcattgttgagctcctcggttagttacggaaattattatttcatcagtgccacactaccaccgggtgaataaaatgcttcttctgc

SEQ ID NO: 23107 - DNA, 2082 bp, Oryza sativa
  ref <308>: DATABASE ACCESSION NUMBER: AK073242
  ref <309>: DATABASE ENTRY DATE: 2001-12-06
gcggctagggttttagggttttttttttcccttctcctccccattcgccggcaagcctccgctcccacgcggcggcggtctcctcccatggcgaagaagggcgcgccacgcaggcagcagccggcgccggcggcgcggcaactggccgtggcgaagaaggggaaggcccccccgaaggcggcgaagagggcgccgaagaagaagcaggagctgctcgagccgtcctccgacgactccgagctggagcagcagcaggagcggctccaggaggtggaggaggatgagtcagggtcggacctcgacgccccctcggactccggcgccgaggagctctccgactccgacgatgcctccttggagggaggagacagcggcgacgaggaggacgatgacgaggaggaggaggaagatgacgacgaccccctcgctgacgacttcctcgctggaagtagtgacgacgaaagtgccgaaggagatgactccggagtggattcagatgagtctgacgaccttgaggctaagtcacgagcaattgatgaagcgaaggggaaggcagaagaagaagctgaggaggaactcaaactcaatattagatcagaatctgatgagttccgattgcctacaaaggaggagttggaggaataggcacttagaccaccaaacctgccacatcttaaaaggaggatatcagaaattgtccgggtactctcaaactttagtaagctaaggcaaaaagatgtgccgcgaaaggattatgtcgatcaactcaagactgatgtaatgtcatactatggatacaatgattttcttgttgaagcatttattgagatgttcccagctgttgagcttgttgagctactggaatcttttgagaaaagaccacctgagtgcttgcggacgaatacattgaagacccggagaagggatcttgctgctgctcttataccaagaggatttaatctggatccgatagggaagtggtcaaaggttggtctggttgtatatgactccaccatttcagctggtgccactgttgaatatatggctgggcattatatgaaacaaggtgcaagttctttcttgcctgtgatggctcttgctcctcaggagaaggagcgaattgttgatatggcggctgccccaggtggcaagactacatatattggagctcttatgaagaatactggaataatttatgcaaatgagttcaatgagaaaaggttgcatggacttttgggcaacatacatcgcatgggtgttaccaatacaatagtttgtaattatgatggtaaagagctacccaaagttcttgggatgaattcggttgacagagttcttttggatgcgccctgcacaggcacagggaccatttggaaggacccacaaattaaaacatcgaagggcattgaggacatcagagactgcgcttttgtacaaaagcaactcctgttagcagctattgatttggttgatgccaactccaaaactggcggttacattgtttactcaacctgttcgttgatgattccggagaatgaggcagttattgactatgcccttaaaaagcgaaacgtaaagcttgtgccttgtggattagattttggacgtccaggattcatccggttccgagagcatcgattccatacttctttagataaaacaaggaggttttatcctcatgtgaacaacatggatggattttttgttgcaaagctgaaaaagttgagcaatacaatcccagtgacatccgagtcatctaaagtgcctgaagaagcaattgagaagactgatcctagcagcgacgatcttcaagaacagcccattcagtcaaaaatacacaaagatgtgaagaagatgaatgaagagacaaccatccttgatggggtgactgaggacaaacaacagacacatgataggcctgaaaagacgctcaaaaaccataagaagggtgagaagaaacggaatggccctggcagtggtaaaaaagaaacacacaacgaaaaagaagagcctacaagtgaaaaaaagcagcctgtgtctgctaaaattaaaaaaactgttcccaagagaacatcaggaacc

SEQ ID NO: 23108 - DNA, 1065 bp, Oryza sativa
  ref <308>: DATABASE ACCESSION NUMBER: AK073243
  ref <309>: DATABASE ENTRY DATE: 2001-12-06
ggtccgccttcttcttcctctccctcttccctaccaagcgagaccactcggcccccacaaaatctccgcttcttctccgagaccgagatggcactcgactctgttccatcctaccccagcgatcttggatccagcagggccaggacgccgcagcagcaaagggtcagccccaggaaggaggagcggacatggacgaccgacacctacgcgccgtacgacgacggccaccagtggaggaagtacggcgagaagaaactctccaattccaacttcccagggttctattacagatgcacctacaagaatgacatgaagtgccctgctacgaagcaagtccagcagaaggacactaatgatccaccattgttctcagtcacttacttcaaccaccacacctgcaacagcagctcaaagatcgtaggcagcactcctgattctactgtgcagtcgaggaaagccatttcgatctgcttcaattcacatggccaaaccggtgaacagcccacattcttgtcatcatcagcttccttgttgtcaccgagcatgcagtcgtacagttccaaccagcaacctgacatgaacacctacagtcgccagtttcagtgggcagacacatcgtcatctacaagcaatgctccggttaagatggaggcggacgattatgcagaagcaagtgcttcacccagtaccactggtgctctgtcgaggacattgctgccgatcggtcagtcaagatgcatcgagtatttccatttcttgtgatgatttttatggaaagtgaaggagatgcatatacattctgaggagcctcttggatggttccagatagggttttatattgggaggtgaggatgttgtgctgatgagattccatatactatagtggcattatgttgttttcttctttgcatgtagattcaagccagatttttgtgcttgaatgatgtaaagaactgaattggcgtttctctatctagtaggaaggagtacgtgatacagaaaaaggcaaatgtagcagaacctgttaaattatactagtataaaattaaggaaaaatctgacagt

SEQ ID NO: 23109 - DNA, 1161 bp, Oryza sativa
  ref <308>: DATABASE ACCESSION NUMBER: AK073244
  ref <309>: DATABASE ENTRY DATE: 2001-12-06
gcacgaaggagcagcagttgcagcagcagcagtgtcttcttgcagagaaagaaggaaggaacacgaaggaaggaaggcggcgacgtcgagatggtggtgctggtggtcgccacgacgtccgacgccgcgtcggccactccggccgccgcgttcctcgccatgcccggctggacccccggcccctccatcccggacggcgtggagagcttcgcgaacggcgcgggggtgcggctgctgcggcacgcgcgcgggatcgtggaggaggacgacctggacctgcggtgggaggccgccacgggggagcgcgtctccgaggtggtcctcctcagccgccacaccgccgtctccaaccgacccgcgctcaccgtccaccccatcggcgtcccgcacctcagggacggcgtggacgtgccgccgcagggcgggcgccccgggtgggccgcgccgcccaacccgcggatcgggccctggctccgcctgctccgccggatcgccgccgaccgcggcctcgtgccggagtttgagattacgctggagggcactcaccatgggccagtgaccaacacgccgacgctgtttgttgagattggaagcactgaagaatactggggtagacaggatgctgctgacgcagtcgctctgctgctatggaaaggacttggtcttggagaagaagaatctgttggaaattggcatgggaatggtgaaaaagtccttctaggcataggaggtggtcattatgctcctcgtcatatggatattgtaacgaaagatggtgtatgggtgggccacttgctctctgggtattctttgccaatggaggaaccgaagcagatgaatggtaaaaatgtggctgacgttggcggtatgtggaagcattccattaaagtttcatatgaagcaacaaaagcggctttcccaggaggagagattattgcacatattgatcaaaagagcttcaaaggatggcaaaagaacgcaattacaagttacttgcaggagttgaacatcagggtaggaaaaccaaatgatttcttttaagaagacataacaccggggtagcagtactcttttggtgttattgctaggtaattagtatgtgtatgctaaagacctcgcctccacggccctgagataataaaattaatattttgagccccg

SEQ ID NO: 23110 - DNA, 1759 bp, Oryza sativa
  ref <308>: DATABASE ACCESSION NUMBER: AK073245
  ref <309>: DATABASE ENTRY DATE: 2001-12-06
gggctgcctcccacaattcggtggtcactcgtcagtcgtgtcgtctgctcacgctcgccaagaaagattggccatggagaagccggcggcgagcgtggaggagccgctgcttgttggcgctggcgagaagaagggcgagagcgcggccgcggcggagctgaagcggctgctccggctggcggggccgctggtggcgagcggcgtgctgcggaacgtggtgcagatggtgtccgtcatgttcgtcggccacctcggcgagctccccctcgccggcgcctccctcgccacctccctcgccaacgtcaccggcttcagcctgctcttcggcatggcgagcgcgctggacacgctgtgcgggcaggcgtacggcgcgcgccagcaccacctcctcggcgtctacaagcagcgcgccatgctggtgctcgccgtggccgccgtgcccatcgcgctcgtctgggccagcgccggcgagatcctcctcctgttcggccaggacccggccatcgccgccgaggccggcgcgtacgcgcggtggctgatcccgtcgctcgtcccgttcgtgccgctggtgtgccacatccggttcctgcaggcgcagagcgccgtgctgccggtgatggcgagctgcggcgtcacggcggcgagccacgtggccgtgtgctgggcgctggtgcgcaaggccggcatgggcagcaggggcgccgcgctggcgaacgccgtctcctatggcgtcaacctcaccataatgtctctctatgtcaggctgtcgcgctcctgcgagaagacatggactggcttctccatggaggccttcagggagctccgccagtatgcggagctcgccatccccgcggcaatgatggtctgtttggagtggtggtcatttgaatttcttgtgatgctctctggtcttctgcccaatcctaaacttgaaacctcagtgttgtcgatatgtctcaacactggtgctctgctggtcatggttccaattggtctcagcacagctataagcacgcgtgtttggaacgaactaggtgccggcaatccccaggcagcgaagctggcaactcgagtggtcatatgtatggccatgaccgaaggctcggtggttgcgtttacgatgattctgttgcgcaattcctggggtcacatgtacagtgatgaggctgaagttgtcacctacattgctcgtatgatacctgttctagccatatcattcttcattgatgggatgcacagcgctctttcaggagtgctcactggatgtggcaagcagaagatcggcgcacgggtaaatcttggcgcattttacttggcaggcattcctatggccgtctttcttgcatttgtgctacatctgaatggaatgggcctttggcttggcatcgtttgcgggagcctcagcaagcttatcttgctcttttggatcacaatgagtataaactgggagaaggaatcaaccagggcgaaagaattggtgttcagttcatctcttcctgtagcatgaagaaaaacaatgcatcagaatttcatgatatggtgcaattgttattgtgaaagcaacacagaaccaaatgttatgaagctcgcctttcatctttaagcacccagtttattaacatttgtaacatgaatttttgttcttgtgataacacctatttaatattttttttcttgttcagattgtactctgtaaactaaggatatatcttatatgcatcgattaattgaaaatctaagaagcatattataggaaatt

SEQ ID NO: 23111 - DNA, 2211 bp, Oryza sativa
  ref <308>: DATABASE ACCESSION NUMBER: AK073246
  ref <309>: DATABASE ENTRY DATE: 2001-12-06
gatcttcttcttctctcccgcactccaaagtcgaaaccctcccaaaaccctaaaccccccatggcgccgcccgtccccactgccgccgctcgcctcgtcctccgccgcctcctctccacggcggtcgccgaggcggaggcggcggccgtggctcccgccgccgagaaggccgcggcgaagggcgccaagacggcggcggcggcgggggaggagaaggacgcgcggtcgctgtaccggcggctctcggcgctcgggggcgcgggggaagggagcgtgtcgcgggtgatgaacaagtgggtgcgcgaggggcgggaggcgcgcgcggcggatctcgccaagtacgtcaaggagcttcgcaagtacaagcgccacgcccacgccctcgagttgatggaatggatggttaacactaagggtatgaacatgtcatacactaaccatgccatacgtttggatctcatttataaagtgcgtggcattgaagcagcagaacaatactttgctggcctccctgatccaggcaagaaccataaaacttatggtgcacttttgaactgttattgctctgctaaaatggaagacaaagcaacagacatctatcgcaagatggacgaactaggaatctcatccagtactcttcctatcaacaacctgatgtctctttacgtgaagataggccagcataggaaggttacaagcctgtttgaggagatgaaagtgaagaatgttaaaccggataacctcacatgctgcctgctgatgagtagctatgcagcattgaacaagatagatactgttggagaggttctaaaagaaatggaagaaaaaaaagtggctctagggtggtctgcatatagcacactcgcttccctctatgtgaatgctaatatggttgaagaagcggaatctgctttgaagaaactcgagagtctcatcgatgttcaagctggcaggcagccttttgatttccttatgagcctatatgcatcagtaggcaatctgagtgaggtcaacagagtgtggaacctgataaaggctaattttcagaaggtgactaacaccagctacctcggcatgcttcaagctctttataaactcaatgacgatgatcgcatgaagcagatttatgaggattgggaatctaattatgaaaattatgatgcgaggctgacaaatatgatgacccgagcacatctaagaaatggcttgaccaaggaagctgaattactatgggagaaggttaaggaaaaaggtgcagaatttgattccaaaacatgtgagttgtttctagagcattacatggggaaaggggacatgacctccgctttgaactgggttgaaaatatgaccaaacttcccaggaagaaatcgaagctagatcaggagaagatcagctgtttcttgaagtatttcgaagagcacaaggatgtggaaggtgccgaaaggtttctcaactgcttgagaacgtcaggatgcattgatggcaaggcatatgagtccctcctgcggacctacttggcggctggcaagacaagccgttcgatccgccaaatgatcaaggaagataagattgagatatgctatggcatcgggaaattactcaagaggattgccgacaagggacgctgaaatgtttatcctcggtaattttactttgtcggtgacacgtgattcttcggcgagcggcacaaagcagattcgtttgagtgaactgttctcccttcttcctactgctccatgtagaggatgatatacctcatggctaggatgctgttccagccttttcttgcttttttttttcaagaagcagaggcatgctagggtaaagggttttttcttcaagtgcaacgtgtagtcttgtctgaggaggcttttctccaacacttcttttttgcttactttctgaacgaaatggcttctccagacatacagtactgaagcaagaatcctactacagaatcgttgctgtttccatctcttgtagtcagtgtgctatcagtttgatgccctgacaatgatatgtgcatgctagtcccaagtgtgttgtggataagtctttgtgaacaggagaagccattcggacaggaagtaattgcgtgcagaacgagagacaaggcctttcaagagaacaccttgcataggcttctgtcttgtcatcccgtgcaaagggatcgaatatgttaaatcaaatttgaggtaatttatttggtc

SEQ ID NO: 23112 - DNA, 4220 bp, Oryza sativa
  ref <308>: DATABASE ACCESSION NUMBER: AK073247
  ref <309>: DATABASE ENTRY DATE: 2001-12-06
gtaggtcaagaaacgatagacgcggaatccccagttccccacccccaaccctgtctccaactcctagccgccgccgtgctcttctcgcgactccgcgagccctagccgcgcctcaccgccgccgccgcccgctcgcccgcccgacgaaacctgcacgtcgactccgcgcttgtaagcgctccggcgagcgtctggtttgagggttccttggcgcctgtgcgtgccggtggcagtcctgagcgccggtcaactctcagccgtctacatgggctcggcggccggcgccgggtgcgtcggtggccgcgcgcgtttgtcgccgtccatccatggatgatccataccccgggctagatgatccgtccggagccagatcgacttgggacttggccgtagacggaagtttgccggtctatcggcgctgactcggtctcacggccaaggatattatcaggatgatctgttgaaatcggtggctggctcagctccctataggcgagacgatgccaggggcttcggctggcaccgttgccggcggttgcatccgccgcaaatcggctcccggcgatggtattgcggtgatgagtttaacggagaagactagatctaagccatctggactacccgcccggtctacccctctctgccgagctaaccgtaaaagggagattcagttccagtattgggcaaggcactcctactcaacaagtcgcagggtcatacgtttcacaatttgggttcgacgagatgatgttctccctttcatctggctatccatgttatcagccatggcaggaggcgtggggctcaagttttctacgtgtttattattaccatatatgtatttttctcatcttcttcagaagaaaatttatcgactacactaatggtgtgctgagttggtatggcgttctctctatatcaaagccatctgctcttatccttaatatcatattaggtatgtgttagataaagctctaaacctttgaacataggtatttccgttcggtttatctacttaaattacgtatataccaaaaattcccatgtgtaagttcggttaggagttataagtttttcagatcgatcaaataaacatgctatgattgacattagtggtccaccttgtatttttaagaccacgcttataacccaaagcaacataattgggaatttagtattgcttaaataggtttggaaaaaacatgtagcgagatatcaaaggagtatataacatcacacccagggttttcacgatattgcggtgagctggtataaaactcagaaggttacggcgtaactgtgataaatgtgtggtactgcatgatattaccaatccccatcacaccataacatcaaagtccaaagtcatagaacctgacttagttgatagttccttcgctaacttgattctagagttcccctacatctttatgactctctcaaatccctgcagataagatataattgatataattagtcaccgcttcaatttacagaagttcaaaattcgcttcaatttacagaagttcaaaatttcagaagtattataagttcaaaacttatagatatagttagttatccaggaaggtagcccatgcttttgcgtgggaatcttatttatgtatgtaacttttattactggaaatatgtgggggtgactttaacttaaaactggaaaggaagcccacgcaaatgcacagattatttattataaaagattgctaaaagaagtccatactaagtataagaacctcatatttattactacctccgtcccataataattgtatttctacccttcaaattttgtcccacaaaaattgtatttctgataagatgagacacaacaaatggaatttctatcccaaccttccttttaattaagtttacatatggaatgtgtgcctcaaccttccttttaacaaagtatatatatggaatatgtgcatgcaatgtagttattaaatagggttattgtggtaaattgtgtttgttgttaatgtctctaattccctagaagtgcaattattatgggacggagggagtatttattaaaataatgctaaagaaatcctattgcaccatattcactataacaatcgtagattaccttataattaaatacaaagaaaaatttagaccacatgttttgatataccaaatgataataatatctctcatattcaataagaaattaattgtcccggttttttgtcctgtgatatgtaaacacgactatcaccactatttattattttgtcttgaaagttgggtgcctttttaatagaaggaattgcatccataccaaaaaaaaccctaatacatcaataatactgtaaaaaaagttcatcttcacttcaaaccaaagtgttcatgtttcatttgtgtttcagtaatcagtatatataaaaatattttaatgtatcgcttctaccaattcatgggagaaaatcattaaaaattagatataaatgctcctctaacgggtgaagccgaccttagccacgaaggttttcttctcttatgccttgatacatgggtcccatatcgacatagccgtgccctcaagaccagtgtgaagcactattataacgtctggttcactattggctgaaaattgcattttattttaaacaagttattttttaaaagtttgcagcatcatattagtaaattatgttgtgttttgtttggttgtagccttagcgatctgtttttaattgtaatatatgaaatctgaatgttttaacattagttttatgtcgtatgaagtatagtcagtccgcctttgaactcttaaaatatagatatatcctagtgaactaccctaagaaataaatgcgatgaaatgagtcacattagaggggtagactgatcatatgtacatatatacaaacatgacaacgttttagttctaatttaagggttaggaggaaattgttaatagttttttttctagatccaaatacgtctatgtgtttttttggcaagtagtagtctcttgtacatgcatatatacatacgtatgcgtttttcggaagaacagtacatatttatttttctcctgcaaatacgtgggaaattaggagagagagattaattactttaatagatctaatctaataaatgaaaataatagattcacctgtttaatacatggatatatacatagaactaatatgtgcatgcatataggatgcatgagacaggtttgattacatagtttattctcgttttggcacctagttgattggaatctacaaattaattgtctttttttttctaaagaatatagtcaactttaatatccaaatggtgtttcataatattattttataatctatcaaaagttaaaagcacaaaaactacatatactctgtaattattgggactgttatttatttctcttgatattttaggtcttttagctgcatatgtgtttttaaagagatatatggtgatataatttacataaaccatcagaaaccagccagtacacagaagctgaaaccagcctgaatctaacattctaaccagtacacagcagctgaaactagatttgaactgcaaagaaacacaaattctaacagcaaaatctaacagcggcagttgtactggctgttcaaggggcctctttgcaaaactgcctgcacgtgcagttgactctcccttgggaataactcatgtgatatgtatctagttatgtatacttaataaaatgcatggggttctaaaataaatcagcagaaatagcccattaacaattgtttgcagcaggtccaggtgcgtccaaaagtgtaaggtcttaagagagatatttaggaattgctcagtgcagtatccattccatacacccaacatgtaaatatttgtcaaaactgtctgcatggcagtcctatccatgttgggaaactaaaggaaatagcataattgctcattcgtttgaataactctacatagcctgaaaacgatgcggtccaatttgtcctcttatgttaactgattaatgcttctaataattgaaagagttactactaaattatcttccttcctcaacaacgcaaagtgtttgggagtgcaataccattgtgaagtgcattgagactgaatcttggagataaaatattgaactctaatagtgagtgcctttgtacttttaattgatttttatatcacaatgcacagatattttcagcactttaagcaacggtattttttcc

SEQ ID NO: 23113 - DNA, 2144 bp, Oryza sativa
  ref <308>: DATABASE ACCESSION NUMBER: AK073248
  ref <309>: DATABASE ENTRY DATE: 2001-12-06
ggctttgcctggccgccatggctcacctaccgcttttgctcctctccttcctcgtcctcatcggcgtccatgcctccgtttcccatggctcgccgcctcttccatccacttacgacccttccatttgctccaagtcatcagagtgcggaggcgtcaatatctcctatcctttctatctttccaacgccaccgattattacactcgattttcttgcggctacaccgatttgaagatctcttgcagccgggaccgggacgggaggaacgagactcccaccatcctactcggtggagacaactacaccgtcctggacatcatctacgacagtcacaccatcgtgctcgcggacaccgatgcgctccgcggcggcagctgccccagagtgcgccacaacatcaccttcgcccaggccgatgagtggcttcagtacaccggcccccgtgacaacctcaccttcttcttcggctgcaaactcaaccttccaccaccaatcgatccagggctggttagtcttgcagacaagcaccaaatcaactgcaaagacttcagcaactggcctgacagtggagattcgttcgtgttcacctccgccgagctcgaggcaccagtagagtccgaattggccaggcgctgcagacaggtcatcgtcgtgccggtaaatggggatattcttaactcgagtaaccagagtgcgctgccaagtggtggatacggtcaagtgcttaataaggggttcgacctggcatggaactcaagaaaagatgaacaatgctaccagtgcgagcaatcccaggggcactgctcctacagccagaacagggtgttcctagattgcttgtgctccgacgggaaggtgggcaaccaggattgcagaaacagcggtgccagcaactcgtctacattaaggtattcaagcttaaaggggagaatgaaactttatataatagcaggcatctcaagcgtccttttgctatgtttactttcctttccgtgtttgttcagtctgaagaagtataggcacagaaggatttcaaagggaacaccaaggattgagtccttcctacaaaggaatggaaccttacatccaaagagatacacttacacagaagtaaaaaggatgacaaaatcttttgctgaaaagctaggtcacggtggatttggtgctgtttacagaggcaacctatctgatggccgccaggtagcagtcaagatgttaaaggactccaagggtgacggcgaagaattcatcaatgaggttgctagtattagtagaacttctcacgtcaacgtggtgactctgttaggattttgcttgcatcgatccaaaagggctctgatctatgagtatatgccaaatggttcacttgaaagatatgctttccgcaataactccaaaggcgaactttcattaacttgggagaaattatttgatgtagcagttggaattgcccgagggcttgagtatcttcaccgtggatgcagtacccgcattgtgcatttcgatattaaaccccacaacattctactagatcaagaattctgccctaagatctcagattttggaatggctaagctttgtgctaacaaagagagtatcgtctccattgctggtgcaagaggaacaataggctatattgccccggaggtctattcaaagcagtttggagcaataagtagcaagtctgatgtctatagctatggaatgatgatccttgagatggttggggcaagggagaggaacatagaagccaatagtgaatctagtagccactatttcccacaatggatttacgaacatctagatgaatattgcatcagctcttctgagattgatggtgagaccacagagcttgtaagaaagatggtagtggttgcactatggtgcatacaagtagttccaactaaccgcccaacaatgactagagtcgttgaaatgctagaaggtagcacgagcggtctggaattgccaccaaaagtgctattgagctggtaagcatccacaaatttcgattgaataagcattattgctcacttcttccagtgttgtacaactgcaaatactatttagcggttacaaaatgtaagaagagatttggaatgtgaaaccaaattcactacaatgtcgaccctcttttgcccagtt

SEQ ID NO: 23114 - DNA, 986 bp, Oryza sativa
  ref <308>: DATABASE ACCESSION NUMBER: AK073249
  ref <309>: DATABASE ENTRY DATE: 2001-12-06
gatccctgtgtctctgaacatgacacatttaattcagagttaagctcaagtctgtcaagaggaaaattaataattgcattagcatattgcctagctataatactagtagtttcagttagatccttgacaagtactccattttggtctctatccagttcaggcttctttccctccctttttaagcccacatcaccttccattgccacccaaagaaaacctctctctcaagtgtcctaacaacttctctccatctctctgaagccagcaaattaaactctctttctgaaaatttcagtacagagcttctgaagattctgatcatggaaggcttcatcccgttcatctacaaggccatcgtgcagtacaggaaagaagggcaggtctccgtcggtgacctcttcttcgacgagccgtcgccgtcgtcctatttccgcctccccggcgactccggtcggtaccagcagcagcagcaggcggcgatgagcgtcctcttctctcaggcgacgacggctgattccgacgcggtggcgccgcgtcggtccccgctgcggtgcacggtgcatcaccgtcggccggcgaccgcaacaccatgaatcatatcatggtgatggaagtgcaaggtggcaactggcaacagaagaaattaagcaactcaaatggaagcaaagcaagtgaagacttgcttaggtggtaggaatggaggttggtagattaattgtggtatgcatgcagattgagcaactgtgaatattatactagcataagttgcagtatatgttactgtttttttttctatttcttttctttttagattgtgatttgtgaaaatgtgcagaaatgatgcatgggtgcaagttctcccaaggagatctctgcaccataattagagtggaaagttgagagttgtgtatagtgccatcgaggaatatggcaataaaaaaagtgtgtacatgtacaaagcacgtatatatacatgcatggttgcc

SEQ ID NO: 23115 - DNA, 2474 bp, Oryza sativa
  ref <308>: DATABASE ACCESSION NUMBER: AK073250
  ref <309>: DATABASE ENTRY DATE: 2001-12-06
ggctgcacaaggagcgaggcggaggaggaggcgctcactctcgcgcgcgcgcacacactcgcatcgtcgcaccgatcgcggcggcgacggcgcagatctcctccgcggcggcgtctccggcttgcgctggttcgtcgtcgtctctccggctcggtgacgcgcgcgcgggtcatctgaggagcggcggcggaggaggaggaggaggagacggagggggagggtagggttagggtttaggggcgatgcagcggcaggggaggagcctgcagaggtcgggctcgaagcgtgtgctcgaccccaccggcggcggcggcggcgacgacgacgaccatgcggccaagcggcctcgcgtgcccgctctcgcaagtgtcattgtggaagctcttaaggtggatagtttgcagaagctttgttcatcactggagccaattcttcgtagagttgtaagcgaagaggtagagcgtgctttagccaagttgggtcctgccagaattcagggaaggtcctctccaaaaagaattgaaggacctgatgggagaaatcttcagcttaaatttacaactagattatctctaccactgtttactggtggaaaagtagaaggtgagcagggggcagcaatacatgttgttctgctagatgcgaacactggggttgctgttacttcagggcctgaatcgtgtgcaaaactggatgttcttgtgcttgagggtgacttcaacaacgaggaagatgaggattggacggaagaggagtttgagagtcacattgtcaaggagcgtgaagggaagagacctcttttgacaggtgaccttcaggtgacccttaaagaaggtgttggaaccataggggagcttattttcactgataactccagctggataagaagcagaaaattcaggcttgggctgagggttgccccagggtcttttgaaggtattcgtgttagggaggcgaagacagaagcttttactgttaaggatcacagaggggaattgtacaaaaagcactatccacctgccctaaaggatgatgtttggagattagaaaagattggcaaggatggtgcattccacaagaagttaaatgcaagtgggatttatacagttgaagattttctccagcttcttgtcaaggatcagcagaggttacggagtattcttggcagtggaatgtcaaataagatgtgggaaagccttgttgagcatgcaaagacttgtgtcttaagtggaaagcactatgtatattatgctattgactcaagaaatgtcggtgcaatattcaataacatctatgagttcactggtttgattgctgacgaccagttcatttcagcagaaaatctcactgacaaccagaagatctatgcagatggattggttaagaaagcatatgaggattggatgcatgttgtagaatatgatggcaaggcactcctgagcttcaagcagaaaaagaaatctgtcacaacaagaagtgacacggctgcagcagcaacaaacagccctgtttcctatggttcatccaacacacacaaacaattgtctcaaccagcaaaagcagggcaaacttctacaggcactacaagtgaagatggatctacaagtgcatacaatggaaatcaggcaggacgatatgcagtcaattctcaaagcatacctgcaaacgtcactacacaatatgagcggagttcactgacacctgaaagccagttcaatggttccgcactgcagaatcaagtttctaggggctccaatatactggcattgggaccaccacagcaacaacatcagcaaaattttgaattctcagcactaggtggccagtccatgcagcccaccggcttgaatcctttcgatgactggtcgcaaccgcaggagaaccggagtggggttgacgactacctgatggaggagatcaggatgcggagccacgagatattggagaacgaagagatgcaacagatgttgcggattttgagcatgggtggcgcgtcaaccaacctgacggaagacggcttcgcatttcctaactacatgccatcaactccccccaacttcaactttggggatgaccgtgcccgcccacctgggaaagccgtcgtcgggtggctcaagatcaaggcagctatgcgctggggcatctttgtcaggaagaaagctgccgagagaagagctcagcttgttgagctcgaggactagcaaacatcctaactgctggtctaacaaagctccattggtgttgctgctgctgctgttttaaggatctgaaaaatgggcttagcagctcctgtttggaggacgcttccttgaggccctgggttcttaattatggacacggattctcgtctactctttttttgtatagttgtttcatcattgtttgtttagtgtgatgcttagttgaatcctgtacgaaccttaaccagaactgtgtacatttaattgtttcaaaattcacacaagcattcgact

SEQ ID NO: 23116 - DNA, 783 bp, Oryza sativa
  ref <308>: DATABASE ACCESSION NUMBER: AK073251
  ref <309>: DATABASE ENTRY DATE: 2001-12-06
gacaagaaccacatcctctcatctctgtcattctgcagctagctgaaaaaatcttcagagaatcatcagttcatcacaaaagactatcaagcgaggcaagtacgtgacggtgactgtgatgagcggcggcggcggcggcgggagggggatgacgagggggctggacctgaagctgaacctgtcgctgccggcggtggcgcgcgcggtgtcgccggcggcggacgacgagtcgtcgccgagctcgtgcctgtcgtcggagagcgagctgcggcagcagcacggcggcggcggcgggcagctgcagtggtcggacagcccggaggcgacgtcgatggtgctcgccgcgtgcccgcgctgcttcctctacgtcatgctcgccgaggccgacccgcgctgccccaagtgccggagccccgtcatcctcgacttcctccacgccggcggcggcggcggcatcaacgccgacggccgccgccaccggaggggatgaacatggccatgaccatgatggcagcaagagatcgaggagaagcatctacacgcttctttgatcgcgcagaggcatcaggaattcaggatcaagaagaacaacgagaagaagaaatctcaccttgatgatgatcacagttaattagttctaggccccattagtttcttctcaattagcagcagtagtatcatgattaatcagctcgatcctctgcagattatgcagtataaccatgatttataagcatcaatctatatattatcacacgtagtatcatcgattcgatcgatccc

SEQ ID NO: 23117 - DNA, 1254 bp, Oryza sativa
  ref <308>: DATABASE ACCESSION NUMBER: AK073252
  ref <309>: DATABASE ENTRY DATE: 2001-12-06
gagtcccaagctcctttcccacccacccgtgagatggcggcggaggcccaagccacggcggccggcggcctcgccggcgagatggaggtggaggcgtaccgccgcctcttccccctcgccttcctcgagcgccacctccgcgaatccgtccgccccgacgcgcgccgccccgccgaggcccgcccaaccaccgtcgccctcgccgccgtgtcctccgcccacggctccgccctcgtccgcctcggcgacaccgccatgctcgcgtcgatcaagctcgaggtgatgtcgccctccggtgaggcccccgacgaaggatctattgctgtggagttccacatgccgcctatctgttccccgcttgtcagaccaggacggccggcagaggtggcgccagtcatctccaagaacctagaggacattctcatgagctcagggatgctaaatttgaaggagctctgtttgatcagtgggaaggcatcttggttagcatacctggatgtctattgtttgaatgctgatgggtctctattcgacgctgcactaatctcagctgttgctgcatttacacatttggaaattcctttggtatctgtcggtgatgatggtagagtatttactgttgggggcaatgaaggcaaagccaaatatgaattggtaaacagagaaaagaggaagcttacgattactaatgttccattttcccttacatgtgcacttcacaaggataatgttctagcggatccaactgctgaagaagaatcaataatagagacttctgtgactattgttctcgattcttcagaccagatagtgtcaatacaaaaacctggaggtgcagtgacatctatgacaactattaaggaatgcattagcttggctaaggacaggagaagaaagttaagagaaattctcatggacaatgttgaagcaatggaagtcgaccaaactgattaagtttgtcacagttctgattcagtgaatctaaccaaattatttttgtagtagctctttcctatctcttggttgtactcgtagcgtgataaattttagcacctttggctactatccgtttaattaaataagtaacagtccgtacctgcctatgattttattgaattaaagtggtatcataattttatttgagtctgtcttatgtcttctttgtattcgtagtatgaggaattttagcgtctatctaccttcggcttaccttctgtgtttagttacacacaacaatacaagtatgtaacagcc

SEQ ID NO: 23118 - DNA, 1637 bp, Oryza sativa
  ref <308>: DATABASE ACCESSION NUMBER: AK073253
  ref <309>: DATABASE ENTRY DATE: 2001-12-06
ggccgaaaagcttcttcgcttcgccgcctcctccccctctctccggcgcgttcgccgctcgcgatcctcccggcgccgccgccgccgccgcgcgggggccctactcgcgtcgacgccgggagggggacgccgtactccctcctcctcgcgtcgccccgccccgccgccgagtgcgacgccgctctctctctctctctcctcgcgagaaaccctagctggagttgaagtgaggggctcactgaagtgagcggagtgcgggggcgtggatgctgccgcgctcctccggccagatctagctagcaggccatggcgatgcggggggtcgatttcaagtggtacgatggattcttcctctccatgctcgccaccagcctaatcattgtctccatcaactggaagaggtatcgtctctgcgcccacccgttgcacatatggatcgtggttgactacaccaccgtcttcatcttccgccttctcatgttcgtcgataatggccttgccgccggcatgggattggatcttggatggcaacagagatatgctcgtttttgtgggagaattgttgtcttgtcggttcttgtgcttcttctctatccctttctttgggtttggactgtgataggaacattgtggtttagcactgcaagaggctgtttacccgaggaaggacaaaaatggggcttccttatatggctgcttttcagctactgtggtctcgcctgtattgcgtgtgtggctgttggaaagtggctaagccgaaggcatgctctccagcagagggcacaacagggaataccagtctctgaatatggggttttggttgacatgatccgtgtgcctgattgggcatttgaggccgttggcttggaaatgagaggaatgggccaagatactgcatatcatcctggtctttatttaacagctgcccaaagagaggcagttgaggcactgattcaagaactcccgaagttcagactgaaagctgttcctacagactgcagtgagtgtccaatctgcctggaggaattccatgttggcaacgaggtccgtgggctcccgtgcgcgcacaatttccatgtggagtgcatcgaccagtggctccggctgaatgtcaagtgcccccgttgccggtgctccgtcttccccaacctcgacctgagcgcgctcaacaacctccggccatcctccgagccggaccggccgtcggccagcgaggtgacagcggcgacgatggcgcggtacgtgaggtcgtcgcagccggctgggcagagctacctgctgcggctgcaggggctgctgctgcggcaggtggtggttcggcacggcggcggcgacgacatggcgagcgccgagaacggcgcttctcatgtggccgccgcggtgaccgcgccggcgaccaccggcggcgtggagagcgagctgcctagcatagtggttgacggtgggcatcagctgccggatcgctgaagcgcccggtggacggcgtgatgtagactgatagttatatgtgtggggaaggggaggatcgaagctatgcagcagcatgttttttttttctttgatcttatctcctgtgtgcagagtgtataaatattatgtaaaggagatcattattgcaagcttttgtttccctttcc

SEQ ID NO: 23119 - DNA, 2245 bp, Oryza sativa
  ref <308>: DATABASE ACCESSION NUMBER: AK073254
  ref <309>: DATABASE ENTRY DATE: 2001-12-06
tctttacaaataacactattttttcccccattaggtctgccctgtgtcagcaggatgccgcgcaaggttgtctctgggcctgactacgatgatgagtacaatgatgactatgatgagtatgatgaagactatgatgattacggtgggactgggcacagtgacgacattcagcaccctacgaaggagaaagagtcatcgaagaagtcctcaagtatggtgcctgtgctttggagatgctccatgtgcatgttcgataatcatgaaagcatggtgtattgtgagatgtgtggggtttttcgagaatcctttatgaaatctgccaaggatggttcaataaaagtccatgggataccaagtgattttgggacaccttcgatgccgaaatctgattctacaaagatgccagtgaatactcgtactacagactttggtggtgaccctgagataaagaatgctagcatatctcatgagaaagttggttccacacagtacgcatctgttggtagctcatcaggcgctgggaaaaagctgaaggaggaccagagtagtagggctaccagttctgcacagaatgaggatgtggcccagaaactttcttctgacatacagaagctaggtttagaaaagaatgaagtagatactgcaaaaccttatttacctgaagaatataagcctgagaagtggatgtttgctaatgaggaatcaggagtgctgagccaactaaaccttgcaatagtaggtcatgttgattctggcaagtcaacactctctgggagactgctacatctgttaggaaggatatcgaaaaaagatatgcacaagaatgagaaggaggctaaagaaaaaggaaaaggatcatttgcttatgcgtgggctatggatgaaagcagtgaagaaagagaaagaggtgtgacaatgactgtggctgtggcttatttggagaccaataagtaccgtgtagttttgcttgactctccaggccataaagattttgtaccaaatatgatatctggcgcaacgcaagctgatgcagctattcttgttgttgatgcttgcactggttcatttgaagctggcatggacggtgaaggagggaaaagtgttggccagacaaaagaacatgctcagcttattagaagcttcggcgttgaacagcttattgttgcggtcaacaagatggatgccatcgggtactccaaagaaagattcgagttcatcaaggttcaacttggtagttttctgcgggcatgcaacttcaaagattcatctgttacctggattcctcttagtgctgttgaaaatcagaatttgatcaaaattccttctgatgtccgtttaacttcctggtatcaaggattttgtctcttggatgctatagattccttgcagcttccatctcgggatgtttcaaagcccctcattcttcctatctgtgatgttatcaagtctcagtcaacagggcagttggcagcatttggaaaattagagactggagctattcgaattggttcaaaggttttaatttcaccttgtggggaagtggcgacagtgaaatccatcgagcgggattcaaattcatgtgacatagcaagagctggtgataatgtagcggttagtttacagggcatcgatgggagtaagctaatagcaggtgggattctttgcaaccctggtttcccagtgcctgtctctaacttcttggagctaagggttctagtgttggacgtcaccattcctatccttattggctatcaggtcgagtttcacatacatcatgtgaaggaggctgcgagggttacgaaaatcgtggcattgcttgacaaggctggcaaaccaagcaaaactgcacctcgatttcttaagtcaaagcagaatgcagttgtgcaggttaccttagacgctccggtctgtgttgaagaattctccaaatgccgagctcttggcagggcattcttaaggtctggtggaagcacaatcgctgttggagtcgtaacgcgggtactcggacaagatcagaactgaaagacctccgcccaacatctgaaaatttgaacgtatctgcagccgtgccctgctttggggtccataatattgtagttgactcaaaacggtattgccgatgagaagaagtttggcgacggcatttttcactgtgtgttcgtcgccatttcagaatttaatccgtcactcttttagttatttgtaattttcttatgcctaatgaaaaagggggtttcaggatttc

SEQ ID NO: 23120 - DNA, 3828 bp, Oryza sativa
  ref <308>: DATABASE ACCESSION NUMBER: AK073255
  ref <309>: DATABASE ENTRY DATE: 2001-12-06
gattccctccatcctctctcgcactcaccccgacgccgccgcctccctcctctctctctctcactacctgcgcgctcgctccaccccgcgccctaatctccgtcacgcccttcgcaagcaccaccattgccgtcgccgccgccgccgccgcccgtcgtggcctcccctccgtgcgcccggttgctccttcacatcctgatgagagaaaagagggatgggaagaaaatggcattatgttcaggatgatgcgatgctctgaccattttacactgttcttctcaggtttgcccaggagtacgagatgtgcggcagggctcgctgcacccttagcccgtcccaggccgctagggctttcggcttcccgaccacgacctctgtcgcgggcggtgggactgggggcggctgcggaggaggtgacgcacccgctgtgccgttgctccggatggaccggtatcggccatcatacaatgtgtcgccagggacatacctgccggtgggcaccgttcgggcgcggccggcggggtatgatggtggaggggacatggacggggaggtgtcggtaatccagtgcatgaagtgggggcttgtgcccagcttcaccggcaagaacgagaagcccgatcatttcaggatgttcaatgcacggtcagagtctataaaggaaaaggcttcctttcggcgacttatcccaaataataggtgtcttgtggcagtagaaggtttctacgaatggaaaaaggatgggccaaagaagatgccgtattacattcatttccaagatcagaggcctcttgtctttgctgccctctttgacacttggacaaactcggaaggttagcatgcacatttgtcaattaactttctagtctttggaagccatgattatggtactaagaatgtgtttcagtgtaatcacattttcttaaagtagtcttgggagttgctgcaaaagatatgttgtcctgttaatgctgcagcttatttattccaacatctgtggttgtaattactaattggtcttatttagcttcctaaaaggttttatctgcatatatgacattgtaaatgaaacaagttgtagtatgatatatttttgtactggtttaacgccatgtttgtaaagatctaacatggttgctcagttttgctttgtgcctgctctgtctgcacatagttgtaaacatattatatccacatcctgctttatatctagatcatgtcttatcataagcggtgcgacaagttcatgttgtcttgtgatcaaaattgcaaatatggatgaactgtgataatgaacatttgcaggcatgtactgaacttgaagtagtgctgtcatcaagtgtttcacattttttaaatctaatttatgccatgcgctgcgctgcgctgcgcattaaatgcctaacattattaattacatagaagaactgcattctgaatagtacaatatgcatatcattatgatagggaaaagctttcagatacgagttccactgtacaatgtcccagaactacatgtttggtgtttggctttttgattgtaaaaataatacgacgttttgctctacaaatattgacagatttagtatataaattgtctagcatgcactcacactaccaactcttatctgctatccttttgtctacattttaaggaaccattttattaatgcattttttattgagctgaattattgatgcatatttccaaacactttctgctgttcacatacgtcagtttatcacatgttcggattaattgattatgccactttagacttttgttgctcccatcggtaaaatgataatttacttgtttgagtattaatattatctgctatttccccaggagaaaccatccatacttttactattttgactactcgggcctcgatttctctaaaatggcttcatggttagctagatactctctaccccccatgatctcagattattcatatatttactatttcgatacatgtgtgataaggctgcttttgaattggcttcatggttagtagggttaataacaaaaccctgttattttacactatatcaagctgacatttatttgtacacacctactctggtcttcgtagctagtgacattactggaagtttgtaatgtttagcttgttaatgcactgttcctattaattttcactttacaatatcttatttagaggcaggcaaggagaaagccagttgattttcaattaaaagatagtatatatcattgatgatagtacaatattgcctttaacagtactgatgcatctgtattttactttatatgataagttgtccttgtagttcaatttaattgagaaaacagattatacctttttctggtaatggatgtatgaaaaatgtttttgccaagtctatcaggtcttgatatacgagtacttattatactgttgcacacaatgtttttatgacttgctaccttttgatttgatttggcaccttctgagtctgcatgtgacttaacagatagaatgccagtaatcttgggtgaccaagactccattagtacttggttgaacggtgcatctgtgaaactcgaagaaattacagtaccctatgaaggagcagatcttgtaagttcatgctttcatcattttattgggatttccgtgatatggctgatatcctttttggatgttattatttgctaactgaacattgtctttaactttttttaatgactagcaaaaatgcatgtgcgatgcaacatgtgaagacaattttaaaaactataccaatttaacagcaaataaaaaaaaacaaacgtaacaatggcattgaatctggtcgcgctcgcttcatgcatcatcacatgaagaatcctttatatacaccattccatagccttacaaatcgatcgggtggctatgccgtaagttgatgtatgggtattttgctatacctcatcaaccaaagattgaaataggcgtttcagaccagcactattggaagttctcaaagtcaggggtttacacttccaaatccgcacatgggaccttctttatcccagacggtcaggtttgctccttggaaaatgatatggaagaattgggcacctcttaaatgtaggttttttttctgtggctgacggatacacaaccattgttggatgacttattgtcttgccaagcgtgacttgcctcatctagccgcttgccccttttgtgatcaagcggatgagacaatgcaacacactttggtttcttgtgttttcaacagacaagtgtggtcactagttctttgaagtctgggctatttctccactcttccgaaccatgacacgcaagttttcgtgttggttgtcaaaggcagtaaaagggttgcgaatgagcgagaagaaagggcttaactctcttattatcttggtcacgtgggcaatctggaaacacagaaatgcttgtgtttccaatggtgttactcctagcatggcggatgtgattctgtccatcactaatgagggcacactatggtgtatggcgggagcttctaggctccaagagctgttagccaaggcaatagctcttgtgccctaggaggggggcgaatgtgggtgtgtttctttgtgtttttgtttttgtaagtccgaacatttattctttgcttaatgaaatgatatgcacatctcatgcgtgttcgaaaaaaaaagattcaattttgattattcaattagtgaaagtctttttgttttactgtagatgaaaagcttttacaaagtaacaaacttactgtatacataccttaaacaatgataatttcaaaaggaaaaaaatatttatgaggagcgaaatttggaagagg

SEQ ID NO: 23121 - DNA, 1103 bp, Oryza sativa
  ref <308>: DATABASE ACCESSION NUMBER: AK073256
  ref <309>: DATABASE ENTRY DATE: 2001-12-06
ggcgcggccgcgccgcaggccgacgagggataacctggtgccgatacgcgtcgacgtcgaggtggacggccagcgctacagggacgccttcacctggaacccatgcgaccccgactcggagatcataagcttcgcgaagaggacggccaaggacctcaagctgccggccaacttcgtcccccagatgctccactccatccaggggcaactgaccgagttccgttcctacgagggagaggagatgcagatcagggagaagattgtgcccctcaagattgacctccggataaacaatactgtaatcagagatcagttcttgtgggatataggcaacctggatagtgatcctgaggaatttgcaaggacgctatgtgacgatttgaacattacagatcctgaagttgggcctgcaatagctgtctccatccgcgagcagctttatgagattgctagtcaaagtgtttctgctatgagggaagcagctagagtttcaaagaaggggaggcgagcaccagaatttgcttcaaatagtaaagccatgaacaattcactagatctattcaagtattttggcagcaaagggagtgtcgttcggaaaaggaaggaatggtacttgtatgagcctgttgtagatgtcataactaatgaggaagttggagtaactgatgcaacagaggagattaactccaggaatgcatgagctgaagctgtaaactgtaccgcatttgatgatcctgacgtgttgaaaagaaggatgagagcctccaacccatgttacaccaatgctgtttgcaaagctttctggttgtgactgcagacctcaggaaagaagccatttcaatgtttgtgtttggaagggagggcgagcattaggagcattaggtacctggctaggttagctctgttctgtagatgtgtaatgtgttgtactcataaaaaaactgcatggaagccatggaatgtgacctacctgtatggagcttgcccttcagtttgctattgtgtcgaccatgttttgggcttgtgatgtgtttatgttttggaagaagtgttttttaggtcgtcagagtttaggcctactaattaagccttggacttttcgc

SEQ ID NO: 23122 - DNA, 1209 bp, Oryza sativa
  ref <308>: DATABASE ACCESSION NUMBER: AK073257
  ref <309>: DATABASE ENTRY DATE: 2001-12-06
gatggggctgaacgacccgtggttcgaggtgaacgcgtacatgctgcacgacccggtgaggtggaaggacctcaacccaaagttcgtgctgcaggtgtaccgcgacgtggtggcgacggggaacgccggcttcgcggaggcggcgtggccggcggtgtacctggccatggcgtacatggaccagttcgaccgcgacggcgacgggatggtcgagaacgagggccgccccgaccagacctacgacctgtggtcggtgtccggcgtcagcgcctacaccggcggcctctgggtggcggcgctccaggccgccgcggccatggcgggcatcgtcggcgacggcgccgccgaggcctacttccgggggaggtaccaccgcgccaggcgcgtgtacacagacgagctctggaacggcggctacttcaactacgacaacagcggcggcgccaccagctcgtcgatccaggccgaccagctcgccggtcagtggtacgcgcgggcgtgcgggctggagccgatcgtggacggcgacaaggcgcggcgagcgctggcgacggtgctcgactacaacgtcatgcgggtgaagggcggcgccatcggcgccgtcaacgggatgcggccggacggcgccgtggacgcgtcgtcgacgcagtccaaggaggtgtggcccggggtgacgtacgccgtcgccgccgcgatgatccacgaggggatgccggaggcggcgttcaagacggccaagggcatccacgacgccggctggggcaagcacggcttcggctacgcgttccagacgccggagtcgtggacggccgacggcggctaccgggcgctgcactacatgcgcccgctcggcgtctgggcgatgcagtgggcgctgtcgccgccggtgctccacaaggagcacagggtggcggcggtggcggcctcgccggaggacgccgcactggggcaggagaagttcgacaaggtagcgagcatgctgaggctgcctgaggagcagcagcacaaggggatccttcgggcgctctatgatactcttcgccaattgctgctcccatcatgatcatgagtcatcatgatcatgagtcataacaactgatgtaagattatcattgcaattgaattacaactggaatacgctttggttccagatttaattagttacatcataccacttcaaacacatgtataaactgcacagttcgattc

SEQ ID NO: 23123 - DNA, 2104 bp, Oryza sativa
  ref <308>: DATABASE ACCESSION NUMBER: AK099336
  ref <309>: DATABASE ENTRY DATE: 2002-08-28
gcggtttctcctcctctttcctctcctcctccgccccgacgcctcgctagggtttttgcctctccctccgccgccgccgctgccgcgaggagaggagggggggagagcacccagccggcgagccagccatgtcgctgcgcccgagcgagcgggtggaggtgcggcggaaccgctacaaggtggcggtggacgccgaggaggggaggcggcggcgcgaggacaacatggtggagatccgcaagagccgccgcgaggagagcctcctcaagaagcgccgcgaggggctccaggcccaggcccccgtccccgcctccgccgcaaccggcgtcgataagaagctcgaaagccttcctgctatgattggtggagtttattcggacgataacaaccttcagcttgaggccacaacacagttccgcaagttgctttctatagagaggagccctccaattgaagaggttattcaatcaggcgttgttcctagattcgtgcagtttcttaccagagaggatttcccccagctacagttcgaagctgcgtgggcacttacaaacattgcatctggcacttcggagaatacaaaggttgtcattgatcatggggctgtaccaatatttgtgaagcttcttggttcttctagtgatgatgttcgtgagcaggctgtatgggcattgggcaatgttgctggtgattcccctaagtgccgtgaccttgttcttgccaatggtgcattgctgcctctgctagcacagttgaatgagcacactaaactctctatgctaaggaatgcaacttggactttatcgaacttctgcagaggaaaaccacagccatcatttgaacagactaggcctgctcttccagcactggcacggcttattcactccaatgatgaggaagttctcactgatgcgtgctgggctctttcatatttatctgatggcactaatgacaagatccaagccgtgattgaagctggtgtttgcccccgtcttgtggagcttctcctccatccatcaccttcagtgcttatacccgcactacgaactgttggaaatattgtaactggagatgacgcgcaaactcagtgcatcattgattatcaagccctcccttgcctcctaagtctgttgacacaaaatctcaagaaaagcatcaagaaagaggcttgctggactatttcaaatattactgctggtaacaaagatcagatacaggctgtcataaatgctggcattattggtcctctggtgaatctgctccaaacggcagagttcgatatcaagaaggaagctgcatgggccatctcaaatgctacttcaggcggtagccatgatcaaatcaagtatctggtgagcgagggctgcatcaagccattgtgtgatcttcttatttgcccagatataagaatcgttacagtttgtttggagggtctcgagaacattcttaaagtaggagaaaccgacaagaccttggctgcaggtgatgtgaatgtcttttcccagatgattgatgaagcggaaggtttggaaaagattgagaacttgcagagccatgataacaatgagatctatgaaaaagctgtgaagattcttgaggcctactggatggatgaggaggatgatacaatgggagctaccacggtagctgctccccaaggtgctacttttgactttggccaaggcggtggtgctgctcaattcaaataaatacagatttgaccagaggtggtaaattgtggccactgtgcggggtactgaattgttctggtggttcaataagctaaaggtttcaagggggccagtgttacattatttccctactggtcacggatatcatatcactacgtctgtaacagggattaaagctttgaagtctgcgtttttcatcaggctactactatgtagtgtttgcatcttttagtatggtgtgcaacattttgctacttgtatagcctgagtcgaagcttctgcaaagccgtcacaacacattcctgaacccgtctggttttgagtttcgtcaggagtgtgctgagttgcagtttgtccggacatgtaaaccattatgcctttaaattatatattgctagggtttgttcggttct

SEQ ID NO: 23124 - DNA, 1768 bp, Oryza sativa
  ref <308>: DATABASE ACCESSION NUMBER: AK073258
  ref <309>: DATABASE ENTRY DATE: 2001-12-06
tcaccaaaaagccaaaaccaaactccatcacctcctcctccgtctccttcccccaccatttctcccccaaatccgtctcctcctcctcccccacccaaatctcccacctccgccgtcgcggaatccgccgcgacgacctcccctcgatccgcccgatccgaccccggatcggatcccaccgtcgccgcccgcgcgcgtggtggttgggtgtgcggggtgtgcaaaccctaggtctccgatccggatcccccccccacccaccccgccgatgggcgctggccgggcttgccgcggcggcccctcctcctcctcccccgccgctgccgccgctgcggtggggcggccgttccctccgatcgccgcttcgtgccccttctcgtcgtcttcggcggcggctgcggcccccgcggcgccttccgagacggcgtcgacgtcggtgaccaagaccgtgaacgggtcgcaccacttcaagatcgccgggtacccgctggccaaggggatcggggtcgggaaatacatcgcctccgagtgcttcaccgtcggcggctacgactgggcgatctacttctaccccgacgggaagagccccgaggatggcgccgcctacgtctcgctcttcatagcgctcgccagcgagggcaccgacgtccgcgcgctcttcgagctcacgctcgtcgaccagagcggcaaggggcaggacaaggtgcacacccactttgggaggtcgctcgagggcgggccatataccctcaagtaccgggggagcatgtggggttacaagcgtttcttcaaacggtctgccttggaaacatcagattatcttaaagatgattgccttttggtgaattgtactgttggtgttgtccaatcacatactgaagggccaaagatatatacaataccagtgccaccatccaatatgtctcagcatattggccagctactgacggatggaaagagaactgatattacatttgaagttgatggagaggtgttccctgctcacaaggttgttcttgcagcccggtcaccagttttcagggcacagcttttcggtccaatgaaggataaaaacatgaagcgtataacgattgaggatatggaggcttcagtttttaaggccttactccattttatgtactgggatgagttgcctgatatcgaagagcttactggcctaaatacaacttgggtatccactttgatggctcagcatttacttgcagctgcggatcgttatgcattggagagactaaagttgctctgtgagctcaagctttgtgaagatgttgcaataaacacagttgcaaacactttggcactggctgaacagcaccactgttatcagctaaaaactgtttgcctgagatttgtggctttgcctgagaatttaaaagctgtcatgcaaaccgatgggtttgattatttgcagcaaagctgcccatccttgctgaccgagcttctggagtatgtggccaaggtaggggagcattcggtgagcccctgcttgtattcgaacgaagtccttgatggtggcgatgccaatggaagacgtgtgaaaccgcggatttaacggcagccctgataaaaacctagctggatttccttgtgttgtttccgtgtaaagtgttatagttctataacggcacttttctggtgccatattatatcatgcatgttgtagtgtcttgtgacttctatacctccccctatcgttgctactctggagctgagttgttgctaatatatgtgttctactgactagtgt

SEQ ID NO: 23125 - DNA, 1257 bp, Oryza sativa
  ref <308>: DATABASE ACCESSION NUMBER: AK073259
  ref <309>: DATABASE ENTRY DATE: 2001-12-06
ggcagaaacccccgccgcgggaggaggagagcagtcgccgcagtagggcttacgtcgccgccgacgagctccatggcgaggggaaagttcaagggcaagcccaccggggagcggagcttctccagcgaggagcagatcgctgccggtacttcagcaggtcgtccaaagaactttaagaagaagcaatctgaaaaggaggtatatgatagaaggcaagaatcagatgaggaatatgatagaagccaagaatcagatgaggaagaatctgacaacttccagaagaacaaacataaaggcactgaaggtcttatcgagattgagaatccaaacctggtgaaaccaaagaatataaaagccaaggacattgatgtaagtcaaatatttgtttctgttcatgatggaggtagtctggtagcgatgcagttctgaggggaagaacatttacaggtcacaagttatatacagagttagactgtacgtctgctttagtaatagatttagcttttttttgtgtcaattctattgagtgaggtgcacaagtgaatattcagtaaagttatgctagaatgagtgattttactccatgtacttaccatgcctttcagaatgttatcgtccttgtacttcattgtatgtgtgggctttgtgatactgctactgttatactcttttcaattaagtgtacaaatttgattcatttttgtgtttatatgactacttgactaattttgctctggtacagattggtaggacatctgatctctccaggcgtgaaagagaggagcttgaaaaacagaaatctcatgagcgtcacatgaagctccaggagcaagggaaaactgaacaggctaggaaagatttagagcgtcttactttgatacgccaacagagggcggaagctgcaaagaagcgtgaagaggaaaaggctgccaaggacgagaggaaggctgaggcgcgcaagtgacctgccaagctattggaacaagaaagaattttgacccgagctgtgatagctcaacgttaccttcctatgcttctgaattctgatatcacttgaactcccctatatttatttaccgtaggaatagtatgcagtagttatgtaaagtggttgtggtcgaccgccacgggtagatgcgacttttgagcttggagaggtagtaggaacttggtggtagcaactttggtgaacaattgtctactatttgtcctcatgccgcggtattttcgttatggtattttagactgttaatgatc

SEQ ID NO: 23126 - DNA, 1483 bp, Oryza sativa
  ref <308>: DATABASE ACCESSION NUMBER: AK073260
  ref <309>: DATABASE ENTRY DATE: 2001-12-06
gatactgggcttctgtgttctgtcattgctagaagtttcattctctgatgttcttccaggaggtagaatgagaggaggtgttgaaaccacctcattttcaagaatcacaacagtcttctcaaccaccacattatcatcactgttgcttatcctggagacttctacatcagctttctttccatctgtaacttctaaagtgggaggtgatttacctccaggatccccatcccttatttctctagcaattgtcttatttttcacagatatagagggagctcgtggagatttgactttgagttctggtagagttgctgatttcctctggtcgagctgcattatagcagatattttctttgtttgggtatcttctggcatgcttttccttcgtgaatggtccatgctagcaaactttgaatttgaaggacggtcggtcaaagcattacttttaggttcagcaagtttcttcaatctctcactggacaattcatttctcccatttttctctttcttcatcgctgccaatgatgaggttgatttactcactgcatttgtactactatcgcttagtttgctagcttttcctgttttctgatggtcactctctgcagtagttctagcaggaagctttcttagaggtgaaaaggatcctggttcagcatcactaaactttgaactcttgtaggtactgggagaagtctttggtgaaggtttcactttgacctgctgtggtgttgatattgaattagatgtgctacttcttgcagcaatcctcttctgcctctcttgcttaagcctttccagccgtttaatctgttcctcttcctgaaaatgttaaaaaatagcttctaactcgttacaatcttgctacaggacagcaaataacaaatttatctttcgtactttgtggttgtagttcatttttctttggtgtgatatgtgtttgctgattaatacatgtgggaggaagatgtatgaatttaatgctagtctttggctaagtatatctaaaatatcatttcaactattactagctctgctttaatttggagaactcagaatgatatgtattttcaaaagaagccatggattggtttgatgatacatcacaggctttcccagatgctaagtaaatggagagtactgtgtcagaaaaagaagttacaagtcatgctttgttatattgggatttttggagaatcacgcaggagctccacctcgatgaaactgaccctgaagaagctcaaaacatcattggacatcaggattttagtgggttgctcaaaacgtagatggccattgtagttatcttttgtgctataaagtgtatgtttagcatgctacagtgaggcttggcgaatgatgagccatgatcctctcgtgctttttgttcacggtgtagcgtgaccaagtgtaggaattgtaaatgggcttccctccatcccaaaaagcatttattttaagaatgtcaaaaggaatatcaagc

SEQ ID NO: 23127 - DNA, 1488 bp, Oryza sativa
  ref <308>: DATABASE ACCESSION NUMBER: AK073261
  ref <309>: DATABASE ENTRY DATE: 2001-12-06
gcgatggggggccggaagcgcgcgctgctggtgggcatcaactacccgggcaccaaggcggagctcaaggggtgccacaacgacgtggcccgcatgcgccgcgccctcgtcgaccgcttcggcttcgacgaggccgacatccgcgtcctcgccgacgccgaccggtcggcgccgcagcccacgggggccaacatccgccgggagctcgcgcgcctcgtcggcgacgcccgccccggggacttcctcttcttccactacagcggccacgggacgcggctgccggcggagaccggccaggacgacgacaccggctacgacgagtgcatcgtgccctccgacatgaacctcatcacagaccaagatttcacagaactcgttcaaaaggtcccagatgactgcttattcaccatagtatctgactcctgccacagcggtggtctacttgacaagaccaaggagcagattgggcacagcaccaagcagaaccaggcccagcagatcaagcgagaagaacgttctgactctggcaccggcggtttccgatccttcctcaaagaaaccctcaaagaaacagtccgggacgcgttcgagtctcgaggagttcacatccctcaccagggcagccgccgcaacgacgacgaggatgaggagccacacatgggctcatcctcccatggtggcgatcgcatcaagaaccggtcattgcccctctcgacgttgattgagatgctcaaggagaagaccggcaaggacgacattgacgttggctcgatccggatgacgctgttcagcctcttcggtgacgacgcgagccccaagatcaagaagttcatgaaggtcatgctgaccaagctccaggagggccagcacggcggcgtgatgggcttggtgggcgccctggcgcaggagttcatgaaggctaagctggagggcaaccaggaggcggacgccctcgagccggccatgaaacaggaggtgcacagcgtccacgaggcgtacgccggcacgacggcgagggtgagcaatggcgtgctgattagcgggtgccagaccgaccagacatcggcggacgccacgacgcccaaggggcgtgtcctacggcgcgctcagcaacgccatccagaccatcctgtcggagaagagcggcagggtgacgaacaaggagctcgtgctgagagcgcgcgagttgttgtccaagcaagggtacacccagcagcctggcctttactgcagtgacaagcacaccagtgtggccttcatatgctgagagcctggaacatcagctgtgctgcgtggattgctacatatgcgagaatcttccctttcccctttgatgttttacattgttatggagtatggagtctatttgttttttaaatgaaagacaacatggagagtggtcgactgttaatatcaagagaagatgttacaaaatgacagtaaaataatcaccaaatcccagccaccgggaaatgcgatttgtttgtc

SEQ ID NO: 23128 - DNA, 1655 bp, Oryza sativa
  ref <308>: DATABASE ACCESSION NUMBER: AK073262
  ref <309>: DATABASE ENTRY DATE: 2001-12-06
ggctgtgggaagggaagagccagagaggccacacacacacaagcacaacacaaaagtggccatggctctcctcctctcctaccccaggcgccacccatccatccacctcctcatcctctccgcctacgccctcttcctcctcccaatcttggatggattggagctgggaggagatgggctctacagggagatcctcagggatgagacggtgctcaggctcaaagaacttggcaagatatctgatggggaaggttaccttgagaggacatttttgagtcctgcctcaatcagagcctctgctgtcattatcagctggatgaaagatgccggacttaccacgtggattgatcaaatggggaatattcatggtcgatttgaaccgaccaactcaaccaaggaggccttgttgatcggatctcacatggacactgttattgatgctggcatgtatgacggagctttgggtattatctctgcaatctctgctttgaaggttttgaaagttactgggagacttcagagacttactagaccagtagaggtgattgcattcagcgatgaggagggtgttagattccaaacaacttttctgggaagcgccgctgtagctggtacactacctgaatcaattttacaagtatctgacaagagtggcacgacagttcaagatgtcctaaagctgaattctcttgagggcactgctaatgctcttggtgaagtaaggtacagcccggagtctgtcgggagttatgtcgaggttcacattgaacaagggcctgtcctggaagcccttcgttatccgcttggtgttgtaaaaggaattgcaggacagacgcgattaaaggtaattataaatggttcacaagggcatgctggcacggttccaatgaaattgcgccgtgatccgatggttgcagctgcagagctcgtcctgacactggagacgctctgcaaagaacccaacaagttcctcacctacgacgaggaatgcggctgcttcactgaggaatccctcgccggactcgtctgcaccgtcggcgagctcctgacatggcccagcgccagcaacgtcataccaggccaggtgaacttcacggtggacatacgcgccatggacgacaaggtgagggagacgatcgtcaccagcttctcgaggcttgttcttcagagatgcgacgacagattggtcgactgcgccgtcgagcagaagcacgcggcggcggcgacgccgtgcgacgcggagctgacgtcgcggctggagcgcgcgacgcggtcgacgatctcgtcgatggcggcgggcgtgcgccgggccggcggcgagacgccggtgctgatgagcggagcggggcacgacgcgatggcgatggcgaggctgacgaaggtggggatgctgttcgtgcggtgccgcggcggcgtgagccactcgccggaggagtccgtgatggacgacgacgtctgggccgccggcctcgcgctggtcaacttcattgaccagaacgcggtggatgcggcggcggcgacggcggcggaatcgtgacgacgacggcggcgattcttttggtaggtgtgtgcctagtagcctacaaattgtaaatatggatttgcttgttacatttgtcaagaaataaaattgaattcaattcgttgagacgtcc

SEQ ID NO: 23129 - DNA, 1635 bp, Oryza sativa
  ref <308>: DATABASE ACCESSION NUMBER: AK073263
  ref <309>: DATABASE ENTRY DATE: 2001-12-06
ggcctcactccgccgccacgtcaccggatcccccacgcctcgcttcccccaccgcgtatgccgccgccggcgaggagcccggccgccggcgtgcggaggcgaggcgcgctcctccccctcgctttcctcctcctcctcctcctcctgctgctgcacctgacctcctcgcctgcccgctcccccaactccccgctgctccgcggctccggcgacggggagccccggcagcgcgggccctgcgactacgcgtccggcgagtgggttcccgacgacgacgatcccgcggtgtccggcggcctgaggtacgaccagacgtgcagggagatcttcaaggggtggaactgcctcgccaacgggaagcgcaacggccgggagctgctccgatggcggtggaggccacgcgggtgcgagctccccaggctcgacccgctccgtttcctggagtgccacaggaacaccagcattggatttgtgggtgattcattgaaccggaatatgtttgtctcgttggtctgcatgcttaggggggcgagtggggaggttcgcaagtggcgtcctgcaggagcagaccggggtttcacattcctgcgctataacctcaccctcgcataccacaggactaatcttttggtacgctatggtaggtggtcagccagtccaaatgggggtcccctagaatctcttggatacaagcaaggctacagagtagacgttgatattcctgaccaaacatgggcagaggcaccaagcttccatgatgttcttattttcaacacagggcattggtggtgggccccttcaaaatttaatccagtacagtcaccaatgctattctttgagaaggggattccagttatacctcctttattgccacctgcaggactggatttggctcttaaacacatgataatatttgtgaacaaagcaatgagacccaatggggtgaaactcttccgcactcaatctcctaggcattttgaaggtggtgactggaatgaaggtggatcttgtcaacgtgacaagcccttgtctgcagaagaggttgaggaacttttctctttggacaacaatggcacaaacgtagaagcacgcttggtaaaccagcacttggtgagggctcttgaaaagtctactttcaatgttctgaatataactggaatgagtgaattcagagctgatgctcatccttcaacaactggtgggaagaagcatgatgattgcatgcattggtgtttgccagggccaacagatacatggaacgatttgctagcagcaaatctattggcgactgagagttagtttgacaaaacgttgagactcttttgcttgagaaattctcccgagatttttgtgggttgtgaacatgatgaagcatcgatcgttgcacagcattgttttgatcaaagcttattcacggcagcttcttcatataggcattagagtattgagcattagacaatgtaaagttaacttcatttttgtgtcattgtgtgtgtgttttgggcggtgggtgaggtacttctgttcaaatttgtcctagagtttggatagtgattctgtccatctgtaaactgcttcctaaactactaaacggtgtatatttttgcaaaaaaattatatacgaaagttgctttg

SEQ ID NO: 23130 - DNA, 2905 bp, Oryza sativa
  ref <308>: DATABASE ACCESSION NUMBER: AK073264
  ref <309>: DATABASE ENTRY DATE: 2001-12-06
gtttctcgtcgtgttcttgaaactttgacatacttggcaagaaatcatccaaatgtggctaaactcttgctatttcttgagttcccttgccccccaacttgccatgctgaaacatctgatcagaggcgtggcaaggctgttcttatggaaggtgacagtgaacagaacgcttatgcacttgtcctacttttaaccttgttgaatcagccactttatatgaggagcgtagctcatcttgaacagctactaaaccttctcgaagttgttatgctcaatgccgagaatgaaattacacaagctaagctggaagcagcatctgaaaaaccatctggacctgagaatgcaacgcaagatgcccaagagggtgcgaatgctgctggatcatctggatcgaagtccaatgctgaggatagcagcaaactccctcctgttgatggtgaaagtagcctgcaaaaagttctgcagagtcttccccaagcagagcttcgactgctatgttcactgcttgcacatgatgggttgtcagacaatgcgtatctcctggtagcagaagttctgaaaaagattgtagctcttgctccttttttttctgttgccatttcataaatgaacttgcacattcaatgcaaaatttgacgctttgtgcaatgaaggagcttcacttgtatgaggattctgaaaaggctcttcttagcacatcatcagccaatggcactgcaattcttagagttgtgcaggctttgagttctcttgtcaccactctgcaagagaaaaaggatccagatcatcctgctgaaaaagatcattctgatgcattgtcccagatttctgaaattaacactgcattggatgcattatggttggagctgagtaattgcataagcaaaatagagagctcttcagaatacgcatcgaatctaagtcctgcttctgcaaatgcagccacattaacaacaggtgtagcacctccattgcctgccggaactcagaacatattaccgtacatagaatcatttttcgtgacatgtgagaagttacgccctgggcaacctgatgctattcaagaagcttcaacatctgacgtggaggatgcatcaacttctagtggtgggcagaaatcatctggaagccatgcaaatcttgatgagaagcacaatgcgtttgttaaattctcagagaaacacagaagattgttgaacgcatttatccgccaaaaccctgggctattggagaagtcattctctctgatgttgaaaatccctcgcttgattgaatttgacaacaagcgtgcatatttccggtctaaaattaagcatcagcatgatcatcatcatagccctgttagaatttctgtgcgccgggcatatattttggaggattcatataaccagcttaggatgcgttcaccacaggatttgaagggtagactgactgttcatttccaaggtgaagaaggcattgatgctggtggactaacaagggaatggtatcagctgctatcacgagtgatttttgataagggtgcccttctattcacaactgttggaaatgacttgacatttcaaccaaaccctaactcggtgtatcagactgaacacctctcatatttcaaatttgttgggcgagtggttggtaaagctctatttgatggccaacttttggatgtccattttacaagatctttctacaagcacatactaggtgtcaaggttacataccatgacattgaagctattgatcctgcatactataaaaatttgaaatggatgcttgagaatgacataagcgatgttctggacctctccttcagcatggatgcagatgaagagaagcggatattgtatgagaaggcagaggtgactgattatgagttgattcctggaggccgaaacatcaaggtcaccgaggagaacaagcatgaatatgtgaaccgggttgcagaacatcgtttaaccactgctattaggcctcaaatcacctcttttatggagggatttaatgagctcattcctgaggagctgatatcaatctttaatgacaaagaacttgaactgctaatcagtggactcccagacattgacttggacgatctaaaagcaaatacagaatattctgggtacagcatagcttctccagtcattcagtggttctgggagattgtccaagggttcagcaaggaggacaaagcccggttccttcagtttgttactggcacctcaaaggtacctctggaaggtttcagtgcactccaaggaatatctggaccacaacgattccagatacacaaggcctacggaagcaccaaccatctgccttcagcacatacttgctttaaccaactagaccttcctgagtacacatcgaaagagcagctccaggagagattgctactggctattcatgaggcgaatgaaggtttcggatttggttaatcagtcactcctgcacctgtgtgcaagaaatttcagggagtaatgtacagataccgtcggagttgcaataggcgaggggaatgtgcgcggactcttacataacctgctactagattcatttgttgcctgcatcaaccatcggcgttggtccctgaagactgatgagatttgttgacaaagtaccggcctgcccacgatgctttataggactggttgctgcgaaggatgtgcagggaggtgtagcaggaagtgctagaagacagcaactatttggtgttcataatattttttttctttcccttttgggtcttttttggccattgccccgttaatagatttcaccttctctatacattggacctgtatggattttttttccttttttattcaagtttgtttttggggggcatagaccggtggaatgcaacattaagtagaatgcaagttttccatcgctattgcatattcaatgc

SEQ ID NO: 23131 - DNA, 1364 bp, Oryza sativa
  ref <308>: DATABASE ACCESSION NUMBER: AK073265
  ref <309>: DATABASE ENTRY DATE: 2001-12-06
ggagggaggaggaggaagaggacgaccagaaaacacaacccgcgtgcgtccacgaatcccggctcgggatctccgtccccccccccccagtgacgtcatcgtaatccgcgggtcaaaagcagcaaggcggcgagcaccggagcaagaagcggagcgagcaaggtagccggcggcatccgcgtctccttccagggattcttggggggctccgctgctggtggtggtgggggagggatcgagaggatggccgtggagtcgccatccagggcggatgtgttgaggggcaaggcggcgctggtcaccggcggcggctccggcatcgggttcgagatcgccgcccagctcgcccgccacggcgcgcacgtcgccatcatgggccgccgccgcgaggtcctcgacaaggccgtcgccgccctccgctcccacggcctccgggctgttggttttgagggagatgtgcgcaagcaggaagatgccgcgagagtggttgccgcaacagttcaacattttggtaagctagacattcttgtcaatggggcagctggcaatttccttgcttccccggaggatttgacgcccaaagggttcaggacagtcgttgacattgacacagtgggtacatacactatgtgctatgaagctctaaagtatctgaaaaagggtggccctgggaaaggtccctctactggtggcgtcatcatcaacataagtgctactttgcattacactgcggcctggtaccaaattcatgtctctgctgctaaggcgggcgttgatagtataacaagatcattggctctggaatggggaacagattatgacatcagggtcaatggaattgcaccagggccaattgaaggcactccaggaatgaggaagcttgcacctgaggaaatggccaaggggagtcgggaaataatgcctttatttaagttgggtgaaaaatgggacatagctatggctgcactttaccttgcttctgatgcaggaaaatatgtaaatgggactacagtggttgttgatggaggtctttggctaagtcgccctcgccatattccgaaggaggaagtgaaggagctctcaaaggttgtcgagaagaaggttagggcctctggtgttggtgtgccatcaagcaaattgtgatgtcctctatggtttatatcgccctcctacgtgtactgtagaatcctttaccgaggagtcccgtagaatacttggatgttgctatcacttgtcatcgaagttttctatgattctatctatcaactcctgtaacatgctcagcacattcaccttgttcacgctcgagttaaacatttgccaaagtggttctcattcatattgtatctggtaatattgcaatc

SEQ ID NO: 23132 - DNA, 1356 bp, Oryza sativa
  ref <308>: DATABASE ACCESSION NUMBER: AK073266
  ref <309>: DATABASE ENTRY DATE: 2001-12-06
ggcttttccttctccaccatttctccttgtctcccaccaccacttccccccttctccgatccctcctcccatggacgccgccaaggataccaccgccgccgccgccgaccaaaaccctacccccaaccctcccaccgccgcagctccacccgatgactccgcggcggcggcggcggcggggagacggcccttcaccagcctcacccaggaggaggccgacctcgccctcgcccgcgtcctccaggagcaggagcgggcgtacatgatgctcagcgcgcaccacggcggcgactacgcggcctccgatggtgggagctacgagtttgacgaggaaggggaggggagcgattttgaggacgaggatggggacggggacggcgacggggaggcgctggatgaggacgaggaggtggccgacgcagacgcagacgccgccggtgacccggctgagttggaccccgcgcggtacgaggacgacgaggccttcgcgcgggcgctgcaggacgccgaggagcgcgaggtcgccggccgcctcatggcgctcgcgggcctcagtgattggcgagtgatggaccatgatgatgacgatgttgatgatgatgatgatgaggatgatgatgatgatgatgatgatgaagatgaagacggggatgatccacaggatgcatgggaagatgttgatccagatgaatattcttatgaggagctggttgcattgggtgaagtagttggtacggaaagcagaggcctctctgctgatacacttgcttcattaccttcaataacttatcgagcacaagataagcaagacggcaacatggaacaatgtgttatttgccgtgtggaatttgaggaaggtgaatcattggttgcacttccttgcaagcattcataccattctgaatgcataaaccaatggctgcaattaaataaggtatgccctatgtgcagtgctgaagttcctacttcacaggacacccgggcatgacatcactacatattgtagccattatgggcgtataatttaaaagaagtagcggcagcttgatactttctgtcatcggtgaaatggaagcatcaggagctggtggattgttcaggtctctgtacttgtgtgcttcctttgccatgccgctacattgggtcgtggttaagacgctcattgtcgcccatgtatgatttgattagatgtgaaatagttattacatggttgcatcattcaaattcaaagcaattaatttatagtctcctggtggcctgaggcctgttgtagcctataagttccgaaaaaattttgaaaatatactctttctttttcatattttacatttatatacacgtctgagattaatttgc

SEQ ID NO: 23133 - DNA, 1368 bp, Oryza sativa
  ref <308>: DATABASE ACCESSION NUMBER: AK073267
  ref <309>: DATABASE ENTRY DATE: 2001-12-06
gaccccccaacacaacagcactccacacacaattacacaacaatggcgtccgaacaacaacgccggcgatcaccacctaccatcctcgccgccatccttcttctctccttcttggcgacggccaacctcgccggcgccatcgatccagccggaaggagacggaacgtggtcgtcttctggggaggcaacaagaacgaaggcagcctccgttcagtctgcgacagtggactctacaacatcgtcatcatctccttctacagcctcttcggccatggccgctactgggacgacctctccggccacgacctccgccacatcggcgccgacatcacccactgccatttcaaggccgtctacgtcctcctctccatcggcggcggcgatggaaaagactactccctaccttcctccaaatccgccgccgacgccgccgacaacctctacaactccttcctcggcggcagccgcccgggagtctaccacccattcggcgatgacgtcacagtcgtcggcattgacttcttcattgaccgcggtcaacccgaccactactacgagatcgccgagcggatcaactacgacacccgccactggcgtgaccccatcgggttcaagctgacggcgacggtgagttgtgcgtacgacgactctgaccccaggatgaagaaggcgctggaaacctaccttttccggcgaatccacgtcaggttctacgatgatccgaggtgttcatacaaccatgccgggctcgccggcgtcatggcgcagtggaacaggtggtcggcgagttacccttataatgggaagatttacttggggctcgcggcggcgaatttgacggggaagaatgacatggtcgccgtcggtgagctctaccggaagctgctgccggcggtgcagaagacggatacctacggaggagtgatgctttggaacagctactatgactccatcactcactacggacggtatgtcagtgcctgggcttaattataagattcagagatcaaccaacgataatctctctatatatacgtgtgcctccatcatcagtccaatccgtgcgtgcatatagctcaatcactatcacagtaatcattacttagtacatgttgttttgtaatctttgctagcgaaagctagtgttttttttttatgtgcacaactcggtgtgccgccatacatgcatgtgtgatcgacgtatcagtctgtactctcccttttttatcttgctagcgaaagctagtattttgagtattattatctgcgcaatttggataccctacatcgctacgtgcttttgtaagctactaaccttgacggggttgaacctgtataaaaatatatctccctctatgtttatcatgt

SEQ ID NO: 23134 - DNA, 1460 bp, Oryza sativa
  ref <308>: DATABASE ACCESSION NUMBER: AK073268
  ref <309>: DATABASE ENTRY DATE: 2001-12-06
gtgggattaggtccaccagtagcttcactgtacataacagaggtttctcctccttcagtgaggggcacatatgggagctttgttcagattgcaacctgccttggaatcgtagtatctctcctaattggtacacctgtgaaggatattgatagatggtggagggtgtgtttctgggttgcagctgttccagcaactttacaagctcttggaatggagttctgtgctgagagcccccagtggctgtataagtgtggaagaacgactgaagcagagatacaatttgaaaaacttctaggtcctcttcatgttaagtctgctatggcagaactctcccgatctgaaagaggcgatgatggagaaaatgtgaagtattcggaattgttttatggtcgcaactttaatgttgtttttattggcacaacgctctttgctttacaacagttatccggcataaattctgtgttctatttctcatcaactgtgttcagaagtgtgggtgtgccccctaaccttgcgaacatatgcatggggatagcaaatttatcaggctcaattgtagctatgcttctaatggacaaactaggaaggaaagtacttctttcagggagcttccttggcatggcctttgcaatgggacttcaggctgttggagcaaatcgtcaccaccttggttctgcaagcgtatatctttcagttggtggcatgctattgtttgtcttgacattttcgttaggagcaggtccagtgccaggacttcttttgcctgagattttcccaaacaaaatacgggccaaggctatggctctgtgcatgtccgtgcattgggtggtaaatttttttttgtcagtttgttgttcttgcggcttctggagcaacttggtccacaagttctgtacacaatgttttcctcagcttgtgtggtagcagcaatatttgtgcggcgccatgtggttgaaacaaagggaaagactttgcaagagatagaagtttcgcttctacaaacacaataaagatttcatcagcgagtttgaggcaacaacaacctacatgattagcatctgacactatacttgttgctgaatacctgctgggaaagtctaccgtgaaagttgatcactgaaccaagccaacataccacggacaggcagcgccctacactggaccagggaagtacccagacatgcacctgtgaccagtaagggcgacctagctcgtgcataaaccatccatgtagtgaggttgcatctgtatagttggtcttctgctagatgtatctggtaatctgtgttgtcttcatcatttgtcatttgtacactgtcagtatggagaaaaaaagacgggaagtgtggttactgatggccatagtttgaaccgtggatacgttttttttactgtttaaagaggaataacagcactggctctgccagctacatgaaaataaagtgcgttctgcctgagct

SEQ ID NO: 23135 - DNA, 1404 bp, Oryza sativa
  ref <308>: DATABASE ACCESSION NUMBER: AK073269
  ref <309>: DATABASE ENTRY DATE: 2001-12-06
gaccaaaaacctcgtctttctcctcctctcctcccatggcgtccctccccaacggcgccgcctccgcctccgcctccgccgccggcggaggcccggcggtggtcgacaaggaggtggacttcgccaactacttctgcacctactcctacctctaccaccagaaggagatgctctgcgaccgcgtccggatggacgcctaccactccgccgtcttccgcaacgcccaccacttccgcggcaaggtggttcttgatgtgggtaccgggagtggcatcctcgccatctggagcgcgcaggctggcgccaggaaggtgtacgccgtggaggccaccaatatggcggagcacgcgcgcgagctcgcgcgggctaacgacgtcgccgacatcgtcgaggtgatacaggggtccatggaggacgttgtgttgccagagaaagttgatgtcattatatcggagtggatgggctactttctattgagggaatcgatgtttgattctgtcatttgtgcgcgtgatcgttggttgaagccagacggtgtaatgtatcccagtcatgctcggatgtggctagcaccaataaggagtgatctggctgaaaataagatggaagatcttgagattgctatgcatgactggaatctatttgttgaggataccgagtcttattatggggtcaacatgaatgttttgacaaaggcataccgtgcagaacatgaaaaatactatcttaagtctgccatatggaataatcttcatccaaaccaagttatagggcaagctgctgttattaaggaaattgattgcttgacagcaacggttgatgagattcgagaagttcgagcacaggttacaatgccaatcaagctggatatgacaagattagcagctcttgctggatggtttgatgttcattttcgaggtagtaagcaaaaccctgcaactcaagaagttgagttaagcacagctcctgatgtgaatggtggcactcactggggccagcaggtattcttgctgactccgcctctgaaagtaaacgaaggggacaatgttaaagtttctttcacaatggttcgctcaaaagagaatcatcggctcatggatatggagttcacatatgaattgcatgagtcatctggcaagcagcttcccgcaatcacaaccaagatttacttagaatagagcaagaacgctgactggatctgattcaattgatgaaaagattgtgtactggctaccatgtctgaaccttgcttgatagttggagccaagctgaactcctccctggtgtatttggtttttaatagagggcctaatggccacattgtgtaatactacccagaatatgtacaccgaggctgtgttgtgtgaggcatgataaaagtgccagagattttgttgtatcagt

SEQ ID NO: 23136 - DNA, 1207 bp, Oryza sativa
  ref <308>: DATABASE ACCESSION NUMBER: AK073270
  ref <309>: DATABASE ENTRY DATE: 2001-12-06
ggccggagcagagaaacctctagaccgcctaaacctacgcaaggatgcaggcgctcctgctctccccggcggcggcgccacggccgcccctccccgctccgaggcggccgtctctaccccctcgagccacctcgatcctcacgccggcgccgcgctcccccgctctccgtgtggtggacgccttcgccgccggccgctggggaggacgcgctgcgtcgcgcctcccggctgctgctgctgctgcggcggcggcggctgaggccggtcctcccgaccccgcgccttcccccgccgaggacgaggccgagcgcgccatgctcgcccaggttagcaagaggctagaaaaaacagcacagtatttcaagactttgggcaccctgggattctggtctcagttagtgtgcacaactgtctcagcaggaattttgtcattctcggcagtcgctacagggaatgcaacatctccctttacattctttgcaacttcaattggtattgttgcggcatttatttcagtcttttgggcttttggttatatccgtctttcacaaaggcttaagagaacagcaaacaaacctgcaaaggctcctccacgtgccgatgtggtaaaaaatctcaaaaatggtattgtgctcaatgttcttggaatgggtgctgcaattcttggtatgcaggcaactgtaggggcattggtagcaaaagccctcactacatctgcagtgccgtactaccagggaatatctcctggccagagccctgttctatctttagatgttttccttgttcaggcttcagccaacacgatcctctcacattttcttggattatcgagcacactggaattactgcgatctgtaaccctgacaaaagtagaagctgcctcaacccctcgatctcagccagcatgagcttaagctttccagagtccagaccaatgttcctccgttctttctttggttgtatttttctctgcaattgctttgtgttttcttaaaattttcttttagtgataagcttcgatcagtctagttgcgttgcctttgctgagtgcagatttgaaggacgcattcaaatctgctcgtctttcttattacctttgtttatttctgagcatattagaagtttctgtgagaagtgagcaagtttcgtgattcctatgatgtgcggtgctgcttcattgctgttatggaaattggaaagaagttag

SEQ ID NO: 23137 - DNA, 1629 bp, Oryza sativa
  ref <308>: DATABASE ACCESSION NUMBER: AK073271
  ref <309>: DATABASE ENTRY DATE: 2001-12-06
gataaactttaccactactcgccccgtgcgctctcctcgtcgtcgtcgtcgccgccgcgagcgaaccgggaggagaaagtccaaaccctcgcgaaggcagagtcggggatagggatatcgccgaggtgggagaaggcgacgtcgccgacatgaagctgttcgtgaagaccctgaagggcaccaacttcgagatcgaggcgagccccgaggcgtcggtggctgaggtgaagagaatcattgagagtactcaggggcagaatgtgtacccggcggatcagcagatgctcatacaccaagggaaaattctcaaggatgatacaactttggaaggcaacaaagttgctgagaacagcttccttgttataatgctgtctaaggccaaagcatcatcaagtggagcttcaactgcttcaaaggcacctgtgagccagtctcaaccagcaactccagttgcctcagttgcaagaacaccacctccacaagcacctgttgttacacctgaaccggcacctccaagtgcacagcctccagttgcttctgccactccagctgctgctgccactccagctgctgctgtgaccgcatcaagtgatgcggatgtctacagtcaggctgcatcaaatcttgtttcaggtagcaacctagaacagacaatccaacaaattcttgacatgggtggtggcacctgggaacgtgacatggttgtccgtgctttgcgtgctgcatataacaaccctgagagagctattgactatctgtattctggaattcctgagaatgtggagcccccacaacctgtggctcgagcacctgctgctgttcaacagggaaatccacaggttccatctcaggctcaggctgcacctccaccgcctgtgcagccagctggtggtgcctcaggacctaatgcgaatcctctaaacctattcccccagggcattccaagtgctgggtcaaatcctggtgctgctgctggtgccggtgccggtgctggtgcccttgatgcattgcgacaacttccacagttccaagcgctgcttgcattggtccaggctaatccccaaatcttgcagccaatgcttcaagagcttgggaagcagaatccgcaaatcttgcggttgattcaggaaaatcaggctgaatttctccgtctggtgaatgaatctcctgatagcggcgctgctgggggaaacatactaggtcaactagcagccgctatgccacaggcacttacagttactccagaggaacgggaggccattcagcggctggaggcaatggggttcaaccgtgagctcgtttggaggtcttcttcgcatgcaacaaggatgaagagctggctgccaactatcttttggatcatggccatgagtttgaggatcaacaataggtgttgttagtttggtctcatcgtggctgggagaccccaaaaaaaaaatgaaatcgaggcagaagcagtgcagttcagtatcgttattatttctgactgctgagagatacctggccgtgtgtgcaatgccgctgactatgttttaatttcctgtgtcttgggaatgcttttaaagtacatattaatttcatattcacatattatactgtgtataaaagttgcatgttggccttgtgtgc

SEQ ID NO: 23138 - DNA, 582 bp, Oryza sativa
  ref <308>: DATABASE ACCESSION NUMBER: AK099337
  ref <309>: DATABASE ENTRY DATE: 2002-08-28
ttggggtaagctagggtttaggtctcggcgcgcggcggaggggaggaggaggcgatggcggcggcggcggcggcagcggcggctgaggaggagatcgcggtgaaggagccgctggatctgatcaggctcagcctcgacgagcgcatctacgtcaagctcaggtccgaccgcgagctccgcggcaagctccatgcatacgatcaacatttaaacatgattcttggagatgttgaggagatcgtgacaacagttgagattgacgatgagacatatgaagaaattgtgcgcaccacaaaacgcactatccccttcctttttgttcgaggtgatggtgtcattttggtttctccacccctccgaacggcatgaagtatgaaggaagctcctgccgattgtcaaccatgagtaatgtgtattttttaatcaatggcatgtgttatgtgctgaagtgctactatttctgatggattctagttttagcatatgatacaattgtgtaacaatttctgatcgaggtgctagtttctactgtcatgttgaatcaaccttttgttaccagattaatcaactcaatcccgaagc

SEQ ID NO: 23139 - DNA, 599 bp, Oryza sativa
  ref <308>: DATABASE ACCESSION NUMBER: AK073272
  ref <309>: DATABASE ENTRY DATE: 2001-12-06
gaggggtcctttgattccgctcgattccgcggagcgctatcctctctcgctctctttcattagttcgtcttcctccgcccatctctttcgttctctccgctgtgtttcgttctcttgaatttctctccgatttcgttgtggtcgctgatgatgggggatggcagatccctagtcccccccccacccccccccccaacacccccaatctggtcgtgctacccttgagcaatggaggcgattctgccgcaacaagggagcggctggtgctgtcaacggcgcaacggcggtgagattcgcccgctgcggaagtcgtggcctggagaacggagaggaaccgccagatcctggggctacagagcaacaccgccagatcgtagagagtttggccgccgccgccgctggaatcatttggttgatgccgaagctgccaagatgactctgatgatgagcttactcttgcagtacatgttcgtagttagtgtgatggatgaacatcaccattttgcctggcactgtgtactgccgctccaaagttagtatgatgtaatagtgaaggctatatgtccatgtgcttagtcttaatgttcttgcacttatgc

SEQ ID NO: 23140 - DNA, 1087 bp, Oryza sativa
  ref <308>: DATABASE ACCESSION NUMBER: AK073273
  ref <309>: DATABASE ENTRY DATE: 2001-12-06
gtcattccatcacagacagttcgcagaatcgcagcagcttagcttaattacttttttcaccaactcaactttcagttaatttccggttaatcctcgattcctcatcatgcctggactcaccctcggcgacgtcgtccccgacctggagctcgacaccacccacggcaagatccgcctccacgacttcgtcggcgacgcctacgtcatcatcttctcccaccccgctgacttcacgccggtctgcacgacggagctgtcggagatggcgggctacgccggcgagttcgacaagaggggcgtcaagctcctcggcttctcctgcgacgacgtcgagtcgcacaaggactggatcaaggacatcgaggcctacaagcctggccgccgcgtcggcttcccgatcgtcgccgacccggacagggaggcgatcaggcagctcaacatgatcgacgccgacgagaaggacaccgccggcggcgagctccccaaccgggcgctccatatcgtcgggccggacaagaaggtgaagctgagcttcctgttcccggcgtgcacggggcggaacatggcggaggtgctgcgcgcgacggacgcgctgctgacggcggcgaggcaccgggtggcgacgccggtgaactggaagcccggcgagcgcgtcgtcatcccccccggcgtctccgacgaggaggccaaggcgaggttcccggccgggttcgagaccgcccagctgccctccaacaagtgctacctccgcttcacccaggtggactgagagactgatggtgagggagggagggagagatctgggccgtcggtttcgtgtgtaataaaccaacgcacgacgtagatgcttccacgtgtgtgtttcccgtgctgcttcgattgatcgatcgatcattcggtaagtactctagttatgtgtaatctgctgtttgggtgtagtggtgcatttgctgttctgttgcctgaaagtgacgaacggattatgtttgtcatttgtatgtaaaatgtaaccgtatgttttttatttatcccttccgaaattactgtggaatatagtgaagtaatgctgttaataaacagcccgttt

SEQ ID NO: 23141 - DNA, 1504 bp, Oryza sativa
  ref <308>: DATABASE ACCESSION NUMBER: AK073274
  ref <309>: DATABASE ENTRY DATE: 2001-12-06
gagggaaggagacgggcggacgaacggagaccttctgctcgatctctgcctgcttctcccttctcgcgctctctctgcagcttgccgagagagagagagagagagagagagagagagaggtttgacccccaacaaccctcctcctccatatcatctcccgtcccgtcccgttggttgctactactacttactcacttcctcctccttctagtaaagggaggagcaggtacacgggggttgagatctgaggagggaggagaggaggttcgtgatgatggagagccaggcgctgcaggaccccgtcgccgagccccatggagctgagcctgccgccgccggagctcctcccgccgtggttcccggcaaggagttcacccgcacctgcaagggcctcgtcgtcgtcctcgtcggcggatatgtgctgctccagctcctcccctcctccctcgactacctcgccatcatccccgccaagactattccatttgtatggactgtcttcacagctggctacatcgaacaagttcttccaggggctatcggcagttcccttggtcttctcttctgtgggaaggatatcgaaccagtgtggggccgcaaagaattcttgaagtttatcatcttggtcaactccatctgcggtgtccttgcattctgctttgctgttgcactctactatgtcactggaaaggagagcttccttgttacaccactttctggtttccatggtgcccttgctggctttcttgttggcctgaaacaacttttaccaaaccttgagctccccatgtgctttttctggaaaataaaggctaagtggatgccattcttcgtgctatgcttctcaactatcatggccttcattgtacctgattccattaacttccttccaactctgctatcggggatgtatgtcagctggatttacctgagatacttccagaggaacccactgacagggcttaagggtgattcaagtgatgacttctccttccccagcttgttcccggatgccatgcggccagtcacagaccctgttgctaacctctttgatcggatgctgtgtgcaaggtctagaccttctgaactggccctcccagtctcagatcctgcaaaggcatcgagaagaagggagcgtggcgaaagggttcttgaggaaaggttggctgcagaccatgcagcagacacggaagccccagctctgggccattccacagcagaagattaatatagctcgtccactgtcaacacaccatactgcgataggagccacggccacctgcctatgtgctttgtaacaccgaaaatttgtgttctggagaatgcaattcagtttacaatggaccaatgatatgatattttactctcttttcttattatttattggttaaattctgttgtagttgattacagtgaaaaaagaaagaaaaggatgacatccccatccagatgtaatgtagagagaattgagactttgtgaggattgctgttgagaatattttcc

SEQ ID NO: 23142 - DNA, 1095 bp, Oryza sativa
  ref <308>: DATABASE ACCESSION NUMBER: AK073275
  ref <309>: DATABASE ENTRY DATE: 2001-12-06
ggttcgtcgcaaagagagaaaccccccgcacgaagcaaagaagccgcaaccgcaagccccaagagcgaaaccgtaacgaagggaaagtttgggatgcgcgttgctgcgacgacgcggcccgcctcctcctccgccgccgctccgctccccctcttcctcctcctcgccgtcgccgccgccgccgccgccctgttcctcgtcggctccgcgtccctcgccatggccggccacgtcctcggcggcgcgcacgacgccccctccgccgccaacagcgtcgagaccgacgcgctcgcccgcttcgccgtcgacgagcacaacaagcgcgagaacgcgctgctggagttcgtgcgggtggtggaggcgaaggagcaggtggtggccggcacgctgcaccacctcacgctcgaggccctcgaggcggggaggaagaaggtgtacgaggccaaggtctgggtcaagccgtggctcgatttcaaggagctccaggagttccgcaacactggggatgcaaccaccttcaccaacgccgacctcggcgccaagaaaggtggacatgagcctgggtggcgtgatgttccagtacatgatcctgtagtcaaagatgctgcagaccatgctgtgaaatcaatccagcagaggtcaaactccctgtttccatatgaacttcccgagatcgttcgtgcaaaggcagaggttgttgaagacttcgcaaagtttgacattctgatgaaacttaagaggggaaacaaggaggagaagttcaaagccgaggtccacaagaaccttgaaggggcatttgtactgaaccagatgcaacaagagcatgatgaatcgagcagccagtgaaccttgccacattaagctgtagttatgtagtttgtgttcaataagaaaacagtgaacatgcacccttccgtttctatcgggacataggctggaacttgttcctaacatcgatgaaaagaagacactacactatccttttgttcctgttgctcttagtgtgataatacgatactggtcgtgtaacttctcaagggaaccgtgggtctatgccatacagcttgtgaatgtgaaatcctatgttgatacttc

SEQ ID NO: 23143 - DNA, 1653 bp, Oryza sativa
  ref <308>: DATABASE ACCESSION NUMBER: AK073276
  ref <309>: DATABASE ENTRY DATE: 2001-12-06
ggaagtacaaggtgggatttaccgatgatgggaagatattggccttagaccttgatgtttataacaatggtggtcattcacatgatttgtcccttccagtcctggagcgtgctatgtttcattcagacaatgtctatgatataccaaatgtcagagtcaatgggcaagtatgtttcacaaatttcccaagcaatactgctttcagaggttttggtggtccacaagctatgctgattgcagagaattggattcagcacatggctacagaactcaagcgaagtcctgaggagataaaagaacttaattttcaaagtgagggatctgtgcttcattatggccagttgcttcaaaattgtacaatacattcagtatgggatgaactaaaggtttcttgtaattttatggaagctcgcaaagctgtaattgattttaacaataataaccgttggagaaagcgtggcattgctatggttcccaccaagtttgggatatccttcactacaaaattcatgaatcaggctggtgctttagtgcaagtttacactgatggaactgtccttgtaacgcatggtggggttgaaatggggcagggtttacacacaaaggtagcccaagttgcggcttcatcattcaatatccctcttagctctatatttatctcagaaacaagcactgataaggtaccaaatgcaacaccaacagcagcctctgctagttcagatttatatggtgctgcagttttgggtgcttgtcagcaaattatggctcggatggaacctgttgcttcaagaggaaaccacaagtcctttgctgagttggttctagcatgctacctggaaaggatagatctctctgctcatggattttatatcactcctgatgttgggtttgactgggtgtctggcaagggaactccattctactatttcacatacggagcagcatttgcagaagttgaaattgataccctaactggggatttccacacaaggacagtagatattgttatggatcttggctgttcaattaatccggctattgatattggccagattgagggaggttttatccaaggattaggttgggcggccctggaagaactaaaatggggggatgataaccacaagtggattcgacctggacatcttttcacttgtgggcctggctcttacaaaataccctctgtaaatgatatacctctaaacttcaaggtctcacttttgaagggcgttttgaatccaaaggtcattcactcatccaaggctgtaggagagccaccgtttttcctcggttcagccgtcttgtttgccataaaggatgcgatatctgccgcaagagctgaggagggtcacttcgactggttcccacttgacagcccagcaacaccggaaagaataagaatggcatgcgtggattccatcacaaagaaatttgctagcgtatattaccgtcccaagcttagtgtatagtggctactgccaaagtacaagggtcattaaaggtttatgcttgtcgtacgtatatttgtacagtcccaagctactgtgtaaacataaatataggcgacagtttaggggataaaaagttaccttttcctcttcttttttaccccccaggaagaaaacactagaaataaaagcaatgttcacatcg

SEQ ID NO: 23144 - DNA, 1444 bp, Oryza sativa
  ref <308>: DATABASE ACCESSION NUMBER: AK073277
  ref <309>: DATABASE ENTRY DATE: 2001-12-06
gactcgctctcccccactgtctctctctttctttctctctcatccctgcccccttcccctctcgcctccctcaacggcggcagatctggcagaggcgatggcgtcagcgactcctgcgggccggatccgatggtcctataccccctccccctccccctccgcccctaaccttcttccgtggcagaactggtggcagcggtggtgtcggtggctcccgcgggcagatccaatggaggcgatggcagtggtgtttctgacaagcgggtccagcggtcctctaccccctctccgccccccccctacccccaagcttctccctcggtggcggcagtggcatcgaggctcccacgggcgcatcaggcataggcgacagtggtggcatttccaacaggcggatctagcggccctccaccccctccccttcctccgcccccaagattctcctgtgatggcggcggtggcatcgatgctcctgcgggcggatccgatggatgtggcagccggcggtggcatttctgacgagcggttccggtagtcctctacccctccccctccaccctaagcttctcctgtggcggatccggttgtggcggcggatcccgcgggtggatccggcagaggccaattgattgttgttgttgttgttgttgttgtgatgatgttgttcttgttgttgtgatgatgactatgatcgatagttcgttgtggattgattttgggggtgaagagggatggatgcgctaggtgcatcgagccctttttttttcccaacccgggaaccataaaggtgtcagttcctaagcaacaccttttaggagactcaaaggtgctgcttgcttgggaaatccagcaactaacatgttttttgtagtagtaatatttttgtttcatttgcggaatttatgttaattggaatattttccaagattcatgttggagggttgtcgggccggatagccgaccgggttgaatcatgagcccaagagtgataactgcacggtccacgctgcatatgccttcgtttccatcggtactcatgctgttcaaaatttaatccccatttttctcacacacgcagagaagagaggattgatttggatctattcttatcggcgccgttgtcgtgatgccctcttctccagcggatggcggaacccttgggcttggcttcgttatcaagagggtggagcgtgcggcttatttgtggaggttgaggttgtggaacaatctcgtccatttttgctacatcatcgtcgttggtgtttgatgcctttccatccgccactgccagtgtgtgcgcacttttttcagagatcggtgactgcaacatctctgatatatggcaaattttgttacaggacacttcgacttcatgcttttagccgtaggatactggccgaactcacttttaggggaaaatactctataaacatggtaatttgcc

SEQ ID NO: 23145 - DNA, 846 bp, Oryza sativa
  ref <308>: DATABASE ACCESSION NUMBER: AK073278
  ref <309>: DATABASE ENTRY DATE: 2001-12-06
ggctaaggtaatcagtttccgagagcgagcgagagagagagagagagagagagttagggtttcgcaagtgatggcgacggggaacggagaggccgcggtggtggagaaggagggagagggcacgatggtgccggaggcgctggagaagaaggtggtgttggatgcggcggagaaggaggaggaggagaaggatagcgaggcggaggcggaggcggaggcgaggatctccaagctcgtcggcgacatgatcgacaacgtctgcgccgatcacgggatcccgctccccaaggtcgacataaagaccgtcaggaagatggccgagtacatgaacaagcacttcgccatcaccaacaaggaggaactcaagatctgggacgagggcttcatcaacgagcttgacggcgacgaggacaagtactccctcttcaagatcatccgggcctccgagcgcgtcggcttctatggactcctcgacctcgccagcgacatggtcgcccgcaagatcaaggcgggcaaggccatcgacgagatccgcaagttcctcggcgtcgagaaggacttcaccaaggaggaggaggagaagatccgccgggagaacgcctgggccttcgaggagtagacacctggctgttcttcgtcgtgattgttgttgtttcgtaggtgtgtgttgcgtacttgcatctctggtagattcagatcgaatcggggagttcgtgcatcccgtcccgtgcaagaagaacagagtcgattggctgtgttgttgaatgctttgaactgctggatcgcttgcatgatcgtgaataattttgcttccatcaatgctgtttcctgtgtttgcttggctcc

SEQ ID NO: 23146 - DNA, 1626 bp, Oryza sativa
  ref <308>: DATABASE ACCESSION NUMBER: AK099338
  ref <309>: DATABASE ENTRY DATE: 2002-08-28
gtaccctagcttgggccacgatgccatccgctaacgtgcgcggggcgcagcctagcgccgaccgcaggttaagtacgttggtgcgccacctactgccttcctccgcacgaacagcaaccaccaccagcacctcctcctccgccgccgacgccgactcctccctccaagctttccccaccatggcgtcgtcgtccgtcttcgctggcctcgcgcaggcgccggaggaccccatcctcggggtgacggtcgcgtacaacaaggatcccagccccgtgaaggtcaatctcggcgtcggcgcctaccggaccgaggaagggaagccccctggtgctgaatgtggtcaggcgcgctgagcagatgctgatcaacaacccgtcacgtgttaaggagtatttgccgatcactggactggccgatttcaataagctgagtgctaagcttatttttggtgctgacagtcctgccattcaagagaatagggtggctacagttcagtgcttgtcaggaactggttctttaagggtgggaggtgaatttcttgcaaggcattatcatgaacgcactatatacatcccacagccaacctgggggaatcaccccaaagtgttcactttagctggcctgactgttaggagttaccgctactatgatcctgcaacccgtggactggatttccaagggctgttagaagatctcggttcagctccttcaggtgcaattgtactgcttcatgcttgtgcccacaaccctactggagtagacccaactttggaccagtgggaacagatcaggcagttgatgagatcaaaagcattgctgccattctttgatagcgcttatcagggatttgcaagtggaagtcttgaccaagatgctcaatcagtgcgcatgtttgttgctgatggtggtgaattgctcatggctcagagctacgctaagaacatgggattgtatggagagcgtgtcggtgctttaagcatagtttgtggaagtgctgatgtagctgtcagggttgaaagtcaacttaagcttgtaattaggcctatgtattcaaaccctcctattcatggtgcatctatcgtggctaccatacttaaggacagtgcaatgttcaatgaatggactgtggagctgaagggcatggctgataggattattagcatgaggcaacagctttttgatgctctgaaaacgagagaaactcctggagactggagtcacatcattaagcagatcggaatgttcactttcactgggctcaacagtgatcaagtggctttcatgaggcaggaataccacatttacatgacatctgatgggaggatcagtatggctggtttgagcgggaggaccattccgcatcttgcagatgcaatccatgccgcagtcacaaaactgaagtgaatgatggtagcatagcagctccctccaagaataacatcttaaaaccatccgcagcagtgttctgaggattcagacagtgatgtttgctggctgagcacatcctggaagtttccttgtaatagactcgtgtgacttgcttttgggagcagttttgtaccagtggattcagaaaaagtggtgatttcgaatcacctaataagctccatcggtgatgcttttacc

SEQ ID NO: 23147 - DNA, 1774 bp, Oryza sativa
  ref <308>: DATABASE ACCESSION NUMBER: AK073279
  ref <309>: DATABASE ENTRY DATE: 2001-12-06
gagtgtccaagatggagagggagagcagcacaccggcgagcagctggctggggatcgacgaggcggcgccgttcgcggggaagaaggcgacgaaggacgccgccgccgccgacgccttcgtccggcgatggcccaaggtggtgaacgccacgctggtggcgttcatcatgacgatgccgccgctcctcatcctcctcggcggcggccggcccggcgcgccggcggtgtggatcaagtcgaccgttgccagcctagccgcacgaggggaacccaagaaagacgtgcttctcggtggcctgctcctcccaggattcgacgagcaatcgtgcgtcagccggtaccaatccgtctactaccgcaagaacatgacgcggccgccgtcgccgcacctcctccgccggctccggcagcaggaggcgctgcaacggcggtgcggcccgggcacggagccgtaccggcgggcgtccgagcggctcaggtccggccagaacgccggcgacgacttcgtcgccacggtcgacggctgcggctacctcgtgctgatatcctaccgcggcctcggcaaccgcatcctcgccatcacctccgccttcctctacgccatgctcaccggccgcgtcctcctcctcgacccgggcaagaccatggccgacctcttctgcgagccgttccaggccacgtcgtggatgctgcccggcgacttcccgctcgagcacttccgggacctcggcgaggacgcgccggagagctacgggaacgtggcggtgaaccggagcggctccgtcgccggcctgcggttcgtgtacgcgcacctcgaccacgcggcgacgccggcgaacaggctgctgtactgcgacgaccaccgccagttcctccaccgcgtgcagtgggtgatcctgaggacggacagctacatcgcgccggggatcttcctcaacccggcgtacaaggaggagctcgacatgatgttccccaacaaggacgccgtcttctacctcctctcccggtatctcctccacccgaccaacgacgtctggggtatggtcaccaggttctaccactcctacctcaagaacgccgacgagcggctgggcgtccagatcagggtgttcgacggcgacgagccgttccagcacatcctggaccagatcctggagtgcacgtcgcaggagcacctcctccctggagtcgtcgtgagcggccacggcggcggcgtcgcgccgccgccgatcgcgcggtccaaggccgtcctgacgacggggctcaactcgtggtaccacgacagcatccgggacatgtactggcggtcgccgtcggccaccggcgaggtggtgagcgtgcaccagccgagccacgagctgcaccagcacttcttccggagcacccacgacatgaaggccctcgccgagatgtacctgctgagcttgacggacaagatcgtcaccagcggctggtcgacgttcggctacgtcggcgccggcctcggcggcctcacgccgtacatcatgatcaagccggagaaccacacggtgccgaacccgccgtgcgtcagggccatgtccatggagccctgcgaccacgggccgccgtacttcgagtgcaccaagaaagagatcgacaagatcatcgacaccggcaacctggtgcctcatgtccgatcatgcgaggacgtgccatggggacgcaaactggctgatcctattagctaaaccaaaatagtagtattaatactgtttttgttcacaatttataccatgtttttagttgtttttgc

SEQ ID NO: 23148 - DNA, 1819 bp, Oryza sativa
  ref <308>: DATABASE ACCESSION NUMBER: AK073280
  ref <309>: DATABASE ENTRY DATE: 2001-12-06
ggccgtctctgagccgcgcggcctccacaccacccatgttggcttgcgcttccctcgcaaggtttagtcggctcgctcgccctctatgcgccgcgggttccgcgccgcgcttcctccagggatctgttaatcaaaatagtttcactcacttgtaatgaaaggtgcacaaggagcctcaaataattcggcaaaacacaagaaaagaaagtctgctgtgcagagatggaggccaatctccacagaagccgctgctccaaaagctgaccttaatgagatgtcaggtcctgtaagcaaacaagtggaagagaattcagcctcagatggaacaactaatgttgttattgaagtttccacctacaacgcatccttgccagaaaataaattagccacagaagatactatggaggatgctagcttcaataaggacatagataggtccaatctatctgaaaagtgttcctcttctgttcaggtagatgctcctctgatgcgctttgtgaaaggaaaaggtggaaccatgcagaagcagattgaagatgaaactggggtcaaaattatatttccatcttctaaggaggaaacatgtgttgttcttgaagctaaaactactgaagatattagaaaggcttcagagaaaattgcaaaggttcttgaagaggccgtgaaaagtccaatactagattactctcacttcatttcgcttccattggctatccacccaagccttgttgagaagctgaaccacttccagtgctcaatccttgggacttcttctaatgtagatagtgataagggtgaggacctaagtgaaggttctatggatgaaattgaccatgaacagaagcaagaaaggagccctagtgtttcaataaagatgcaagcccatgaggagtctgtcagagttaaaatggatattaagggctcccaaccagacttcggcattgacaagtcaatatttattaaacccaaaacctttcacctaacggttcttatgttgaagctatggaataaggatcgcattgctaaggcttctgatgtgctccagtcagtatcgtcccaagtaatggaagccttggaaaaccgaccaatctccatacaacttagaggtctgacatgcatgaaaggctcaccagctagggccagggtagtatatgctcctgtgctggaagttggtgaagagggacgcctacaacgtgcttgcaaagttataactgatgcctttgtcaagtcgggcctagtacttgaaagggatgcgaggcaagaattgaagttgcacgtgaccataatgaatgtgaggcacaggaagagcaagagatggaaccaaagaaacgactcattcgatgctcggaatattttcagaaaatatggggaacatgactggggcgaatacctcattcccgagatccatctttcgcagcgattcaagttcgatgaaagagggtactactactgctgctcttcaatccccttgcctgcggcggagatgcaaacggagtgagtttcataataaacacattttcagtgttttcaaatctttcaccagtatcatcatcccattaggacgacttcgcgggttactgttgctgaaccaataatgtgccatgtgttgtgcttgttttgttctggagtgtggcatgctcagtctactcggttgatataggcctttcttttgatagtgggatagccggataggcaattatgcatcatgctgtggacctatggtgttgtcaatggcagtgggctccttggagtggttgatgtaagtttctggtctggcccgtgtacaatcacgcctgcaattttctctgtcgttgccctg

SEQ ID NO: 23149 - DNA, 1519 bp, Oryza sativa
  ref <308>: DATABASE ACCESSION NUMBER: AK073281
  ref <309>: DATABASE ENTRY DATE: 2001-12-06
gcatcgggataccgccaaagagtgcgtgcgagtggcaatggcgatgccgctgggtgggattctcctcctcttcctcgtgctcctcgccgccgccgcggcgggcggcggcggcggcgtgtgggcgttctcctcgtcgtcgtcgtcgtcgtcgtattccaggatcggcgagcagccgctgtcgctgatcggcatccaccgcgcgacggtcggcatcgacgccgcggcttccgtgcaagcgtcgcctcggcttctcggtgtcaagggggaagatactgcctgggtaactgttgatttcgcagctccgcatgcgagtgacggcgattggatcggagtattctctccttcaaatttcaacgcgtccacatgccccggtccttctggatcagactcaggacctgttatatgctctgcaccaataaagtatcagcttgcaaattattcttcagattatggcaagacaggaaaaggcactctcaagtttcagttgatcaatcagaggcaggacttctcctttgcactgttcactggtggtctctcaaatccaaagcttatcgcagtatcaaataagatcgccttcgcaaacccgaaagctccggtttaccctcgtctagctcaaggcaaatcctggaatgagatgactgtcacatggactagtggttatgacatcaaagaggcatatccctttgttgaatggggcatgaaatggagccctcctacgcgcacagcagctggcaccgtcacttttgatcgcgaaagcttatgcggagaacctgcccgtactgttggttggagagatccaggtttcatacacacagcattcctgactgatttatggccaaataaagaatactattacaagattggacatatgctacctgatggaaaaattgtatggggcaaattttactccttcaaagcacctccttttcctgggcaaaagtcactgcagagggttgtcatttttggtgatatgggaaaggccgagagggatggaagcaacgagtacagcaactaccagcctggatcactgaacacaactgacacactgatcaaggaccttgacaacatcgacattgtatttcacatcggtgacattacctatgccaacgggtacatttcccagtgggatcagttcactcagcaagtcgagccgatcactgctcgagtcccctacatgattgcaagtggaaaccatgaacgggattggccaaacagtggatctttcttcaatgggacagattctggaggggagtgtggggtgcttgctgagaccatgtactacacacccacagagaacagggcaaactactggtacaagacggactacgggatgttcagattctgcgtggcggacagcgagcacgactggcgggaaggcacggagcagtacgcgttcatcgagagctgcctcgccacggtggaccggaagaagcagccatggctggtgttcatcgcgcaccgcgtcctcggctactcctcgggcttcttctacggcgccggcggcgccttcgcggagccg

SEQ ID NO: 23150 - DNA, 1705 bp, Oryza sativa
  ref <308>: DATABASE ACCESSION NUMBER: AK073282
  ref <309>: DATABASE ENTRY DATE: 2001-12-06
gatctctctgcgacagccatcgccaccgacttcttcgtcttcctcgttggtctcctctctctctctgtgttcttggtgttccctgtgctgttcttgggcaagaagaagaaggagagcagatgggagggtcagggaagtgggtcaagtcgctcatagggctcaagaagcctgacagggaggattgcaaggagaagctgcaagttccatcggtcaatggcagaggaggaggcaaggggaggaagtggaagctgtggaggagctcctccggcgaccacggctcgctatggcggggctcgaggggcggcggcggcggcggcggccaccaccgctccgcgtcgtcggacgcctccgacgacgcctcctccgccgccgccgaccccttcaccgccgccgtcgccaccgtcgcccgcgcaccggccaaggacttcatggccgtccgccaagagtgggccgccatccgcgtccagaccgccttccgcggcttcctggcgaggcgggcgctgcgggcgctgaaggggctggtgcggctgcaggcgatcgtgcgggggcggcaggtgaggaagcaggcggcggtgacgctgcggtgcatgcaggcgctggtccgggtgcaggcgcgcatccgcgctcgccgcgtgcgcatgtccaccgagggccaggccgtgcagaagctgctcgaggctcgccgcaccaagctcgacatcctccgggaagccgaggaaggatggtgtgatagccagggaacattggaggatgtgagagtgaagcttcagaagcgtcaggaaggcgcgatcaagcgtgaacgagctatcgcgtatgcgtattcgcagcagatcgaaggcgctacgaaatgcaatcagcaaccgaagcctacttcttatggtcggctgaaccagtctggaatgttgcttaagcaccaacatttcgacaagagcaatggcaactggagctggctggagaggtggatggcggcgaggccttgggagaacaggctgatggaggagtacaaccagaccaactccagctcgccggacctcctgtcctccaagaactgcgaggattcattcggcattcttggggacttctccgaaccaaattcagtgaaagtgcgcaagaacaatgtcagcaagagggtctgcgcgaaaccgccggtagtatcacaccaccagcgcatcaaagctcagtcgatctcgtctctgagcactgaattgcacaatgatgagagctcggcatcgtcatcgtcgtgctttgcttcgacaccaatatcgttctccacctttgtcacgacggagaagaccgaggacagcatcagggcaaggccaaactacatgaacatgacggagtcgatcaaggcgaagcgaaaggcgtgtaatgctcaaagaacgacagcagggaaactgatggaggataggaaggcctcaggtgtcgagttgaaggtcgctcaagtttgaatttgcaatgttcttggagctgtaagctgagatgaagccaacttctacctctctagggtgtttgttaggtggattgctccatccacaggtttttcgatgtcttgctgctgcattcttgagttgtgtctgtgtcgccaatctcatgttcaacatcttgttgtcgagtcatcccatttttggggatgtcctcattgtcagtggcagtgtctttgtaagatagctctttgattgggaaaaaaatggtgtggatttgttgc

SEQ ID NO: 23151 - DNA, 1574 bp, Oryza sativa
  ref <308>: DATABASE ACCESSION NUMBER: AK073283
  ref <309>: DATABASE ENTRY DATE: 2001-12-06
ggccgtgcaggatgcccgagtggataacccgttaaaccccccgatgccgctcgccgccgccgtcgccgcctcggcggtcgtgccgccgcggccgcctcctccgccgccgcggagagcgcggcccttgcgctcctttactggactaatactaacgagggacctagcagccctaacggtggcccgctgcgctccctcccctcctgcccccgcggcggaggcggaggcggaggcggtggcggtggatgaggcgccgccagcgaagccgcggccgcggcggtacccgaggcagtaccccggcgaggcggtgggcgtcgccgaggagatgcggttcgtcgccatgcgcctccggaaccccaagcggaccaccctcaagatggacgatacgggggccgaggaggaggtgggcgatggcgtcagtgaggatgcgtcggcgtcagaggaggaggaggaggaggaggacgacgacgacgtggttgaggaggaggaggagggagcggggttggagggggagtggatgccgagcatggaggggttcgtcaagtacctggtggacagcaagctcgtcttcgacaccgtcgagcggatcgtagccgagtccaccgacgtcgcctatgtttacttcaggaaaagtggtctggaacgctcagctagaattacaaaagatttggagtggtttggagggcaaggaattgcagtaccagagccaagtactgctggatcaacatatgcaacttatctgactgaacttgctgagagcaatgccccagccttcctttcccactattacaatatttattttgcacatacaactggaggggtggctataggtaacaagatatccaagaaaattttggaaggaagggagctagagttttacaaatgggattctgatgtagaacttttgctaaaagataccagggagaagcttaacgaacttagcaagcattggtctcggaaggacaggaacttgtgcttgaaagaagctgcaaaatgtttccagcatttggggcggattgttcgcttaatcatcttatagttcctcatagatgagcaactgatcaaatcaacctataatctattcctgaagacaggaaagctagagatatattaaacttgaggcttagtgcagtcatttttgtcgaagactacacgtcttaactatgttgaagtctggtacagaaggatcttctggtgtgagactgaagctgatcagcgagcactatcctggagattgaaaacaccaggccacaacaatagcctcttttctggcttgcatggtggagctgctcgttggagtgagctcttgctttcagcaacttcgaactgtgcaaagttgaagatgcttgctgctgtcgatcaggatctcacgcgttcaatcgcaatgatgccagcctgacacaattcacttagcagcagaacaccatgctagccagccaggatccccccatgcctgccaaagcttcgtctcctcttgtacctcaccacattatccatttatccttgcaatgaattcgctttgcttgtaccaatcctagctactactactactaccatcttacattatccttgcaatc

SEQ ID NO: 23152 - DNA, 1273 bp, Oryza sativa
  ref <308>: DATABASE ACCESSION NUMBER: AK073284
  ref <309>: DATABASE ENTRY DATE: 2001-12-06
gtgccgccgcctcctcccttcctctcttctttcctcgccgacgacgcgattccccaccggcgtacggcggcggcggcggcgagggatttcgccggccagctagccccatcctcaacaaaatcgaggggtcggttgctctcccggtggaagagccccatggcctccgccaccgccccgcagcctgtgtcctctccatccgccgcagccggcgccgcgtcgaacaacccccacaagcgcaagaagccggcggcgagggggaaggggaagggcaagggaaagggccgcctcgccaagacgcccaggcgctccgatgaccccggcgacctcccccgccgccgcagcaagcccagcgacaggttcctcaagctgctccgcaagcgcgcccgcgactacaactccgacgactccgacgacgaggagcgcctctcggatgaggacgaggaggaggagggggcttccggctccggtgacgacgaggccgccggcgcggtgaccaggttcgagcaggggtgccgcgcgttccgcgtcgccttcacgaagatcatggccaagaagctccccgacgacccactgggtccaattctttcggcgcacaagaagctggtcgccgccaagttggccgaggacgcagaagaacacaagcccaagggagaaggccgcagggaaaagcgcatggctgcagagaagggccatgtcattcccacaaatcatttagatagtaaagagaaggagctcatcaaaatcgcaacccaaggggtcgtcaggttgttcaactcggtaagcaaggcgcagaattgtcggaaaggtttgaacccatcaaggagtaaagacgccaaagtgttggcaaaagaaacaaagcaggccttcctcacagaattaagcaaaacatctaaccaaagtcaaaagggcaaggcatcttccaacttttctaagaacaatagcaaagacgaagacgaacctgggtgggcacccctacgcgagacatacatgcttgggtcgaaattgaaagattgggataaaatgcagacctctgatgttgtgaatgaacaaacggagatccctttggacgactcttctgatgaggaataggcaatagattcacctgagtgagttgaagcagcatttgggacaatgttcctgtgctttgaagtcgtgttcttgttattgacattgtaaagcgatatttggttcaaatttgcaagttaagttttcttatcattgtttcatgcattgatgaatgtgatggctaatgcacggcacgggcaagttgtcc

SEQ ID NO: 23153 - DNA, 1316 bp, Oryza sativa
  ref <308>: DATABASE ACCESSION NUMBER: AK073285
  ref <309>: DATABASE ENTRY DATE: 2001-12-06
gaggcgggtaagggcagagagaggcatggagatggaggcgcgaggtggcggcgggaggtggtacgcggggggcatgtccaccgccgacaacatcaagggcctcctgctcgccctctcctccagccttttcatcggcgccagcttcatcatcaagaagaagggcctcaagaaggccgcctcctccgctcttcgagcccggggttggcggctattcttatttgtatgagcctctttggtgggttggcatgattacaatggttgttggggaagttgcaaactttgcagcttatgcatttgctccagctattttggtcactcctcttggtgctctcagcattatcatcagtgctatacttgcgcattttatgctgcgtaagaagctacacatatttggcattctcggatgcatcttatgtgttgtgggatccaccacaattgtccttcatgcccccgcggagcgtgagattgagtcagtaacggaagtgtgggatttggctactgaaccagccttcatgttctatgtttcagtagtacttgctatggtcgccatacttgtttgccgatttgtcccactttacgggcaaactcatgtcatggtgtatattggtgtttgctctcttgtaggctctatctcggttatgagtgtgaaagcacttggtatagctttgaagttgaccttttgtggaacgaatcaacttatatatccacagacatgggcttttaccctggttgtcctctcatgcattgtcacccaaatgaattacttgaacaaggcacttgacacctttaatacagcagttgtatcaccaatttattataccatgttcacatccttaaccatactggctagtgtcatcatgttcaaggactgggacaggcaaaatccaacacaaattgtgacagaggcgtgtggcttcgtaacaatcctttctggaacatttttgcttcataaaacgaaggacatggccgatgggctttcaacttcatcgtcgttccgtcttccgacctcttcatcatttcgtttctccaaacaaacagacgaagaatgtgaaggcattcctcttagatcatcagaatcattccggtcaccaccttgatgtccgcttgttgataactaagctacatgttaggagggtatgtatatacatgcatactgtaggagctagtactcaaaagacgagtctcttttgggtacaactcatagagtatttggcttcaaaaaaaaaactcagagtatttaggccctcacgtcacgtctcctgactcgtgtgttgtgttgtcacggtatatgcatatgcttcaagttaaaaggtact

SEQ ID NO: 23154 - DNA, 1436 bp, Oryza sativa
  ref <308>: DATABASE ACCESSION NUMBER: AK073286
  ref <309>: DATABASE ENTRY DATE: 2001-12-06
gaattcgctcaacagcagaccaccaagattcagccacggctggcggaggagcaagaaccgcccaagatcgaggcacccgacgccaccagccgctcgtcgtcgatctgccaactgatggaggacggcgaggtcgccgatgagggcgcggacatggacatggacatctgcggcggcgtctctcccctggtagtggacaaggttcagttctcgccgcttccgaagcaagaaggatgatgagttgatcaacaccagcggcggcggcggcttctctctccaatcgccgcctgccaagcaacaagaggaagaattcgtccgcgatgcctcccctgttgcagttgacaagttccctcaaactgaatctcctagctcgagcactggctcctcttctggatcgtcatcatcttcatcttcgagcggtggctcatctggatcatcctgcagcggttgctcctcttcaggcagcgactctaacgatgacggagacagtgcgagcagccgccctgataactctgaacttcccactgaagctgcagcgaagccattggagcagcagcaggtcacagtctgcggcggcgtctctcccctgatcgatgagttctcgccgcttccgaagcaacaagaggatgacgagttgatcgacgtcactggcggcgtctcccctgtatcagtcaacaagttcccagattctcctcgctcgagcagcagtggctcttcctcctcttccagcagcggttcgtcctcctcctcgtcggaaagtgactcagacgacgacggcgacagtgcgagcagcaagccagacaccgcagatcatcccactgaagctgaggcgccgaagcttcagccattggagcaacatgaggtcgcggagcaagacaagaagctgatcgccgagagagcagcatctccgaacaccgagatgcaggagctgatcgccagggcccaggagaggcagaaactccggcttgagctcgagaggaagacggcgcgcgagctcgagaggaagatggcgcgcgagcagctgcaggagatggagaggacggcacggccggtctacgacagcatcgaccccagtgtcatgaagcagctcgggatctccggcgatgcgcagtacatcgtcagcccggtgaaatctcggcacagcctgcatcggcgcggcggcggcggcctgctacagaagctcggcttcttcctcaaagaatagcatgatccatcatcaatggtgtctgtaaagctctgtaggtttcttgtcacattgggatcatatgctctgagcctctgacaatgatctcatcagttgcttgctctcaagcctttgatgtacttaaaaccattgattagcttgcagctaagttatgctgtacatgtgtcttgtattatatctgattatatgaaattatgaatcgtcttaaacaactgtactgtttctgccttatttc

SEQ ID NO: 23155 - DNA, 1174 bp, Oryza sativa
  ref <308>: DATABASE ACCESSION NUMBER: AK099339
  ref <309>: DATABASE ENTRY DATE: 2002-08-28
gaagctaactccattttgctttgcattgccaccatgagagcgctcgccgtggtcgtggtggccacggcctttgcggtggtggccgtgcgcggcgagcagtgcggcagccaggccggcggcgcgctctgccccaactgcctctgctgcagccagtacggctggtgcggatccacctccgcctactgcggctccggctgccagagccagtgctccggcagctgcggcggcggcggcccgaccccgccctccggcggtggcggcagcggcgtcgcctccatcgtgtcgcgctcgctcttcgaccagatgcttctccaccgcaacgacgcggcgtgcccggccaagaacttctacacctacgacgccttcgtcgccgccgccaacgccttcccgagcttcgccacaaccggcgacgccgccacccgcaagcgcgaggtcgccgcgttcctggcgcagacgtcgcacgagaccacgggcgggtgggcgacggcgcccgatggcccctactcgtggggctactgcttcaaggaggagaacaacggcaacgttgggtccgactactgtgtccagagctcgcagtggccgtgcgccgccggcaagaagtactacggccggggacccatccagatctcctacaactacaactacggcccggcggggcaggccatcggctccaacctgctgagcaacccggacctggtggcgtcggacgccaccgtctccttcaagacggcgttctggttctggatgacgccgcagtcgcccaagccgtcgtgccacgcggtgatgacagggcagtggacgcccaacggcaacgaccaggcggcggggcgcgtgccgggctacggcgtggtgaccaacatcatcaacggcggcgtggagtgcggccacggcgcggacagcagagtcgccgaccggattgggttctacaagcgctactgcgacatgttgggcgtcagctacggcgccaacttggactgctacaaccagaggcctttcaactcctaatagctcgttctagcttcaagctttgcactgataaccactgatcggatgctttacatcgatgaataagaattcatccgagcagacaaataatacaatcatcagtaatgcccacaatggctgatggaaaatatattgtgcttccgattattaataattaatacttctacat

SEQ ID NO: 23156 - DNA, 1903 bp, Oryza sativa
  ref <308>: DATABASE ACCESSION NUMBER: AK073287
  ref <309>: DATABASE ENTRY DATE: 2001-12-06
agagcccccacgcggaccccgtcccggaggccgccctgcaggccgtcttcacttcgctcgccgcagcggcctccgccgctccggccttggccctcgtgcgcgctctgctgcgctgcgggcgccgcctcccggctttccctgtctggggctccccgcttatagagctcacgcgcgctgacacgggcgccttcgtggccttcttgaaggtcttcgacgaagcctgcaagcaaatggtgtcggagaagtccccctctgcggcagcggcgatgcgtcctgaccttgctgcctgcaatgccgttcttggtggctgctgccgtctgctcggttcagtcacagaagctgagagggtattggagatcatgtcggctattgcagtgtcgccggatgtggatagcttcggatgtcttgcgttcttgtatgcttggagagatattccaagccgtgttgatgagctcgataaattgctggatgcgttaggattcggcaagaagatttttttcaagaatttgatcagtgggtatttgaagagctgcagctttgagtcagtttcatcagtcattcttcgtgtggtggaggagagaagagttgggggtagcaatgcatttgatttagaaagctatacagaggttgcacagcgttttgtagataatgggaggatcagggaattagctcagttgatcatcaaagcacaggaaactgagtcattgcagcagtcactggcagttgaggattctgttgggtttgggattgtcaatgcttgtgttgagcttggcctattgaacaaggctcatagtatactcgacgaaatgactgctcaaggagcctctgtggggctaggtgtatactcctcaatcctgaaagcgtattgcaaggagcaaaggactgcagaggctgcacagcttgtctcagagattagtgcagcagggctgcagcttgatgctggcagttatgatgctcttattgatgcttctatgacagcccatgatttcctatctgcattctctctcttcaaggagatgagagaggcgaggttaccagaccttaggacaagctatcttactataatgacaggcttaacagagaacaaccgtcctgagcttatggcatcattcttggacacagtcgtcgatgatccgaggatagaaattgcaacacatgattggaactcaataatacatgccttttgcaaggttgggaggttggaggatgctcgaaggacataccgaaggatggtattcctgaggtatgaaccaaataatcagacctacctttcgctaatcaatgggtatgtctcagcggagaagtactttagtgtgcttatactatggactgaagtgaggaggaagggggctgatttcaaccatgagttaattgatgcatttctgtatgctttagtcaaaggtggattttttgatatggcaatgcaagtgattgagaaagcacaagagttgaaaatatttttggataagtggagacacaaacaagcattcatggagacccacaaaaaactgaaagtggcaaagctgagaaagcggaatttcaggaaaatggaagctctgattgcatttaagaattgggctggtctcaatgcatgacattataatctttttatcagtctatcatgactgattttaatggcacgtatctgagatggcatcccatagtcctcttggaagtaacaagcagcggaccttcagagatgaacaagtgaggggttttgtcatcatgtcaaattttgataaggttaggaaggccggtgcgctttcggtttcttcttttacttaaagtaatacatgtttaactatataggctgacctgtctctgtactagttctagtcatttacgctgatgtaatctccaaaccatgaaaatcttaaatgagctaatatcatgtttatcctgg

SEQ ID NO: 23157 - DNA, 1849 bp, Oryza sativa
  ref <308>: DATABASE ACCESSION NUMBER: AK073288
  ref <309>: DATABASE ENTRY DATE: 2001-12-06
ggatagtactagtacaactacaaaccttgcttgcaagttgctgaatagtagtggagcagtggagcagcagcagtggcatataaacacacacacacagcagcaacagcagcctcctcctagctagatgctggtgaggcaaagttcagtgatcacttgcttcaaagggtgcagcagtgtaggagaggtgaggaggcacaggaagaagacaaccacatactattgccactctctcctgtgactgtgtgtgtgtgcgcgtgtgcgtgcttgctagatccagacaagctgtggaagcaaaaggaggatggcttgtagcttccactttgttcccttgctcctcctcctcaccttgctcttgctcatctcctctgccagtagaactgctgcattgccctccatgcgcagtagcagtgaagacaccgccagtaatgctactgctgctgcaaggcttaggccagggaaggagctgcttaagtacaagaggatcagggctctcctcaagaaactcaacaagccttctctcaagaccattcagagcccagatggtgatctcatagactgtgttccctctcatctccaacctgcatttgaccatccaaagctcaagggacaaaagcttctggacccaccggagaggcccaagaactacaacctcaccattgccgtcagcagcagcagcagcagtagagtaggtgaggtggtggtgcaggcctggcatgccgccggcgaggagtgcccggaagggacggtggcgatacgccggacgacggagaaggacctgctcagggccagctccctccggaggtacggcaggaagccggcacgccggaatattcgccgtgattccaccagcaacggccatgagcatgcagttggatatgtgaacaatgataattactatggggccaaagctagtgttaatgtgtggtcaccaaggataggtgacccatctgagttcagcctgtcacagatctgggttatctctggctccttcggcaatgatctgaacaccattgaagctggatggcaggtcagccctgagctgtatggagacagtaacccaaggttcttcacatattggacaaccgacgcatatcaagagaccggttgctacaaccacaactgccgtggatttgtccaaacgaccaacaagatcgcgatcggcgcggctatcacgccagaatcggtgtacaacggaaggcagtttgacattaccctgatgctatggaaggaccccaagcatgggcactggtggttagagctgggcccgggtatggtggtggggtattggccatcgtatctgttcacccacctggcgcaccacggcaacatggtgcagtttggcggcgaggtggtgaacacgcggccgtcggggtcgcacacggcgacgcagatggggagcggtcacttccccggcgaggggttcgaccgcgccgcctacttccgcaacctgcaggtggtggactgggacaacagcctcatcccggcggccaacctcaagctcctcgccgaccaccctgcctgctacgacatccagggaggctccaactcctactggggcagctacttctactacggcggccccggcaggaatgtcaaatgcccttgaaaggatctcgctctctccatctcttgttgcttgatggccggtcactcttgtttttctttttttgttcgtttgtttgtttgttttctttcttctgtgttcttctttgtgatagagattggttagtgcattaatgctaggatattactctatttgttaggtcttagcttgagctgctgaatgcatatgggagcaattaaattgagagggatttgtaaatttgagaagcaccttgattttgggatc

SEQ ID NO: 23158 - DNA, 808 bp, Oryza sativa
  ref <308>: DATABASE ACCESSION NUMBER: AK073289
  ref <309>: DATABASE ENTRY DATE: 2001-12-06
ggtctttctccgcctctctccgtcctcactttctctgtttattcctctccctcaacgttgccggccgatccaccacatcgtcgacggcctatccacaacatcgtcgccggccttctttttccctcgagttgccggccagatccacgatgccatcaccacggaggtcctcctagagggcgaagacgtggaggcggcggtggtattcggaggcgagcagcttgaggcggagagagtggtcggagacggggaggccgagcgagccacggatggattcgcatcgctcgccatctccttctctccatctcgcctccctcccgcggtagatccggcatcgatggcggcgtcggcggcggccgcgggtggatctggcagcggtggcagcggatgaggacggatccggcggcggctccctctgccccctctcgcctccctcccaagcggatctgacgacggggacggcgaccgcgtgtggatctggcggcagcggcgccggctgagagtggatcgggtggcagcagctcctcccgcggcggattcgagggcagcggctcctctcacagttatccgatggctgctgctccccctacccggagtggcggccggcggctgcttccctccttgtgtgttggcagtaactccccgcccccctggctgcccctcacctccccgacgtggagccgacggtggttcgatttttgatttgtgaatattttgaggattttgtttttttgatttgtgaatattttgaggattttgtgatttggaatgttgatatagtaaccacagtacgacggcggtttgatttggg

SEQ ID NO: 23159 - DNA, 1486 bp, Oryza sativa
  ref <308>: DATABASE ACCESSION NUMBER: AK073290
  ref <309>: DATABASE ENTRY DATE: 2001-12-06
gcccaaccattcgacccgcgcagcgagccccaaccccacatcgccgcgcgcccccgatggcgtcctcctcgtcggcggcggcgctctggacggcggcgccccacccccacggcagctgcatcaggatccacgccatcttccaccagcgtcaccagcggagggggaggaggccggtcgtcgtcgcctcgtcggtgaggccgctgcaggccgcgagcctggcggtggccacggcgccggtggccgtggcgtcgaggaggacggcggcggaggaggccgtctacgaggtcgtgctgcggcaggcggcgctggtggaggaggccacccaccgccgcggcgcgggggcgccgcggtgggcggaggaggacgccgtcgactggggcctcctcctcggcgacgcctaccaccgctgcggcgaggtctgcgccgagtacgccaagaccttctacctaggtactcagcttatgactcctgaaaggcgcaaagctgtctgggcaatctatgtatggtgcagaagaactgatgaactggtagatggccctaactcgtcttacattacaccaaaggcacttgatcgatgggagaagagattagaagatctcttcgaaggcaggccatatgatatgtatgatgcagccctctcggacacagtgtcaaagtttccagtagatatccagccattcaaagacatgattgaaggaatgaggcttgacctgtggaaatcaaggtataggagctttgatgagctctacctctactgctactacgttgctggcacggttggtctcatgacagtaccggtgatggggattgcccccgactcgaaggcctcaaccgagagcgtgtacaacgctgcgctagctcttgggatcgccaaccagctgacgaatattctcagagacgtaggcgaagactcaaggaggggaagaatctaccttccattggatgaattggcagaggcaggtctgacagaagaagacatattcagagggaaagtgactgataaatggaggaagttcatgaagggacaaattctgcgtgccaggttattctttgatgaggcggagaagggcgttgcgcatctagactctgcgagtagatggccggttctggcatctttgtggttataccggcagatccttgatgctatcgaagcaaacgactacaacaacttcaccaagcgcgcgtatgtaaacaaggcaaagaagctgctgtctttaccggtcgcttatgcaagagcggcagttgcatcatgaacaatcactagatcagatgccttattatttttttttctttcattttcttttcttttgatttcgcacgatttcttggctgttgtatatattcaagcagctacctgtatgccataagcctgccacagtttttctttagttcaagggactgatttcaggtccctcaatactcaactcttgttagaaacaaatacagagggggtaagccccacagttcaagaagcatattactctcc

SEQ ID NO: 23160 - DNA, 1832 bp, Oryza sativa
  ref <308>: DATABASE ACCESSION NUMBER: AK073291
  ref <309>: DATABASE ENTRY DATE: 2001-12-06
ggtgtcaagggggaagatactgcctgggtaactgttgatttcgcagctccgcatgcgagtgacggcgattggatcggagtattctctccttcaaatttcaacgcgtccacatgccccggtccttctggatcagactcaggacctgttatatgctctgcaccaataaagtatcagcttgcaaattattcttcagattatggcaagacaggaaaaggcactctcaagtttcagttgatcaatcagaggcaggacttctcctttgcactgttcactggtggtctctcaaatccaaagcttatcgcagtatcaaataagatcgccttcgcaaacccgaaagctccggtttaccctcgtctagctcaaggcaaatcctggaatgagatgactgtcacatggactagtggttatgacatcaaagaggcatatccctttgttgaatggggcatgaaatggagccctcctacgcgcacagcagctggcaccgtcacttttgatcgcgaaagcttatgcggagaacctgcccgtactgttggttggagagatccaggtttcatacacacagcattcctgactgatttatggccaaataaagaatactattacaagattggacatatgctacctgatggaaaaattgtatggggcaaattttactccttcaaagcacctccttttcctgggcaaaagtcactgcagagggttgtcatttttggtgatatgggaaaggccgagagggatggaagcaacgagtacagcaactaccagcctggatcactgaacacaactgacacactgatcaaggaccttgacaacatcgacattgtatttcacatcggtgacattacctatgccaacgggtacatttcccagtgggatcagttcactcagcaagtcgagccgatcactgctcgagtcccctacatgattgcaagtggaaaccatgaacgggattggccaaacagtggatctttcttcaatgggacagattctggaggggagtgtggggtgcttgctgagaccatgtactacacacccacagagaacagggcaaactactggtacaagacggactacgggatgttcagattctgcgtggcggacagcgagcacgactggcgggaaggcacggagcagtacgcgttcatcgagagctgcctcgccacggtggaccggaagaagcagccatggctggtgttcatcgcgcaccgcgtcctcggctactcctcgggcttcttctacggcgccggcggcgccttcgcggagccgacggcaaggcagagcctccagaggctatggcagcggcaccgcgtcgacctcaccttctacggccacgtccacaactacgagcggacgtgcccggtctacgacgggcggtgcgcgtcgccggagaggtcgcgctactccggcgcggtgggcggcaccatccacgcggtggtcggcggcggcggcagccacctgagcaacttcaccgccgaggcgccgccgtggagcgtgtacagggagatggactacggcttcgtcaagctcacggcgttcaactacacgtcgctgctctacgagtacaggcggtccagcgacggcgaggtgcacgacagcttcaccgtccaccgggagtaccgcgacgtgctcgcctgcgtcgccgacagctgcccgccgaccatcccgccggcgacgtgatccagctccggtgattccgccggcgagtctgccggcgacgtgtgcactattgctgcttggtggtgcttgcgggcctcgtctgtaatcttgacttgtcaatcgtgtgtaaattgaattgcgaaatatttcgaaattaagtcaaataaagaaatgtt

SEQ ID NO: 23161 - DNA, 1616 bp, Oryza sativa
  ref <308>: DATABASE ACCESSION NUMBER: AK073292
  ref <309>: DATABASE ENTRY DATE: 2001-12-06
gattcctctctctctctctcacttgctctccagctagcttccctcttcgttctcttttcccttttctttacaggatgtaaaccaagccgaaaatctcgcaaattttgagctgttttcttcttttcctttcgcttcttgctttcctcctcctcatcgatcgatcgatctcttggtgatggtgattgtggtgggttaatttgggaggaggagagtggcgccatggctgctgcagagggaagcagatctgcacctaccgccatagctatctcgcctttcaagatctggaaaacctccatctccgttatagctgaatggggcgtcatttgcaaaacgtctccatctcaactgaaacaacagtcgcgcgtttgggtcaaggtgacaggtgttctatatcgtcagtagcgattgtatagtggctggaagacaaagaaagctctctgcgcattgcttgttgtatatgttaggattacggaaaggtgcgactgtaagagtgctatgatcctgtgtggtgcctgcaactcatgttgtgtgtcattcagcattcctacttctgcatcaattgttttcaagttcaattttaggatggtagaccattagtggccgccaaaagatattagctacctatctgtataatttaatctgagatgtaaaatggaaaaaaaataattaaccacatagaaaacgcgcgccagcaaagctaagtttattagtaggaacttgtttccatgcctaggaaaaaatgtgcactgaacattaagcatcatatacaaagaaaagggacatgttacgtgcctagcttaaacttagaacgactgctcattttctcaaaaattgttgtattatagacttctggtagctagtgccctaaattaaacagaactagtgaaacatgcttgttaatcacacatattagtttgaagccaattactaatgtatgtcgtgtggaggaagcaccattggtgtggtgatggcgtcatgaaatgcatgactgaatgttttaattacttcatttgtcccaaaaagaaagatacatatatcttgtttattactgttgtacgtatctgttattgaatggaattctgaataacatgatccactttgttgtacatgtcttactacatcatctcttgatgtgtcgatggtgaatctggcaagtaaaataacctggtatttatggctttatgtttggtaagcatcatccattgtttcttctgtcatgtctgaatatgtagcttcatattttgtgctcacttatataccctggtgatgtctatctgatgtagggttgtttgcttatgtttatgcttttcgttcttttattttcgaggattatacttttagttcttgcctcggtgcctcattccctgcttgaactctcatgcagtttctcttgaagaattttgacacgttggtatacgtaccataaatgccaacaaattaagaattcttctctgggctgcccagaaatcattgccagttttattacgacaattcattctccagtctgtactctgttaattttacactgtggaatcatcaccatgtaaattttggacatggctgtatttatctttcaccttgtgaatcacttaatacaacctgatgatttgtgatct

SEQ ID NO: 23162 - DNA, 1046 bp, Oryza sativa
  ref <308>: DATABASE ACCESSION NUMBER: AK073293
  ref <309>: DATABASE ENTRY DATE: 2001-12-06
gtcacgaacccgaaaacccttttctccatcgcctccccctccgccgcgccgccacttctctcctctcctcctctcgccgctcccagggtttcgcgcgagatctactctagcattcgggcgttagggttccccgagatggcgagcgagcaggcggcggagagctacacggtggaggagctcgtcgccgtgaacccctacaaccccgacatcctcaacgacctcgagggcttcgtcaacgatcaggtttccaaccaaacatataacttggatgcaaatcttagtcttcttcgtctgtaccagttcgaaccagaaaggttgagtgtgcagattgtatctcgcatattgattaaggctctcatggcaatgccaggcccggacttcagcctatgcttattcttaattccagagcatgtgcaaatggaggaacagttcaagacgttgatagttctctctcactacctggagactgctaggttccgtcaattttgggatgaggcgtcgaagaaccgcaacatattggatgttgttccaggttttgagcaggcaatccaatcctatgcgatacatgtgctctccttgacataccagaaagttcctaggcctgttcttgcggaggccatcaacattgagggtcttgcattggacaagttcctggagcaccatattgcaaactccggttgggtgatcgagaagggtgcacgatctcagctgattgtccttccacgcaacgagttcaatcaccctgagctcaagaagaacacagctgaaactgttccgttcgagcatgtaactcgcatattccctgtccttagctgagtcaacaaccagaccaattgagattttgcattacagaacttctgagcgcgtgaagatactctgggcgcatctgttttctctgctgtgatgtactgcgttttgatatgcctgttttagctaaacaagtcaattctagtgacgatccgagcgtcatatctgcctagttatgtttatgtaagcattctgccatgatattacattgttggcaagatattttatcaggtcagagc

SEQ ID NO: 23163 - DNA, 1300 bp, Oryza sativa
  ref <308>: DATABASE ACCESSION NUMBER: AK099340
  ref <309>: DATABASE ENTRY DATE: 2002-08-28
gtcacacagtgagcggcggctacccgatctggtactggtagtagcaggaacgacgatggcggaggagtcaaggaggaggagcggcggcggcgtcagggtgtgcgtcaccggcggcgctgggttcatcggctcgtggctcgtcaagaagctcctcggcgccggctacaccgtgcacgccaccctgcgaagcataggggacgaggtgaaggtgggcctcctgcggcggctcgtccccggcgacgcgccgccggagcggctgcgcctgttcgaggccgacctctacgacgccgccaccttcgctccggccatcgccggctgccagttcgtcttcctcgtcgccacgcccttcctccatgacgccaccagcacgaagtacaataacacggcggaggcggcgctggacgcggcacgggtgatcctccggcaatgcgaggaatccagcacggtgaagcgcgtcatctacacgagctccatggctgcgacctcgccgctcaaggaggactccaccggcttcaaggactccatcgacgaatcctgctggacgccgctcgccgtcgactacccttaccggagcgcacggttcgatgagtacatcctgtcgaagctgctgtcggagaaggagctgctggggcacagccacgctggcgagaggcggaggccggcggtcgaggtggtgacggtgccgtgctccgtcgtcgccggcgggacgctgcaggggcagtcgacgacgagcctggactgcgtcgtgtcgccggtgtcccgggacgagggccgcttccgggcgctcaggctgctgcagaggctgatggggtcggtgccgatggtgcacgtcgacgacgtctgcgacgcgctcgtcttctgcatggagcagccgtccctcaccggccggttcctctgctccgccgcgtacccgactctcgacgacatcgtcgaacacttcgccggcaagtaccctcacctcgacctcctcaaagaaacggagacattgccgagcattcaagctcacactgataagctgggggagctggggttcaagtacaagtacgggatggaggagatactggacgagagcgtggaatgcgcggtgagacttggttgccttgatgcgtccaagcttagtttacaaggatgataatatcatcctgattagtgcaatttaccatcattattgtgttggtgtgcctcttcaggcgttctaattactatacttaaaataaaaaggagcaatggagcattccttggcgtcattggtttacagtcgtgtactcgtgtactaccagcaatctgaaatctgaacttc

SEQ ID NO: 23164 - DNA, 2793 bp, Oryza sativa
  ref <308>: DATABASE ACCESSION NUMBER: AK073294
  ref <309>: DATABASE ENTRY DATE: 2001-12-06
gcccgactccgagagattacttcctccaccttccatccatctcctcttctccccctctccctctctctctcgagatcgaacgaacgaagaaccctaggtcatccatggcgggggcgatccgcgtcgccatggaggtgggcgccgacggcgtcgcggtcgtcaccatctgcaacccgcccgtcaatgcgctgcatcccatcatcatccagggattgaaggagaagtacgcggaggcgatggatcgcgacgacgtcaaggccatcgtgctcaccggtgctggaggcaaattttgtggaggctttgatatcaatgtgttcacagaagttcacaagactggaaatgtatctcttatgcctgatgtatctgttgagcttgtgtcgaatttgatggaagcgggcaaaaagccttcagttgctgccattcaaggccttgctcttggtggcggtttggagttgaccatgggttgccatgctcggatatctacccctgaagctcaacttggactaccagagttgactctgggcataattcctggatttggaggaacccagcgtctgccaaggcttgtaggtctgcccaaagcaatagaaatgatgctgcaatcaaagttcatcacagcaaaggaagggaaagaaggtggtcttgttgatgccctgtgctcccctgatgagttgataaagatgtcacgcctttgggctctggagatagctaattaccgtaaaccttggataagatctcttgccagaacagataggcttggttcactgtctgaagctcgttctgtattaaatagtgcaagacagcaagcgaagaaggttgcagcaaacttgccacagcaccaggcctgcctagatgttatggaagaaggtgtactatgtggaggccatgctggtgttctgaaggaggccaaggttttcaaggagttggtgctatcaccaacatcaaaggcacttgtacatgctttctttgcccagcgtttaaccacaaaggtgccaggtgttactgatgttcaattgaaacctaggaaaataagaaaagttgctgttattggtggtggtttgatgggctctggaattgcaacagctcttcttgttagcaatacatccgttgtgcttaaggaagtaaatcctcaattcctgcaaaggggacagaagatgatagcagctaatcttgagggtctagtcaagaggggctcattgacaaaggacaagatgaacaaggccatgtcacttctcaagggtgcattggattattctgatttcaaggatgttgatatggtcatcgaggctgtcatagagaagattcctttgaaacaatcaatattttctgaccttgagaaagtatgcccaccccactgcatacttgcaacaaacacatctaccatcgatttgaatgttgtgggcgagaagacaaattctcaagatagaattataggggcacatttctttagccctgcccatattatgcctttgcttgaaattgtccggacggagaagacatcaccgcaagctattcttgatctcatcacagttgggaaaatgataaagaaagtccctgttgtggttgggaactgcacaggcttcgcagtcaatcgtacatttttcccttacacacagggttctcatcttctagttagtattgggatcgacgttttcagaattgatcgagtaataagcagctttggcatgccaatgggaccttttcaactgcaagatctggctggatatggagtggcattggcagtaaaggatatctatgcggctgcctttggaacaaggaatctggactctaatctggtggatttgatggtacagaatggacggcagggaaagagcaatggtaaaggttattacctttatgagaagggtgggaagccgaagcctgacccaagtgttcaggttgtgattgacgagtacagaagatgtgcaaagacaatgcctggtggaaagcctgttactttatctgatcaagatatattggagatgattttcttcccagttgttaatgaggcatgcagggtcatggatgaaaatgttgtgatccgagcttctgatcttgatattgcttctatccttgggatgggttttcccaagttcaggggtggtcttgtcttttgggctgacactattggagcaccttatatacattcaaagcttagcaagtggactgaaatttatggcgatttcttcaaaccatcatcctatttggaagatagagctaaaagaagcctaccattgagcgcaccaaacgcaacccagcaggcttcgtcgaggtcacgcatgtgagatgctatttcagctgatggcagaataattgcttgatgtgcatcggcaccctagttgaccctcatatctgggacctgaaaaaggaggtcagagcagtgttcaccatgtaatctcttttggatattttggcctttccggttttccgaactgggttgctatggcaatcggagtaataaatgttggcttcggatgccacaaaactgtaactttatggccgatagccttttactccagtgttacattaaaatgtatatggtacagtgtttttttaacttgtagtaaaataatatgcatgctctccgaatagtcatctcagcttcccagtttatttcacttaaaacgtaagggggaaggcagtaatctgactcacccaagttcgaacgtcttgctttgattatcaatgtaaggtgtaaagtctatcatgtaatgtgttcgttgtggtgatgtgtgtgcccatctactactatgaacaaatggaattttggaaccaagtcagagcattttactc

SEQ ID NO: 23165 - DNA, 1467 bp, Oryza sativa
  ref <308>: DATABASE ACCESSION NUMBER: AK073295
  ref <309>: DATABASE ENTRY DATE: 2001-12-06
ggctcctccccgccgcgacaacttcgcccccaaaatcgcccccgcctcctcgcccctcctcgccgctgcctcctcgctcctcctcgccgcccggcgaatccccgcgcctcctcgcttctcctccacacccacgaatccccgccgtctcctcgctccgtgcgcatcctccctcctcctcgcgacggggcaacgaggtcgtccccttccgctgccacccccgctgcccacgccggagattaggtcatccccagccaccgccggagccgtggtcttccccggagccgacgtcgtccccagttgccgctggagccgagttcttccccatccgtggtggccgccgaagtccaccgctgcccccgacgaagtcgaggtcttccccaaccgcggcctgcccccgccagcgcttgaatacactcaaccgatccaacatcctccacttgcgccggcgagagccttcctccactccagcgcctaaccgtacactccaccgcagctcggtcatccttagtcgcacaccgatacacgaaggcgaggtcggagcccctggtgccgccacgagcgagaggcaattcgccgttgcggccgcgctcgtcgtgcaaataccggaacgcaagtggtccctttcctgccgccgcaagcgagcagttgcgtcgctacatgcacccccaaggtcttcctccaccgatctgtcctgaacatgcaaatgctgatgtgatgttttggttgctcagatccatcagtgggatttcatcaacgacaaacattgatagtggttctgacaaatattcatgtatagtggttcgatctacatcagctcggcccggtaatgcaggaagctttacgtcaccattgcttgcagtgacaagtaaataatacacatcatgttcgcttcttttgcaaagctgttatgccgctgccagttaattgctaattgtatatctctgaaattaatttatacagatcgatgggaataccactaatttaagtgctctcgagttaaagaagatagcaagcttggatgaggtatgctttgctcaattgtaagcagtagcaagctaaggttcaacagaaccatgagtacaagcagcggaaggatgcatcaatctacaattgccatagtctaatagtggaaccctttccttgagggaattccatgaaagatattggtctccagattttaagattggtagatcctttcgtggctgccacttcaactgcagatcacatgaacttctgtggacccacggcaggagctgtatacacctcattggtgatcatgtaaatgctatttttagttgctggccatgaaggatatatttgaagtattgttggtgaagatctgagtcttttttcctgataagatattgtaggctgtggggtttaattcaataccataaatacaaatatcttgctttgagcttttcaagtgtttatcaagctatgacaaattatatgtttggtattgtt

SEQ ID NO: 23166 - DNA, 948 bp, Oryza sativa
  ref <308>: DATABASE ACCESSION NUMBER: AK073296
  ref <309>: DATABASE ENTRY DATE: 2001-12-06
gaactaactgtccgtgtgcgagttgcgaccttgctggaaaacttgtacctagagctagctgaaggaagcaatatggccaccgtggatggcacaacggcgccgagctccggcggcaagacggcgacggtggcgttggagtcgggcggcggccgctacggtgggccggctccggcgaaatgctccggcgccaacctggccctgagggcgctgctcttcgccgtgtcgctgtccgcgctcgtggtgcttgtcaccgccaagcagacggtgatggtcccgttcgtcatccggccgccgcagttcatcctcgcgccggtccccgccaagtacacgcactcaccggcgctcatatatctgctggctgcgctgtgcgcgacgtgcttttacagcctgatcacggccatcagctcggtgaggttgctctccagctcggcttgctctgccaagacgctcttctacctcatcctgcttgatgtgttctacgcagccgtgatggcgtcggcgaccgggacagcgggggccgtggcgtgggtgggactgaaggggaactcccacacccggtggaacaagatatgcaacgtctacggcaagttctgccgccacatcggcagctccaccttcctcgccctcatcgccgccatcgttctcgtcctcctcgccttcctcaacgcctactccctctaccgccgaagccgttgattcattccccatgaacttgtttgctgccgccgcccccggaccgtagagttgcttgcttccgtcgtcgcatcgaccgtccgtgtgtggatggattcttgtgtttaattagtttttgtccctaagtgtttgaaacatttgggtggtgtgatgtttttttagtgcttgccggccgtatatgttagctgttgtctcacatctccggaaattcaacgttatcctctcagtgatatataatgtttcatggttgaactg

SEQ ID NO: 23167 - DNA, 1607 bp, Oryza sativa
  ref <308>: DATABASE ACCESSION NUMBER: AK073297
  ref <309>: DATABASE ENTRY DATE: 2001-12-06
gggtcgccgcgcacgacgcgacacgagccgagatccccaacccaccggcggcggcgcgagcacacgatccgccccccatctccggcgccggcgatggcgatgccgtcgagcgcctccgccacggcgcggatgctcaccgtgccggcgctgctcctcctcctctcctccgccgcgctccttgtcttcctcatcctaccgtccctctccccgtcccccgccgcgcacctctgcgcctgctcgcccccgaccaccacgcacaccaccactaccgtcaccaccaccaccaccaccgcctccccggcgcccgtcaccacctcccccgccgacgtcgcctggctcaagtctcagctcgcctccaactccctcccgctcctcgcctcccacgacgcatggcaccgcctccgcaagggcatcaacccccgcacccgcgagcagcagctcttcgacatcaacaggcaccatgggatctcgcattacccggatgaagaggcaactaaccacactgcgctgccttgccccggggagctcctggttgaagagcatcacagtaactatggcgagccgtgggccggtggccgtgatgtctttgaattccttgctaatgcctccgcgctcacgcctagagaccaagttctggaaattggatgcgggactcttcgcgtcggtcttcacttcattcggtttctggaggcggccaagttccattgtctggagcgggatgagctgtccctcatggctgcacttcgctatgaactgccagcgcaggggctgttgtacaagcggccaatgatcgtgagaggggaggatatggatttcagcaggtttggggatacggttatgtatgatcttatttatgcaagtgctgtgttccttcacattccggataagcttgtttggactgggctcgagaggcttgcagggaagctgaggccacagagagggaggatttttgtgtcacataatattaagttttgctcaagattgggtggtgatgggtgcacacggcggctcacggaattggggctcgagtatgtggggaagcacactcatgatagcttgttgttcaaccattatgagatatggtttgaattccgaaggccaaaagtttaagtcttgatagttggaagatagactggtgtggcatccattttgtaattttggtggtgtgaagtgcagagcaagctatggcctgtagttgtatgccaatgagctctgacctgagatcgagatcattgtttgctgggtgttggttcactttcgaccacacacaacactcaggatgaaagatccaatcgcccttgagccttccgaattacatctgccagtgtattgcaggtggcagcatcacacgcctgaattggtccaagacaagactgcagaagaagaagaggaagaggaagcagaggctgaagggtggccgtcgccgtcggaggctgaagaaatcgctgccgccggcgccggggaccccttggagcgcgtccttttgttgtatctagacgggtcagtgtaaccatcctcgaaagagactcgcatcctcttccttgtgcaagtagtatctatgtacttaaaacgaagatgcattggatgatggcgtcttctgtgcatcc

SEQ ID NO: 23168 - DNA, 1533 bp, Oryza sativa
  ref <308>: DATABASE ACCESSION NUMBER: AK073298
  ref <309>: DATABASE ENTRY DATE: 2001-12-06
ggcttccttttcgttcccctccgcggcttcaccccgtgtccccgtcactctccggccagcgcctccactccactcccctccccacactcccccgcgtctccagcgccgccgccgcggtaatgtgacctcgcgcgcggcactccgggattatctaggaagagcacgaggaggaggcgccgatctgtagggctcgttgttagtcatctcgaccaagggaccggtgaagctggaaaaatgcctgatatccagttagggtgccacactataaggtcccatggaaccagtgtggcaagactccacatgtatgactgaatacttctctttcttgctgttgttgatgggctgctaaacataattgagccttttcaccgctttgttggacgtgacatgatgacagacttgagatatccactaaagggcaacacaattccattttgggccgttccacttattgcaattgtgctgccctgggttgtctttggtggaatttacttcaaaaagaaaaatgtctatgatttacaccatggcatactggggattctatattcggtacttataactgctgtgattactgatgcaattaaggatggtgttggtcgtcctcgcccagatttcttttggcgttgtttccctgatggaatacctaagtttgataatgtcactacaaatgtcatatgccatggagaaaagagtgttatcaaggaaggccacaagagctttccaagtgggcattcttcatggtcttttgctggtctaggttttcttgcgtggtacttggctggtaaacttaaggcttttgatcgcaaaggccacattgcaaagttatgcatagtatttctgcctctacttgttgcgtcccttgtggcagtctctcgagttgatgattactggcatcactggcaagacgtatttgcaggtggcattataggtcttacggtttcttcgttttgttatctgcagttcttcccatatccatttgatgctgatgctgtatggcccccatgcatacttccaacagctagctgacacacaaagcaacggcattgcaaactcatacaacatgggaccaacagacattgagattgctgacgaaggccatggtgccatttccctgagagacaccagtcctattttagacacgatggagtctggtaggagaggctgaaacatgaggcgacaagtatcttgatgttgtgtggattcttcggcctttctgagttttaagttctacaacatgactagttcgtacggttcccccatttccatgtacattgcgcaagaataggtagagttttgccaggtagaattgtgcttgtcatctcaggtgatcgtctcatcattgagagttccttgcaactcggtgctggccgttatatgctgacttaaactcgttgtgggtgttggctgtaaattacagtgggagtttgcactcttaatcatattccacagtcctctttgttaccctgctgatgtacctatcctacgctctggttgtgctgaaattggtcccaatgtaaattacaaatgttgctg

SEQ ID NO: 23169 - DNA, 1596 bp, Oryza sativa
  ref <308>: DATABASE ACCESSION NUMBER: AK073299
  ref <309>: DATABASE ENTRY DATE: 2001-12-06
tgggctcgcacatggttcgccgcctttcggtgagatccccgcggctgcagcgagctcgcaggccgccgccttccgcgccgccgaccaccgcgcccatggaccccccctcgccgccgccgccgccgccatatcctcctgctgctgctgagggcggtccggcagcggatagccaggccgctgagctgccccggctgactgtgacgcaggtggagcagatgaaggtggaggcgaaggtgggcgaaatctaccgcgtcctcttcggcaacgcgcccaacgccaattccctcatgttagagctgtggcgtgagcagcatgttgagtatttgacgagagggctgaaacatcttggaccaagcttccatgtgctcgatgccaatcgaccttggctgtgctactggattattcatgcacttgctctgttggatgaaatacctgacgatgttgaggatgatattgtggacttcttatctcgatgtcaggacaaagatggtggttatggcggaggacctggacagttgcctcatctcgctacaacttatgctgctgtaaatacacttgtaactatagggagtgaaagggcactatcatcggtaaacagggacaacctgtacaagttcatgcttcggatgaaagatacatcgggagctttcagaatgcatgatggtggtgaaatagatgttcgtgctagctatactgcaatatcggttgccagccttgtgaacattcttgatggtgaactagcaaaaggtgttggaaattacataacaaggtgtcaaacctatgaaggtggcattgctggggaaccgtatgctgaagctcatggtgggtacactttttgtgggctggctacgatgatcctgcttaacgaagtggacaaacttgatttggctagcttgattggctgggtggcatttcgccaaggagtggaatgtggatttcaaggacgaactaataaattggttgatggttgctactccttttggcagggagctgctcttgctttaacacaaaaactaatgacagttgttgatgagcaattaaaatcatcatattccagcaaaaggcctccaggagatgatgcttgtggtacgagctcttctactgaagcagcatattatgctaagtttggatttgattttatagagaagagcaaccaaataggcccactgttccacaacatcgcgctgcagcaatacatcctgctttgcgcacaggtgctggatggagggttgagggataagcctgggaagaacagagatcactaccactcgtgctactgcctgagtggtctgtcagttagccagtacagcgccatggttgattctgatgcgtgccccttgccgcagcacgtgcttggtccttactcaaacttgctagagccgatccatccgctctacaatgttgtactagacaaataccatacggcctatgagttcttttcaagctagtgatacaactgtctaggacatgtatgatatgtatgagctctacaatgttgcgccttacaagttacaactgtctaagacatgtatgatatttcattcttttttacactgactgaacggccccagataccaaaagtccatataaactcgc

SEQ ID NO: 23170 - DNA, 997 bp, Oryza sativa
  ref <308>: DATABASE ACCESSION NUMBER: AK073300
  ref <309>: DATABASE ENTRY DATE: 2001-12-06
gatttcttcttggtcgctttgttggcgaggccggatcagctccggtcctccggcggccgcaggaaaaggaatggccatgcttgtccgctgtccaacttctaccctccccgcagcgaatcaccggcagaaatccggcgtgctcctccggcgtccaacgcgccgctccgctcgccgtttccaactgcacgcggagaagcccgcttcccctggcgcgggcaacgagacgtcctccagctcggagaacgccgtcctcagggccgcctggtacggctccgagctcctcggcatcgccgcctcgttcttccggccgtcgcagccgcctacggagggggacagcgccggagccgttgaagaagcagcgtcggagcctcagggccgcgctcaggtcgccgaggctgtcaaggatgacttcgcgcggtcatatttcgtcacagggaatctcacgctgaaggcttatgaagaggactgcgagttcgccgaccctgcaggttcgttcaatggcctgcagcgcttcaagagaaactgcacaaacttcggttctctcttggaaaaatctaacatgaagctcaccaaatgggaggatctggaggacaaatcaattggacactggcgtttcagctgcgtcatgtcgttcccctggaggcctattctgtccgcgaccgggtacactgaatattacttcgacgctggatcaggaaaggcatgtcgagcactggaacgtccccaagatggcactcctgcggcagattttcaggccgagtcgatgggtatgggagaaacgcaccgacgaatgaagcatcggtgttcatcgtgaactaggattatgcatgattatactcaatggtacctggttaggggcattagtagtactagtaccttgcatggaccgcatggtagcctatcaggttaaggctgctcgctcctgttgtacagactacagactacaagcagtaatagatcgaaccataatcattttagttctgggagattaaaccgt

SEQ ID NO: 23171 - DNA, 1528 bp, Oryza sativa
  ref <308>: DATABASE ACCESSION NUMBER: AK099341
  ref <309>: DATABASE ENTRY DATE: 2002-08-28
ggttaacctccatcttctcttctcctctcacgagctcgcagctcaagcgcacccagccatggcgactcctcagatctcgcgcaaagccctcgcctccctcctcctcctcgtcgccgccgccgccgcggtctccaccgcgtccgccgacgacgtgctcgccctcaccgagtccaccttcgagaaggaggtcggccaggaccgcgccgccctcgtcgagttctacgcgccatggtgtggtcactgcaagaagcttgcccctgaatacgaaaaactcggtgcaagtttcaagaaagccaaatcagtcctaattgcgaaggttgactgtgatgagcacaagagtgtgtgcagcaagtatggagtttctgggtaccccacaatccaatggttccccaaaggttccttggagcccaagaagtatgaaggtcaacgtaccgcggaagcccttgcagaatatgttaactctgaagcagccaccaatgtaaagatagctgcagttccttctagtgtcgtggttcttaccccagagaccttcgactctgttgtccttgatgaaaccaaagatgtccttgtagagttctatgccccatggtgtggtcactgcaagcatcttgctccgatttatgagaagctagcttctgtttataagcaagatgagggtgttgttattgccaatcttgatgctgacaaacacactgccttggcagagaagtatggagtttctggtttccccacattgaaattcttcccaaagggaaacaaagctggtgaagattatgatggcggtcgcgagttggatgacttcgtcaagtttattaatgagaaatgtggaaccagccgtgattcaaagggtcagcttacttcagaggctggcattgtcgaaagcttggctcctcttgtgaaggagttccttggtgcagcaaatgataagcggaaagaagccctctccaaaatggaagaggatgttgcgaagctcactggccctgctgccaacaggtacggaaagatctatgtgaactctgcaaagaagatcatggagaagggctctgaatacactaagaaggaatctgagaggcttcaacgcatgttggagaagtcgatcagtccttccaaagccgatgaattcgtcatcaagaagaacatcctttcgactttctcctcttaaagggtgtcccacgtaccccgacgagcaattggggtatagtcagtagcgcaatgcctgtctccaagaatggaaaacagaaaggaatgaaaagaaaaggcaatatcgatatcagcaagagatggcaatggaagttcgttagttgggtattctgttgaacaaacatgtatcccactgcccggcatgatcttttttttttctttctgctatttgcttttgtggttacagggattgacatagcaatcagctagtttactcaagaacacaaaaggttttgtaaccatcccgtgatgagtgatgacaccgttctacgtttgtcaatccaataatttgataattcagtttacattatttctgtttaccctggtg

SEQ ID NO: 23172 - DNA, 1613 bp, Oryza sativa
  ref <308>: DATABASE ACCESSION NUMBER: AK073301
  ref <309>: DATABASE ENTRY DATE: 2001-12-06
gagacttggccctccaatccacactggtgttcgctgcctccgcggccggtgataggacgagttcggctccgaacgcctcagtgctgctctactcgcacatgaggtgttcgttcaaatgcttgcgagttgttcgcctcttgttctgcttctacctatcaccggcgagacgtagccgggacgacgatgctggcagccgtggacgccgtggctgactctcgccggccgtgagcctgtgcaagcagcaggcagcggcaacaggttctcgtcgcgaggcgaggatgacgtcatcgagcatgtgggcccacctgtcagcggacatgggactgcggccccacctgtcagcgaagggttgaactcccttcaaattgcacccgccttgccgccgagagcgccgagccgtaaccttggccaacgaacttctctcctccctccgttctcccctcgccggtgagccaagaaaccaagaacccactcgccgcctccgctgctcgccggacagagcgccaagaaaccaagagccgcctcgcctgacgccatgggtggtcgaaagaagccgggttccaagaagatgccagcccctgctgtgatgcgcatccgctctccacctccagacccgcacaggagggcgcgagctgcgccccgaaggtgcatccctccattggcttcggattccgagtcgtctgcttcttctccgacgacttctccagccgccgccgcggctgctctgcctggcatcgctcaagcccggcacgagttcttcgccaagcacacggtgtaccactacggagcgcctccgactgctcaacgaaacgagcagcgggagagcgcgggaggatgccagagcgtgcgcggcggagttcgccgccaaccagctgacggccttgccgctgcggcggggcgaggacatctccgcggcttcctcctcgcgccgtcaagaatcggtggcggagcgcgcggggcggtggatgctcctggactcatcggcgatcggtttctcgactccggccacggcagcttggccggtaccggaatggacgcaccagccggcggggaacgcattggagtacggcccatggaatcctccgacgatgacagcaccttctgctccaggtgcgcccgagctcagcggggagccgccagcgccaccgccctcgtcacgaccgctgtcgccgccgccacctccgccaggtgtcattccaccaccgccgggcgtgatcccggcgccgccacctgcgtggtggacggagcaccaccaccacccggcggcgtctatgccaccacgaggaccatagcctagaggaagaggaaccgcaggagcagaacctctgacaatcacttcttcattatctcttcagaagtttctgctgcttcagatcgaatgacagagaggggatgtcttctttttttcttcttctcctttttcttcttcttcttttgttaatatgggctcagggtaggaaatcgtcaaaccttctgtttcccggttgttaattagctattacccattatgttctgatgaagttcacaaactgctgtaagcaaccgtacaatgtgcgcctgaacaaattgtgcgttccggcattatattggtataaatcttgtgagtgcattct

SEQ ID NO: 23173 - DNA, 2799 bp, Oryza sativa
  ref <308>: DATABASE ACCESSION NUMBER: AK073302
  ref <309>: DATABASE ENTRY DATE: 2001-12-06
gtcaccttccccaatctccctgcggtagaaccctagaggaaccttctagaacccccgagcccccccccccccgcggcccccggcgaagccagcgagatgattctccggactccaccgcagcggaagcggcgggcggactccgacgtcgacgccgccgccgccaccgccaccacccggagccccgtttccgaccgccgcctcgtgctctacgaccggcccaccgccctcgtacccgctggcgtccccggggagcccatggatgacatggtctgcacgtaccactgccgtcagatggtgaaatcagaatttatggtggcattggacactgcagagaagcaagttcaggagtatcgagccacacttgatgatatggaggaacgattatccaagagtgaggatgagagggcaacatgccaggacaaactgaattatgtcgagcaagaattggcagcaacaaaaggtcgggaaagtgcaatgcaagagcgattattaaaggaggtgggtgactttcaggaacgctactgtgatcaaatcaagaagataggggaacttgagacgcagctgaaaaaagagattgattctcgaattgctgctgaatcatcgtcagcatccgcaaaggagtcagtcaaggagttggaggggaatttgcagcgtttatctgaaaattcagaaagggagaagaaagcccttaagaagaagctttcatacttgcaagacgacacaaaattatccatttctaaactaaatgcggagcttgaaagaatgagactcagggcgctaaactctgaggacgaagcaaagttgctgaatgaacagttggaggacttaaaaaagcaactagatgagagtgttcgtgaaaataatgagatggagcacaggctattgaattgcagttctttatcttatgaacgtactccatcagacgatcagaagttgataaagcttttgcaagaggagctccggaattatgaaaaagaagttgatgaagctagaaggttgaagtcttcccacacaaatgttgagttacttaaagaaaaaatattggaggaacaggggtgcagggagagagcagaaatggaattatctaagctgcaggaaattgaagctaaagcacagaagttggagcttgaattagcatcatgcacagcattgctcagcaacatacctgatgtatcttcttttggtgatatacctcaaaagatcgcagatttgcagaagcaagcattgacaaatttaaataaagttggtgaggtaacatcacagttgaaagaattaaaggttgcattggaatttgctgatcttagcaagcaacgggcagaaggtgaagcaacccttgccaaagagagggctgaaagtgctactagggagatcaagcggcttgaacttctgcttgctgccatcagtgaagaaagggatagattaagaaaggaccatgctgtgtcgaaatctagggatggagatgatgcatcatccaagaatatggaatcggatctatctcgaatggaaaaggtagtaacagaactggagagcactatacgtgaccagagagaactaattagtcaacagcacactgagctcaatttgatgaatgaaaaattgagcattgaatcaagaaaagcaaaatcattggagcgagatggagatcaactacgctcacaggtggctttacttgagtcaaagctgggccatggagattactctgcctctagcacaaaagtactgcgtatggtaaatactcttgcagtggacaatgaagcaaagcagactatagaggcattgcaagctgaattgaagaaaacgaaagagaggctacaagcagttgaagaactaaaaggacaagctgatgttggaactgtggttgatgtgaatattgctgaaaagctagcacagcttaaaaatcaaattgcaaccctagagaaacgtgaagaaagatataaggcagtatttgcagagaggatctcagttttccgaaaggcttgctgctcgctctttggttataagatagtgatgaatgatcagcaacagtcaaatgggatccctgtaacacgttttattctgcattctgtttacgcccaaagtgatgatgagaagcttgagtttgactacgaatctggaagcaccaatattgtggtcaatgactacacttctcaacatgaaattgctcagcaggtagatattttcatacgaaagatgaattctatcccggccttcacagctaacctgacaatggaatccttcaacaaaagaagtatctgttgaagataaaagttcagtgagaattcatattgttggattttgtgagtatgctttcttcgagtcaccgaagattggaaaatgtatttcattttggaaacactctgggctcatgtctttccgatgcattatcacagcttctcgtagtaactggagatgtccaaattgttatgttgtggcagccctggaccgtggtcgagcaagctcctagatatagcaaggttccccccaccctttttcatatatactaaggtgcaattgatataccttgtggttttttatatgttttaacgatttgttcaaatgtcaaaagctgaggagcacggcgtgttactaattggacatgagtagagagttgatgccgggctgtcacatactcacatggattcacctctgttatgatttttgacaaagtatatatgaatgcgagcgttacttgtactgtggcctggactgaagcatgagcttttgtaaactgtagcgaactatcatatgtaactgagccatgtgaattgttaattaccgcaaaccagaattggttttctt

SEQ ID NO: 23174 - DNA, 1335 bp, Oryza sativa
  ref <308>: DATABASE ACCESSION NUMBER: AK073303
  ref <309>: DATABASE ENTRY DATE: 2001-12-06
gagcgagccgagccgagagcgcaacaaaaggaaagcagggaaacctcgccgtcctctctctccatccatgccctagcacgcgccgcgcagcctacgagcgggagccacacctcgaggtcttcatctgttgcactcatgatttagcaccagctgaagtgacctctgagactgcgcggtgacgtagcctgttgctaggataaaaatctcagtagttaagcatggcggattctatggtgtcaagtttctgggggcctgttacttcaacaactgagctctgcgaggaaaattatgcacactcgtcatatattgcagaattctacaatactgtttctaatgttccatgtgttcttctggcacttgttggacttgtgaatgctcttcgccaaggttttgagaaacgattcagtgtcctgcacatatccaatatgatacttgctatcggcagtatgatcttccatgccaccttacagcacgttttacagcagagcgatgagactccaatggtgtgggagattctcctatatctttatgtactttattcaccagactggcattaccggagcactatgcctactttccttttcctatacggtgctgcttttgcagtagtccatttcctggtgcgattccaagtggtattcaagttgcattacgttggcctctgtctcctatgcatcccacggatgtacaagtactacatacaaactaaagacatggctgccaagcgtctagcaaagctgtgggttcttacgttgagcttggcgactctttgctggctatttgatcgaatgttctgtaagaagctttcacattggtacgtcaacccacaagggcacgcatggtggcatattctcatgggatttaactcatactttgcaaacacattcttaatgttttgccgagctcaacagcgtgggtgggagcccaaaattacccaccttttcgggttcttgccttatgtcaagattcagaaaccccaaaagagggaatgagttctctatttgtcagtgctgttctccaggaccttaaagccaacgccctcatgtgcttagacaagaagcagaggcattttttttgtatatgggcttccaagtgattacggactacagtgttatgatgcctcactagattttgttaacttttaactaacgcctgttttgtaccatacttaattgttgctcagagattagttggagtgttgtctcatagttttggtcattattttttgtttctctacatttgattttccgttctaataggactgaattttatttgttttttgtttgtcttgaatgttgtcgaacagttttagtcaagttactgcttcatatggcc

SEQ ID NO: 23175 - DNA, 1693 bp, Oryza sativa
  ref <308>: DATABASE ACCESSION NUMBER: AK073304
  ref <309>: DATABASE ENTRY DATE: 2001-12-06
aaaaaaaaagcccaagggcccgaattggcagcccaacgacggcgacggcggcggcgacgacgacggcgatggcggcggcggcggtaacggtcaagctcggagggtggagtagttactgttactgccctaccaccacgaggaggagcaaaccggcggcggtgaagatgatgatggcgctttgccctaccagcttccggatcgaattgcctcgacgaaccattcgggctgccatactgaacaagagacacaccgttccttgctaccagaggcaagaaggagcttcatctccagctccgcagatcgaagccaagtcaatggaggaggtatatgatgctttggctgagcaccttttttctgttttgaagaacattgaacatcttgactcaaaatacattgttggtatagctggaccacctggcgcgggaaagtctacagttgcttccgaagttgttcaacgtgttaataaacgctggtcccagaagcacgagaatggtagttcacttatttcaaccgaagaaattgccacgatgcttcccatggatggtttccacctttatcggtcccaactagatgcaatggaggatccaaaagaagcacatgcaagaagaggagcaccatggacattcgatccatcccggtttttgaaatgcctacagaccctgagagaagagggttcagtttatgctccatcatttgatcatggtgttggtgatccagttgaaaatgacatattcgtaaagccgcagtgagttatcattgcagatccagaatatattctctttgtagattgcagaatgcttgaactctagtttcttatttcgatttaaatcaaatgtgaagcatgcctgagttattcatatagttagttcagatgctgaacacactggcctttatagaaccttttagaccaactcacttttagcattacctaacactggaaccttatgctgttattatgctgtgtggaatgatcatattctatcaggcactgccaagttctaattaatctttttttaatgaatacctgtgtttggaactttgtatgcctgtatgcggtatgtgaatagccgcaagcagatacctttatgagaagttttgttttatgctttatctttctaacagattatggctctcgcaccaaaaatggtttattttaaacaagccaggtaatttaccctaagtatgttcagcacatgctggttactaattactatgattttggcagacacaaaatagtgattgtcgaaggcaattatctattactggaagaagatgcctggagggacattagagccttgtttgatgaaaaatggtttatcgatattgacattgatgtctccatgcaaagagtgctccagagacatgtcgccacaggaaaagagccagatgtagcagcatggcggatctcgtataatgaccggccaaacgcagagcttatcatgaagtcaaaaaagtctgcagatcttgtaatcagatcggtggatttgtcaagataagagtccatgtcttcaattgctgattagatatctgctctaataatgttcagagaaagacactaccaatggttgtttccatggagatctttgtacatataataagctcaatgcatctctccatggtgatttttttagatcaaataaacttatccccaaccagtttggttgtacagtcgatgatgaataacttattcaac

SEQ ID NO: 23176 - DNA, 1624 bp, Oryza sativa
  ref <308>: DATABASE ACCESSION NUMBER: AK099342
  ref <309>: DATABASE ENTRY DATE: 2002-08-28
gtgaaaattcctatatcctctgttcgtcactgccttcctctccaagtccatccccttccccgatctaagatccatccgatccaggccatggcggcgaccatccagagcgtgaaggcccgccagatcttcgacagccgtggcaaccccaccgtcgaggttgatatttgctgctcggatggaacatttgcgagggctgctgtgcctagcggtgcatctactggtgtatatgaagctttggaattgagggatggtggctctgattacttgggaaagggtgtcctcaaggctgttgacaatgtgaactctattattggaccagcattgattggcaaggaccctacagaacagactgtcattgacaacttcatggttcagcaactggatggaaccaaaaacgagtggggctggtgcaagcaaaagcttggtgctaatgctatcctggctgtctcacttgctctatgcaaagccggagctattatcaagaaaattccgttgtatcaacacattgctaaccttgctggtaacaagcaacttgttttgcctgtgcctgctttcaatgtcatcaatggtggatcacatgctggaaacaagctagctatgcaggagttcatgatcctccctactggtgcttcatctttcaaggaggctatgaagatgggtgttgaagtataccataacttaaagtctgttatcaagaagaagtatgggcaagatgctactaatgttggtgatgaaggtggttttgctccaaacattcaggaaaacaaggagggccttgagcttttgaagactgcaattgaaaaggctggatacactggcaaggttgtcattgggatggatgttgctgcttcagagttctacactgaggaccaaacctatgatcttaacttcaaggaagagaacaatgatggttcccagaagatatctggagatagcctgaagaatgtgtacaagtcatttgttagtgaatacccaattgtctcgatcgaagacccatttgatcaggatgactgggttcactatgctaagatgaccgaagaaattggagatcaagtgcagattgttggagatgatctccttgtcaccaacccaactagggtagccaaggcaattaaggacaaggcctgcaatgctcttctccttaaggttaaccaaattggatctgttactgagagcattgaggctgtcaagatgtcaaaacgtgctggctggggtgtgatgaccagtcacaggagtggtgaaactgaggatacattcattgctgatctggcagttggtttatccacgggccagatcaagactggagctccttgcagatctgagcgccttgccaagtacaaccagcttcttaggatcgaggaggagcttggtgctgctgccgtctatgccggagccaaattccgtgcaccagtggagccctactagatgggaatagaaccacttcgtttccgtaaattttgtgaagattgtgagggtttgagcaataattccccacggtcagatgtgggtggacatgctcccacaaaacgcttaattttgatgttgcgtggcgcaagcgtgatttgaaggaacacaaatgattatattaaacgttataagcaaagttcaacaccatgtttggatc

SEQ ID NO: 23177 - DNA, 1337 bp, Oryza sativa
  ref <308>: DATABASE ACCESSION NUMBER: AK073305
  ref <309>: DATABASE ENTRY DATE: 2001-12-06
gaccacacccctaccgcccactcccccggccgccgccgcatctgcgctcttagggcctctccttccccatccccaaatttcccctccggccatggccaccgacggcacaggcgtcgtcaccgtctacggctccggcaccaacggtgccgccttgctcgagccctccaaccacaagtccgccaccttctccgtcaaggtgggcctcgcccagatgctgcgcggcggcgtcatcatggacgtcgtcacccccgaacaggcgcgcatcgccgaggaggccggtgcctgcgccgtcatggccctcgagcgcgtccccgccgacatccgcgcccagggcggcgtcgcccgcatgtccgaccctggcctcatccgcgacatcaagcgcgccgtcaccatccccgtcatggccaaggcccgcatcggccacttcgtcgaggcccagatcctcgaggccatcggcgtcgactacgtcgacgagagcgaggtcctcaccctcgccgacgacgcccaccacatcaacaagcacaacttccgcgtccccttcgtctgcggctgccgcgacctcggcgaggccctccgccgcatccgcgagggcgccgccatgatccgcaccaagggcgaggccggcaccggcaacgtcgtcgaggccgtccgccacgtccgctccgtcatgggcgacatccgcgcgctccgcaacatggacgacgacgaggtcttctcctacgccaagcgcatcgccgcgccctacgaccttgtcatgcagaccaagcagctgggccgtctaccagtcgttcagtttgcggccggcggtgtggccacccccgccgacgctgccctcatgatgcagctcggctgcgacggcgtcttcgtcggctccggcatcttcaagagcggcgaccccgcgcgccgcgcccgcgccatcgtgcaggccgtcacccactacagcgaccccaagatcttggcggaggtcagcagcgggctcggcgaggccatggttggcatcaacctctccgatcctaaggtggagcgcttcgccgcccgctccgagtagcccatccatcatcattcatatccgccttatccttctttcgctatatatatatgctccttccttcgattaagtaataattacatctactatcatcgtcgtgataagaagaaaatgaattagacaccagccagccaggactttgttggcttggctcacttcccttcccttcccttcttggtgatgatgtaacatggaacagcacatgtatcgattaggagcatgtattgttatttttgctaattgctgtggactggatccatttctatggaaactgtcatacttcccgttc

SEQ ID NO: 23178 - DNA, 1059 bp, Oryza sativa
  ref <308>: DATABASE ACCESSION NUMBER: AK073306
  ref <309>: DATABASE ENTRY DATE: 2001-12-06
gtggaccgaggaggcttacctggacatcgccgacaagatggtcggcgagttccctgagcttgcgctcatgggctcttgtgttcttgccatgctcatgaaaggagaggacatgtacatcatgaatgttggcgatagccgggctgtgttggcaacaatggacagcgtcgatctcgagcagatcagccagggttcattcgatggatcagtcggggattgcccgccatgcttgtcggccgtgcagctcacgtcggatcacagcacttcagtggaagaggaagtaatcagaatacgaaacgagcatcctgatgatccatctgccatctccaaggatcgcgtgaagggctcgctgaaggtgaccagagcatttggtgctgggtttttgaaacagtccaagtggaatgatgcactcctggagatgttcagaattgattacgttgggtcctccccatacatatcatgcaatccatccctttttcatcataagctcagcacaagggatagattcttgatattatcttcagatggactttaccagtatttcaccaacgaggaggcagttgctcaggtcgaaatgttcatcgcaacaacccctgaaggcgaccctgcccaacatcttgtggaggaagttcttttccgtgctgccaacaaagcaggaatggactttcatgaactgatcgagataccacatggtgatcgtcggcgataccatgacgatgtatctgtcatcgtcatctctttggagggcaggatttggagatcctgcgtgtaaatagaaacaatagtaggctagtgaaacaaaacgtatagagggggttcttcccatgccttccttgagctgagaggtgttcttgcggctactctactcctcttcccccagttgctactgtacaatatcaaccaagcactgtggggggttggattcggggctctcggcacatccagctgaatcgccatgaatcgcccgcagggctggccgcgtggtataatatgttgatgtaaatgaggatttgttcaattattaataatttataaaatcgaccaattggtcaactttctttg

SEQ ID NO: 23179 - DNA, 1337 bp, Oryza sativa
  ref <308>: DATABASE ACCESSION NUMBER: AK073307
  ref <309>: DATABASE ENTRY DATE: 2001-12-06
gacacacgctgacacacgagacgaacacttgtgctacagcttctcgccaccagctactgatcgaccatgggcggcctctccatggaccaggcgttcgtgcaggcccccgagcaccgccccaaggcgtccgtcgccgaggccgacggcatcccggtcatcgacctctcccctctcctcgccgccggcgatggcgacgccgacggggtggacgcgctcgcggcggaggtcgggagggcgagccgggactggggcttcttcgtggtggtgcgccacggtgtgcccgcggaggcggtggcgcgcgcggcggaggcgcagaggacgttcttcgcgctgccgccggagcggagggcggccgtggcgcggagcgaggcggcgccgatggggtactacgcgtccgagcacaccaagaacgtcagggactggaaggaggtgttcgacctcgtcccgcgccagacgccgccgccgccgacgaccgccgtggccgacggcgacctggtgttcgacaacaagtggcccgacgacctgccgggattcagggaggcaatggaggagtacggcgaagcggtggaggagctggcgttcaagctgctggagctgatcgccaggagcctcggcctgagacccgaccgcctccatggcttcttcaaggacgaccagaccaccttcatccggctcaaccactaccctccctgcccgagccccgacctcgccctcggcgtcggccgccacaaggacgccggcgcgctcaccgtgctctaccaggacgatgtcggcggcctcgacgtccgccgccgatccgacggcgagtgggtgcgcgtcaggcccgtccctcactccttcatcatcaacgtcggcgacatcatccaggtgtggagcaatgacaggtacgagagcgcggagcaccgggtggcggtgaacgtggagaaggagaggttctccatccctttcttcttcaacccggcgggccacaccatggtggagccactggaggaggtcgtgagcgacgagagcccggccaggtacaacccctacaactggggcgaattcttcagcaccaggaagaacagcaacttcaagaagctggacgtggagaacgtccagatcacgcatttcaggaagaattaacgcgccggctagatcatgttcagtaaattttcagatgatgatgcgtggacaaccatatagcctttgcgtcataagttaataatgtctgtgacagtatatcatgtaaacaatcgtatgatgtggcttctctatctgccggtgatggtaatgtgacattgtagaagagggtttgtgagatacttccttcacttaacttttacgaatgaatatag

SEQ ID NO: 23180 - DNA, 1198 bp, Oryza sativa
  ref <308>: DATABASE ACCESSION NUMBER: AK073308
  ref <309>: DATABASE ENTRY DATE: 2001-12-06
ggaggagagagagagaggctatgacgcgctgcgccgtcgtcgccgccgtcgcggccgtgctcctcgtcgccggcgcggcggcggcggggggtggggaggaggaggaggccccgtcgacctgcgcgcggaggggcccgggtttcgtcgacgcgctcgcgtcgcgctgcccctgcatccggatcgagccatccccgcctgtagaggtgagaggagaggctattgctaaagagttgaaccttcgccacagaggtgttacgtactccgttctcttctatgctgcttggtgtccattttcaagcaagttccggccaatatttgaagctctcagcactatgttccctcagatatatcactttactgttgaagaatcatctgcaatgcctagtttgttttcaagatatggtgtccgtggattcccggccattcttcttgtaaatgagactacaatggtacgatactggggcccaaaagatctcagctctctggtggacttctataaagaaactacaggcttcgatccaattgcatattttgatgtcgatcatcaagacagtactggagatttcagaccagtcacaccaggggaccgatctctgcgtaaaattgcaaaagatgagccatttgtgttgcttgcggtgctttttatcatcctgaaggttgcagcgcatttcgtccccatcgtcgtctcccatctgaaaacgttcttggtcgtgcgtgttcagaacttgaacttagggatccgtaggggatcaagccaactgttggaacgagcgctgaatgtacttgatgtgaagaggctttgtagcaagcttagactgagcaataagacaagggaccttaggaaaggcgcaagcaatgctcgagcttgggcttccttgtttacttctgtttcactgggtgaatcatcatcctcacggcaagcttaagtgcttaaccttttcggggctgtttgtttagtgtagctgcacatgtgatccaaagttatttaatcttgcttccgcatccagctatatatgatagttgctttgttgcgccattcaggcatgtgggaacctcatggtcatgtaaattctgagggcctcaccttgttgtatactaggaataccttttgcgttgcggatgcaatgcctaatcttgttgtcaagataactactgtaaatttgagatgtgtggtgccagtttgagtagcctttagacg

SEQ ID NO: 23181 - DNA, 1014 bp, Oryza sativa
  ref <308>: DATABASE ACCESSION NUMBER: AK073309
  ref <309>: DATABASE ENTRY DATE: 2001-12-06
ggccgccgccgccgccactccatccactctgccaccgccgctgccgccaccatccactcaccaccgacaccgttcgtgcgacgccgccaccgtccactccgccgccgccatcgtcctcttccgccaccaccgccatcgtccccttccgccaccaccatccactcctccaatagctcatctgccgccgccgcgtcgttcagcaccggcggcggcggcctaccctccccgttccccgaccttggcgcccccctctccgccacgaacacctccttcccgtcgctccagcgctcgctcacctcggccgcggcgaacaagatgaagaaggcgctcaggctgaggtcgttggcgtcgtccaagggtggaagccctaggagcggcggctgcggtggggcgaagtcggcgccgccgcggtggccggcgaccgtcggggagttgacgcgtgtgcagatgcggatttcggagcccgccgccacctcaagccgccgtccccgagcccgacacattgctcaaggacgagcggctcgtgcagcaccagccgacgcagtacccgacgtcgtagagctgagcgtcgccaagaacaagttcaaggccttcgacctcggcggccaccagatcgcccgcctctgttctaattctaccgctctttctttttttccccctctcctgctgcagcttttgtgctacttgttgatggatttatgattttattccttgagggacggatggggtgatttgggtcggaagcagctcttgtttgattggaacaaactagggtttaggcatgggggacggatgggatgatttgggtcagaagcagctcttgtttgattggaacaaactaggtttaggcatgggggacggatggggtgatttgggtcagaagcagctcttgtttgattggaacaaactagggtttaggcatggggagtattggggattagacatgcacctgggttaatgaagaatcgggcatcttactcgaatcatggaaataaataatcagtgctttcattc

SEQ ID NO: 23182 - DNA, 1666 bp, Oryza sativa
  ref <308>: DATABASE ACCESSION NUMBER: AK099343
  ref <309>: DATABASE ENTRY DATE: 2002-08-28
ggcgacgccggcatcagtaattgagcgccgcggcggcggaggcgggcgaggctgcagacgccgacgagggctgagccggacccacccacccaccgagcgccgtggcttgggcggccggggagagggagggagtggttggtgagctctaatggcgggcctcccctttctcctcgcgctccacatcgcactgctgctgcttcttccctgctcctgccaggttggggattcgtgctcgtcggcgcgcgactgcggcgccggcctctactgcggcaattgcgccgccaccggcaagacccggccgtcctgcatcagagacctggcgatccagcctacctccattgtgaagggactgcccttcaaccgctactcatggctggtcacccacaactccttctccatcataggcgagccgtcgcacaccggagtcgagagggtcacgttctacaaccaggaggacactgtcactaaccaattgaggaatggagtgaggggattgatgctggatatgtatgacttcaatgatgatatctggctctgccactccttgcaaggccaatgctacaacttcactgcttttcaaccagcaattgacacattgaaagaggtggaagcatttctatctgagaatccgacagagataataacaatattcattgaggattacgtccattcaacgatgggattgagcaaattgtttactgctgctgacttgacgaaatattggtaccctatctcagaaatgccaactaatggaaaggactggccaagtgtcacagatatggttgcaaagaaccacaggttgctagtgtttacttctgattcttcaaaggaggctagcgaaggaatagcataccagtggagttatctgctggagaatgagtctggagatccagggatcactggttcttgtccaaatagaaaggaatcacaaccactaaactcaagatctgcatctctgtttatgcaaaattacttccccacaattcctgtagagaatgaagcgtgtaaagagaattctgttggactaccacagatggtccaaacttgctatactgcagctggaaatagaatccctaacttcatagctgtgaattactacatgcgaagcgatggtgggggtgtttttgatgttcaagacaggatcaatggcgtgacactatgtggctgcaacaccattgctgcttgccaggctggggcaccagcgggcgcatgcaaggacaccggagcccctaaccggacttcctcttctgtaaatggaaacgtatattcaggaactatagaattcaagtcacctgcttcagcagccagcatttcgaatgctaacatccctagtaaatttgttggtttgctactgctaggtcttgtgttgatcattaagccgttttgatctttcaggcattctttttttcttttgatgagtttgccacgtttctttttcgtttttaatgtctcctatgtgatgggattacaattacagtaagtaatcttgttagccatctaggctagaatagattcagagagttacggtctggtctgtttggctgtctgacctgagaaatttcctctcatgcctgctcgatatgttctaggctagcaccttacgttgtacccatcacgaagtaatacaaagaaattgaatggattaatggtcctatgggttggcacc

SEQ ID NO: 23183 - DNA, 1640 bp, Oryza sativa
  ref <308>: DATABASE ACCESSION NUMBER: AK099344
  ref <309>: DATABASE ENTRY DATE: 2002-08-28
gggtgcaacaattttcacgtatgctcagttcttcgggagcgccgcgccctggtgcagcgcctcggagagcctctgcagcgcggcgtgcgacgagccgccgcccgccgccacggcgctccggcacacggccttcatctccgccgccttctccctcgccttcttcccctcctccgacgcatcgtccatcagcgacctcaccgcgcgctccagctccgccgcctccacgaagttgtcccgctccctgtccaccccgagcggcacggccacgcccatgtcgcgcaccagctcgaacgcgttcaggtgctgctccgcgtacagcggccacggcgccatcggcacgccgtgccacaggctctccagcaccgagttccacccgccgtgcgtcacgaagccgccgatggccgggtgggcgaggatctccttctgcggcgcccacgtcggccacaccatgcccctccccttggtcctctccaggaacccctcggggaggagctcgtcgaggttcgcgtccgtcgggtgctccgacccgtcgggcgcgccggtgcctgactcggcggcgggcggcgggccacgcaggacccagaggaagcggtggccggaacgctccagcgcggcggtgatctccaccacctgcgccgcctcgaaccagcccatgctcccgaagcagaggaacaccaccgacgccggcggctgcccgtcgagccacgcgatgcactcgtgcggcggctcggagctgtccctcttgtcgttgccgccgagcgagagcacggggccgatggggtacactggcggcgcggcgcgccccggcacgcaccggccgtccgcgatggcggcgaggggccccggctcgagctcgtcggcggtgttcgcgatgatgcccgtggcgtccatgaagcggtcgccgaggcgcacgaaccacgtgtagttggggctcttcttgtccaccaccgggcacggcatggacgccggcggcagaggcggcaggccgggcacgtccacctccccgtccacctcgtggaactccacggcgacccggtcgtggagcactgggaggtgcagcatgagcgcgagcatggcgccggtggacgacatgaagacgtaggacggcacgccgaggtcgcgcgccacgtcgaccatgggcgcggcgaacatgtcgagcacgagcgcggcgacggggcgccccatcccggcgacggcgtccctgacgtgcggcgcgtgcaggtggatgtaccgcgcgatgaactcctccacgccggcggcgtcggcgggcgggtcgacggcggggaggcggtggaagcggatgtcgaggcccgacgcggcctcgcggcggacgtgcgcctcgacctcggagcccgcctcgtcggtgggcgggcgcatgacgagcagcgtgatggagaactccctgccgccgccggcgccggcgaggagcacgcgcttgcaggactcgagcatggacatgaggtggccggagccccactccggcaggagcaccagcgccggcgccagcgtcgccatactctcgctctctagctgatcaccgtctgcagcagtagtgttcgttcggcgcaacactctattagttggactagctagctagtagctaataatggataattgaatacaacaactcgtgattgatc

SEQ ID NO: 23184 - DNA, 2721 bp, Oryza sativa
  ref <308>: DATABASE ACCESSION NUMBER: AK073310
  ref <309>: DATABASE ENTRY DATE: 2001-12-06
ggtttatttggtatgttcattagttctttgctttgcatgaaaaaaagctagctgttatgttgctatttctgcacttaccttgagcaaaactgttgaggtgttttgctgtgaatgtgtgttctgggtgttttggtttgttccaagataatttaacaaggctgctagatctgtttcaagttcagttcttgagctcagagatggtttcgttgtgcttcttgaatctttagcaatcctagagctgtggtctgtggtatgcaggaacatgaagcttctcttctccatttcttccagagtttatgggaatcgttgtggttcacatgttcttggtgttagaacatgcaagtgcatgtgcattgacttcttaatttgttgttcctgcaagtgcatgtgttttctgttatttgctcacacagtgtgttggatcatgttgacttgaattatttatagaagagattgttttggagagcatagatctttggaaagtaatgtccatggattatgctctgcatctttctgcgtcttctttctgatgatgctgaaaatgcttcttgtaatgtttccactccaatccaaagctgttcttagcttcactcttcagtgttccttccttctgtgagttcacttatatggtacagctgaacagagactgatagaagcttggttcctggattgaattttaagttattttagccttttgttgtagaggaatctgatctgtatatgttgtcggaaagttcaggtgaacaattcttctttgttactacctctgctgtttcctgaacagttcttgagctgcaaccatgtagctgaagctgtatacttgtatttcgctttcagagatcacatatttccatcgcacacctctcttacatcttccagagttcagtctatgttttttttttgttctcatgttcttggtttcaatgcaatacacaaaatcctaatgaatctttcccactgagagtttggattgaatcttgttctttccagttcatagctttacacagtgatctgttgctcactgactttgcagagtaacaccgtttaccaagtctgacagagtttcatggagcaggtaattactctgtccctgattcttctccggctccggcgagatcatgtatcttgtgaaggatatcggcggcgccattgcgctgatgggcgtgtcactggtgctcctgggcacatggccggtggtcctcgccgtgctggagcgccgcggccgcctcccgcagcacacctacctggactactccatcaccaacttcctcgccgccctcctcgtcgccttcaccttcggccagatcggcgccgacacgccggagacgcctaatttcctcacacagctcacccagatgcaggacaactggccttcaatcttgttcgcgatgtcgggtggcatctttaacggcctagggacactggccacgcagtacgggtgggcgttcgtcgggctttcggtcaccgaggtcatggcgtcaagcctgaaggttgtcatagggacaacactgaactattttctcgatggccggatcaacaaggcggagattcttttccccggtgtcggatgctttctgattgcagcctgccttggatctcttgttcactcttccaatgctgctgacaaccaggagaagctgtctagtgccatggtgaaccacagcaacaccaatggggacactgaaaatgaagaactcaccaagcacctccttgagatagaacaacccaaggattgtgaagaacaagagcctgaagtggcaccggctgcccaggctgtggaaaaactagaggcaggaacagctgatttcctggttgaccttgaggggaagagatctattaaagtgctcggatcgaacaccttcctgggcctcggcatcgtcaccttcgccggcgtgagctactccctcttctcgccggcgttcaacctcgccaccaacgaccagtggcacacgctcggggagggcgtcccccacatggtggtgtacacggcattcttctacttctccctcgcctgcttcgccatcggcatcgccctcaacatctggttcctctaccaccccatggtcggcgtgccgcggtcgtcgctcacggcctacctgaaggattggaaggggagggatcttgctctcgtcgcaggcatggtgtgtggccttggcaatgcgttccagttcatggctgggcaggctgctgggtatgctgctgctgacgctgtccaggcgttgccgctggtgagcacggtgtgggggatcgtgctgttcggcgagtaccggagatcgtcgcggcggacttacactctcctggggagcatgctgttcatgttcgtcgtcgccatggtcatcctcatggcgtcgtcggcgcaccggaggccgctctgatggcggccggccggcggctgccgtcgacctcctcctctcctcatggacatgaccgagaaacatcagaagaagaagaagaagctgcatatgtacagctccattgatctgaccacatcagtgtgtagttcctgaccttctcgacgtaggatctatgcatattgcctcccggtgcttgcgcatcggcgaggctacacatcaattaatttcttctgcaatgagcaaccatgggatgggggagtgaatttggagatgtgattggactagtatatagtgtaatgttgtaatatatgtctcagcttctttgtgtgaagcttctgtgaagggaaccaaaataattttcaaatgt

SEQ ID NO: 23185 - DNA, 1248 bp, Oryza sativa
  ref <308>: DATABASE ACCESSION NUMBER: AK099345
  ref <309>: DATABASE ENTRY DATE: 2002-08-28
gagagacatcttctcgaaggcctgagcaccaatggcacggtatcttctccgtcctcccaccgccgccgccgccgccgctgccgccgcctcttcacaccgcaggaatggcacaacctcgccgcggggaccggttcttggcctccgggcgcttgcctccagggccggcaaagctcgccccgtgatggcggtggcgtcggagcagcccgccgcgaggggcaagtgccccaaggtggccgcccccaccaccggcccgattccggccgcggagctcctcggcgtcatccaggacgcagccagggccggagccgaggttataatggaagctgttaataagccacgcaatattcactacaagggagttgcagacctggtcacagacacagacaaattgagtgagtcggtcattctggaagttgtgaggaagaccttcccagaccacctcatacttggggaggaaggtggacttattggagatgccttgtcggagtatctctggtgcattgatcctttagatggaacaacaaactttgcgcatggttaccctagcttttctgtatccattggagttctgtttcgcggaaagcctgctgcttccactgtggtcgaatttggtggtggtcctatgtgctggagcactcgtacggtttcagcatcatctggtggtggtgcttattgtaatgggcaaaagattcatgtcagtaagacagacaaggtggaacaatcacttctggtaactggttttggttatgaacatgatgatgcatgggtgaccaacataaatttgttcaaggaatacacagacattagcaggggagtacgaagactaggttctgctgctgctgacatgtcccacgttgccctaggcattacagaagcctactgggaataccgacttaagccttgggatatggctgctggtgttctgatagttgaagaagctggtgggatggtgtcacgcatggatggtggggagtttaccgtctttgatcgttctgtccttgtttccaatggtgttgtacatgatcagcttttggatcggattggccctgccacagaagatcttaagaagaaaggaattgatttctccttgtggtttaaacccgacaaataccctaccgacttttaagttgaactcctcacccagagctattttatactactagaagaaaagagaaaaacagaggatcttatgttaaaatgccatgtacttgactgaatatttgtttattgaagtcctttgactcagcc

SEQ ID NO: 23186 - DNA, 1564 bp, Oryza sativa
  ref <308>: DATABASE ACCESSION NUMBER: AK073311
  ref <309>: DATABASE ENTRY DATE: 2001-12-06
gtgccgccatcatccaccggaggcgccgccgggcgcacgcggccgccgccgccgctgccattcgccgctccgcccccgccctgctgcgggaggaggaagacgaagaggccgagcatgcggcgcacgatccccttcagcaccgagcccctcttcgggacgtagcgagggtggactcccggcggaggcggcttcttcccccctcctactccgccgccgccgagcataacgagagaggagcagcgaaggaaaggctggggaagatggcgggaactggagcggaagtggcgcgagatggcgacagcgtgagagcgtaagcgagatgatgagcgcacgactacgtctgaacttttttgggggcggtttccgcaggtggaagttagcgagtagccatcggccatgtggcgccatggccgtcgcccatggccgtgggaaaagctcaacgggcccctccgatttgcggctaaaccgttcaagacgtcgcctttctgctgcactcgccatcaaattcatcatcttttcttcctcttcgtgcactgtgggacgaaggaagcatctgcaggagcagtgtgtgtggccgtgtgtggaggtcggtgaaaaccgaatacaatgatgcctcaactcaactctcgccgcaaacacggtcaggcaagactcaagagtgctacagtttattggcgagcttgtttgtagctggcatgaaaggacgctggtcactttgttctaccaggtgatggctttctgttcgtttcacatcggcaaaccgcaagtggcgaactggggggcagattttacatggaaacgatagtgcagacggcaggatggagagaataaaaataacactggaactatgagaaagggagggcaactgggcaagaacagcactggaatcctggaaaaagaaggagagaggaaaaaaaaagattatccttactctatgttctttggaaatttagttaccaaagcattttttttcggtgtgcaaaatttagcggtgattctatgtccagtaggtacactgaagatgagggcagtgaccaagtgaagaaacattgaaagattgacttcgggtcagggtcagtgtcccggagagaaactggtcgcgtccagtgatcggatttaatgaatgactctgatcgagccaactaatgagagaagaggaactgtaaaaggcaacattagttcttgcccatgttcatcccagtggcaggttttcttcgttctgaatgtactgactataaaaggcatggatcgtaccaaattgttggagaatgtactatactactgaagtactgaacggatatttgaatttcagaaatgtgtttagccacaagctagtactccattccaaaatagacttattcagatttatcgtagtaatattatatatcacatcccatattaaatttctttattttggaacggatggagtacgtgcttaagtcttagtactagtttggatgaactttcatatgagtaaatgggtaatagctcgaagtacagaataagttaatgtgatgcagtgttctctcacgctatattcaatgaaaagtcacaattatgcgct

SEQ ID NO: 23187 - DNA, 1873 bp, Oryza sativa
  ref <308>: DATABASE ACCESSION NUMBER: AK073312
  ref <309>: DATABASE ENTRY DATE: 2001-12-06
ggtcttgtcgcctcaaaatttcctctctcctcgccaccgtctcttctgtttacgagctcctctccaaatccccaaaaccctaatccagccagccgccgccgccgccgccgccatgggaggaggaggaggaggagggcgcaagccacgcaacttcgccacgttccggctgttcccgcgcgccggcgccgccgaccccaacgaccgcgtcttcgtccgcgtcgacagcaacgactacaccgtccccggcttcggcgacgacgacgccttcgactcctcatccctctccctcaccggtgacgccgccgccggcgatcacttctcctccgcctccggccccctccccaaccacgtccgccgcgagatcctcgagctcggcctcccggacgacggctacaattacctccaccacctccgcgagctccgcccctccgccgccgccgccgcctcatccttcgcgcccaaccagactgccccgcctctccccctcgacgtgaaggcgtatgatgccagtagggtgcggattgcttctggcaatgttgaggatgagatggacgaggggaggacgatgtgtaaggtggccgcgaagacagcgcctgtgaggcggattgagagggcggttgatcctgacatcgcgaggttgctcgacgagaccgatgtctcccatggcgggtcggaggatgagggactggaggaggattttgtcatcatggcaaaccgggctgagggggatgaggaggaagatgatgatgatgaagaggaggaagtgatggatagtgtgttcttaagtgatgttgaagaggaagaggagtttgaggatgatgagggtgagcccaagccgagggtccggcggttgctggatgaacagtttgatttgcttgctttggaagaatatggtgacagtgatgatgatgatgatgatccaggtgttagaaatggggaatgtgaactgcctactgaggttattgatgaactgaaactgttccatagtcaaaatgtatctgtcacagaagaatatagaacgccggcagattttgttcgtagaaaattggattcaagcacagcagaggaggtggatgaatctgctaatgtaatccaaaaatgtgctgaatatgctgaaaggtatttaaatgaaactgctgaagaggaagaagttgtacttgtttcagaaagcagtgatgagtctgaagtttgggactgtgagactattgtttccacatactcaaatcttgacaaccatcctggaaagattcaaacaccaggaaatcctaaaaataggctccctaaagtttttcctggagaaacagctacaacgaaagatatcatcaggcttcaaggcaaagagagacttccagtagaatacctaccacagaggaaaagaaatggtgagaaggagaagaaagcaaagccaacagaaactccaagtgctgaaagttttaagaaaggagctcaaaaggaaacaaaggaggaaaagaaagcaagaaaggctgcagtgaaagaagagaagagagaagcacggaaagcaaagaaagagctgaaaggcctgtacaaatttgaaacacagaaggctcagaaggttgctgctgttacagggccagcttctatacggctaatgtaataaccatgttgatttgtaaacatgttctgcacgataacgacgcaatgtgagtcgtaaggagatcctcatcctacaaggtacgacggcaagatatgatacactgatacctcctgggtcatcttgtgccatgtttgtggtttttgtcgactagatacccagtgtataccatgtttggacttctgtatgagaaatatgtcgtgtaagacgtaggttatctaatggacacagtggcgctattttgaatgtgattttacactg

SEQ ID NO: 23188 - DNA, 1389 bp, Oryza sativa
  ref <308>: DATABASE ACCESSION NUMBER: AK073313
  ref <309>: DATABASE ENTRY DATE: 2001-12-06
gagggtcaagctttgtttcagtgtcacttttgcaaaagcttagacctcagctttaggttagtgatcgtctttccatgttgcattggggctttcatccaaatcctttttgtcttgctgtgccaatctaaacagatttgttggcaccacttggggttcatactaagctaatgatttagtaagatttaaacccaaaccattgtgcagcttaagcttttgatactcacaagagggggaaaaaagagagaagagaatcttggggttattagcattcctagtctcttactgtggatggattatctttgtcggacagtgaactgatgttgctgaaaacgaattaacattgtgttgtgtatggcaggttctatgtggcggagactgtgctggcgctggagtacctgcacatgatgggtgtggtgtacagggacctcaagccggagaacgtcctggtccgcggcgacggccacatcatgctctccgacttcgacctctccctcaagtgcgacgtcgtcccgaagctgctccgccccgccaggagcgccgccgccggtggcaagccgccgctgccgccgccgtcgtcgtgcgtgccgccgacgatccagccggtgctgtcgtgcatcttccgcggcgtgcacaagtgccatcacgccaaggagtgcgccggtggcggcgcggcggcgggtaacaatggcgacggcgacggcaacgacgaggaggcggagaccgagacggcggagcccgaggtggtggtggtggagccggtggcggcgcggtccaagtcgttcgtgggcacgcacgagtacctggcgccggaggtgatctccggccagggccacggcagcgcggtggactggtggacgctcggcgtgttcatgtacgagatgctgtacggccggacgccgttcaagggcgagagcaacgagaagaccctcatcaacatcatcaagcagccggtcaccttccctcgcctcgccggcgccgccgccgccggcgaatgggaggagatgaagacggcgcaggacctgatgttgcagctcctggcaaagaaccccaagaagcggctggggagcaccatgggctccgccgaggtgaagcggcaccccttcttcaagggcgtcaactgggcgctcgtcaggtccgtccggccgccggaggttcctgcgccgccggcgccggcgccgaagaaggtgatgacgatgagcaagaaggagcggcaagagccgtacaactaccgaccggaaaaccacttcgattacttctgatcaagtagctgccatgcatgagcatgatgcatgatgcatcttggttaattaattaattaatcacttgtaagaggggagattagtagtgtacatagagtgctaatcaatgagtaaccagtgttagtttctc

SEQ ID NO: 23189 - DNA, 1621 bp, Oryza sativa
  ref <308>: DATABASE ACCESSION NUMBER: AK073314
  ref <309>: DATABASE ENTRY DATE: 2001-12-06
tggggattacagttaaaccagtctcctcgtcttctctcctcccctcccgcttggagctttccgctgctcaaacccccgccgcgccaacctagggcatgctcccaacccccatggccctagccctagccctagccctatccccctcctcctcctcgccatgaccgccctcgcctcccccttcctcctcccccaccgccgccggaagcgccccctcgacgattcccacttccacggcccgcagcgccaccgccgccgccgcctctgcctctgcccggcggccttcccctccccgccgatcccgcccgaggcggcgtcgtcccccgcgttcgacatggggggcttcctctccttcctccggggtaaacctaggcacgacgatgccggcctcggggtgtacaggggctgggtcgacgtccggtcgcgggatctctcggtggccaccgccatggaagacgacgacgcggggtttggcccccggttggtggtgaggcggagggtcggggacccgaggaaggccgccctggaggccgcggcgccgcgtccgcgggtgaagagggagccgtactacaaggaggcgctcgagaggatgaggagccacgacaagaggctgggcgagctcgcttcactggtgaatctagaagaggagaaactcgccgagctgcggaaggcggctgagccacccaaggaggacctgtctgaactctttacacctctaactgctgaagaggaaaatgaagttcataattgtttgtttggtaggggttcaagtactgaaatcctagcactgcatgagccctccaacattgaagttagcagagagaagttccggtgcttgagactgactgcctggttaaatgatgaggtcattaatttgtaccttgaattattgaaggagagagaggcaagagaaccaaaaaggtttttgaaatgccatttctttaatacatttttttataagaagcttgcttgcggaaaaaatggctatgactacaaatctgttaaaagatggactacccgcaggaggttgggttatgagcttattgagtgtgataaaatctttgtccctgtacataaagatgtccattggtgcttagcagttataaacatgaaagaaaggacattccaataccttgattctcttggttgtgtggatcatcatgtaccaagagtgctggctagatatattgcagaggaagtgaaggacaagagtaataaagagatcgacacaaacacttggcacgaagagttagttgatgatattcctttgcagcaaaatgggtgggactgtggtatgtttatgctcaagtacattgatttccacagcagaggattgagcatgtcttttagtcaggaaaacatggaatatttcagaaagagaacagtgatggaaatcttaagattaagagctgactaatcaaatatggatccttttccttttggtgaacagctgattaacttaggttgatattcgtagactaaattgtcaatcgtgtatacattgttggaagttgccggcaaagataggaaatatatttttccagtgagaagctggagttttgtcagtatgtaaacctgtatgttgataacaccagatttctgtaaagttccgttgtttttggtg

SEQ ID NO: 23190 - DNA, 1872 bp, Oryza sativa
  ref <308>: DATABASE ACCESSION NUMBER: AK099346
  ref <309>: DATABASE ENTRY DATE: 2002-08-28
gatccgggcagaggcagagccatccttggcttcccaaaaactctcttttttctcttctcccttcctttgttgcttctcctcctcctccatcgtctcctcttcaccttgcgtcctccccatccaaagctcacaacttgacgacacacgcacacgcgctcccatgtcctgtagcctcctctccatgtcaagccacgccgccccctcgccgtcgcagccgtgagacatccctccgcgccgcggcgagacttcccctgtgtccatgttcgccgctggttcttgattcgttcaggtctcgtgacaaacttgcttctcctcctgatttaatttgtccggtgcgggaagggaagcctccctctgcagcatggcgccgttgcgcggggccaagcgccggaggaaggcggcggcggagaagaaggctgcaatggcggcggccgctgcggcgggtggcgcgcccggagcaggcggcggcgactggtgggacggcttctgcatgcggatgtaggaaccttgtctggtatacaggatgcacaaagatttgagtttatcttcaaaatgccaaggagaaccttcaactacatctgtggtttggtgagagatgaaatgatggtgaggtctagcagctatacctttcttgatgggaaggtgctgtctttagaagatcgggtggcggtggctctgataaggttgaattctggcggatcactagtgactgtaggatctgctgttggtgtaaaccactcaaccgtgtcactgattacttggaggtttgttgaggctatggaggagcgagcaagccaccatttgcggtggccagattccagtgaagtggagaagatcaaatccatgtttgagaagatacatggtttgccaaactgctgcggtgttgtagacacaacacatatcacaatgtgcctttcttcagctgagccaaactgtaaggtctggctagaccatgagaaaaattacagcatggtcttgcaagctgttatcagtccagatatgaggttcatggacattgtgacagggtggcctggtagcatgaaagagtcgagcattttgcatagctctggtcttttcaagatgtgcgagaaaggagcacggcttaacggcagcaagatggtagtgtctgatgggtcagaaattggtgaatacataattggtgatgcaggatacccccttcttccctggcttctcacaccgtaccaagaaaaggacctctcagattctaagctggagttcaataagagacacgcagcggccataacagttgctccaagtacattggcgaacttcaaggacacatggaaattcctgcatggcgagatgtggcgccccgacaagcacaggctgcctcggataatccatgtgtgctgcatgctgcacaacataatcatatgccttcaggatgcaaccatcgacgaggcagccatgtcgaacgatcacgacgcgaattacaagcagcaggtgtgccagttagcagatgagaatgctgtgagggtgagggacaaactgtctgagcacttggtcagcaggtgaggacaagagaagaaagagggtgtggatgtcccgaagaaactgaaccttcttagtctgctgcagcctgcagctgagtcttttagctgtgagtttcagttttgatgagtttgtttatttcttttaggggagaaaggggtagtgctaaactgctaattagtcagtcagttgtgacaaatgaaaacccaactgtaaccgtagagctctccagctcgcccctgtgatgtgaattacatttgattactttggttctgaatgaaaaatatcatacagatcaaagctaaagttgaactgcggaaactatctatgaaatcattggcatgattaatatttgtgatg

SEQ ID NO: 23191 - DNA, 1819 bp, Oryza sativa
  ref <308>: DATABASE ACCESSION NUMBER: AK073315
  ref <309>: DATABASE ENTRY DATE: 2001-12-06
gatttctctccccaaaataccccccccccgccttaaaccctccgccgccgccgccgccggccgcggcttgtcgccgccatgcgccgcttcgtcggggccctccgcccgctccgcaccctaaccctcagccccatcccgacggcgctccgcgtcctctccaccgcctcggcctcctcttcctccgcctccgccgccgcctcctcatcggactccgactccgccgccgccccggacgccgacttcgacagctcggagttcgcgctgccgccctcggggccgacgccgccgccgccgccgcagcaggcgcgcaacccggtctccgcgctccggaagctccggttcgacccctccctccgcgcgcgcgccgacgaggcgctgttcgggaaggagaggagtggggtggacgatgcggtggaggaggagcggtcgcgggaggttgcgctggccctgctcgaggccgcgctcgagccgcccgacgacgacttgggccctggcgaggtcagggaggaggaccagatgtcgctgtccgtcggcatcgtcggcgcccccaacgccggcaagtcctcgctcacaaacaccatggttggaacaaaagtggctgcagtgtcccgcaagacaaatactacaactcatgaaattttgggcgtgctgacaaaagggataactcaaatatgcttttttgacaccccagggctcatgttaggccaccatggattacctcatagggatgtcactgttcgtgtagagagtgcctggagctcaattaacctttatgatttattaatagtcttgtttgatgtcaacaggcatcttaaaacccctgacacgcgagttgtcaagttaatcaaacggttgggtgctgaggtaaacccaaatcagaagcgtatattatgcatgaataaggtcgaccttgtggaagacaaaaaagacttgcttaaagttgcaaaggaatttgaagatcttcctgcatatgaaaggtacttcatggtatctggactaaaaggcgaaggggtcaaagaccttgtacagttcttgatggaacaggcagtgagaagaccttgggatgaggaaccaactacaatgactgaagaggtcatgaaaaccatctcattggaggttgtgcgggagaagatgctggatcacatccaccaagaaattccttatgtaattgaccatcgtctgatggactggaaggagctaaaagatggttctcttagggtggaacaacacttcattgcaccaaagcaaagccaacgacagattcttgttgggaaaaatggctccaaaatcgggagaattggtattgaagccaatgaagaattgaggtccatattcaagcgagatgtccatctgatcctccaagttagagttgctaaaaagaggagtgcatgaacagattttaaagctcttgtatagacaaccttttcccaatttgggaactcaactgcaagcattcagcgcatgcagcatgctccaacagcgtgtctggatacagcgtgtttgatgactattttgaattgacagcgcctttgccgaatcaagaacatatgcccaagcattcgaaggatgcgtagtaaaatttttccaatgttgcagttgtaaggatttccttctcagatgctgtgggctgcacagcccgagtatgtgtatgttgtgtgcgtgatatagatatatttgtactaggctactgaggccattcgatttttttggttcaaataagttttcccttagcctgtatcctgaaaggtggtttatgcactattgtaatctgacagcaacgtacttacaaagaaatgggtttataaggattgtcttttcc

SEQ ID NO: 23192 - DNA, 1616 bp, Oryza sativa
  ref <308>: DATABASE ACCESSION NUMBER: AK073316
  ref <309>: DATABASE ENTRY DATE: 2001-12-06
gggggccgaaaactgatcgggtggtgcggcctctctcgcctttgatttaccctttcgcgcaccaaacaccaaaccctcgccgccgccggcgccgccatgcggatccccacggagacggagacggagacggggacgggggcacggattcccagccacaggcggcgcaagggatcgtccgacggttcgcgggccgtacaccggcgcaaaccaacgccgaccaaggagacggagattcccggcggccacgggcggccgaagcggtcctcctcagccctgtcgttggacggcgccggcgactccaacccaacctgggtgatcctgaatcgggtcggtgcccggagggattccttccgcggcgaccgcaccacgtcggtggcctcccgcacctccggcggcaaggagatctccgtctcgttcgagctcgcgccgccgccggagacctccctcctcaccctcgactggccgcaagggccccgcccgtcggaggggaccacatcctacccttacgtcatcgcggcgcacggcaacgtcgtgctgctcgagatcatctccaccgccaagtgccctcgccccatcgacatcgactacttcgtctacaaggccaagcccaacggggaaccctccttgacgcggctgcccgtttgctactggaagggggcttcgggcagagacaatcctcggccacgcatcatgagtagggtggccatgggtgtcctgtcctgcagcaaggattcgttcgttgtggccgagatggagagaaggtcataccaaccttctgcagctaacatctacatgtttttctccggctccgacggctggagagtcttcagggatgtgcggattgaccatatcaatggtgccggctggtggtcaactgatgcagtgttatcctaccgccgtcgctacttgatctgggtggactacttgagagggatgattgttgccaaattggcacatccaggaggaggagacccacaggagcctgctctatggtatgtaccgcttccggtcgatccggttatggggaacccttatgacagtgagcgtgggcgaggatgccctgaagcttcccgtaatgtgtgtgccacccaccatggcatcaagttcgtcaatatcatcaaccaatgtggtggcagttttagcataaccctgtggtcgtggtgcgaggacggaacatggagagaagatgcgacactggatgctgcccaactttgggacctcgattgtgaaaaccgccttccaaatgtccaaccagaattccctattgttgacatggaaaacccttacaccgtttgcttcttgttgaacgagggcaactacattgtccctgaagccacaacatggatgatcaaggtccacatgaagaagaagattctactaggttgtactagttattctaaaaatggaagcttgtctcatcagaacaccacctacatgactgccagaaggatgtctgagagactctcctttatctccagtgaaatgccatattacctgtctggacaaaccatgaaaaggaagttgataaactaggaatataactggagatcgaggaattgtcttaccagtttgaagattggatccatcaaacactgtgtttgcaagagcaagttccc

SEQ ID NO: 23193 - DNA, 1142 bp, Oryza sativa
  ref <308>: DATABASE ACCESSION NUMBER: AK073317
  ref <309>: DATABASE ENTRY DATE: 2001-12-06
gagaaggaaaagaaacctaacccacctcgacctgaacccgatcgcgccgccgctcgcctgaacccgccgccgctcgctgcaccccagtgcactcaccacgcacgccggaagttcccttaccagaccgggcgatggcggcggcggcggcggagtttatggagctcgcgctcgagcaggccaagtttgcgttggacaaccttgaggtccctgtaggatgtgtgattgtggaggatgggaaggtgatttcatccggtagcaacaagacaaatgccacccggaatgctacaaggcatgctgagatggaagcaattgatatcctgcttagggagtggcagggcatgggacttgatcagccacaggtcgcggagaagtttgcaagatgcgacctttatgtcacatgtgagccttgcataatgtgcgcaatggcgttgtcgatacttggaataagggaggtgtactttggttgtgctaacgataaatttggaggatgtggatcaatcatgtcattgcatcagagttcttctgctgaactgtcaggggaggaaattcccgggccaaaaggttacaaatgtactggtgggatcatggcggaggaggcagtggctctttttagaaatttctacgagcaagggaatccaaatgcgccaagcctcacagacctgtccgtatagctccccagtgactggtttctttagttactctacaagcatgatgaggaagatctcaggaaggcagatctatagattggatggagatcctaatttaaggcccatcacatgatttagagttgagcattgctgttactaaacagccttatgtattctgaaatagctgccacatgcgttcatgtgattgttattattatttgcagccaggtatcctacaggcttgatgattctgggagatttccacagtttacaagcctgtgtttcaagccatatatgcaattgttgtaggccttaactgtagccttcaaaacaacattggtttgtgattttttttttgaagcctaagccagcttctgctggttttatattaagagagagaaagactgtagaaatggtttgtgatatacgtgcatgtatggtccaatgccaccatgtgttttttttccctgaaaaatatcgcactaccattttgtt

SEQ ID NO: 23194 - DNA, 1898 bp, Oryza sativa
  ref <308>: DATABASE ACCESSION NUMBER: AK073318
  ref <309>: DATABASE ENTRY DATE: 2001-12-06
gattccacccgaccctgttcgctttcgcttcgcctcgttcgcgggtcgcgacgcgagcagcggaggcgcaacaggcggcaaacgtcccggggcggtgccggcagccaagccaagccaagccgcctcggtctctccggccgacagtgattcggcggccaaacctaccagcagccaccaaaaattggcggacgactcctcagatcgcgtcacatgctgggcgacgacaagggaaggcggagaggtggaggagggagcaatgggcggggcggaggacgcgccgcgcgcggcggcggcgaacgggcacgggaatggggccaccgtggaggagaagctggacgagctgcggcgcctgctgggcaaggccgacggcgacccgctccggatcgtcggcgtcggcgccggggcctgggggagcgtcttctgcgcgctgatgcaggacgcgtacggacacctccgcgacaaggtgcaggtccgcatctggcgccgcccgggccgcgccgtcgaccgcgccaccgccgagcacctcttcgaggtcatcaacgcccgggaggacgtcctccgccgcctgatccgccgctgcgcctacctcaagtacgtcgagggccgcctcggcgaccgcaccctctacgccgacgagatactcagggacggcttctgcctcaacatgatcgacacgccgctctgcccgctcaaggtcgtcaccaacctccaggaggccgtctgggacgccgacattgtcatcaacgggctgccgtccacggacaccagggaagtcttcggggagattgggaggtactggaaggagaggattactgcccccatcatcctctctctggccaaagggatagaggcctccctggatcccctgccacggatcataactcccacacagatgattagcaatgcaacgggggttccattggaaaacattctttatcttggaggccctaacattgcttcagaaatttacaataaagaatatgcaaatgctcgtatatgtggagctgacaaatggagaaaacctcttgctaaatttttgaggcagcctcattttattgtatgggataatagtgatctcattacacatgaagtcatgggaggtttgaaaaatgtgtatgccattggtgccggtatggtggcagctctaacaaatgagagtgcaaccagcaaatccgtttactttgctctttgcacatctgaaatgatttacataacccaccttttggaagaagagcctgaaaaacttgctgggccattattggctgacacttatgtcacattgctgaagggtcgtaatgcatggtatgggcagaaactagctaaaggtgaactgacactagagatgggtgacagcataaaaggcaaaggaaccattcagggtgtctctgcagtcaatgcattttatgaactcctgagtcaggatagcttaagcgtagtgcatcctgaagccaacagatctgttgcaccggttgagatgtgcccaatcctgaaggcactgtacaaaattttgatcaagagggaacttcctcctgattcgatccttcaggccataagagatgaaacaatgtatgatccacgtgaaagaattgagatggcgcagggccattcactttaccggccatctcttcttggtcaacctaaaggagatgccaaagcttaggcagttcttccttttttttttttggtgctagatatcctgtaagctctgtgtgctattatgcttgctgctgctgctgttgttgtaacactagtgagttccagcaagggaccaagatctcagttgattgcttcaagacttgttgagcttgttatgtagtttgatttgttaaacgcctgaaatgtgtacatagacgttgttttgtgtgatccaataataaaatatgcaaaaggtaatgttc

SEQ ID NO: 23195 - DNA, 1183 bp, Oryza sativa
  ref <308>: DATABASE ACCESSION NUMBER: AK099347
  ref <309>: DATABASE ENTRY DATE: 2002-08-28
ggcacgcacagagggagaggggggtgaggggatcacacctttctctcgctttctctctcgtttgcgagcggcggcgcgggcgctcgagctgacggtcggtagagacggcgccgggcatctggaggttaggaggctgatctagtgagattgtttttcaacggaccgcttcctgtgttgtcaagctaggatatggacaccaacaacggaaagggagttgtagcctcatggacatcatccatgtcatctttgatgctctccaatttggccaatctggtggctagtggcacaaggacatcggctggttttaagcaggtgcatctcaatgcatgtgctagagttgtgaatgaaaagttttcgacaacactcaccggggatcagattagaaatcatttgaagacatggcataagaagtttcaaaagattagtcgtcttaggaaggtgagtggagctatttgggacgaagagaacttcattattagccttgacgaggagcactacaatgactatatgcagcataacaacaagagcgatgctgagtttttcaacaggcctattaccaactatggtgagatgcttaccatatttggtagtaccatggctataggaaattttgcaaaggactcaagctcagttctaggcactgaagatgtcgagggtacagagaatgaagtgaatgaagatgctcccacaatagatcatgatgagagatcatcggctagcaagcccaagagacaaaagacatatgcacatgacgatgatggtttggttggtgcatttgacagagctagtgacaaactagcaaatgccataataaggtctagcacagttgggaatgaactacctgatgatctatgggacaacttgaatagccttccaggttttgagcaacatcacatctctttctactatcactatttggttgctaatccacatattgctagagctttcaacggtcttccatttgcgaacaaacttgattgggttgctatgtacatcagcgagaagtttcccggtgctatgtaggataccatcttcatggaaagattggttatttcactattatgaactatttgtaccctctcattttgtattgtgtgtgcaccgttaatttgggctatgtgtaagacttcatgcaattatctactattatgtgagactttgaattggaaaatttgtggatttc

SEQ ID NO: 23196 - DNA, 1556 bp, Oryza sativa
  ref <308>: DATABASE ACCESSION NUMBER: AK099348
  ref <309>: DATABASE ENTRY DATE: 2002-08-28
gagccgatacgggagattggatcggaagcttctagaagtttccgtgggcgatggcgatccgcgcgaggtcctcctcctacgccgccgcggcggtcgcgctggcgctcgcgctggcgtccgtcgccgctgtcgccggcgaggtcttcttccaggagaagttcgaagatggatgggaaaatcggtgggtcaagtcagaatggaagaaggatgagaacatggctggtgaatggaaccacacatctgggaagtggaatggagatcctgaggacaaaggtatccaaacctctgaggactacaggttctacgctatttcagcggagtacccagaattcagcaacaaggataaaaccctggtgctgcagttctctgtaaagcatgagcaaaagcttgactgtggtggtggatatgtcaagttgcttggtggtgatgttgaccagaagaaatttggtggggacacaccgtacagcattatgtttggaccagacatctgtgggtacagcaccaagaaggtccatactatctttactaagaatgacaagaaccatttgatcaagaaggatgtcccctgcgagactgatcagctgtcccatgtgtacactttgatcatccatcctgatgctacatacaccatacttattgacaatgttgagaagcaatctggcagcatctacgagcactgggatattctgcctccgaagcaaatcaaggacccagaagctaagaagccagaggactgggatgacaaggagtacattcctgaccctgaggacaagaagcctgagggatacgatgatattcccaaggaaatccctgaccctgatgctaagaagcctgaggactgggatgatgaggaagatggtgagtggactgcaccaaccattcctaaccctgagtacaagggaccatggaagcaaaagaaaatcaagaaccctaactaccaaggcaaatggaaggcaccgatgatcgacaacccagacttcaaggatgatccatacatctatgcttttgacagcctgaagtacattggcattgagttgtggcaggtcaaatcaggtactctgtttgacaacttccttattactgacgaccctgagttggccaagacattcgcagaggagacatggggcaagcacaaggatgctgagaaggctgcttttgacgaggcagagaaaaagaaggaagaggaggaagctgccaaggccggtgaggacgatgatgatttggatgacgaggatgctgaggatgaggacaaggccgatgagaaggctgactctgatgcagaggatggcaaggattctgatgatgagaagcatgatgagctctaagatggtgaggatgaagaatggaggccgccttcgcgacgatgccaggatttgctagttctcccattgttatgaagttccctttttcgtgatcagaaacttgacaagaaagtactctgtagatgagcattgctgaggaactttaatttggtctttgtagctctctctgtagtgtcatttttcccaccacaagaaaaagaactgataacttattgaacaagagaaatcttttgc

SEQ ID NO: 23197 - DNA, 1701 bp, Oryza sativa
  ref <308>: DATABASE ACCESSION NUMBER: AK073319
  ref <309>: DATABASE ENTRY DATE: 2001-12-06
aggggttggagacgcggactcggagggctcgtgggtggcggcggactccggcgactggtggcttgaggatcagcgccgtcagcgcctgcatccaggtaggcaactcaatacgccggtggccgtggttgttccgcccccgcggcggcggggccttcgatccgtactgacgtctactcgccggcggcggattgaggcggaatgtttgggtggccgcaggcggagattgtctccgcaaaggaggaagggagcccatggtggttctacagcgaggaggtcccttgatccttgtggttgtggaggcccaaactggcattctcccttgctgaaatctcactgttcactgtttcttcagactggaagtctggaactggttcagattccattctctttggatcacttctatattagaatcaacagagatgattatgcttgtgcatagattgctaattatcactagtttagctgtagaataagtatacagatagcatatagtagttctatgtgattatgtgaaggatgaagcaaaaggttcagtagtaagcaccttctccccaagttacagaaaccaaaagaaagaggaaaagaagataaatgagacatacatactcctggcacgtacatacacattctaggaattctgatcacaccaacaagcaatctacactactgaagtactgatctcatattagtaactttttttttttggacaagtcatatattaccacttgcctgctttcttgtcgttctacgatttacatccatagcctgcttccccgttgtgcttctatgatcatctttccctcctttggcctggggatatcgtagttctgagggtagctcatctgttccatctcccatttcatctttgacacgactttctcgtgctggggagagtactcctgcaagacagatactggttttagacttttagtccttttctgccgacattttagtctaccattgtttcagttgataggtctcaggtccacaatgtgcatttattagtgcaataacgttttagtgctacactagaaacggaatttgtactttgattgctcttgcagtaatgaggaccttgacactggaccaagagcatatgcataattgtgatataatcctcattgacagttttacttaattaaaactttggccttgcagctaactctcacatttttttcgcagtgtccaggtgtttaacgacaaaattggtgctgattggtcaacaagttaagcagaccaactctggtgacatatactcaccaggcaatgctataaaggcatcagactgcctggccatctcagccttcctctggtgcatatcggacactgctttcacctcccccactgtctcacctgatatctgcatgtacatacaccatcacacgcgcaagaaacacacattatatattagcaggggagccagctttttgcttaaccaaaagaggaccaactttcttcagatggagaaataaaggtatgggggacaagagaaaatgtgatgggctttttctttgttaaatctagccagcatccctgcttgagagattgcagtcaagatcagtgagatatcatctatcatgggggaacaagatttcagtgagcatttctcctgatccttcatcataagttctctttcttctttcccgctagcaaaaaagacaaaggaacaagatctacaaacattatcatatttctatcgtt

SEQ ID NO: 23198 - DNA, 1997 bp, Oryza sativa
  ref <308>: DATABASE ACCESSION NUMBER: AK073320
  ref <309>: DATABASE ENTRY DATE: 2001-12-06
gaatcatccccggcgcggggaaagcaagagaaaatctccgcacactacctctctgtcccgcgcgccgctggtcagagcgaatgagctcaaccgccgtcctcccgccgcctccatttctttagcggttgccaagggttcttgagctgtccttggtcaatgagagtgcaggaaggtggtggcgtaaggatcaaagctcacgaccccgcctcactgaaatccatgcaagcaacctggcctcctttggtggctagtagctctggatttcttatagctcatcttgttcagtagcagcagcagtgttgcgtacttgagcaagtgcaaggcttcttgcttggcacgctcaggtgtcccgtggtccggccattggagattttggagctcgtaatggctcacaaggccgcggctctggtgctgctgctagtgtcagtgtcagtggcggccgcggcgtcgggcgaccaggagagcgaccggatccgggagctccccgggcagccggcgaaggtgaggttctcgcagtactccggctacgtgacggtcaaccaggcgcacggccgcgcgctcttctactggctggtggaggcggtgccggcggccgggcccatcgcgccgctcgtcctgtggctcaacggcgggccggggtgctcgtcggtcgggtacggcgcgtcggaggaggtcggcccgttccggatcaggcccgacgggaagacgctgtacctgaaccccaattcttggaacaaggcggcgaatttgctgttcttggagtcgccggccggcgtggggttctcgtactcgaacaagacgttggatctgtacgtcgcaggagatgctaagacagcatcggatgcttatgcatttctggtgaactggttggagagattcccacaatacaagtacagggagttctacattgctggggagagctatgcagggcattacgttccccagttagcccagctcatctatgaacagaacaagggcattcagaatccaataattaatctcaaaggattcatggtgggtaatgcggttactgatgactaccacgactatcttggtacctttgagtattggtggactcatggcctcatctctgacaacacttatcacaacctgaagaagacatgcttgcttgagtcctctgagcacccttctcctgaatgtctaaagaacctgaacctagccagttcagaagaaggcaatatcgatccttacagcctgtatacaaagccctgcaataatacagcctctctcaaacttggcttgggaggacgctacccttggttatccagagcatatgatccctgcacagaaagatactcaagtatttactacaaccggccagaagtgcagatagcgatgcatgctaacaccactgggattcaatattcatggaaaacttgcagcgatattgtcggatcatactgggcagattccccgaaatctatgcttcctatctaccaagaattgattgcagctggtatcaggatatgggttttcagtggggatacagatgctgtagttcctgttactgcaacaaggtactcaatagatgctcttaagcttccaactatggtcaattggtacccttggtatgaccacggaaaggttggaggttggagtcaagtgtataaaggattaactctcgtcactatagcaggcgcaggccatgaggtaccactacaccggcctcgagaagcacttatattattcagacacttcttgcagaatacacccatgccaactcaatagccacttgaagcagaatgatagagtaaactacgacaatcatataaagtgctaaagtgtttttacattattttttaatttgatttgattattacaacatgatatcaactatctctactaaatgtatgtatgtttcttactagctagtagggaaacctgacaattgtactgctccagctaaagagctcctttgtatatgatactgatagtgattctttgagcagtaaaatttacaattttacatctttctc

SEQ ID NO: 23199 - DNA, 1263 bp, Oryza sativa
  ref <308>: DATABASE ACCESSION NUMBER: AK073321
  ref <309>: DATABASE ENTRY DATE: 2001-12-06
gagctgattgccaacgaattccccgtgcgccgtgcgcctcgccctcccctccctccctcctcgtgccgttgccccccggttggactcggcgcgcttgcttctcgctcgcggctgctcgtaacctcgcctcgcctcgccctcctgcagcacgcgcggctggctgcccgacccagatccggagcgccatgtcgaggaatccgggctgcaccgtcttcataggtaacttggatgaaaaggtacctgagagggtcttgtatgagattcttattcaggtaggtcgtgttgtagacctacacataccacgtgacaaggaaactaatcgctccaaaggttatgcttttgctgagtatgaaacagaggagattgcccagtatgctgttaagctattttctggccttgttcgtcttcataatagaacacttagatttgcgatttctggacaagacaagcaatcttctaatggaaatattcctgtaacacctaaagtgaaccctataccgccaccaaagccggctcagctaacgagatctagtgatactcccgcatcgcaacatacagtggtaaatggcaggattgctggtatttctccaaaccattcttatagtgcgcactctgaggcaccaagtgggatatcgagtagaggattaagcaatggtacatacgaatatagtagacgcgtatttggttctgttctgaatgacgttagccgtcgtactgacaggcaaccaattccatacccgtcctactagcatattgagctccagggaagaacatggtatgctaacagattagcccagcgatgtcaatgttcgttgtctcagcccttctgtaatatcatctatgtattcaccattacatgcatgtaaatatgtcttatggcttagtcgtgtaggccgatgcttatcttttccattgttctgttctcaacattgtagtcagacttgtgcccgctggttatctcccatgtcatgtcctagtgatagcatcatgcctccactaatgcagctgtaccaagacttagtctaattgcagggatggctggcaatttgtgttttaatatttaatctagtgatgtttgttgttgcttctgtgttccagtgggaccaagtttgtgcttgagttcttggtgtattttgttcttctcgtcaaagttggtttgtattatgttgggcatcacaaaagataatgtcattgtctactatttaaaaaacagtgcaaatctactgaaatttaatgtttatttatgaatatgaaagatgtttt

SEQ ID NO: 23200 - DNA, 1417 bp, Oryza sativa
  ref <308>: DATABASE ACCESSION NUMBER: AK073322
  ref <309>: DATABASE ENTRY DATE: 2001-12-06
aaacgcagaactcgtttcccgtctcgtccgcatcgatcggcgccggcagttttcgaatttggggtttgagaaggttgaggaggagttgggaggttgagaaggcggcggctgattcgttgggttcgatcgggctcatggcgacggcttccggcgatcagtcggcgggttccgcggcgagggcgtcgaagctgaggtacccgctccggtcggcgagccgggggaagggcgccgccgatgctcctccgacgagcggctccgtggcgaggagttttattccttgcagaccaaaaccatctttggatgtcagcaagagcgtttgtggtcttgatctttcatcggtgaaggataattcagccaaacctccacggaggcactcaatacagaccaagccaggtgttagccccaggccaactcctacaggaactatcactcctgtgtcattggttcgttcaaggaggtccgatagtcaagggaagtttgataccccgatatcagaagtttccatgtccacagcaaggcgcaagttcagcactctgtcctcaacctcatattggatgacacaaatcaggcttgcagaggctgcttccaagcactctatatcgttgggcttctttaagcttgcacttgaatcagaatgcgagcctctggatcgtatgagagatgagctaaaggcttatgttgtccggcatggccttgcaacagagttggaggaaccagtgaaggatattcttcaggtttacaatatcgtggaggatcttgagaagctaaagatcactgtgaactcttcagaacagccgaaaaagtctgacaaggctgctcatagtgccaccaatgtgtcaccaaagggtaatctgaagccaagatcgctgaattctgatgcagctcaaagtaaggaagcagctaaaaaagacaacattcagaagaagcctgatgcaaaggttagaggctcctacaaccggaatcctgcaaaagaagccatcaccaagaatactggtaagaaagccaagaagcaggtcaaggggcagaaggaagattgcaatggaggcagcgaggctttgccagttggtacagagcaagaacctgttgatgtggtgaaggaggtgacaaatgaagataaggagaatatgggggacagtgaaatgccaatggatcttggcatagcccaagaaatctagaacaaccaaaccgacttcagattcaaatctttttatcgctggatatgaagtagagtgtgtggtgcttgttttttcccctcatttgttcatatatcgctggagcttgccttattatcaaaaccataaagaggtctttaagtgtgtagtatggtttgcagggtggatgtttgctttattatccctttgttaagtttgcaattctgaattgtccagtcatgcatctgaatataattgaattcttt

SEQ ID NO: 23201 - DNA, 1803 bp, Oryza sativa
  ref <308>: DATABASE ACCESSION NUMBER: AK073323
  ref <309>: DATABASE ENTRY DATE: 2001-12-06
gagcctgaccaacccacccccactgcttgccgatcgctcgctcgctcgccggcgaaggacgaggggagagatgacgctcctgtgcgtgccgctggtgtcgcgcacggtggaggcgatgcaggccgacgcggcggcggccgcggccgccggcgccgacctcgtcgagatccggctcgacttcatcgaggggttccgcccgcgggagcacctcccgagcctgctccgtggctgccctctccctgccctcgtcacctaccgacccaattgggaaggaggccagtacgatggtgatgatgctacaagatttgaagcactccgtttagcaatggagttaggcgtagactatgttgatattgaattgaaggttgctgacaaatttatcagctttatttctggcagtaagccagagaagtgtaaacttattgtctcatcacacaattatgaaagtactccgtcctgcgaggagcttgcagatcttgtggctagaatacaagcagttggatctggcatagtgaaaatcgcaacaactgctagtgacattgctgatgtgtcacgaatgttccaagtgatggtgcactgccaagtgcctatgattggactagtgatgggcgaaaaaggtttaatgtcaagggtgttatcccccaagtttggaggatatctaacctttgggactcttgatgctacaaagatatcagcacctgggcagccaaccgtcaaagaactgttggacatttataatataaggcgtataggacctgatacaaaggttcttggtcttattgccaacccagtaaaacagagcaagagcccaattttgcacaataaatgtcttcaatctattggatacgatgctgtttatcttccacttttggcagatgaccttgctcgatttctcagcacatattcatctccggatttttcaggattcagttgctctcttcctttcaaagtggacgctgtacagtgttgccatgaacatgacccagttgctaagtcaatcggtgccataaacaccataattaggagaccagatggcaaactagtgggctacaatactgactacattggagcaatttctgctattgaggatggcataggaggcccaggatcaaaggatgctgccatctcacctttggctggcaggcttgttgttgttgtaggtgctggtggagctggtaaggcaattgcttatggggcaaaggagaagggtgcaagagttgtagtagcaaatcgtacctacgaaaaagcagtaagtcttgctgctgcagtgggtggtcatgccctgagattagccgagcttgaaactttcaggcctgaagaagggatgatccttgctaatgcgacatcattgggaatgtaccccaatgtggacggcacccctatcccaaagaaagcattaagcttctatgatgttgtatttgatgcggtatatgccccgaaagttacccggcttctacgagaagcagaagaatgtgggattaaagttgtcagcggtgtagagatgtttgtcagacaagccatgggtcagtttgagcatttcacaggtggtattgaagctcctgaaagcctgatgcgtgagatagctgccaaatacacataacaggcgaatggcgaagcgacggttgtgagtaattagcccaaatattcctctgggttaagttaataaaagttttggatgccagcccaattttgtgctaggtggagattagttgttgtaatgttcgatttcgccgacttaacctgtcagagatgtaaacagaaagtgttcaatctcatcatacttgcaataaagaatttgcatgc

SEQ ID NO: 23202 - DNA, 1293 bp, Oryza sativa
  ref <308>: DATABASE ACCESSION NUMBER: AK073324
  ref <309>: DATABASE ENTRY DATE: 2001-12-06
gagaggtgaggtggcacgcgtgagagtgaggagctcgcgaactccaaaaccctaaccctctcggagcttcacatcggcggcggcggcggcgatggcggagggtggcggcggaggaggagggtcggcggcgtcggcggcgctgaaggatcaggggaacgagcagttcaaggcggggaactacctcaaggccgccgcgctctacacccaggccatcaagctcgaccccgacaaccccaccctctatagcaatcgggctgctgcatttctccatctagttaagcttaataaggcactcgctgatgctgatacgacaataaaactcaagccacaatgggaaaagggtcatttcaggaaagggtgtgttttagagtcgatggaacactatgaggaggcaatatcttcttttcagatagctttgcaacacaatccacaaaatacagaagtttcaagaaaaattaagaggcttactcagttggcaagggaaaagaagcgggctcttgatgtggagaacatgcgttctaatgttgatgttgcaaagaacttggattcactgaaaaccgagctggctggaaaatatggagatgccgaactggggcaaagtatcttcacttttgttgttaatgtgattgaatcagctataaaggtctggcatgacaccggaaaagtagatgcaagagttaattttcttcttgatgaccagaagactgatactgaaaaacatgccccagtggttaacattgacaaggcctttgactcaccccacactcacagcagttgcttcacatttttgcggcaatattccgaggagtctttctcaaaggctgcttgtatggtagcacctaagagcgccatctcgtaccctcaggtctggaaaggacagggatcaagaaaatggaagcttgaccagagtgatggtttctttgtgcaatttgagtcaccaattctgcggaagatatggtttgtccctagcacaactgaaaagggacgagtattatgcaggagtcctgagctcctggacattagcatccacgaagtgcttccccgtatattcaaagaaacggcttgaataaacaacaaatggacagtgaatggctcccaaattcttcccctgttgtggtcatattctttcctagcttacagttgcaaaggggatatttttcatagcgtggtgagagcttagatttgcatgccagattttgtaagctgttgatctgtattgtacaccgaggcacacaaattttgctgatctggttttttaattatatatgccttaagtggtgcaatttccattgt

SEQ ID NO: 23203 - DNA, 1542 bp, Oryza sativa
  ref <308>: DATABASE ACCESSION NUMBER: AK073325
  ref <309>: DATABASE ENTRY DATE: 2001-12-06
gctaattggaacagttcattctccaatttctccaaattgtaacatggtatcagacccttgttccaaaaaccctagccaccaaatccgatcatcaccggcgcaccggcggcggtgagccgccggcgagccatcatcatcgtcctccttcatccctcaacgtttttgtctccaagcagcaagcctgcagttcgtcgtcgtcaccgtgttcctgttcgccggtcgcagccgccgccagttgcggcgccgcgcccgttcccacttctccacccacgcagccacgccgtcgtggtgttcatccacgctgctcgtcgcggggctcgttcttgccgccgttcgagagccgccgctgtggcctcgtcaatctacatcaaggcatcaagcaacatcagtttttggcccatttcttgtcagttagcatcagcaaaccatcgtcctctctgatctgcagcagcaacaacaactcccgttcacctcctagtagatgcagcagctagcccattgttgtctcctaatttcagcagtagaatttccatgttccattgtttgtgttgcaacatgcattctgcagattgtcatcaagcttgtattccaccacatgtgttagtcagtttttgcgcttgctaatcgctgccatccactactcactcatcaatcatcaccatgctttgttattgttagctacttattataatccaattttacttctccaaattatcatgatggcttgtagtagtcactggttaggtcattagctgcttgcttgctactgtcaacatgttcactagcatcctttgtgtcttttgctagtaatgtgcatctctgcttgcagtccatctatcaatattgcctttttgctatatccatcaatccgtgttctttactaatcaaattcctgtgtttcctaccgagtccagcaaaatccattgcatatccttcattttgtcgaagctgtgccagtccatctcttcatggtcatttcatcatcaccagctccccgtcggagctggccttcattgtcacttcatatcttcatcatctccatgtcggagcttgtcatcatcatcatcaatcagtgaaggtccgaagaacagtttgtgaagggccttcatcaatatcaatgtctcatcatcaatcaaaggaccgaagaacagcttgtgaaggtccattgtcatcatcatcaacatctccgaatcaatgaagagccgaagaacgattcgtgaaggcttcaaggtaccgagggccgaagaacagtttgtgaaggctccgaggtccatttcattgaggagggggtcttttcttcttcatcatccaagaattgacacacttcgacgacatcatcaagactttggagataggctaatatttagattgtgttctcatgtttagtttacctttcaaatgcaatgttattacatacacattgcatttgagtgggggtgttaagggtagtatgtctaggggtattttagatatttcccatctctctcttgtacaaatatattttgccctttgggcctaatctaattggaacagttcattccc

SEQ ID NO: 23204 - DNA, 1205 bp, Oryza sativa
  ref <308>: DATABASE ACCESSION NUMBER: AK073326
  ref <309>: DATABASE ENTRY DATE: 2001-12-06
ggtccacactgcaccgcgctagctcactccctcacttgcgtccccccttcccgtggctgatctcgccgtcgtgcggccgcgggctccggcgaccggtcatggcgtactccggcggtggcgggaagctgtccgccgtcgatgcgatcctcgccgaggcggccgacctcgtcgcgctggagcagatcgccaagctcaacacagcccacctcgccgccgacggcgactccgcgctcccttccagcctcgagtcccgcttccgcaagctcaagtccctccccgccgcgccgttgcctccgccgccgcccgccaagtccctgggccgcagcgccaccgcgccgccccaccacaccgacccgccgccatcggagacgccggaccctgctccgcctgcgccccctgcaccggcggcacaagaacgccgaccagaagacgccgccaaggaagcccaggagaaggagaactcctcgccgccgccgtcgcaggctcatcctccaccggccgtgaccgttccgacggcggcggcggcggacgacaacgaggaggacctggagaagctgttcaggccagggcgcggccggccgacgctgagggagaggaacagggggagggacgacggctcaccgtcgccgccgcgccaggcgtgctgcttcggcttctcccccaagaagacgctgcagaggactccgaccgggagcggcaggaagagccgccgcgccggcgtcgccgccgccgccgacgacgacgtccttggcatcggcgacgccggcgagtggggcgacgagaacaggaggatcgtcaccgagctcaagcagcagcagcgcaagctcaagaaggcgctcgaggagcaggtcaaggtcagcagggagacggccaagatggcgcagtgggtgaagcaggcgtccgcgcggatgacgcacaccgctgccattgacgacttgctcagcgactgcgacgatgaagacgagctcaagtgaacaaaagatttcatcactgctgcttctgctttatctatgttccaaaatgttttaggttacaacatagaagagtcatatgaatcaaacttcagggaaaaggatataaatcctgctgttttctagtattttgcatgagatagacgaagaaagatatatgaatgggatatgtaatgtggtcaggagatgtagaaatgaagtacagacttcttgccaaaatttcgtcttttgccc

SEQ ID NO: 23205 - DNA, 1275 bp, Oryza sativa
  ref <308>: DATABASE ACCESSION NUMBER: AK073327
  ref <309>: DATABASE ENTRY DATE: 2001-12-06
taggccacgccacgcctaactctctccctctctctctcctcgccgccgccgccgcctccacgtttctctctcctcgccgcgcgccggcgagacctcgccgccatgaacaatctcctcaccgattcgtttgagctccctcggggaggctcttcaagagatggggacattgaaatgggaatgcaagctgatccttcagacaatctaaaaggtttcttgaaaaaggttgacgcaattgaaagcctaattgctaagctgacgaatctcttgcataagcttcagactgcaaatgaggaatctaaagcggttacaaaagcaagggacatgaaagcaattaaacagaggatggagaaagatattgatgaagtggggaaaatcgctcgcatggcaaagacaaaagttgatgaattggaaaaagataacttatcaaacagacaaaagcctggatgtgggaaaggatctgcggtagatcgatcaagagaacagactactggagcagtgaaaaagaaattgaaggagcgcatggatgattttcaggttttgagagaagcaatccggcaggagtatcgtgatgtcgttgaaagaagggtgtttacagtaactggtagtcgtcctgatgaagagacagttgacaatttaatagagactggaagaagtgagcaaattttccaagaagctatccaacagcagggaagaggccaaatactggacactgttgcagagatacaggaacgtcacgatgctgtaagagatctagagaggaagcttctggagttgcagcagatattcatggatatggcagttttggttgatgctcaaggagacatgatcaacaacatagagacacatgtttcaaatgctaccaaccacatacaacaaggcgtcagtgctctacagaacgcgaagaagctccagaagaactccaggaagtggatgtgctacgccatcatcctcctgctcatcatagtggtgatcattgtcgtcgccgtcatccagccatggaagaagggtgcttgattgtaacttggaaaaagaagatcgtgggatatatttttttccctgtttgtgcaatatgtgtagttgtgtctccgattccctcctacccctgtacgtatgcttaacaaaacaacatgatgagattgagattcgtttgcccttaggcgcaggttgattcatcttcataccagatttcctgtgcaatctaccacgccaggggttatgtgtgaaacaatggtcccatcagtctcaacaaaaattgtgaattcctggatcttttac

SEQ ID NO: 23206 - DNA, 1795 bp, Oryza sativa
  ref <308>: DATABASE ACCESSION NUMBER: AK073328
  ref <309>: DATABASE ENTRY DATE: 2001-12-06
gatgttcgttccggaatcctctcgaccgtcgggaaacttgagccttcagcttcctccttcctcccccatcgccaatggcatccccttccctcgctgcagcaaatacacttcgcgagatcctcctcctcctcctcctcccgcgtcgaagcgaaatcgaagcacacactcctcctttcacctccccttcacttctcctcgccgcccaagggaagggcaaaggtgggggaatcttagcttacataggacccaggggggcgtcagcgtcgtctctgcttctccttgtcttgtttgcaggaattgaggggaattctttcttttttcttcgctggatttggtttggttggttcgctgctgatattggttggaccggatgcggctctactcatctgcagtcaatttgcggcgaccttctaaacgtaccatgtattcccaatctagtcagtttcatggaggattaacacagagtttgggattacggaagtgttcacgctcgcagacatccagttataatgtgaagctgggtcttgtcgattgttctctacataggaatataaaatcttctgaccggcctagtctgaggtactttgttagcttagtgggtcggcagttccgttgtggactgtcaggcaaagaaggtagtttaaatatgaagctcgacatgccttcccgtgacaatttctctagtatgagctggaaatggagaggtttgcatcaaaaaataggaggtacaaccagtggactttgcttaggttttgcagtttctggaatagcaaatgctgaggttcctgtggagataagcatcagcaattcagcagcatctaccagttcaactcatggcaaagaagtctatacggattattcagtaacagggattcctggagatggaagatgcttattccgctctgtgattcatggggcatgcattagggcaggaagacccataccaaatgaagatcttcagagaaagctagctgacgaattgagggcaatggttgctgatgaatttgttaagaggcgggaagaatcggaatggtttattgagggagatttcgacacatatgtgtcccatattaggcatccacatgtgtggggcggtgaaccagaattattcatggcttcacatgttcttgagatgccaataacggtttacatgcatgatgaagatgctggtggtttaataacaattgctgaatatggccaacaatatggaaaagaagatccaatccaagttctatatgatggttttgctcattatgatgctgtacagattccagcaaaaaaatgctccagagagatgacttctgaatttttgaagtttcaaggttcaaatggtaggatttggtcttaacccatttccttcctttccatgtatttgcaagtatcgaagttctggtggttgacattgacaatatcgcgccggtgagagtgaagactagctgtgatctagacattgcttttcttgttaaaagaagcaaaatccaccactctgatcaaccttgtctatattcttcaaatggctttgtgttcaggatccaggcatagattcctgaatcgagatggaaatagatgacaaggcatatgtttctcgatgtgaatctgctgaaagagccgaaactgaattgttgttatccacactctagtaatgcttctggtaaaacgtgagacaaggcagcataagcttatggatgattgaatcctgcttggttagttaatacactgattgtaggcacatgtaagggtgtaagcctgtaacttactgcaatatcctgcatactaatgtgatgactatgagacc

SEQ ID NO: 23207 - DNA, 1500 bp, Oryza sativa
  ref <308>: DATABASE ACCESSION NUMBER: AK073329
  ref <309>: DATABASE ENTRY DATE: 2001-12-06
gggattggccaccgtctcctgccgccgtacgtggtagtggaggatgcttggtgaagtctcttctcggctgctgcgcacatccctcctctccccattctctcctcttcggttttcttgggtttccttcaccgttcggctgcgcattgccttcccatcggagctacttgcctcaacagtttggtcggccgcatgtgctcggtcgggaggccctagggcctccactttatctgcgaaggtgatccaatgaaagccttctagattacctccgatcccatcgctccaatccctatttccatccgacctctctcatctagccttcgcctcctccaaaatccacaatatggtgtgccgctgatatgattttcccctccctcctcactagaaatcctttcttccattggtgaccatggtaatcctcacctcctccacccttaggtaccttcctggacgctatcctcgcatctttgaccaatagccacgaccagggtctgcatcacggcacggggacctagcctcacaatctgaggtgaagcaacagccatggctgctattatgcgagaggaccatagttgtaactgctgaatacatcactgccttgccttttctggtatggtaactgctctggtaatcagagaaaataggatgcagacagactcagatcgccatcttctcgagcacatgatctacacaagtagccaattctgcacaaagttaagtaaactctaaactatatacattgaattttgcttcccaatagcagtgtagaagataatagattttctaattgcttttctttgtatatgctcattactgtccttggtttgtgcttattcataacaagattgtttgcctatcctttttctctacaagatgggcacatttaaatgaactatttatcattaatccatgatggagataatgcgttgaaagctcagttagtccgttgcttattaatttaagttaaccatttttcttaggtcaattattatcttacattaacataatagagaaaaattttcacttttgagaggattcaacacaatgtttcattcaaacaagcgccttcagcaactgttcatagaagtgcattcttcttctagagcaatgtacaatgatttaggatttgacaaagtaattttcaatttatcaggactgatttctcataattacatcttcatttcatattggccagagcattgccagtgagcgcgctataactgtggtatcccaatcagtggcactaagttttaggttgactgcaatgctttttctctgcagttgctcctaactgcaatttctttttgtcaaacctcattgatgtattcaacaagtatcagtcgctgaagcaagttctgctgcagcacaaatctaacagtgttaggttctcatgttcttctggttatacttagcattctttaatgtcaatttatcacatttctggttatagtttcttactctttttttacagcatctgtatgaaacaacaacagtcatttcagc

SEQ ID NO: 23208 - DNA, 1869 bp, Oryza sativa
  ref <308>: DATABASE ACCESSION NUMBER: AK073330
  ref <309>: DATABASE ENTRY DATE: 2001-12-06
gatcagtctccggctgacgctgtcgctagggttcagccaccgccgccgccgccgccgcgaccgccggagatgagcgccgcggcgaaggccgccgcgctcgaggtagtgctcgccgccaagtcgtcccgtatcgcctccctcgaggccagggtctccttcctcgaagccgagaacgcgcgcttgaggagggccatggcggatcgtagtacaggtaagggaggcccaaatctccgtcgatcggaggagatggcgggagggcgtgtggcgcgtgatgtcattgaggttagtgatggcgaggaggaggggatggctgttgacgtcaggaaggggagaggcgcggaggaggggatggatgcggttgcgactcctcggaagcgtgctgctttgcgggtggtgatcggcgagagcggggatgaatacgagattgatgacgccaagggggatggtgatggtgatggaggcgaccatgggagcgttagctgtggcgacaatgtgggtctcgaggatgatgatgttacaaccgcgctgcccgataggaagcgcgccgccgcgctggttgtcaccagcgatagtgaagatgaggttgagagccagggtggccatgggaggaggggcaaggatggtagtaggaagcgtgctttgcgtggcgtccgagacaatgggaatgaggacaagggcgtcacgcggagtaggaagcgtgctctgcgtggaatcagtgacaatgaggacgaagatgaggatgaggatggtgtcgatggtgctcatgtagtcgtgacagagatcgagagtagtgatgatgatatgattcccattcgtgaagtggtcaagaagatgagaaaagagagggcgagcaagggtggtggtggattcggtgagactaatgggtcttccacacctgcaaccaggcgttcggctcggttagctaaaggtcagccaaagagagcacagtctgcgcgtcgggtgctcaactttgttgaacccaaggattgtgaagagagtgcgagtgactcagatgaagatgatgatttggatgactttataataaatgattcggattgttcagaaaattctgcgaattctgctgaaccagaagaatctgatgcttctgcccccagtgaaggatcctcttcagaacttgaagagtctgacaatgagatagactataaagacgttatggcttgcataggccgtaaaaggaatgccaaggaatggaagtatgaggcagagatgctatctgcatttgctgcacaccctgaactttgcttgaaagctgtttgtgctctctatcgaaagcaaactaaggatgaacaggaagtaaaggccaccattttgcataacaagcaaggatttaaccagattgatgccgcaaggggatcttccatagcggagtttcttcttgatggtgatacttttggcccgcttaagaagactgtccatgatttggagcagtacgatcgttatgctcttgaattctgtcacaagctcgccgcacgttactcaaaacagttgttttcaatatatcagaacaaggaggacccctacttccatccatgactctggtaatgttagttcatttggttgaacttttgttggtccttgtaatattcttactactgtacctatcttactcttgtagtctcgtgtacatatatatttcttctggagaagttagtgcttgctaagattaagtttgcagattgcagccaccctatgtttatatcacttagaggtattttgttaagtcaagagtgtttccgtcagaagagaaagtgtctgatgaggtttgcattgttgatacttgataccttggctaactgaattatatcctacggttattcccacctaaatgaacttgttatactacttatc

SEQ ID NO: 23209 - DNA, 690 bp, Oryza sativa
  ref <308>: DATABASE ACCESSION NUMBER: AK073331
  ref <309>: DATABASE ENTRY DATE: 2001-12-06
gaacctggtctggtggaattcctgaatccgggtcgatcgagagctcacgatgtcggccatggagaccgacatcaacgcgccgccgccccccgcccccgcccccgccggcgccggcgagggatcctcctctgccgccggcccctcctcccgcaagcccaacaagcgcttcgagatcaagaagtggaacgccgtcgcgctctgggcatgggatatcgtcgtcgacaactgcgccatctgccgcaaccacatcatggatctatgcatcgagtgccaggcgaaccaggccagcgccaccagtgaggagtgcactgtcgcttggggtgtctgtaatcatgtttttcacttccattgcatcagcaggtggctcaagactcgccaagtgtgcccgttagataacagtgaatgggaatttcagaaatatgggcactagacaccacctgctgtctgcgcttgtttgttgccacggctgcgctacaaacacaagccgtatcatctgccgaacagctccatcgttagcttcttttgatgccttacatctatcgctggacgtttatcgtgcgtacttgtcccatacagggattgtgtttggatgatttgtagagagggtactgtatggcataagatccttcatattaatgttctgtgggtcacatatcaacttgctattattgtattcagcggttctctctc

SEQ ID NO: 23210 - DNA, 1026 bp, Oryza sativa
  ref <308>: DATABASE ACCESSION NUMBER: AK073332
  ref <309>: DATABASE ENTRY DATE: 2001-12-06
gaaagagagagagagagatggcgcgcaccgagaaggttgccggcgatggctgctccggtggtggtggtggtggtggagaaggtcaggtggaggtggaggtcggggtggggatggggatggacgggaagggaatgatagagtgccggatatgccaggaggaaggggatgagggcgccatggattccccctgcgcctgcactggcacgctcaagttcgcccacaggaaatgcatacaaagatggtgtgacaagaaggggaacatcacatgtgaaatctgcaaccaggtttactctccaaattatgtcctccctccaaccaagtgttgttcagctgaaatggacatggatcttaggcaaagctgggttggacgaattgatccccatgattcgcattttcttgccattgccattgcagagcagcagctgctgcaagctgaatttgatgattgtgtgtcctcaaattcaagtggtgccacatgctgccgaactgttgttttaattttgatgttacttttgcttgtgcgccatgtagttgtgtttgtgagagatgttagcatgctgcaggatgcaacagtgttgtttagcgcaactcttcagttcgcaggattctttcttccatgttatgttatagcccgttcttgttatgcttttcaacaccggaggcgaagacaggtttaggggccacctgaacctggctggaagcatttactcaaaacaactcaacaccatcacagagagacgagaggaaaagcttgtgaagaagtaactcaaactccctttgcttggagcctctgcgaaagatttggcttaatttctcccccaacaagatgtagttgccgatttagaccatgggccctcgtgaagctcaactgtacataggagagcgacccacccccttcggcaaaacatttatgttttcgaaattgaattttagagaaaagaacaagtggatttaaaaaatttcagtgtctttccagctgttaattctttctgaagagaagtggtcgatatcgaaatattgagcatg

SEQ ID NO: 23211 - DNA, 1130 bp, Oryza sativa
  ref <308>: DATABASE ACCESSION NUMBER: AK099349
  ref <309>: DATABASE ENTRY DATE: 2002-08-28
ggtctcgccctctccctctctcgccgccgccgccgcctctgctttcccctcgcgcggtcgcgccaccacctccgcttcgcgccgccgccatcgtcgtccgcatcgcctcgcgcctccgccgccgccgccacctccgccttcgcctccgtcttcccctagcgccgccgcctccacctccgccgccatcgacgtcgccgtcgccgtctctgagcgcctccacctccttctcccccctcgcgtcgccgtcgtcgccgagtgcggacttcgaggcggacgcggagaaagcgacgaggcgaacgctcctctcctcttccactctcgtctctcctttgcctgcgaggagctgtgcctcgccgccatcgtcatcgtcgtcaacctgccgccgtcgtcgtcaactggccgacctagccgctcgccgccatcgcagtggccagatctgatggcacgaactcaaggccgcctgatctgatggcggtgagctcgtggctgtcgatggttaggcggttggtggagcaaccattgtcctcccaccagccggcatcaccctttccgccgccatccgcaccttgtcgctgtgttggacacttggacgaggggctccgcctcttcacgcgccgtcagccgctgtgtccgatagaatcctcctcacgcgccgcgaaccatcgatggaccagctgaaggagctcgggtgggccaagcggtggagctcgcagccatacgtgtcgtgctgcacgacatctctgcaagagctcaccacgcttgggataaagcacgtggagaacctggcgattccgagtgtccgaaatgatgtaaggcctgctaagcttaaaaatgtatgcgtagctttgtttaattatttggaaattgcaatggtgcagcagagcatgatgatttgatggggattctggaatcaagcattgcaaaattgcaaatgcagaagaatagtattagtgccataatttgttcagaagaatagtcccccattttccttgttgtgatcatgcaggcagcattttttttcactgttgtcggttcaaccagattcctacccattcgtgcaggccagcttagtatggtttttccttgctacctcctctttgtgctactctggattgctactctggattgat

SEQ ID NO: 23212 - DNA, 1539 bp, Oryza sativa
  ref <308>: DATABASE ACCESSION NUMBER: AK073333
  ref <309>: DATABASE ENTRY DATE: 2001-12-06
gcggggcgtggggtccccttccgaccaaggcaaggcgaggcgaccacctgtcgccgccgccgccgccgccatgaagcctccgcggcgccgctatggtttactcgcggtggtcgtcactctcatcgtcctcgcctccctccagatccagttccaccacctcaaggaggaccgtctcaccggggaccgcaccttcgccaccaccaccaccgaccccgttcactggcggaccggcgccgagggcctgccacgcggcattgttcactccaactccgacatgtacctccgccctctctgggactctggcgccaaccccaagaataaaaacgataatcacaatgctcttttggcgatggcagtcggcatttcacaaatgcagaatgtagacattatggcccgtaagtttcttaaccaaaactacacagtcatgctcttccattatgacgggaatgtagatggatggcacaatcttgagtggagtgataaggccatacacatacttgctcgtaaccaaacaaagtggtttgctaagcgctttctacatcctgatgttgtggctatctacggttttatctttttatgggatgaagaccttggagtggacaactttgacccgagaagatatcttgatataatggtttctgaaggattggaaattacacaacctgctctggaccctgatctatcgactgatattcaccatcggatcacaatccgcaacaagatgatgaaagtgcataggagaatatatgataaccgtgcaagtatgaattgttctgatggaagtaaaggacctccatgcacagggtgggttgagggcatggcacctgttttttctcgggctgcttggagatgtgtatggcatttgattcagaatgacctgatccatggatggggccttgacatgaagcttggttattgtgctcagggtgatcgagctgagaaggttggcgtaatcgacagtgagtatgttgttcatcaaggaataccatcgttaggaggaccatcactaagcagtaagacccctcggagatctctggatttacggacccacattagaagacaatcgtctgctgagctggagaagtttaaagagcgctggaacagagctgtaagggaagatgaagaatggacagatccttttgatacttgattactttgaaagaagaatccgatacaaatatacaagcccacctgatacaaatatacaagcccacctcacattagagttgcaggacagtccacatcgattacaataattggactcgagatcatctcacatggcaatctgtgggcttcatagtaaacggtttgttacagacatttatctgactagcgttcaccattatgtcctcaagaggtgaagagccactggatacggtaccatcaacacaaggatcaaggtgcaactgaacggcaacccaaactaaccagagacttaacacagtgtcttgtaatttaatttaattcctcatttcactacgggtgtatagtgacatgatatacacacttgtgcagttatcttaatagcaagtttcaaag

SEQ ID NO: 23213 - DNA, 1889 bp, Oryza sativa
  ref <308>: DATABASE ACCESSION NUMBER: AK073334
  ref <309>: DATABASE ENTRY DATE: 2001-12-06
gctctccatctcgcgataattaatcgcgatttgcaccgctcaaaattccgatctgcgtttctcctcctctccaaatctccgcgtttcttcttcttccgcagcaacggatcgaggaggacacgagagattgcggcggcggctgtggcattagcttgatactggggcaatggcggaggcggaggcggggaggaaggagaagaaggaggtggtgcggctggagcgcgaatcggtgatccccatcatgaagcccaagctcatcatgaagctcgcctacctcatcgaacaacaatctgacagagaagaattcttgaagctctgcaagaggattgagtacaccattagggcctggtatcatctccagtttgatgatatgatggaactatttgctctttttgaccctgttcatggtgcccaaaaactgcaacagcagaatttctcgactgaggaagtcgatacactcgagcagaacttcctgacctatttctttcaggtgatgcaaaaaagcaatttcaacatattatcagatgatgaggttgagcttgctcattctggacaatatctgctgaatcttcccatcaaagttgatgaagcaaagttagataacaaacttttgtcaaagtattttaaagagcaccatcacgacaacctaccggagttctcagataagtatgtcatattccggaggggcattggactggatcgcactagcaactttttctttatggagaaagtggacatgatcatagctcgtgcgtggcgatggttcttggagaaaacaagactgcaaaagctcttctcaagaaagaaaagtgttaggccaaagacagattccaagaagaatgatgatctagttggtgaagaagaggacaaggagctatatgttgaacgcatacgacttgaaacaatgaatttgagcttgcgcaacttaattggcaaggttacaattcaagagcctacatttgaagaggtgattgtcttgtacaggaggaaaagccctaagggccagaatgatagatcaattcatgtaaagcacttcaaaaatattccaatggcagatatggagctggttttgcctgagaagaaaaatccaagcctcacaccaatggactgggttcagtttattgtttctgttgtcattggacttgttacacttgtcagttcgctcgaaatgcctaaagctgatttctgggttgtagttgccgtcctttctgccctggctggatattgtgccaagatctatttatcgtttcaacagaacatggcaacatatcaaaacctaataactcaatcaatgtatgacaaacagctagatagtgggaaaggcacacttctccatctctgtgatgatgtgattcagcaggaagtcaaggagattataatttcctactatattttgatggaaaatggaaaggcgactattgaggatcttgacttacaatgtgaagagttaatccaagaagagtttggcttgcaatgcaattttgaggtgatggatgctgttcagaagttagagaggcttggcatcattacaagagattctattggaagaatatgctgtctatctctgaagcgtgccaatgagatcattggcgctactacagaagagctggttatgaaggccagacaaagctagttatccaattctatttgaaccagtttaggggggcaataggtcctggacggctgcggaataattctccgatggaagttgagcagatatgctattgttgttctgttgtaggacctgctgtattatgcaatgtttaatgcatgttgtaagaaatttagtttcttcttggaacaaaatgtggaaagatttcagtaaaaaaaaatgtggaaagaggttcatgaactgctgccttgtttgttcagttaatgaatactcctac

SEQ ID NO: 23214 - DNA, 1704 bp, Oryza sativa
  ref <308>: DATABASE ACCESSION NUMBER: AK073335
  ref <309>: DATABASE ENTRY DATE: 2001-12-06
cccctctttctctctcttccctcgatttgtcccaaccaaatcttcttggcttcatccatccttgctccacgtcccaatctcctcctcctcctcctccccacttcttcttctttgtttttttctctttttttttcccgaattcccagaccaaatctcctcgctttttgcttcgttctccgctccggtgacccggaggaggcggaggttggagaaagtttgcgcctttgcggtgagtggtggtgtcggtgatgggatcaagaacggtggggtggtggctactggcggcggccgtcgtgctcgccgcggcggcggcggattccggggaggcggagcgcgcggcagagcagcacagcgagcgcatctcagggagtgccggcgatgtgctcgaagacaatcctgtggggaggttgaaggtcttcatctatgacctcccaagaaagtacaacaagaagatggtcaacaaggatccccggtgcctcaatcacatgtttgctgcagaaatattcatgcatcgcttcttgctctcgagtgctgttcggacactcaaccccaaggaggctgattggttttacacgccagtttatactacttgtgacctaactccggctggactgcccttgccatttaagtcgccgagggtgatgaggagtgcgatccagtacatttcgcacaagtggcccttctggaatagaacagatggagcagaccacttctttgttgtcccgcatgattttggtgcatgttttcactatcaggaagaaaaagctattgagcgtggaattctaccgttgctgcaacgtgctacgttggtccaaacatttggacaggagaaccatgtttgcttaaaagagggttctatcactataccaccctacgctcctccacagaaaatgcaggctcacttgatcccccctgacactccacgttcaatcttcgtctacttccggggactattctatgacactggaaatgaccccgagggtggttactatgcaagaggggcgcgagcttccctatgggaaaacttcaagaacaatccattattcgacatttccacggatcaccctcccacctactatgaagacatgcagcgtgctgtcttctgtctgtgcccattgggctgggcaccatggagccctaggttggttgaggctgtggtctttggctgcattccagtcatcattgctgacgacattgtgctaccatttgccgatgcaatcccttgggaggaaattggcgtgtttgttgaggagaaggatgttccaaagttagacaccatcctcacatcgatgccaatcgacgatattttaagaaagcaaagattgcttgcaaatccatcaatgaagcaggccatgttgtttccacagccagcccaaccaagagatgcgttccaccagatcttgaatggccttgctcgcaagcttccacacccagagggagtatacttgcaacccagtgacaagcgcctcaactggactgctggacctgttggagatctgaaagcttggtagtgagcagcttccctctccttggacgatccttgtatgaaaacctcgtagggtcagtcatcagttcatacttcctgaaatgtgatgtaatcaacgtgcagtgccgggtgtaatgtacaccttggccttatctaacttaatgaatctttgtaagttagtaaattttgaaagaaatgaaaattgtatcgttggaatc

SEQ ID NO: 23215 - DNA, 1063 bp, Oryza sativa
  ref <308>: DATABASE ACCESSION NUMBER: AK073336
  ref <309>: DATABASE ENTRY DATE: 2001-12-06
gaggccaaggccttcgcgctccggatgaccaaggagggcgtcctccccgatgtggccacattcaactcgctcgccgaggcgctttgcagctctggagatgtggaattcgccgtggcgcttctcgccgatgcatccagccgcggcctgtgcccggacatctccacctacaaggtgatgataccagctgtggccaaggctggccgaattgatgaggcatttcggttgttctatgcagctcttgaggatggccaccggccattccccagcctgtatgcagcgattatcaaggcgctctgtaaggcggggcgattcgccgatgctttcgcatttttcggtgatatgaagtcgaaggggcacccgccaaatcgtcctgtgtatgtgatgcttgttaaaatgtgtgtgagaggcggtcggttcgtggaggctgcaaactaccttgttgagatgagtgaagctggattcgctcctcgtgctccgacctttaattctgtagttgacgggttgcggcattgtgggaagcatgatctagctcagaggatggagcagcttgagatgtcgatgaatgggaattgaatggattatgaactgtatccagttctctttttccattgggccttgcaaatggcatggcagtgctcctggatttccaggatctcaggttggcttgatgaggactccataattatctgcaattgatggggatgtttgaatgttgcactttgctcgtgccgtttagaatattcttacatttggatgttctagagctaaacataatcacgagaattgtgatgcttctatggaattgatcctgcatccaataggataacactgtaaatgaatcgatcagactggcagcaagtcatagaaaagggtgaattccttattgtaccaaaattttcatttggttgctgttgtcttgtgcattaatgtaattttcacaatcttgtaaggaagtgaggtgagtgtggactatgaggaattgttgatgtaaacagcgaagcataatccttgtgaactgtgattatcattggttgcactaaatagcagatttaggcatgccttc

SEQ ID NO: 23216 - DNA, 1905 bp, Oryza sativa
  ref <308>: DATABASE ACCESSION NUMBER: AK073337
  ref <309>: DATABASE ENTRY DATE: 2001-12-06
gggaaccgaaccaaaccaaaaccctacgaagagggggagagcagagcagcagcggcggcggcggcgaaggcggagagagcgcgctcggcgcacggcatgggtgtctccgccgacggcctcgtgctcaaggcggcgtgcgagcgctgcggctcgtcgtcggacctccacggcacggggtgccgccacgccaccctctgcgtctcctgcggcagcgccatggctcgctccggcgattgctgccccgtctgcgccgcccccatcgccagcctcatccgggagtacaatgtcctggtggataccaccggagagaagcaatatacgatcggcaaattcaccaccggtgtgccgcccttctccgatagggagaatgcggggagccgcagctggtctcttcatcccgagggacagcaaggacggcaacctaccggcaatatatgggagaattgcagcaacagaaagtcatgtattttggaagatgatacaggtgactatcagtaccaaggtcaaattcagggcttacaatctgcagcctcgacatattatttgttgatgatgcatggcaaggatgtacacgctgttcccgctgattcctggtataacttcagtaaaatttcacagtacaaacagctgactttggaagaagctgaagagaagatgagcaggaggagaagcacagcaactgggtatggacggtggatgatgaaggcggctacaaatggagctgctgcttttagttcagatgtgacgcagctcgatgatgctaatgaaggagaaacagatcaggttcacctgaagaaaggcaacaagaatggggatgaaaataaatctgataaaggcagtggggaagaaagagcgcatgtgcctatgacaaagggtagggaggaggaaggtagtaaagacagagactttgatttggatgatgaaattgaaaagggtgatgattgggaacatgaagagatctttactgatgatgatgaagctgtggacgttgacccagaggaaggaggtgatttagctgatcctgaaatccctgctccaccagaaattaagcaggatgataatgagaaacatggaggggtaggcctgagcaaatctggtaaggaactaaagaagttgctccgccgtgccgcgggacaaaacgagtctgatgatgacgatgaagacacggatgaagatgagtcaccatcgccagtacttgctccgaaacagcaggatcaactcaaaagtgaaccacaggaagacaaccattctaaaccaacagttctcggacatccttatagcactccacatgtttccaaatccaatcaaaagaggagacaaaggggtgatgattcaaaaacttgtgctacccctaaaaagccgaagatagagcctgataccaagaagatagtcgtgaaggaggagacctcgtgttccttggaaccaacttcagaaccatttgcctcagcgagaagtgatacaaatgtatctcctattacagtggaggaaatcagggtggtacttcgtttatatgcacctatcgcaatgcgagatttttcaaaagattttatgcccagattttcgcctcgactaagaagtccagaggacagggaagtttttctcgccaatctgaggaaaatctcacacctgcagaagatcaatggccagaagtacatcatccttctagaggaatataaataaaatgacaaaacctgcagagttgtgtatgctgttatgctccccttggctcgagcttagcatgcctgcccttctatcctgaaaattagtagatgcttgcagttgcagaacgtgacaggcttaacacatattcttgattgaactcatatttttcatactagtatacccccttgtaagttgtaacaacaaatgatagtttgtcatactattagcaaatgatagtttgcc

SEQ ID NO: 23217 - DNA, 2108 bp, Oryza sativa
  ref <308>: DATABASE ACCESSION NUMBER: AK073338
  ref <309>: DATABASE ENTRY DATE: 2001-12-06
gacgcacctaccctcctccgccatcgatcgtgctccgatctgcgccgccgagccggacctccgcgcggcgacggcggcggctttccggccggcgagagggccctcgtgggcggcacgtcgtggaccacggcccccgcccagcgttagccccttcccccctgcgctcgctgggtcctttgctcgatcgcttctcgattccccgggtcgcctgcgtcgatctccatcccgcggggacgagcagctgcgccggcatccgctgcttccgacgcatcctcgcttcgctggaaaatttggtgggccctgaagaaagtagtgaattctgattggattggttgatttctggttcatccatcctaaatgtggtttgcattttcagggagatatgtgtttgtcatgctcaaaatgaggtggtaaggggataatctacatgcaatgctgggtggtaaaaaggttcactctaggagagattggtttaaaccattgcttcaatgaacatcatactagaactcaaccatctcaagcaggtcagcttgccgacgcggcctgtcgtttgcaaaggcctttttatagtgattgcgcttattgtgctgagggcaatcgtatccccgtttctcgccgttaacccgtccgagaaggagggtttttacgatccgacagccgatttgctgcctgggattaggcgaggcaagttcattgaggttccacagattatatggggattgaacaatcagaagattgcgtttgccagggcgtgcttgactgcgagattcctgaaccggtctctgctcatgcctagtttgagtgcttcgcttttctacaaagaggttgacttgctgcgaccaatcactttcgacaaggtgtttgactttaccaagttcaacgcccgttgccaggggttcgtaaggttagctcgctattcagaagtttctaatcaaaccaagcctttcaaactccaaaagggaagtggtaggaggtggaccgtggagaaagacttggatcagctactacagtacagaaggggtgaggcagatgactctgaagtcattgaaatcatcgggaaacatccatttttgtggcctgatcactggccagtgaaagactatgccagaattttcgattgccttgcgttagttccggagatagaaactgaagtggttaaggccatatccaagattagagaggcaggcataaaagcaagacatgaggctggtatttctcataataagcacgtgaaagatggtacaatgaatccaccagtgccatacattgccgtccacatgagaatagaaaaggattggatgatccattgcaagaaatgggagcagcgttccaattcaaaggaaatttgcagcagtaaagaagagatcattcataaggtctcacagatcactggtctacgtaggccagttgtggtttatcttgcagtagctgacagccttctagaagatgattcaataactagcggttggagggtgggtatggttgcttttgagaagaagagacttggagttactgacatctacaataggcaaccttatcttataaagtccgctattgactttgaggtatgtgcgagagcggatgtgtttgtaggcaatagcttctcaacattttccaaccttgtggtgctgtcaagaacacaaaggctatataacatgggagaggcaagctcatgtggagagaatgtcgggctttcatcctatgcctacaatgttattggagacgatggcgggccacagagatggatgacagatatgtcagacacaagcctccaaaacttgagttacggaacgaacaatatctcatgccactgacttatgacataaaacacttgactgaacacgatcacacacacaaggataattcttgggagaattttagctacaaacagaggaacatgttagaaggttgatattggctgccacacttgagagagactttggccaagaattgtctgcagacctttgtgagtgtatacaaaaactgttctctgaagaacattgacttgtattgaacagtctttagtttgtaaagttaaatgttgtgtgttactttgtcttcctccgtaacttttaatgttatggtttcaaaagagcagcttcatactg

SEQ ID NO: 23218 - DNA, 1398 bp, Oryza sativa
  ref <308>: DATABASE ACCESSION NUMBER: AK073339
  ref <309>: DATABASE ENTRY DATE: 2001-12-06
ggtcgatcagatcgttcgagagaatgggtgtaggaagggttatgaacgatgcgaagccgtacctggcgatgatactgctgcaggtggggttcgccgggatgtacgtggtggccgtcgcctcgctcaagcgcggcatgagccacttcgtcctcgtcgtctaccgtaacctcttcgccaccgccgtcatggcgcccttcgccctctggttcgagaggcgagtaagaccaaggttgaccctcatcatcttcctgaagatcatggggctcgccatacttgagcctgtgcttgatcagaacctgtactacatgggggccaacctgacatccgccggcttcgcctccgctctcatcaacgtcctccccgccgtcaccttcgtcatggccctcgtcctcaggatggagaaggtgaagctgaagagcgtgcacagccaggcgaagatcgccgggacactgttcacggtggccggagcggtgctgatggtgctgtaccacggcccggtggtgcagttcccgtggaccaaggggcagcaccacgacggcggctccggcgccggcggcgcggcgggcggcgggttcctccagggcaccatcttcatcgtcgtcgcctgcgtgtgctggtcgggcttcttcgtcctccagtccaacaccctgcagagttacccggccgagctgtcgctcaccacgctcatctgcctcatgggctccgtcctcagcggcaccgtcgccctcgtcgccgagcgccacaacacccacgcctggctcatcggcttcgacacccgcctcttcacctgcgtctacgccggtatcgtgtgctccggcgtggcgtactacgtgcaggggatcgtgtcgaggcagaggggcccagtgttcgtgacagcattcaacccgctctgcatgatcatcaccgccatcatgggctccatcattctcaaggaagaaatcaaccttggaagcgtgatcggcgcggtgatcatcgtgatagggctgtacgcgctgatctggggcaagggcgccgacaaagtcgagcagacagacgccggcgcggcggcggcgggcagcaacaagggcggcggcgagctgccattgacggcggtgcccaacggccacggcagcaagcacggcaacggcggccatgtctacgacgtcgagacgccgccggcggcgaacgggcactactagcctaagcacatgcagcagcagtccgtcatcctcggcagtccattgtaagctagttgtggttcgatcgaccatcgatcgatcgagagcgtgacacgatttcttcttcttcgtcgtcttcttcttcttcttcttttccttcttgatttctcctaagaattcttgtgaggtattaaaattttcacataatgcaatgtaatggataaggccaggacgtgtccgg

SEQ ID NO: 23219 - DNA, 1733 bp, Oryza sativa
  ref <308>: DATABASE ACCESSION NUMBER: AK073340
  ref <309>: DATABASE ENTRY DATE: 2001-12-06
tgcgcagggcaagggaagcaacaataacgttaggttcgtgcagccggacaaggtggtgttccggtcgcagccgatccctggcggcaagccggcacgccgcgcggcatcgaaccgcggcggccggatgatgtcccgggacaggcgctacgactcgttcaagacgtggtccgggaagcttgagcggcagctcacccatctggctggcgccgggccggaggtccccgaggaggaggaggacggctgcgacggcgacgccatcagcagccaccacaccaagtccatgcctcaggttgatcgcttcttcgccgcactggagggccccgaactggacaaactccggtcatcggaggagctggtgcttccgtcggacaaaacgtggccgttcctgctccggttcccggtgtcggcgttcggtatctgcctcggcgtgagcagccaggcgatcctgtggaagacggtggcgacgtcaacgccgacgagattccttcacgtcactaccaaggtgaacctggtgctctggtgcgtttccctcgcgctcatgtgcgtcatcgcggccatctacgcttgcaaggtggtcttcttcttcgaggccgtccgccgggagtattaccacccgatcagagtcaacttcttcttcgcgccgtggattgcctgcctcttcctcgccatcggcgtgccgccgtccgtcgcgacggagctgccacgctggctctggtacgcgctcatgacacctatcctctgcatggagctcaagatctacgggcagtggatgtccggcgggcagcggcggctgtccaaggtggcgaacccgtcgaaccacctgtcggtcgtcggcaacttcgtcggcgcgctgctcggcgcgtccatgggtctcaaggaggggcccgtcttcttcttctccgttgggctggcgcactacaccgtgctgttcgtgacgctgtaccagcggctgccgacgaacgagacgctgcccaaggagcttcacccggtgttcttcctgttcgtggcggcgccgagcgtggcgtgcatggcgtgggccaagatcaccggcgagttcggcctcgggtcaagggtcgcctacttcatcgccatgttcctgtacgcgtcgctcgccgtccggatcaacttcttcagggggttcaggttctcgctggcgtggtgggcgtacacgttcccgatgaccggcgccgccattgcgtccatccgctactccacggaggtggacaacgccttcaccaaggcgctctgcgtcgcgctctccgtgctggccatgctcaccgtgctggcgctcctggcgaccaccatcgtgcacggcttcgtgctccgcaacctcttccccaacgacatctccatcgccatcaccgagcgcaaggtcaaacccatcgtggagctgcatgagatgctcggcagcaatgacagcgccgccggtcgtagcaacgacgacatcgaggccggtgttgcgacagtcgaatcatcgtgatccgactaaaagcacacgctcagtacaacatgtacatgaatcgaggatgacacgagacaacgcatgactgttcttgcttgcctcgtggacttgcattgatctgtggcttagcatacgtggcatgctcactagacacaaagattgcctcgtggactcctggtgtaaatcaagaagaggaacctttaacttttcgattaagcttgcggctagatgttctgtacatttttcagataatggattataagaacctagt

SEQ ID NO: 23220 - DNA, 1127 bp, Oryza sativa
  ref <308>: DATABASE ACCESSION NUMBER: AK073341
  ref <309>: DATABASE ENTRY DATE: 2001-12-06
gggttcgcatccgcatcgcggtcgcagtggtggtgtgccggcggcggtggaagaggaagaggaagacgaagaagcagcagccagcagcaggtatgcccgcgccaagaccatccatcccctaggccctagctaccccgtccatccccctcgcctgaaacttccttcgccgatctatctccgtccatcctccgctcgccgtcgccgtccttgtgcctccgcatcctcgcccaccggtctctgctacacactacactcaagagagcgagaggcatggaacactactcgaccaagttcagcaatggaggagggagactagtagaccccatgcccgaccgaaggtcaagattttggcagatggattcccaacccaccgagctcatctgtcccatgcctcgccgcccgtcaccccgccctcctttcctatccgactccatcaacaggacattaccggtgtacagagctgactctgcttctgatgtcctcgacctcatcctcagtaagaatgaccctgatgttgatactgattcgagcacccaggtgggctttttctgtggctcacctcctgtgcgcgctaacaaccccattgtccatgatccacagtttggtaaaaacataccttccttttctcctttagggagttctttcggcaaaaagtctgctggaagagctgaagtaggttctccatcttgcggggcaagcagcccaaaagttagaattgaaggttttgcttgtgggaacaaggagccccactgtgcagtcacctttgcctgagcattctcattgaccctaacgctatcctgccaccaaaacttgtaaattttccgtgtgctgaggagggcataaattagtttattttgggcttctttttgtcgagttgagttggcattgcccttctgattgtggcttttgaaactgcacaatcgcagagagctttcggatgtacataaatgaggtctcccgtctgtagctatatcatcttgtgtgtgtacaaaaggtagtaacatccaggtccatggtgtcggtcagtctgtaaatatgtgtcggtcagtctgtaaatactgtagtgtactggcatgtaagatgcaatcaatcgatcaattaatgtgaaaaatcctcattagtctgct

SEQ ID NO: 23221 - DNA, 2057 bp, Oryza sativa
  ref <308>: DATABASE ACCESSION NUMBER: AK073342
  ref <309>: DATABASE ENTRY DATE: 2001-12-06
gcccccttttcttttttatttttttcttcgaggaggaagcaaacagcgtcgctccacgaaaccatcgctgcggttgcgtgctcgcgcgaagaagaggagagagaggaccaaaccctcgtctcctcctcctccggtggtggggggagaggaggcggcggcggagaggacgagccgtctactggatcggccgcccacgaggagattaagccaagtttgatcagattgttcacgtgttatggctggacatcagtataataattcccagatgtcccggatggatcatatggacaggctaaacaatgaacctccaccttttggccaaaagttatttatgcatcctaggagtgatccagctaacggagctggatcgtctggctatgtgggtaacacaatgagatcgaatgatcttccgtcttcaagttatgctggccaagcttatggtcagcagaatagagcccccatccatgcttcatattctggtcatgcacctgctggaagctctagtggtagctatgcaccatacaatactcaacatatgcctgcttcaagctatccacacggatccgaggataatttcattccaagttcccatgtggatggcagaagggttgcattgaagagaagaaatcccatcattcatcctacagatggattcggtgttggaaattattatgctggcagttcttccaatactcagttctctcggcccatgcctccaaatcctattccacctcctgaatcctgtgttcgaatgccctcacacttgggttcgaaccactggaatgatcaccgctatgttaatcatgaaggatctcagaggaatgtgaggggaagacatgatcatagtactatccatttggaacaaagtccagctgcagcttgcccgtcaagcagcatcaatgtgccaccataccatccaaatgcaaatggtccttttggaagtgcaccagtacaacgtgacagagctcctttatctgtgcatccaagaattcttcctccagggcctgatggtagcagcatagcattcagagagaggccatactatcctgctccacagagcaccaacataagtgcacctgtgccaacgcttcctatttcttgtgacagtgcaccatttgctcatggtgggtacgcccctagatcagctcatcgtaacaacttacgcacttatcctcctccagcttttgcatcttcttccaaccctggagcagtctcccatgagccagctattcctagctatccacctgctgcccctagctatccacctgcaacctctgcagcatcatcaagtgtccagccatttcatgctgaagctgctgcacatttgaggcatccaaggcatgtatctgtagggggcagtggtagtgcaaggagtagaaggatgagggattcctatcatggttttcatcatttgatgattgaagacaataacttgggaagatcagcagctgagcggtttatgatgctggatcagttagttatccatgaatcaagagaagcattcgatcctcactgggacatgagactggacattgatgacatgagctatgaggagctgctggctttggaagaacgcataggccatgtgaacactggcctcgctgatgagaaaatttctggctgtgtgatggaggtagcctgctgcagcagtagtcatttgcaggatgatcaggacaatgaaagatgtgtaatctgcctggaggaatacaagcatgaggacacacttgggaggctgaaatgcggccacgggtttcactgcaattgcatcaagaagtggctgcaggtgaagaacacctgcccagtttgcaaagctgctgccgcagatgaaggcagctgatgaggggaccaattgatcttcccctccatttatataatgatgcagttcaaggtcaggccaaattatgcctgtctccattgctccgcaatctgtgggctcttgtgaataagttatctcggtcgatatggaattattttgtgagctattagactattataaactcaagcaaaacctatgtgcaatgtaaatctcccaagttagttaatttcgctcaaaagcg

SEQ ID NO: 23222 - DNA, 1395 bp, Oryza sativa
  ref <308>: DATABASE ACCESSION NUMBER: AK073343
  ref <309>: DATABASE ENTRY DATE: 2001-12-06
gacgcttcatcaggattggatccccacgcggccacgcctccacatccacaagccatccccagaagcggcgacaccgccgcctccgcctccgcctccacctccacctccacctccgcctccactcgccatcaccagtggagggaacgcgtcgccctcagctccgcctcgacaagccccgccctccagtcacctccgtctggacctacctcaccctccaatcgccatcgctggcggcggcgacgcgcgaccacctccacactggtagcgcccactcgtgacaacctccgttcgcctccacctagacgtcgacctccttccaccaagcactaccggctgagagggaacactaacttatgcattgaagattcagtttcatatatggaggaaaatcgtagttggatgtatagagaatgaaaaggtaggttatacagccaagtatgggctactggggtagatcattttgtagagcatgcgttttcattacctgaggcattgagtgatgggacatcaaggtgtccatgtaggaaaatgtgtgtgctcgcacaagagaaagagagaagaggtaacaatgcacttgctgcagaatggtttccagcaaggatattatgcatgtactggagacaccaagtttcaggaagatgtcaatgcgtggcaaggagaatcggttggtaggaggtaacactgtataccatcgtagcggatcacgtggcttattagggactcgacaattcctaaagaccaaaaatggagttgatcctgggcaggcaggagcatggcatcatcaacaccgaatggaacatgacgggccaagagggctctgctgtgagaaaactgctattttttaggcaaaatatgataatgcaatgagagagaaatatgatgaggattggctagcgaagaatctagacatagatcatgcagttgtacatgacatatcaggcctgccccatgggagatttgcaaatgggagatagtgtagtcagtacaattgacataagggcattgtattgtaacaaatctcctgggaagtcgtcatcaagctcaatgtatggtgcatcaagctcctcaaaaagaaaagcatgtgaattaaatcatggagatggtggttctgctcatgatgatgttagagactatggtgttgatcatgttgatgataatggagagtattatggtgacgatcatgatgatgttatgcatggctgaagtcatattcttgacattcgttccaactgattagctttagattcattaagaaaactatttgttttaagccaaatgtttggctaattgtactatactgatcgagtagtggaaaactctagaaaactcacagtatttgtttggtcatgaatcttgttcatatttactattaaactacattactagaaaactgtc

SEQ ID NO: 23223 - DNA, 1669 bp, Oryza sativa
  ref <308>: DATABASE ACCESSION NUMBER: AK073344
  ref <309>: DATABASE ENTRY DATE: 2001-12-06
tgagcggaaacctgggcgagttgtccgttggcgccgccgccggcgagctcgcgcacggccgccgcggcagtacgggatggcggaggcgggagtggcggccgcctcgctcttcggcgccgaccgccgcctctgctccgccgacatcctccctcccgccgaggtgcgggcgaggatcgaggtggcggtgctcaacttcctcgcggcgctcaccgacccggccgcaccggccatctccgccctcccgctgatcagccggggcgccgccaaccgcggcctgcggcgcgcgctgctgcgcgacgacgtctcgtcggtgtacctctcctacgcctcctgcaagagatccctcacgagggccaacgacgccaaggcattcgttagagtgtggaaggtgatggagatgtgctacaagattttgggggaggggaagctggtcaccctgagggagctgttctacacgctcctctctgaatcgcccacctacttcacctgccagcggcatgtcaaccagactgttcaagatgtcttctcgttgctccggtgtacgaggcagagcctggggatcatggcgtcgagtagaggggcactgattgggcggcttgtggtgcaggggccggaggaagaacatgttgactgctccattcttggaccttctgggcatgcgatcactggagatctcaatgtattgagcaaattaatcttttcttcagatgcgcggtatatcattgtagtggagaaggatgccatatttcagaggctggctgaagatcgcatatatagtcaccttccgtgtatcctgattactgcaaaaggatatcctgatcttgccacaaggtttatcttgcatcgactgagccagacttatccgaacatgccgattttcgcattagtagactggaacccagcagggcttgctatactatgcacttacaagtatggaagcatttcaatgggtttggaatcatacagatatgcttgcaatgtaaaatggcttggcctaagaggagatgatctgcagcttatacctcagagcgcatatcaagaactgaagccacgtgatctgcagattgccaaaagcttgctgtcatctaagtttctgcaggacaagcacagagctgagctgacactgatgttggagacaggcaagcgtgccgagatcgaagctctctactcacatgggtttgatttcctggggaaatatgttgcaaggaagattgtacagggtgattacatttgacagtgcattgctgcctgcctcatggtttctctggttttactgagaactgaaattttgagctgattccatcagccctggccctgtccagttttcttcaaaaatgacttgtatctttgaagaatgttgctgttgttactgcacgtcccctgcgtgagtatgctgtatgcagaatacttgaaattattacaccatctgaaggtgaaggagaaatctgaaccttgacatacacaaaaggatactgctatacatccccagaatgtcagtagtaaactgctcagctgtggactactggatgtaaattgtagtctagcagttgcatatatctcctcctttttacctcctttattaaacaaagatcaaacggtctttagtgtgttaacacatggaatattgtcggatttactgcagttctaaggtgctgtttgattcacttcc

SEQ ID NO: 23224 - DNA, 1639 bp, Oryza sativa
  ref <308>: DATABASE ACCESSION NUMBER: AK099350
  ref <309>: DATABASE ENTRY DATE: 2002-08-28
gacatgcacttgcagtcagtggtacaacaccacagcaacgcaccaccggccatcaacctcctctcccctgcttctcgctcgctctcctgccctgtttcttggagaagtgagcttaagtgagagcctctgtccctcgcacacgctattggccatggtggttctcgctggcccgcccgccgtcgatcacatcccgctgctgaggtcgccggaccccggcgacgtcttctccggcgtgccggtcgtcgacctcggcagccccggcgcggcgagggccgtggtggacgcctgcgagcggtacgggttcttcaaggtcgtcaaccacggcgtggccacggacacgatggacaaggccgagtcggaggccgtcaggtacttctcccagacgcagcccgacaaggaccgctccggcccggcctacccgttcgggtacggcagcaagcggatcgggttcaatggcgacatggggtggctcgagtacctcctcctcgccctcgacgacgcgtcgctcgccgacgcctgcaccgtcccgtcctgcgcggtcttccgggccgctctgaacgagtacatctcgggggtgcggaaggtggcggtgcgggtgatggaggcgatgtcggaggggctgggcattgcgcaggcggacgcgctgagcgcgctggtgacggcggaagggagcgaccaggtgttccgcgtgaaccactacccgccgtgccgcgcgctgcaggggctcggctgcagcgtcaccggcttcggcgagcacaccgacccgcagctcgtctccgtgctccgctcaaacggcacgtccggcctgcagatcgcgctccgcgacggccagtgggtgtccgtgccctccgaccgcgactccttcttcgtcaacgtcggcgactcgttgcaggttctgaccaatgggaggttcaagagcgtgaagcacagggtggtggccaacagcctaaagtctagggtttccttcatctactttggagggccaccgttagcacagaggattgcaccattgccacagctgctgggggagggagagcagagcctgtacaaggagttcacatgggatgagtacaagaaggctgcctacaaatcaaggcttggagacaacaggctggcccagtttgagaagaagtagctagctagatgcctagcaacagaactggccggtcaagcaacaacgactttactgcatggcagctagctaccttagctatgtctcacgcacacgtacggtacaccatgaccacgagaagatgaagctgcttaagagagaaaaagaaaagaaaataaaaacaggaagaagataataacttcaagatgcacaatgtacagccaggttggatggatagctagatttttctcgtgtggctaatcaccgtgtgtggtgaggtgggctcctttcctgtttcggaatactgatcgatggatgaacagcctccaatagttaatgttaaccaaatatagcacaacaaaggggttcttttcttcctttggttgtttcttttttcctcttgcctttgattttctcgtcatgctttctgagcattaattatgtgtgcgtgtatttcggtatacgtaacgtacttttacctatgtgtgtatagtacgtggcttgtgttaacaagtaaatattatagtc

SEQ ID NO: 23225 - DNA, 2349 bp, Oryza sativa
  ref <308>: DATABASE ACCESSION NUMBER: AK073345
  ref <309>: DATABASE ENTRY DATE: 2001-12-06
gtagcgagcaatatatatataatcttcagtgagaaaagcctcagaaccacaccctcgagagcccgagctggagaagaagagaagaaaaggcggccacggaatcgtcggccgccgccacctccgccgccggcgcagagctccgccggtatcggccaggtggctcttctcctctctcggaatcgaaggcgagcgcgcgctttaatttcttcatctccctccatcttcttcattggcggcggcggcggcggttttgcggcggcgcgtgcaggccagcaagaacgaagctaaggacagggaacagtgactgcttgttgaactaagctacaacaatcatgggcctcctggagctctttattacagcatgtgtgccggttctgaacatgcttctggttactggtgttggatcattcctggcaactgattttgttggcatactgaacaaagatgcacggaaatatctaaacaatatagtattttatgtatttaatccatctcttgttgcgacctatttagcacaaacaatcacattggaaggcttggctaaattgtggttcatgcctgtgaatattcttcttgcttgtacctttgggttaatccttggatggatcgtggtacatgtcaccagagcaccggctaggctaagaggcctcattttgggttgctgttctgctggcaattggggcaatatttttctcatcatcattcctgctctttgcaaagagaaaggaagcccgtttggagcacctgatgtttgtcacacttatggattagcgtattcttcactctcaatggctcttggtgctgtctttctgtggactgtcgcgtataacattatgcgagccacttcaaaagtggctgatgaaggtaatgctcgaacaaatgatacaaaagtatccaattcagggagcagtacaggaacagcgtcagaagagaatttatcaatcccaaacgataacaatcaatgcacactccctttgatatccaattcaagtgtaccttcaagcaaaactaaggtcacattgtcagagagagcgaagcgatttgtatcatcaatgttcggagcaattgacttcaagaagatctttgctccttcaaccattgctgtgattattgggtttataattggaggaacgcctctaattagaaatgctattatcggagaaaacgctcctcttcgtgtcattcatgagtcagctgatctaataggtggaggagcaattccatctgtcacactgataatgggagggaacctcctcaatggattacgaggagaagcaagcgtccagccttcagtgatagcgagcgtaatcgtcgtcagatacattcttctcccttcgctaggcaccttgctcgtcaaatcggcggttcacctgggcctcatccaccctgatcccctctaccagttcatcctattgcttcagtacgccgtgccgccggcgatgaacattggtaggaaagaaagaatggaataatcttgaatacgtaaaatacatggccggtccttaaacttgagagcaaatgctacttagatccatacacttgaaaattgcacatttagttctactatcttggtttaatggactatagtaggtccaaatcttatttgaccggagctgaccgccgatgtggcattccacgtaggcaacacatttacagccagccccctgtagcagcgaagaattgcaatttgccccttcgttctacggtaccaccctagaacccacgaaaaagacgagggattttgtgggtttcaaggtggcactgtagcgcgaaggggcaaatcgtaattcttaccccactcatcttgaatcttcatgtcaactgaagaattaatactgaatcttggtgtgtgtgtttttggttcagggaccatcacgcagctgttcggcgtgggggagagcgagtgctccgtcatcttcgtgtgggtgtacgccctcgcctccgtcgcggtgacggtgtggtcggcgttcttcatgtggacgctgtcgtgatagatcgatcgatcgatcggacgccgcgtgccggcgtgaggaggtttcagggggttcagagacgacgacggcgagacgtacggtgcgttcctccggcgagacaggatggagcgaccgggcaagatgacgccggcgagagggcggcgcggctgctgctgcatcgcatttgcgtcgctggagaagatgcaacgcgacatctagctaaggcaattcatggcgttcgtgttcgttgtctcattccgagcaaataatgttgtgatttgtattactatctgtaattcggcgtgtgtgtttgccgccacattttggctaaattaatcgatatttgggccgggccgggatggcccaggatccagcg

SEQ ID NO: 23226 - DNA, 1329 bp, Oryza sativa
  ref <308>: DATABASE ACCESSION NUMBER: AK073346
  ref <309>: DATABASE ENTRY DATE: 2001-12-06
ggggctgtgcaaggaagccaagaaccaactatggcgggcgacgggcttccccggatcgcggtggtcggcgccggcatcttcgcgcgcacccagtacatcccaaggctccgcgagatcgcccacctcgtcctcctcaagaccatctggagccgcaccaaggaatccgcggaggccgccgcggagctcgcccgggacttcgcgcccgagatccagcccagatggggcgacgcgggcctggaggagattatgggagacgcttccatctccgccgtcgccgtcgttcttgctggccaagtgcaggttgacctctccttaaaaatgctcaaggcaggaaagcatgtgatacaagagaaacctgcttctggatcaacaatggaagcagaaacagcattgtcagtttacaattcatttccaaaccaattcccatacaaaccaatttgggctctggcagaaaactacagatttgaacctgcatttgtggagtcaaggaagttgatgagtgatattggtgatatgatgaacatccaagttattgttgaagggtcaatgaatagttcaaatccatactttaatagctcctggagaagaaattttgtgggtggctttatactggatatgggtgtgcatttcatagcaggactaagaatgatggttggttcagaaatagcaactgtatcgtctatctcccgtcatgtggataaggctttaccaccacctgataacatatgttctcttttccagctagaaaatggatgcgctggggtctttgtgtttgcagtcaactcgagaacacccaagatattatggcgggtggatggaactagaggaacagtgcaaatagaacgtggaattgctagtgggaagcatgggtaccaggttttattcaccaatgaaaatgggcagtgccagacgacattttatccattctgtggcgtgaatgaagaactgaaggcttttgttcatgacattgtgcaggcaaacaaagatggggatcacaaggctgaaccccgcagttcttatgttgaaggcgcacgggatgtcgccgttctagaagccatgcttgaatctagtgcgaagcaaggaaccatggtccaagtgaagaaattctaacatccataaaattgttcaaaaaaagagagggaaatatattcttcagcaagttggtacgccaattatgtagctttactaataaggaacattttttccaagttcatacataccattgagagtacagcgtgcaaatagcagtgtttccagagaaccaactttctttgactccatacatatttgttggcttgttgccattgataaattgattattacacaccg

SEQ ID NO: 23227 - DNA, 1499 bp, Oryza sativa
  ref <308>: DATABASE ACCESSION NUMBER: AK073347
  ref <309>: DATABASE ENTRY DATE: 2001-12-06
ggccacgcctcatctgactcttcttcccccttcctccctcccgagctccgcccgcccgcccgccgccgccgccgtcgagttcgccgcacctctcgcacggcccccaccccgcgcttccttcctcgtcggaccgcccgcgaccgcgagcctgcctcccgtccaagttgacgggaaccctcgccgcggaagaccgcggagaggtggggggccgcgtcccgaccccggcggtggtcgatcggttccggacgagaggagcgatgcagggcggcgtgtccggattccagaacgcgccggtgacgcgggccgtcgtcctcgccagcggcctcctctccgtcgtcttcagcgcccagcgccgcgcccgcgccctcgtcctctcccaccaggggattgtcaaaaacttccgtctatggaagttgtttgcatctgggtttgcctttcagtcaacaccggagctattgtttggagtctacctgctctattacttccgtgttttcgagaggcagataggctctaacaaatactcggtttttagtttattcactatctcagtatcattgcttcttgagatcctatctttggttctcctgaaagacaccaactacctcagcactcttgcatgtggaccttatggccttatatttgcctcattcattccattctttcttgacattcctgtcacatcacgatttcgtatttttggtgttaacttcagtgataaatcattcatatacctagctggcctgcagctgcttttatcttctgggaagcgttctcttattcctggtatttgtggtctgattgctggttctctctatcgtctgaacgtgcttggcatccgcaggatgaagatgccacaggttattgcatcatttttcgcaagaattttcgcaccttcttcgggaggttcatctaggccctccaggagtctggtcggaaacatgagttctcgtacaagccgtgctgtgcagaacaatcagccatctggattcgctcctgtcgtggagcccccagaatcttcaatcgctatgctggtttcgatgggctttgatggaaatgctgcaagacaggcgctaatgcgagccagaaatgacatcaacacggccacgaacatcctccttgaagcgcagactcgttgagctaacttaatgcgacttccctggaaacattgcgggcagaattggtgatatttctaagatgaggcaacatgctgaggtccattaggcagcagattggcgacgaaatggtgcgctgctaattttattcacttgccactggtaccatgatttgatgagaagttccactcggctcttgctagctgtcaggcgtctgcttaggaagtcagcaaacatttgccgtagttaacgggttatctatgtcaatatttaaatttctctcaccttacagatgatgtataattccaaattcagcttgtaggatagatgatatataaacattggaatcatagtgtaaaattctttagaaatttgtgcctcgtgacc

SEQ ID NO: 23228 - DNA, 1306 bp, Oryza sativa
  ref <308>: DATABASE ACCESSION NUMBER: AK073348
  ref <309>: DATABASE ENTRY DATE: 2001-12-06
gcgcgtctcctcgcgagttcacccgcccgccgcctgcggcgatctccatccagcgagcagcggcgccggcgccggcgtaccgctgcttccgccgcatcctctatctctggagatgcctcgctatgatgatcattatggaagcacacgcttgtatgttggtagactgtcttcgcgcactcgttctcgtgacctagaatatcttttcggcagatatggaagaatacgtgaagtggagttgaagcgcgactacgcgtttattgaattcagtgatccccgtgatgctgatgaagcacggtataacctagatggcagggatgttgatggaagccgcattcttgttgagtttgctaaaggagttccacgtggtgctactggtggttcacgtgaatatatggggagaggacctcctccaggaacaggtcgctgttttaactgtgggattgatggtcactgggcaagagactgcaaggctggtgactggaagaacaaatgttaccgttgtggagaaagaggtcacatagaaagaaactgccaaaacagtccaagaaatctcaggcgagagagaagttattcgcgctccccatcgccacgccgtggacgtggtcatggtcgtagtcgtagctatagccggagccggagcaggagttacagccgatctaggtccagatccctatctggatctcccaggggacgcagagatcgtgatgataggagatcaaggagtcttagctacagcagaagtcccaggcgatccatctccccagcagcaaatggaaaggagcgcaaccccagcccgaatggtaggcggagtccaaggagtccacaggatcgggtaagcccaccacccaaggataatgatgagcgcaatggtgacagcccctggggcagggagaacagcaggagcccatctgacggctaccgtagccctgtggctgccaatgggcgcagcccaagcccaaggaacaatggaagccctagtccaatggacaacaatagccgaagcccaagggacaacggcagcccgagccctagggatggaaatggtgatggtggtagccgtggcggctcacgctcgcccagagcaagcgagtcccctgaagcttgaaatttaatcccagtctctggcgttcatcttgtggatggtcatgctatggttgtaatagttatatttccggtttaagacgagatcaaggagtcttaacacctgaaaggatttggtgcccttggggctatgctatattgctattggtgtgtaatggatcgatgaactttctattagcctgcattgtttttgcggtctggtatc

SEQ ID NO: 23229 - DNA, 1835 bp, Oryza sativa
  ref <308>: DATABASE ACCESSION NUMBER: AK073349
  ref <309>: DATABASE ENTRY DATE: 2001-12-06
gaccggtttcaaaaactcgccccccaaaattcctcctccttcctctcgaaggcggcgaaccccatcgattcctcttcctcctccgccgcacgcgccccaatccgattcaaccgccggcggcggcggcggcggcggcggtggcggcgatggaggtcggggacctgcacaaggtgtgggagatccgcgcgctcaagagaaagcccgacgagcccgccgcccgcgcgctcctcgaccgcgtcgccaagcaggtccagcccatcatgcgccgccgcaagtggcgcgtcaaggtcctctccgagttctcgccgaagaacccgaggctgctggggctcaacgtcggcgggggagtcgaggtgaagctgcggctgcggcacgcgggacgggactacgacttcatcccctacgaggaggtgctcgacaccatgctccacgagctctgccacatcgcgcggggcccccacgacgcgcagttctacaagctctgggatgagctccgcaaggaatgtgaagaacttgtttccaagggtatcactggatcaggccaaggatttgatggtacaggtcggcggttaggtgggtttacagtacacccaccgccaccatctttaaggcaagcaacattagctgcagcacagaaacgggcaaggaatggagctcttttgccatccggtcctagaaagcttggtggaaataatgatattatgagtgctcttagtccaatacaagccgctgcaatggctgctgaaaggagaatgtatgacgatttgtggtgtggatcgcacgatcaatctggcattgatgattcagaagacgttgttattcttgaggatacacctaacttgccaacgcagcttgggaaaagcacaaaggatggcttttctagcagttctgagaatcccagcacatcttcgggatttcccacagcagcacagaatggatcctcttcttgtaggataacaaccgatgcaggagatagttctctatgggagtgtgttgcttgcacacttctaaatcagcctctggcaccaatctgtgaagtttgtagcgcagctaaacctaaaaccacgaaggccaaatatgcaacctggtcctgtaaattctgtactctagaaaacagtactaagattgacaaatgttcagcatgcgatcaatggagatattcacatggaccacctgcagccacatattgtccaagctatgattgatctacattgaagcttgcattaatatggactacagaattttggacagccatctgctgaattgtggatacacaaattcgttcccatcagcagttctatctgttaccccattgcacttctgcataacgaatcagatgtgtaatttactatctaaagcattccctctttcgtggatcacatcatgtgtatagagagaaccacctattggaaacatctgacatatcccaagctccctctgggagcagctaacgcttgaaccattttcaatccttcctgctcctgaagtcctgaagcatgaccgagcacgctggtactatcatgagtcgctgttgctgcagttgagcgatataagctgtcacttcattctaatcaactaaggtcgttgactttttattcgtcctcgtctaatttctccatttggcagctttgggtttgctcttggttgggtgccaactgccaatgacttgacaagttgacattgtatggtcaaagcccaatgggggagtgagctttatcacttgtgtaacgattaacaaatttcttaaaatcattcccgtggtagaatctcgagcgaaaccaacactggctccttttgaaacaaaggaattttacatgttcataggaatttgattc

SEQ ID NO: 23230 - DNA, 1152 bp, Oryza sativa
  ref <308>: DATABASE ACCESSION NUMBER: AK073350
  ref <309>: DATABASE ENTRY DATE: 2001-12-06
gtcttttgctgccaataccccataccatgtctgcataggaaatcatgaatatgattggccattgcaaccttggaaaccttggtgggcaactggtatatatggaacagatggtggaggtgaatgtggcataccttacagcgtaaagttcagaatgcctggcaattcttttgtgcctactggcaatggagctcccgacacccgaaatctttactactccttcgattcaggggttgtgcattttgtttacatgtcaactgagactaattttgttcagggcagtgaccaatacaacttcataaaagctgacctagagaaggtcaaccgaagtagaactcctttcattgtgtttcagggccaccggccaatgtatacatcaagcaatgaagctagggattttgctcatagacagcagatgctccagaacctggaaccactcttggtaacatacaaagtgacccttgcactctggggacatgtccacaggtacgagaggttctgccccatgaaaaacttccaatgtgtcaacatgtcatcaagcttcgtataccctggtgcccctgttcatcttgtgatcgggatgggtggtcaagattatcaaccattctggcagccaaggaaggatcaccctgatgtacctgtctatccgcagcctgagaggtctatgtaccgtggtggggagtttggatacacaaaacttgtagctacaaaggagaagttgacactaacgtacatcggcaaccatgatgggcaagtccatgatatggtggagatattctctgggcaagtatctaataacaatggtgttcctgaggtgatcgatgatacaaagctcagcacaggggtcagcaccaaactgaaaatccctctgttctccttggaaattgtaggcagcgtgatgtttgcactggttctgggtttctctcttggatttctgatcagaaggaagaaagaagctgcacagtggaccccagtgaagaacgaggagacctaaaatcacacactgtatctaatgcaaatgcaaatggtttttgatcaacaacctgtttataggatcgtgccccatttcttggggctctacagtgttgtactatagtgcatagagtattgtaacgtgtgctgtgtcaatcgtgggcattgtagagtttgatcagc

SEQ ID NO: 23231 - DNA, 1315 bp, Oryza sativa
  ref <308>: DATABASE ACCESSION NUMBER: AK073351
  ref <309>: DATABASE ENTRY DATE: 2001-12-06
ttgacgcaaggcagtccacaccacccgaatcccctccactcccccgcggtcaccggcggcgccggcggcgagctctcgccgacgccgatgaccaccgcgcggttcgtctccccctccctctcgcgcgtgtccccctcgccggccggccgagtctccgggtcgtcgtggttgtccagggctggggtcgccctccccgctcggccgcacggtctctcgctccacctgaggccgcctgctatggcctccgccgccgccgccgggaacggctctccttccgcgccggaggactccacagcgttgtccaggataggagaagtcaagagggtgaccaaggagacgaatgtgcatgtgaagatcaacctggatggcactggtgttgccgattgcagcacagggatacctttcttggatcacatgctcgatcaactggcatctcatgggctctttgacgtatgtgttaaggcaaagggtgacactcacatcgatgaccatcactcaaacgaagacatcgctttggcaattggaacggcactacttgaagcacttggagatcgaaaaggaattaatcggtttgggcattttacagcaccacttgatgaggcagcggttgaggttatactggatctatctggtcgtcctcatttgagttgcggcttaagtattccgactgagagagttggcacatacgatactcagctagttgagcactttttccaatctcttgtgaatacatctgggatgacacttcacatccgtcagcttgctggaaaaaactcacaccatattattgaggcaactttcaaagcatttgctagagcccttcgacaagcaacagaatatgacttgcgccgacgcggcactgtccccagctcaaaaggtgtgttgtcaaggtcatagtgttgcaggtttggaaaacaaggggtgcatgctactgttccttgtagattgcaatattcaaaggaaacaaatggaatggcctctacagctcctcgagtcctacttaccctgggaatctccgttggttgcgataacagaacatgaagccattgctaactagatcaccaaaaaaggaacaaatttagcactgttctcatgatctattcttctgtaacatttagcattcgaaataaacatgtccggccgttattgcaattttggatgctagatgtcttgagttgtcatctgtgttgtccatcaaacggcgtgtctagcagctcagtttcactctgtatgagttcagagttggtcatgttgctgaacctctgtattttcaagggaataaataagttttgcacctacgtttctgccagactcc

SEQ ID NO: 23232 - DNA, 1083 bp, Oryza sativa
  ref <308>: DATABASE ACCESSION NUMBER: AK073352
  ref <309>: DATABASE ENTRY DATE: 2001-12-06
gacccaaacccaaagcagcaattgcaagaagcaaaatctcttctcctcctcctcctcctcctcatcatcatcctcctctcgcccttcgacaacgcaccatagtttaacccaagctagaagaagaagacgatagatatgagcactactcgcggcgtctcctcctcttctgctgctgctgctcttgcgctgcttctcctcttcgccctctgcttcttctccttccacttcgccgcagctgctcgcgccgttcctcgtgatgaacaccaaggtagctagctacagcacttggattattgattgttcaattgatagtgtatgcaaattagctgacgttttggagcttttcttttcagagaatggcggtgtcaaggcagtagcagcagttgcagctgatcagcttgtgctccagctggaaggtgacaccggcaatggcgacgaggtctccgaggtgagaatcgatggaaatatacagagctataaatcttcgagtacctagctgattagacaagaattgatgaagaagcaattagtggtaactaatcttgattgttaatttatttctatcttgttcttggtcagttgatgggagcagctgaggaggaagcagcagcatgcgaggaggggaagaacaacgacgagtgcgtgcagaggaggctgctcagcgacgcccacctcgactacatctacacgcagcacaagaacaagccttgatcgatcgatccatccatccaactacacgctgaaatccaaagctaatacaaggaagatcgagatcgagataaattaaccaactctatatgcatatctatctatccatctacctctgcatgctgttttcactgcatcgatcgctactgttctgcagtgccaatcactgtccgtttctgtacaatctgtgatactactagctagtagcagtacatggcatcgttttccttcaagtgttcgttggcttttacttagtccggtgagtgcttgtgggttatttctgacgagggagtgtgatcagtacgcgtactaatggtattttggtttgtcatggcatgatgaaattaagctgtggtagcaatataatgcatatat

SEQ ID NO: 23233 - DNA, 1721 bp, Oryza sativa
  ref <308>: DATABASE ACCESSION NUMBER: AK073353
  ref <309>: DATABASE ENTRY DATE: 2001-12-06
gggattaacagagtaaactgcaacaaaccacgcgacccccaaacctctctctctctcctcgcctccgccgtcgccgtcgccgtcctcgactgctcctccggtgtgatccgatcacgcgcggcctctccgcctcccgctcgcccttctccgcttcgcgtgttgtactgttctcccgcggtcccgcccgagcagaggtttgggttggccagcgagggaggttggctagggcagcgggctgatgagagaggcgtcaggcatgtccgggggagaagacgtccgcaaggtttctcgccaggacatacagctcgtccagaatcttattgaacgatgtcttcagctttatatgaaccagaaagaagtggttgagaccctatcattccaggcgaaaattgaacctagttttactgagcttgtctggcagaaacttgaggaagagaatcgtgagttctttaaagcatattatgtgagacttatgcttaagaatcaaataatggtcttcaacaagctccttgaggatcagtatcggcttatgtgtaaagagcagccttctggagtaccttctatgcctcctactactaatggctccaacatgggcacattgaatcaaaatgcatgctttttgccagacactactcccagcactgcaatgccagatagcttgctacccaatggaagttccagcggtattgtaaatggcactccatccagtgaccaatttatctatgctggtaaagtcattcatggtcttcctagcagtatggatgcttcatctagtctactggcagcacataactcaactgctgggaggtttaatggagacaatggaacaacaatcaagacagaagcaagctactcgggcaactctgattttggtttctgcaatgagagcgctttcctagaaccttgccagtcaattggggatgcctctggtggatccttcagcagctctgagctgaatggacagccactaggtgatccaattatggacatggattcatcatcttttggtttcttgagccaaattcctcggaatttcagtttttcagatttaactgaagactttagccaaagtgcagaaatattggagaattatggcagatccccttttatcccttctgaaccaaataatttctcagagtctactcctggagaccatgcagaaataggaaatagacggctagataccatatccgagggtgttagttatgaagattttggaagcgattaatcagatattgatggtactgcttaaggttgagcagtgatgcataactttgtacatagtagtttgggcaagtgagtctatattcgtggccatggaactcagctaatttcatggaaactattgcttcgtcagttttaggtcttgttctgttggactaccagcttcggtgacttgtgtgagaatatttcatggcctaataatgtgtcgcattgactgatgcaagaaacctattgtccctgtgtcattgctgaagatattgtagaagttagcgttaatggtgactggaagctttacattgacatttcgtgctgttgcacttgatgtgtagtttgtacatgatgcttagttaacattttccctctgttgcacttgctgcggttggccatgtcgcgctctgcactcttcggttgttcagacatgagagtttacaataattcagtattggagaagttggtaaaactgtcagattgttgacgcttggtgaagtttgattccc

SEQ ID NO: 23234 - DNA, 2326 bp, Oryza sativa
  ref <308>: DATABASE ACCESSION NUMBER: AK073354
  ref <309>: DATABASE ENTRY DATE: 2001-12-06
gatccactcccaccgcagccatccaacgaaaaaccctaaaaacccctctctctccccttcgcttccatccatggcggaccacccttcgtcttcccctacggcggccacgtctccgccgccgcgcaagaggccgcgggacgcctcgccgtcggaggaggaggagggcggcctccccggcgggccgccgtcgccgtcgccgtcgccggcggggtacatcttcatgtgcagcggggcgacgaagccggagtgctacgcgcgcggggtgatgggccagccgcgggggaggctgcccgccgtctcccggatcaggcggggcgccgcgctcttcctctacgacttcgactccaggcacctccacgggccctaccgcgccgcctccgacggcggcctcgacctcgcccccgccgccttcggtggccgcttccccgcccaggtcaaatttacaattgatggtgatttcatgcctatcccagaaagtagcctaagaagtgctataaaagagaactattccaatgggaagttcagctcagaacttacccttgcacaggttgaaaatctgagaacattgtttcgcccaattattgtgcaaccagaacctggactcccaaataattttgatgataggcaacctgctcgtccttgctccatgtcccctactgcaccttctctggtgtgtgacaaaccacattctgcggcagagaatgatgagaatggttgctccagtgggtcctccatgtcatcgcctgctgggtacatcttcatgtgcaatggcgtgacgaaagctgagtgctacaggcaccgggtgatgggcttgccactggggagtctagacgtggtgtcccggatcaggcgtggcacagcgctctttctctatgacttcgatgccaagcacctctatgggccctaccatgccgattccaatggtggcctcacactcgtcccggatgccttccggggccgctttcctgcccaggttaaatttacagttgatggtgatttcatgcctatcccagagagtagcctaagaactgctataaaagagaattattccaatgggaagttcagcccagaacttacccttgtgcaggttgagaaactgagagcattgtttcgtccaattattgtaatgccagaatctgcactcttccataatgacagtgacaggcatcctgttcctcctgctgtttacctacctcctgcttctcatccatcacagccagctgcttatgtgcatcagcagcaccaaacttcttatattcctcctttgactgctcatccgatgccacctgaatcttatgcacattcatatgctcagatgcctcctccaaacatgcagttcactacacctccttaccatatgtcaacagctgagtatccatatcaagcagcgcacacagcatatagttcattgccctcagccaacaatatctctatggccaacaatctctatggccaacaatctctttctgatcatgtttcggctactggctactatactgccccatattatgccgcccaccaaattggcatgcacccagttgatcctccaagatcacactacttaggaactacatctgagagaattacctacggtacagagcatgaggcggccacgacaaacttgcaacctattagccattatgggtccattccaagtggtgcaaccgcagcacctgaggcagctgcgacaaactcagaactagtttgtaattctggggctactccaagtgcttcagcaactggggcagctatgacaaacttacaactcgttaggaattatgggtctatgccaagcagtgtgattggagctgcggcacattcatctgaggggagccaattcgagcaggcagccacttacatcactcatgcacctggaacctactactgttatggagcttcctcggcgatctactcctacccagggaacacagcatcctgtgatggaaacaatgtggctgctgctccgtcagtatatgctgtcgcagcaccaccagcataccagtgattactccatggccaactgatgtttctgctaacaatgttattctcagaccaagtgctgctgcttcttcatcctcctgagcttcacatatgccaccggatgcactagcgatcccgtatcatcgatggtggccataacctccccatataattttatcatgtaatttttgtgcataaggtattagagtgattcgtctcctacatgtagcttggctagattggtggcatcctatgtagctgcatgtgtgagccaagattatatgtaaatactccttgtttatattataagttgctttgacttatttaagtcaaacttcttgatagc

SEQ ID NO: 23235 - DNA, 1245 bp, Oryza sativa
  ref <308>: DATABASE ACCESSION NUMBER: AK073355
  ref <309>: DATABASE ENTRY DATE: 2001-12-06
gtgcagccagccgcccggcctcccgccgcctctgctgtctcagtcccgagtcgcgagtcgcaacgccaccacgaggagccgaggaggaggaggaggaggaagaagaggtgttgtccgggcgtgaggaggatcggaggaagggaagctatggggatcgtggaggaggcgcacaacctgcgggtggtgggggaggggaagcgcggggtgatcgtgctggcgcacgggttcgggacggaccagtcggtgtggaagcacctggtgccgcacctggtggccgactaccgcgtggtgctcttcgacaccatgggggcggggccgaccaacccggactacttcgacttctcccgctacgccaccctcgagggctacgcgctcgacctcctcgccatcctccaggagctccgcgtcgcctcctgcatctacgtcggccactccgtctccgccgtcatcggcgccatcgcctccatctcccgccccgacctcttctccaagctcgtcctcctctccgcctcgcctcggtacctcaatgatgtcgactactatggaggatttgagcaggaggatcttgatgagctctttgaagccatggggtcaaactacaaggcctggtgttcaggctttgcgccactgtgcgtaggaggggacatggaatcagtggcagttcaggagtttagccgcacactcttcaacatacgtccagacatagccctgagtgtcgcccagacaatcttccagagtgatgtgcgaagcctcctaccacttgtcaccgtaccatgccacattgttcagagcaccaaagatcttgctgtggcggttgtggtgtctgagtacctgcacaagcacctcggtggcgactcaatcgtcgaggtaatgccgtctgagggccatctaccccaacttagctcaccggacatagtcatccctgtcttgcttcgacacatccagcatgacattgcggtctaggtggtgcaaccattccgcctagagctgttcatcagaagttgtataatttcagtatctgtactccactgaatcacccgacttaggatccatctactgttgttgtaataagattctccatatgttgtaaattgatggcggtggagaagtagtctatggtgtttgtaaaccactgcacgtatgatgttcattataatgttggatgttttaacgtaaccgagtccttcagaattaaactcatcatgtcagtgtggccgctaccacgagctgcaactctgttttatg

SEQ ID NO: 23236 - DNA, 937 bp, Oryza sativa
  ref <308>: DATABASE ACCESSION NUMBER: AK073356
  ref <309>: DATABASE ENTRY DATE: 2001-12-06
gatcatcaaacgagacaagagtcacagttcgagtcagagctatctaaccaatccatccatcgagcaattgttgatccgtctgtgaattgtgatggcggcggcggagggggagcaggggaagacggtggtggtggtcggggtggacgacagcgagcacagcaactacgcgctggagtggacgatgcagcacctggcgagcggcatggcgggcagcggcggcgccgagctcgtcatcgtccacgccaagccctcgccgtcctccgtcgtcggcttcggcgccggccccggtacatcacccgcctccttgaattgatctcgatgaaatttattctgagctgactcgttgatggcgtcagggtctggagaggtggtgagatacgtggaggccgacctgcgcaagacggcggaggatgtcgtcgagaaggcgcgccgcctctgcatcgccaacgcggtaatcgatcgatcaaactctctcactctcgcagattctgcagatttccgcacagggtttctgtggctaaacgggcacctgattattggcattattgatgcatttggttgcagatgcacgcgttgatcgaggtgatcgaaggggagcccaggtacgtgctgtgcaacgcggtggagaagcacagcgcggggttgctcgtcgtcggcagccatggctacggcgcaatcaagagggccttcctggggagcgtcagcgactactgcgcccaccacgcgcactgctccgtcatgatcgtcaagcaacccaaggccaagcgctctcgtgccgagaccgcgtgaaaaacaccaaatttcgggtgtgagctgagccgagcaatgtgtgtgtggttcgcttgggtagcagcagcttcttgcgttctgtacatgggatgatttgtatgtgttagtttcataggttttatcagtttatgtatcgaaatgtttgtgc

SEQ ID NO: 23237 - DNA, 862 bp, Oryza sativa
  ref <308>: DATABASE ACCESSION NUMBER: AK073357
  ref <309>: DATABASE ENTRY DATE: 2001-12-06
ggcgttcgattcgattcgcatcggcgttgcttccaacgagagggagggagggaggagaggcgaatcgcggcgagcggcggcggcggcggcgatggtggacgtgtcgagggtgcagaaggagctgacggagtgcaaccgggacagggaggtctccggggtgtccatcgcgctccacgacggctccaccatctcccacctcaccggcaccatcgccgggccccaaggcacgccctacgagggcggcaccttcgtcatcgacatccgcctcccaggtggttacccctttgagcctcctaagatgcagtttatcaccaaagtatggcaccctaacattagcagccaaaacggagcaatctgcttggacatactgaaggaccaatggagcccagcccttacattgaagacggcactgctttccctccaagctctgctttctgcccctgcacctgatgatcctcaggatgctgtcgttgcacaacagtacttgcgtgactattccacattttctgctactgctcgctactggacggaggcctttgcaaagaattcctccaccggcatggaagaaaaggtgcagaagctggttgagatgggcttccctgaagacatggtgagaagtgttctgaagagtgtcaatggcgacgagaacatggctcttgagaagctctgctctggctgaggccctataagccgatatgaactgtaaattgaatccccattcgttataagacaacagtgcttgctaatgctcctgttctgccatttaagtgtggctttatgacactcttctatataggggattggaccatgggacgttgggactgaactgaacctatcctaacttgacagagttcggtcattg

SEQ ID NO: 23238 - DNA, 1667 bp, Oryza sativa
  ref <308>: DATABASE ACCESSION NUMBER: AK073358
  ref <309>: DATABASE ENTRY DATE: 2001-12-06
gggttgcgtctcctccacacgctagcgagtagctatacaacgtacctttcccttcctcttgctcctcctcgtcgtcgtcttgctcgtcctgcctgatcaatctttctcgctcttatctcctctcatctctcaatctctctcagataattaaaccaagtgtgcagatagatatatagctgctgctgcatgtgtagggattgcctctgacatattactattccttgcatgcgaaagagagactagctcttgtcactctcctctgcccttcttccttcgattcaagaaggcacagtagtgtgtatatatatacaggcatacataccgttcttgccgcctctagtttgggtgtgattgaatgacaaaggagatggccgatgatgtcgagtaccatgaggagtttgtgacgaatccgagggggttgcggctcttcacatgcggctggcttcctgcttcttcctcccccaaggcgctcatcttcctttgccatggctacggcatggaggtcagtggcttcatgaaagcatgtggggtcgagctggccacggcgggttacggcgtgttcggcatcgattatgaggggcatggcaagtccatgggtgccagatgctacatccagaagttcgagcatcttgtcgatgactgcgacagattcttcaaatcaatatgtgagctggaggagtacagagacaagagccggttcctgtacggggagtcgatgggcggcgcggttgcgctgctgctgcaccgcaaggacccaaccttctgggacggcgccgtcctcgtcgcgccgatgtgcaagatatcggagaaggtgaagccgcatccgttggtggtgacgctcctgacgcaggtggaggagatcatccccaagtggaagatcgtccccaccaaggacgtcatcgactctgccttcaaagaccccatcaagcgcgaaaagatcaggaagaacaagctgatctaccaggacaagcccaggctgaagacggcgctggagctgctgcgaaccagcatcagcgtcgagcaaagcttgtcacaggtgagcatgccgttcttcatcctgcacggcgaggccgacaaggtgacggacccggaggtgagccgtgcgctgtacgagcgcgccgccagcgccgacaagaccatcaagctctacccggggatgtggcacggcctcaccgccggcgagccggaccacaacgtccacctcgtcttctccgacatcgtcgcctggctcgaccgccgcagccaccaccaggacagggcgagcattaccccgccggcggcctgcaccgacagcgccgccgccgctgcggcggacagcccagtgtcgcctgagccgccgcggcaaggcgccgccggcggcttcctctgcggcctaaccggccgagcaaatccccagcaatgtaggatgtaaaatatagaaagaggggaaaaaaaaagaactcccttgatatacaaaatgaaaggaatgcagatgttgtgatgcaaacagtgtcatgaacaagttcagagaaatttttagtttcatcagaacagtttctgtttgtttcagtttgaacatgcaccagctgcctgcctagagcgagcagcctggcaaaatacaaatttctgagagaacatgtaatttataccatataatgctatcatctcaacaaagaatcagaagatcc

SEQ ID NO: 23239 - DNA, 1275 bp, Oryza sativa; identical to SEQ ID NO: 23205
  ref <308>: DATABASE ACCESSION NUMBER: AK099351
  ref <309>: DATABASE ENTRY DATE: 2002-08-28

SEQ ID NO: 23240 - DNA, 1390 bp, Oryza sativa
  ref <308>: DATABASE ACCESSION NUMBER: AK073359
  ref <309>: DATABASE ENTRY DATE: 2001-12-06
ggcgtcactctcctccccctcgtatcgctcgggagcggaggtctcctcgcccctagagcgccgccgccgccaccgccgcggccgccgcggcggggacttgccggtgccaagtccacacgccatcgtcgctcgcacccttcccgcgcagggatttgttcacgatggcccgcttgtatgttggcaacttggatccccgagtgacttccggggaacttgaagatgagtttcgtgtgtttggagttctgcgaagtgtctgggttgcccgtaaaccacctggttttgcatttatcgattttgatgacaagagggatgctgaggatgcactccgtgatttagatggcaagaatggatggagagttgagctctcacggaactcaagtagccgcggaggtcgtgatcgacatggtgggtctgagatgaagtgctatgagtgtggtgaaactgggcactttgctcgtgaatgtcgtttgcgtattggtcctggaggtctgggtagtggaaagcgtcgtagcaggagtcgcagccgcagtcgcagccctcaataccgcaagagcccgacctatggtagaagaagctacagtcctcgtgatcgctctccaaggcgccgcagtgtttcaccagttcgtgggcgcagctacagcaggtcaccacgtggccgaggtggttctccttatgctgatggaagagatggtggcaggtaccgccgtagcaggagctagaccctgatgcctgtgcttgaccgtctgctctttggcttgcatgccatgaatgctttaagactggcatcaactgattgacttcaattaagagggatcattctgcttaagcgactcagccaactaccggctctgtctgcatggttttgttctgcactcttcattcctcgagcgtgttgcctgcttcatgtgaagttgcaagcaaaagagaatcttccattgtttcctgcctatgatgcctcgttgtggttggcactcttcgttgaagatgctgcatcgtcacaaattacctgtaattcagcgacaaaaggaatttgctgggttggcttccgcaagaggcagagactaccttttaagcggttccaccgactccaccccttggctttattctttctggtttttccttcactctgcgcatctgtcggccttcttcctgcactgcatcgccataatagtagcctctatatatgggaccttcagatgaaatattctcgttctgcattcttcctaccggcggccattagacaaaatatgtttttttttctttctgtttatgtggtttattacttttatttgtatctcaaccgttcagaacaagtggccagcacttcatgtctcaattgttgtgaattactcttttgacctagagctaataacagcctcagttcatatcc

SEQ ID NO: 23241 - DNA, 1240 bp, Oryza sativa
  ref <308>: DATABASE ACCESSION NUMBER: AK073360
  ref <309>: DATABASE ENTRY DATE: 2001-12-06
ggtgaggaagccacaagctagcacagcacagccggtaagagagtgagtgcggagagccaaattgagatgggtgcagcgagcaggagactggccgtcctggagctcgtctccatcgtcgccatcctcctcatctcctcaccagcagcagcagcagagttgtccgtggacttccacgcggcgtcgtgcccgcagctggagtccatcgtgcgctcctccgtgcaagccgctctccagcaggagatcgccctcgccgccggcctcctccgcatcttcttccacgactgcttcccgcaggggtgcgatgcgtcggtgtatctgagaggaggcagcaactcggagcagggcatgggcccaaacctcacgctgcagccgcgggcgctgcagctggtggaggacatccgcgccaaggtgcacgccgcctgcggccccaccgtctcctgcgccgacatctccgccctcgccacccgcgacgctgtcgtcgtctccggcggcccctcttacgccgtgccactcggccaaaaagacagcctcgctccggcatcgttggacctcgtcggagatctcccgggcccgggcacctccagagtccaggatctcatcgacctttttgcaagcaggggactgcgggacgccgccgacctggtggcgctctccggcgggcacaccgtcgggaggacacgctgcgccttcttcgatgaccgcgcccgccgccaggacgacaccttctccaagaagctggcgttgaactgcaccaaggaccccaaccggctgcagaacctggacgtgatcacccccgacgccttcgacaacgcctactacatcgcgctcatccacaaccagggcgtcttcacctccgacatggcgctcatcaaggaccggatcacggcgcccatcgtcaggcagttcgccacggacaaggccgccttcttcacgcagttcgccaagtccatggtcaaactaagcaatgtgccgaggactgacaggaacgtcggcgagatccgccgcagctgcttcaggaccaacagccagagcctcgtcgacttcgccaccagcgatgaggagggcttcgctgcttctgcttgatcattcagctgtctgtcgttgctcgttaattagggagctaggtgcttgacgtcgctagctgatcctagtctctttagtcttcaggccttggcttttgtacgcatatgctttcgttatgtccgtgcaataataactagtaagactgtttttctttcct

SEQ ID NO: 23242 - DNA, 1165 bp, Oryza sativa
  ref <308>: DATABASE ACCESSION NUMBER: AK073361
  ref <309>: DATABASE ENTRY DATE: 2001-12-06
gacgaagacaaagtcagaggtcacacagctcatcgtctcgagctacctagctggaagaagaagaggaagaagaggaggaggagctcgtcggagtttagttggtgagttcgccggagagatcgatcatggagaatctgaaggcgacggagctgaggctcgggctgccggggacggaggaggaggcggcgccgccgccgtcgacgcccagggccggaagcaagcgcgccctcgccggcgagcctgatcaggccaagatcaagcccgccgccgccgccaaggcgcaggtggtgggatggccgccggtgaggtcgtacaggaagagctgcctccagccgacgacgacgacgacgaagagcaagccgccgccggctgccgcggcggcggagacgcagcagaaggaggatgtcgccggcgccggtgggctgttcgtgaaggtgagcatggacggagctccatacctgaggaagatagacctcaaggtgtacaagggctaccgggagcttcgcgaggcactggaggccatgttcctctgcttctccggcggcgccgccgccgacgccgccgtcaacccgtccgacttcgccgtcacctacgaggacaaggacggcgacctcatgctcgtcggcgacgtcccattcgagatgttcattagtacgtgcaagaggttgaggatcatgaaggggtctgaagcaagaggcctaggagcaacaaggggttaaaaactgaacaacaacaagaagaaatcatcatcatgtgtgcatgagcaattcttttgttctttttgggttctccaagacatgcaatcatctcatctcctcattgcaaccttcaagaaagagagagagagaaagaaaaggaaagcaaaaaaaaaaaagatgcagtgaaaaaaatatgtgaagcttaattggagtcatcagattgcaaagcatgcatgcatgtgtggatgtgtggctttaatttgtttttttcctcttaattaggtgttagaaaacacagaaggaatggaggttcgagttgagcctccatgtgtgtttgtacaaagcaaacatcttttttcttttacatgaatggttgattacttttgtaactggagggaagaagaatgcatgtatgcatgggctgtgtgtacttctccctctggcttcaatgctttgatttccatccg

SEQ ID NO: 23243 - DNA, 1348 bp, Oryza sativa
  ref <308>: DATABASE ACCESSION NUMBER: AK073362
  ref <309>: DATABASE ENTRY DATE: 2001-12-06
ggatgatttctttttcttctgcccataataaaggttgggcattttgctagtgttgtgtatatatgaacaagaacgcgcccagagatccctccattaattatcccccctctctgctccgtcagtcggtttggcggtcgatcgatcggtgacgccgtgacggtgtatgtaggccgactggtccacgtacgtgcggtgcgattgctgttgtgatcgaggaaccgcgaaatgggtcgcgggggcgacgtggacggcgcggcgggcgcgctgcggcggttcgtgcgggaagcgggagggtgcgcggtggtggacggcgggctggccacggagctggaggcgcacggcgcggacctgcatgacgagctctggagcgccagctgcctcgtctccgcccctcacctcatccgcaaggtgcatttggactacctcgacgccggcgccaacatcataacctcggcgtcttaccaggcgacgatacaggggttccaggcgagaggcctgtcgcgtgagcggagcgaggcgctgcttcgtcggagcgtccacatcgcgcaggaggcgcgcgccatcttcgccgagggctggtccaagggcccgtacgccaaccaccgctcctcgccgcgccggcccgtgctcgtggccgcctccatcggcagctacggcgcctatctcgccgacggctccgagtacaccggcgactacggcatatcggtgaccaaggagacgctcaagagcttccaccggaggaggctgcaggtgctcgccgacgcggggcccgatctcatcgcgttcgagacgatcccgaacaagctggaggcgcaggcgagcggcgaccccatcacggagtgcgccgccgtggccgacgcctgcgcgagggtcggcgccgtaggggtgaactgcaccgcccccaggctggtgcacggcctgatcctctccatcaggaaggtgacgagcaagccggtcgtcgtgtaccccaacagcggggagacctacgtggccgagaccaaagaatgggtggagtcggagggcggcgcgtcggagacggacttcgtgtcgtgcgtcggcaagtggaggcaggcgggcgccgccctcgtcgggggttgctgcaggacgagcccggccacggtgagggccatctcgtgggcgctgcgtgaatcggatgacgccgtgggtggtgacggcgatcgcgacgatttccctgcagtggccgtgctctagttgttcctgccttgtcgtcgatcatcgagtctcgtggttgtctggttgagcgcgcagttttgtgtgtgtatccatgcttccaatcaatggaaaatggaaataaaatggttcggttcgtgcagtttattcgattttc

SEQ ID NO: 23244 - DNA, 760 bp, Oryza sativa
  ref <308>: DATABASE ACCESSION NUMBER: AK073363
  ref <309>: DATABASE ENTRY DATE: 2001-12-06
gatcgatcaccggcgacgagagacactctcactgaacgaagctacctagcttaattacctagctactcgatcgatcatcagtctagatatggcggctttgaacggtaaggtggtggtggcggtgatggtggtggcgatggtggtggcggcgccgggggcgtcggcggcgatcacgtgcgggcaggtggggtcggcgatcgcgccgtgcatctcgtacgtgacggggaggggcggcctcacccagggatgctgcaacggcgtcaaggggctgaacaacgccgcccgcaccaccgccgaccgccaggccgcctgccggtgcctcaagaccctcgccggcaccatcaagtctctcaacctcggcgccgccgccggcatccccggcaagtgcggcgtcaacgtcggcttccccatcagcctctccactgactgcagcaaggtcagctagatcgattaatcctgcttggaccgaccgatcgatatatcgatcgatgctggctcgcagttgatcaactagccaaaataatagctacagtaaaaataacagctggggcgtatcaatgcagcgctggtcatctctctctctatctctgtatactttatgttgcacgctccgtgcgtgcatgctatcttaattttcttgactctgtacaccgctctgtgtacgtgtaatcctacgttgatgaattgcatcttgtccagacttggacctagctaactacgtactccagcttggcagcttcttgccgaggcaatctgtagt

SEQ ID NO: 23245 - DNA, 1756 bp, Oryza sativa
  ref <308>: DATABASE ACCESSION NUMBER: AK073364
  ref <309>: DATABASE ENTRY DATE: 2001-12-06
gatccaatccaccccactccattctctcatctcatccgtgaccacactccactctcatccagagcaatggcgttgcaaacgcagccggtaccaaatgcgtcacctcttcatgttcttcggtccgtatgcgtcctcctcctggccgcgtcggcgacggtggcggcgcggcgccacggcccggcggcgcccatcgccgggcagagcatgtacctggcgccgagctgccgcgcgcacacggcgtcgctgacggacttcggcggcgtgggcgacggcacgacgtcgaacacggcggctttcaagtcggcggtggaccacctgtcgcagtactccggcgagggcggcggcggggcgatgctgtacgtgccggcggggaagtggctcactgggccgttcaacctgacgagccacttcaccctgttcctccacagcgacgccgtcatcctggggtcccaggacatgggcgagtggcccatcatcgatcccctcccgtcgtacggccgcggccgcgacaaggccggcggccggtacgcgagcctgatcggcgggtccaacctgacggacgtggtgatcaccggcgcgaacgggacgatcgacgggcagggggcgatgtggtggtccaagttccattcgaacaagctcaagtacacgcgtgggtacctgatcgaggtgatgcactcggacacggtggtgatatcgaacgtgacgctggtgaactcgccggcgtggaacatccacccggtgtacagcagcaacatcgtggtgcagggggtgacgatcctggcaccgacgcactcgcccaacaccgacggcatcaacccggactcgtgctcccacgtccgcatcgaggactgctacatcgtgtccggcgacgactgcgtggcgatcaagtccgggtgggacgagtacgggatcgcgtacgggatgcccagccagcacatcgtggtgcggaggctgacgtgcgtgtcgccgacgagcgcggtgatcgcgctgggcagcgagatgtcgggcgggatcagcgacgtgcgggcggaggacataacggcggtgaactcggagtcggcggtgcggatcaagacggcggtggggcgtggggcgtacgtgcgcgacgtgttcgtccgggggatgtcgctggacaccatgaagtgggtgttctggatgacggggaactacaagtcccacccggacgacggctacgaccccaacgccatccccgtcgtggacaacatcagctaccaggacgtggtggccacgggggtgtacaaggaggccgccaggctggagggcatccagggcgcccccttccgcggcatctgcatcgccaacgtcaccgccacgctctccaagtcgcgcaagtacccgtggacctgcaccgacatcgagggggtgtccaccggcgtcacgccggcgccgtgccagccgctgcagggggcgcacgatggcgcctgcccgttccccacggacacgctgcccatcgaccagctcgtcatgcagcagtgcgcctactccgtcccggcctccatctagctgatctggctgcagcctgcagcgctgtagctgtagctgtgaccgtcgttactactacaacactagcctctgcgtgcggtcttctgaaacaaaaacaataacccagagtgacctttctgactgtgctgcttcacagcgctcgctctgcgtcatgtcagtgctgcctctccttgctctgcaattatgtaacttaaacttcagttcgtgaaatacaaatgagaaattagtcgcc

SEQ ID NO: 23246 - DNA, 1012 bp, Oryza sativa
  ref <308>: DATABASE ACCESSION NUMBER: AK073365
  ref <309>: DATABASE ENTRY DATE: 2001-12-06
aaaagtcatcgccatcatcgatcgatcgatcacaactactagaaatccagccaagaagatcgagaccggatacagctagcaatccatccaagaagatcgagagagcggatacagctagcctagctacgcgaaggatcagatcatcggcatggagctggagcttgggctggcgccaccgaattccggtcatctcgtcgtcgacgagctcagcagcagcagcagcagcggcggcggcagcggcagcgcgccggtgtctgcctcgtcggccgggaagaggggattcagggaggcgttccaggagacgctgctgctcttcgacgacggcagctgctgcaacaccagcgacgacgattgcaggaggaggaagaagacggtggtggggtggccaccggtgagctcggcgcggcgggcgtgcggcggcgccaactacgtgaaggtgaagaaggaaggcgacgccatcgggaggaaggttgatttggccctccattcctcctacgacgagctcgctgccacgctcgcccgcatgttccccaccaacgaccaccaaggcgagaagaaaatggccaatgatgatcatggcgatgccgctggacctgtggtcacctacgaggatggtgatggggattggatgctggttggggacgtgccatgggatgattttgcacgatctgtgaaacgcctgaagatactgggttaactgaactgaaggagatgcatgcgtgagttgatggagcacagctcggttttggttgcctggcatctgcgtgtgggtgtgcactgatgtatgtacatgttttcgttttcagtcaggatgttaggacgagagaaagagctttctgtcaaagactatatactgctagcttatatatactgtagttgggcacatctcatgtgtgcccagggctaggttttgagaatgtttacagagttctgtgtttttacaccttctatatgttttgcaaactgatcttgtactataatactacttttatttatttctctcttttttttc

SEQ ID NO: 23247 - DNA, 1405 bp, Oryza sativa
  ref <308>: DATABASE ACCESSION NUMBER: AK073366
  ref <309>: DATABASE ENTRY DATE: 2001-12-06
tggtggtgggtgagtggagctcgcggatctcgccatggcgggcggcggcggcggcggagggtggtggtgggtggagcggtacgggccgtgcgtggggatggtgatggtgcagtggttctacgcggcggtggacatggcgctcaaggcggcgtacgggatggggatgcgccccatcgtcttcgtcgcctaccgccaggggatcgccgccgccacgctcctcctcgcctcgctcgccgccagggggtgggacctccgccgccacatggccgtcggcgccccggcgttcgccctcctcttcgccgcctccctcgccagcgcgacgggtctgtacttctacttcctggggctgcagctcgcgtcgccgtccatggccagggccaccaccaacctcgcccccggcattaccttcgccatcgccgccgtaatcgggttggagaaggtggatttgaggagttcgaggagcttggccaagatcgccggcaccgtcgtctgcctcgccggagcgatggccatggcgttcttcaaggggcccaagctactcggcgcggttctcgtcgcggcgaccaccgatgatgactgggtgaaaggaggcatctacctcatcggaaatgctttctgcgtctccatttggtacatcttgcaggtgccggtttgcagatcgtaccttgatccactgtctctggcaacatggatgtgcttcttagcgaccttgcaatgcgccgtgatggcattcttcctagaatcaaactacttacagatttggaaactagcttcgatttgggagctcccctgcattttatgtggaggtgtttttgcctctggcgcaaacttctttctccaatcctggtgcatatcagtgaaaggccccctttatagcgcaatctttacaccactgagtgctgtgattacaacaatattatctaccatcttccttcatgaggaacttcatataggaagcatattaggtgcaattgcaatcatcattgggttgtacgttgtgctatggggcaaagcagatgatgcaaagagtgaggggctgaccatcctgtcaaatgattccaaaaggataactgaacctgaatgtacaggcgtcaaagttgaatgtggaaccaatctttcagtaccactgttatctgagtccttaaccagactgaatgaacaaatggataatctggcaaaatgctcaacatgatgcttgacgaagaatcgaagattgctggaggttgctgtcaaaactgatataaccttccatgtaaaaggaaaatactgccgtcagcctgtcaccgatagagcatttcgtagttaaaacggtcgaattccttgttcaggcctccttttgaatcagggctttgtggaggaattttgtatgactcaaatgctataaaaaatttcctatcattgtacc

SEQ ID NO: 23248 - DNA, 1623 bp, Oryza sativa
  ref <308>: DATABASE ACCESSION NUMBER: AK073367
  ref <309>: DATABASE ENTRY DATE: 2001-12-06
ggcaaagcttctccagatggcatcgcttataatatgggatgaggcctccatgacaaagaggcaagcggttgaggccctcgatatgagcatgagagatataatgggttgtccacgttctccgtttggagggaagacgattgtgtttggaggggatttcaggcaggtgctcccggtcattaggaagggcactaggtctcagataacagaagccactctacgcaggtcctatctttgggattgtatggttcaattaaagcttgttcgcaatatgagggcgcagagcgacgcgtggtttgcggactacctccttcgagttgggaatggaaccgaggaggtgaacaaggaaggaaacataggccttccttcggatatttgcttagagtgcaaagggaatgaaacggacctcgaaaggctcatcgataccgtgttccctaacctaaacgataacctgacggacccaaactacatcatatgtagggccatattgtccactcggaatgagttcgtcgatcgaataaacatggagatgattgagcgggttagaggagatgtgatgacatatcatagttttgactgagcagaggatgacactcataactattacccgccaaaattcttgaactctataactccaaatgggctacctccgcatctgcttaagctgaagataaactgccccatcatgcttttgaggaacattgacccagccaacagccaacggactttgcaatgggacaaggctggtggttcgtcagttcggaaaaaatgctattgacgcggagattgttgtagggcagcatgctggaaagagagttttccttcctcggatacctctatgtccttctgatgatgagatgttcccatttcgcttcaagaggaagcaatttccggttagattgagctttgcattgaccatcaataaggcgcagggtcaaacaattccaaatgcaggcgtctacttaccagagcctgtcttctcccatggtcaactatacgttgcactgtcaagagcaacctctagaacaaacataaaaatactatcgatgccggtagaagacaagaaacaaaagaaaaagtctaagcgtactggcgtgaaggacaatgagaagaaaggaaaggaattgtctaaacaagctgcaacatacacaaaaaatattgtgtatagagaggtcctcacagattagaaaagtaaacatttactttcttggtctgccccttctcctgtatatgcctacatccactccttccccgagcagtccctccggccgcctcctcgttatggctgactcagagaccaaaaccgttgtagtcggctgctcgccgaggagttgcaggtgatcaggagagaagcagccaggtccaggatgaagcaattcactgttatgaacaaattcaagatgaagtccttacttgtaagctgacagttatttcttcttctttttttaaaacaatcgtagttggtttgtacatgtcttgcagcttagtactgatgttagcagatttatgaggttctgctttagttcagatttccaattgcagtttagcatttcttgtaatcatgttgtggcagtccagtttccagtggggtactgaataacacttgagtggagatcatctgaactg

SEQ ID NO: 23249 - DNA, 1591 bp, Oryza sativa
  ref <308>: DATABASE ACCESSION NUMBER: AK073368
  ref <309>: DATABASE ENTRY DATE: 2001-12-06
gtgtcgagtccatccatcgtcttgctcgcaactcgatcgcacaaggagcaagcaaatcgcgattcgatctgactcatcatccaccgaggtgccttgcttccgcttctcggatcgccctcgctcgcagtcgcaccatcaatcctttacttgagacgaggttcgtttgggcttgccctatccctccctcctctctctagacgcttgattcgctcggtgtagattcatcagatagattactaggacaagggcaccgggagatgagatgatcacgcggtcagatggatagataaagatgagatggggctcaaggtggaggacgacccgccgtcctcaggctcagttgcagatgcagatgatagcaccgacagactttgccgagtctgtcactgtgtcgagcctgatctcagaggacactccgcccttgctttcttaggcattctaccgccgccttcttctccagatgaagatgcagatgatgttgctaccgccaccgccaccaacaacaatgtcctcgagttcgtaagcccccgcggcgagatttttgtctgcaccgccgccaccaccgacctggaatcaggccctctgcatcaccaccaccatctcatggatctaggatgctcctgcaagaacgaccttgctcttgcgcattacgcctgcgcactcaagtggttcatcacccatggttctactgtatgcgagatttgcggacatgtcgctgtaaatgtaaggcctgcggatttcaataaggtccttgcctccttgaaggaatatgaagctctcagggaaaggacttccactggagacctctcttacttgcattatggggcagattcaggtgtcgatccagacgctgtcgccgcgatacgcagacagcgcctctccgagatatcctcatggttcaaccctcaaaattcacacctcgctatttctcagggccaaaccgaacaaacacctgctagtccaagtaataattctatacaccatggtgctgtggtaacaacagtagtacacacaagatggagtttggagggtactggagtgtttcttgccattggcctaggtgttattgttcttgcatggttagttgctccacatgttggtaagaaagctgctgtgatttgtcttcacatgcttcttggaggtttatgtgcgttgactataataatctccctgagatttgttttcccaaggatccaatatggatctatgcgatgttgggcgatcttgtttgtgttttggttcctggtttttggagtttgggcatcacggacccacagtatacgctcctcatgaggatggagatcatggtgagaaagtaggtttcggtcttatactatccacatccgctgtgcagtgatagatatggcatctttgtgtatacccatctctatatatattgcttctgaatttttcgaattaaatatgtcagatgtatatgcatgaccacaagaaaaagggaaagtttgttattggtgttacagtagactgctagtattaatttgatatacatctagactaccatatagccttaaaactgataaattatgcttcaagaaaaagttaaacagataaaatgggaatacaaggtctg

SEQ ID NO: 23250 - DNA, 1660 bp, Oryza sativa
  ref <308>: DATABASE ACCESSION NUMBER: AK073369
  ref <309>: DATABASE ENTRY DATE: 2001-12-06
gcacaacaaaagagtttccccctccgcctccgaatcccaaccccaccgccgccgccgcaaaccgtctcgccgtcgcctcgcaccggcggcgagaatggcgaagaagaacaaggagcccgcgtccgacgacgccgcggccatccgcaccctcttctccgcagacaaccccttccgccgcaagccctccgacgaccagcccgctccaccggcgcccaccgccgcggcgccccgaggcaagcaccccgaacccgaggtcgctgagccgtccgcgaagtcgcgcagggatgagccccggcgcaagaggaagcgggacgaggtcgaggccggccacgagcggcggaggctcggcggcgcacccgcgcctcctcttccggtcgtcggggagaagaggaaggtgcccgaagaggtggctgcggcggcgggggcagggcaagaggaggaggaggcgttcgacgacgagagcaagctgctgaggacggtcttcgtggggaacctgccgctcaagaccaagaggaaggcgctcaccaaggagtttgcggcgttcggcgagatcgagtccgtcaggatacgctccgtgccactcaccgacaccaagattccaaggaaaggagccgtcataaaaggaaaaatcaatgattctgtcgacaatgtacatgcctatattgtgttcaaagatgagcagggtgcacgtgctgctttatctcataatatggccctgtttgatggcaatcatgtccgtgtcgatatggcatgtccacctcgtaagaaacttaaaggcgaaggacctctttatgacagaaagcggacagtttttgttggtaatcttccgtttgatataaaggatgaagaggtgtaccaaaagttctgtggttccagtggttcagaaggtgatgttgaagctatacgtgttgttcgagatccagatacaagtctaggaaagggtatcgcctatgttttgttcaagacaagggaggctgcaaacactgtcgtaagaaaacaggatttcaagattagagatcgccttctgaggcttgcacatgcaaaatcagctgatgcaacaccaaagaagacgacggatgctggcaaaacaaagggtggatcgaaacacaagacagctttaacaccaagcagcaaatcccatgaaggcagtgacaagaccaaacggaaggcgtcaactttgtcataccaaggccttagggcaagcaaatctggtgtggtgaagaaggcgaaggtgagccagcgtccaagttaccaggggaagcagcaaggcaggactagtgagacaggacatgatgctagttctcaaaaagccaagcgccctgctgttgcagcaaggaaggcaaagcaactagccaagaaacgcaagttggatgctcaaactcctgaaaatacacatcggagcaaaaaagcaaagaagtaaccatccttaacttgaagattgtcatcctgtctttgtacaagggggttgagtcagattttggacaaaatgagctcctgacattgttaaaccccatgcaagagtgatcttgaaatgcaaggctgatacaaattcgtagtactgtattacttaaattaaagtttgcgctcatgtatactgacattaatgttgttttttccctgtaacatcgtgcactgatatcattcattctgcttttgattg

SEQ ID NO: 23251 - DNA, 1176 bp, Oryza sativa
  ref <308>: DATABASE ACCESSION NUMBER: AK073370
  ref <309>: DATABASE ENTRY DATE: 2001-12-06
gaggagaaccctaaccctcctccggagccggaggaggaggaggaggtgtcgtcccctcccccgcccccgcctcctccccccggcttcctctccgactcctcctccgatgacgaggagggcggggacctcgacctcgggatggggggcatggacgccgccgccgcccgcgcctacctcagccgcctcgtccaccaccacctctacgacgacgagcccatcgacgtcgcggccgccgcggtgtccctgctgcagcggagcggcctccaccagggcggcggcggcggcgagagcgccccggccgccgccgcgtccatcgccgcgctgcccacggtcgaggtgtccgagcccgccacggcctgcgccatctgcaaggacgacctccccctcgctgcccccgcccggaggctcccctgcggccacctctaccactccgaatgcatcgtgcagtggctggagatgcgcaactcctgccccgtctgccgctcccgcctcccgtccgacgagccccaggacgcggcggcgccgtctgacccgggccccgcgcccatgcggatcacgatcaggctcagcaccaaccgacgacgcgtccgcaccagcagcgatgcggctccgcccgtcgcggcgtcgcccacccagctcgcgcaggccgtgaccggggaaggaggtggtggacctgcgaatagcacggagactgtgtcgtctgagtggccaccgccctctgagtccgatgccgtcatgtcagacgcccgtgagggccagagattcttcgattgaaccagagcttagagatgcaggtgataaggaagctgttgttagctgtcaaccaagaagagtagaaagaaggcaaccatatgccctagttctttgaggtttctgcttttgcttgagctagttgcctcagcaaaagcacctttctcgccggataaaggcttattgatagatggtcgaattaagttgtcctatgaagagaccaagggcatcgttgcattgcttctcaataccttgtacattggtcaaacttgtttcttttagcaattagcaataaatatatgtatacatggttgtgtttgtactttaccggttactcttcaacttgaggcaggatatagatgagaacctactggtgtctccattgcactctactttgttgatgaatgatgaagcagccttcttgtc

SEQ ID NO: 23252 - DNA, 1354 bp, Oryza sativa
  ref <308>: DATABASE ACCESSION NUMBER: AK073371
  ref <309>: DATABASE ENTRY DATE: 2001-12-06
ggtccgtctccgttgacagtcaccccaatcatcacagtttatcccctctctcgtgcttcaaaaaaaaaaaagaaaaaaagaaataaagaaaaaaaaagtgaccgccggtcttctcccccgcctcgccgccgcgcgcacgcagccgccggcgaactggccccggaggcgcctcttccttcccaaccccgccctagcccttctcccctgctcggcctcctcgcgcgcacggccggtcgctgggtttggagccagccaggggggccgatgctgccgcctgccgcctcctcgttcgcatcgattccaagcttgtaggtagcacttctaaacagtaaggagattttgagcttcccataggaagggcattttataaactgggcagcagacatgtcaggcatcgatggtaacaaaccaccttcagaggttttgattgatgagaatgatgactgggtgatagtcaagaagcagcgaatcaccatcctgatccctccaccatcacctgcagctgcaagtcttcaggatgatatgcaaaaaataagttctgaacaagcttgtatagccaaaaagagcatggaaaactgtgatgctgcaagaaagaagcatccaaagcagatgacaaccaacaaagctcaggagccacttctagagggcatcaaagtttctgccaacatcaagaaagctcaagaaattgctacatcttctcaccatcctgttgcccctgttgttaaagcaaaccatgcttccatccaaggactgtttcatgagaatattgagaaagcaggaaattcgtttggaaacatttataaggaagagctgccagttatttcttcccaagttacgaataggataatgcgagcacgacttctcgagagacgggttgctggatttggtgggctgaagaattggcttttcacttgtggtttcggatggttcgtcgacatactggacagtgaaaagctggggatgtatcagatagtttcccttacaatgaaccagctaaaagatatgggtcttgatgctgtaggtccacggaggaaattgatccatgccattgagtgtgtttcccagcccaacgaatttgagatgttttcttgatctcaagcgtctaatcagttcattataaaccactgctactatatttgagaggaatgcctgcagtagtcagagttcaggatctattttgacctggctgaaaatgacaccagttctgggggttttggaagtagaaaattagaagcaacagacagttcgacctatattagaaaatgcttatgagatgatccctgtaaaaatattttgcatctgagatgttcagttgcactactattttgcatgagagttctttaatggaattgcc

SEQ ID NO: 23253 - DNA, 1804 bp, Oryza sativa
  ref <308>: DATABASE ACCESSION NUMBER: AK073372
  ref <309>: DATABASE ENTRY DATE: 2001-12-06
gcccgtgctctctccaacggcgcacagcgagcgaaaccccgcgcattggacgcgaatccgcaccgagcaggaggaggaggaggaattccgaacttatccccccacctccaccaccacaaccgccgcccaccgccgattcccaaattccccgcgccgccgccaccgccgccgccgccggaggaatttgttgctgctgctgttgttttggcgagtcctggaggtggtggcgcagtggtgcggtgtggtgagtttggttgtgttggtggtggtggcttgcgtggtgaggctgagccctagggcgatggcggggagcaggggggtggggatgggagtgggggatccgagtagcccgagcgcgagggctggggcggcggcggaggaggaggcgggggcggggaaggtgaagctgctgtgcagcttcggggggcggatcgcgccgaggcaagggtacggggcgctgcgctacgtcggcgggcagatgcggctcatctccgtgccgcgcgtcgcctcgttcggggagctcatgaggaaggtggaggcggtggacgacgcggggggagccggcggcggcggcggcggcggggtgctcgtcaagtaccagctccccggtgaggacctcgactcgctcatctccgtgtcctgcacggaggactacgagaacatgatggaggagtacgagaagctggccgccgccgcgcccgacggctccgccaagctccgggtgttcctcttcccggcctccgggagcgaggcggccgccgcgggggcgtccggctccgggtcgcacctcgctgccgccgtcgacgagtcggggcagcgctacatcgacgccatcaactgcgtctccgcggagtccgtcgcggccatgcggcggaaggagagcgtcgccagcgctgggtcatcggcgcacaactccgaggcctccgagcacggcggtgccgtcgaaggtatgtcgccgcaggctgccgtgccgccgccttcgcttccgccggaatatctgtattcaggtgggaacaaataccatggcgccttcccggactccttgggattcagtgccgtgacagcttcatctccggcgatgggtatccaggcacaaaatcatatcatggttagaacagagccattgccgccgcagccgcatcaagttgcctcttacgcgccatcgcatcagccgccacaagttgcttcttatgcgccgcatcaacaaccacaagttgcctcttatgcaccacagcagcagcagcagcagcagcagcctcaagttgcttcatacattccacagatggcgcagtcgttcagggagccacagcaagtccaatacatcaatgcgcagcaattgggtgtgcatggtgtgccccaatctgtcaattttgttcctgtgcaaatgagcccatatatgcccagcattccggtgacgaactccatgccaacctctgccgctcaagtcggcaccatgaagccagcttctccagcttcagaacctgttttagagaacgttcataacacaaggccaatgcaagctacaggtgatcagagttacagggtgctacagccactgtcacagcttcctcctttgcctcctgtgcatttgcagactagtgatgcacacagatatggcgtccagacagtaatgacaagttcagcgagcacgccgttggtgacaacctcaggtacaattccaatggtgattagctcggctaccatgcctgcattgaggtatgatgattgcacaatgtgccagaaagcactgcctcatgctcattcggacaacatgatccaagagcagggcactccacatggagtg

SEQ ID NO: 23254 - DNA, 1753 bp, Oryza sativa
  ref <308>: DATABASE ACCESSION NUMBER: AK073373
  ref <309>: DATABASE ENTRY DATE: 2001-12-06
ggcaaaaaaccacaaacccaacgaagaaggaaaaaaaaaggaggaaaagaaaagaggaggaaagcgaagaggttggagagagacgctcgtctccacgtcgccgccatggccgcccgcgccgccgccgccgcgttcctgctgctgctcatcgtcggcgcggccaccgcggcgccggacatgtcgatcatctcctacaacgcggagcacggggcgcgggggctggaggaggggcccacggaggccgaggcgcgcgccgcgtacgacctctggctcgccgagaacggcggcggctcgcccaacgcgctcggcggcgagcacgagcgccggttcctcgtgttctgggacaacctcaagttcgtcgacgcccacaacgcccgcgccgacgagcgcggcgggttccgcctcgggatgaaccgcttcgccgatctcaccaacgaggagttcagcgcgaccttcctcggcgccaaggtcgccgagaggagccgcgccgccggggagaggtaccgccacgacggggtggaggagctgccggagtccgtcgactggagggagaagggcgccgtcgcccccgtcaagaaccagggccaatgcggaagctgctgggccttctccgcagtaagcacagtagaaagcatcaaccaacttgttactggtgagatgatcacattgtcggaacaagaacttgtagaatgctcaaccaatggacagaacagtggctgcaacggtgggctcatggatgatgcctttgacttcatcattaagaatggaggcattgatactgaagatgactatccttacaaagctgtagatggcaagtgtgacatcaacagggaaaatgctaaggttgtgagcatcgatggctttgaggatgtacctcaaaatgatgagaaatcacttcagaaggcggttgctcaccaaccagtcagtgttgctattgaggctggtggccgcgagttccagctctatcattcgggcgtcttcagcggtaggtgtggcacaagccttgaccatggtgtggttgccgtcggttatggcactgacaatggcaaagactactggattgtccgcaactcttggggcccgaagtggggtgagtctggatacgttcgcatggagcgcaatatcaatgtgaccacggggaagtgtggcattgccatgatggcatcataccctaccaagagcggagcaaacccacccaagccatctccgactcctccaactcctccaacaccacctcccccatccgcccctgaccatgtctgcgatgataacttctcttgcccagcgggcagcacctgctgctgcgcattcggcttcaggaatctctgcttggtttggggctgttgcccagttgaaggtgcaacctgctgcaaggatcatgccagctgctgcccgcctgactaccctgtctgcaacacccgggctggaacctgctcagcgagcaagaacagcccattgtgcgtgaaggctttgaagcgcacgctcgctaagctgaacaccgcatgagctcatcgataacatgtaatcggcgaggagaggggatgaggcagcgtggagcctttctgaaatttctgcttccgtgcctccatatatcgttgtcgcattttgaggggacagcttatttactctactgcctgccttttatcttacagtgatctgtgtacatagctcgatccaatttgtactcttatttatcttctccaatttgtactctatataatttatcttctcaagaatacattaacgaagatcc

SEQ ID NO: 23255 - DNA, 971 bp, Oryza sativa
  ref <308>: DATABASE ACCESSION NUMBER: AK073374
  ref <309>: DATABASE ENTRY DATE: 2001-12-06
gtagcgaagaaggggacacgcgacgcgaccccgcggccaccgatccggcggaggcggggcattcccggcggccagatccgcggcggcgccgaggatgacgggagggggagggggtggaggaggcacggcggcgcaggcgtacggggaggcgtggtactgggacgagcggtacaggaaggaggccggcccgttcgactggtaccagaagtaccccgccctcgcgccgctgctcgccgtctacgtccgccgccaccaccgcctcctcctcgccggctgcggcaactccgtttttggtgaaaacatggttgatgatggttatcaagacatcgtcaacatagatatatcatcagtggtgattgatcaaatgaagaagaaatatcgtgacaagcctcatcttaaatacatgaagatggatgtaaggaactggctgaattcgagtcaggttcattcgatgctgttattggcaaaggaacgctagattctataatgtgtggccaaaattcacaagagaatgcgtctcagatgctagaggaggtcaatagaattctcaaggacaagggagtttatattctgatcacttatggcgacccaagttatcgattgcgtctccttaaagacctgcagctttggacagtaaagcttcatgtcatagatagatgggaaaggagtcgggagccttcatgggaactgacgaagccactgcctttagatggtgatagcacatcaattgttagtcttcttggcccaaaacctgatgttcactatatttatgtctgtataaagcgacgacgggaagtcgcatttggattcgagggctgaagtcaatggagaagcatagtgatttcacctcataacccttttggatcatcttgtataaccagtgtaggaataatgtagtgcagatactgtataattatgctgttgcttgatgaatcacttggttttattggcagtagttaatttgatttttc

SEQ ID NO: 23256 - DNA, 1950 bp, Oryza sativa
  ref <308>: DATABASE ACCESSION NUMBER: AK073375
  ref <309>: DATABASE ENTRY DATE: 2001-12-06
gatccttttcttccctacccagccgtcacgcactcacgcttcctccggcggcggcaaggcgacggcatcggcggccaaggcgcgggcggcggcggcggcggcgagcaaggtgcaggcgacgtcatcggcaaccaaggcgcgggcggcggcggcggcggaagcgggaggcggaggagtgggagaggcggaagagggggaggaggaggaggaggcggcagagacgagaggaccccgtggatgtgctcggggaggaggtgatggggcgggtgatggagctcctggacgcacgcagcacctggcgctgggtcgccgccgacgaccgcctctgggcacccaaggcttatttgatgagagctggggctgtcattcatagccatgggatggaaacttgcattgcaaccatgcttaatactggtgcaaaagagtttagggtgaacctacttgtctcttttccccatgaatcttagctaatgctccagttctgctttatatttctcatgaagttagctgtaatgtttacagaaatgtggtagtactaagaaaatgcactatttctcatgtagtgtaccacattatggacatttttctgtctgatctaatgtatcaaattgaaaaacggataattgttcatatttttagatttccgcttacttttccattacaagaacttcaatggtattaacaattaagtgctaatcttctatatgatgcactattcaataaaattggagattatgtttgctccatttccttttcatttcatggcagacattattatatatgtactagaaagagtggtgaacatttttttttaagatttgatctattattgatttcacacagacatgcatcagctatcaggaccagttggaataattgaaatgctaattgagaactttgcatgcaccacatagtacagcaactactcaagccaagttctatttactagtgaagccatttccaacttatatcaatccatttattaggaatatgcatgtacattgtgtgtttactgagtttttacttgtagaatgtaccatcctagtataattattttaaataaaactcccttagttgatctctgcaaattaggtggctagctgtccttgcagtgagttgtcgtagtacaaatttgaaacagtcttcgggcttcagattttccatctacattaattatgaaaatgtcacctacatacatctcaattctaatataagttaacatttgcaagtgggagccaattaaactgtacttcagcacttatcttctttttatttatttactagctatgatttgcgacctgtgggtgagcaatcaacttcttgctgaagtgtcagagaagggtacctgaaggaacagaagatcaacactaacttaaaggctcatacatcatgtaagctaaaatcagtttgttcccatagtttgtgagataaattgcaatccttgctgcttgtaaattgtaattgaatctgttacgattgcaattatactgcttcaacataaatttctcataaaatggaactggtaatttaatattggtggattgtgagaatatcgaagctatgctacagattgaattaaatggaactacatcagttatgttattgacacttatcctgcacatttgacactgatcttcaattctgtattgaaatagtaggtgttgcatagattacttatcattaaatggagtattattataatctatatatctgacccttaatacttttgtctttctgataatctgattcaagtttttagatgctcaacttatcatggcggtcacaagatattttggagtggcatttctctacaagggaaatgccttgcctgttgtagatttgccatcgttttgtctcattttgtagattgtataggagaatttctctttttgtacaactaacctatgtacatggcatttgtaattaaatggaattggtatattcagtact

SEQ ID NO: 23257 - DNA, 1910 bp, Oryza sativa
  ref <308>: DATABASE ACCESSION NUMBER: AK073376
  ref <309>: DATABASE ENTRY DATE: 2001-12-06
ggctcgattccaacgtctcaaccctgacctagcgccgccggccagccgctcgccgcctcctccgcgccctcacctcacagttcccacccgtgcgcctttccacgggctagggcgcctgcggcgcggcggaacagcagccgcagcagcagcaggaggaggaggaggccatgaagcttgacgtgaacgcgctccgctacctctccaaggatgacttccgcgtcctcaccgccgtcgagatgggcatgcgtaaccacgagatcgttcctgccgagctcgtcgaccgcatcgccggattgaagcacggaggcacatataaagtgctgcggaatttgttgaagaacaaattggtgcatcatgatgctactaaatatgatggttatcggctcacatatcttgggtatgatttcctcgccatcaaaaccttggttaatcgtggagtatttgcttcagttggtcggcaaattggtgttggaaaggagtcagacatctttgaggttgccacagaggatggtaccgttttggccatgaagcttcataggttgggtaggacatcttttagggctgtgaaatccaagcgtgactatttggcacaccggaggagctttaattggttatacctgtcacgactagcggccctaaaggaatttgcttttatgaaggctttaggagaccatggatttccagttcccactgctgttgactgcaaccggcattgtgtgatcatgtcacttgtgcagggatatccactcgttcaagtaaaagagttacaaaatccagacgatgtttttgacacaattcttggccttgttgttcgtttggcggagcatgggctgatacattgtgattttaacgagttcaatatcatgattgatgatgatgagaaagttacaatgattgacttcccgcagatggtatctgttaaacatcggaatgcccagatgttttttgatcgagatattgaatgcatctacaaattctttaggaagaggtttcatctttcctcagagaaatgtgaagaacaggatgggtcagacattgatgatgatgagaatagcaggccatcctttctgtctatacaaaaggctgctggttcattggacaaggagctagctgccagtggtttcacccgaaaagagcaagttgagatggacaagtacattgaccaaaatgctgaagaagagagctcagatgatgattcaacatcagaacaagataatgaggatggtgatgatgtggctgttaaaatcggttccttaaaaatagcagagcaggattctgctgaggtgcctgattgcactcttgcttcaaaagattcaaatgaacctgaaacttttgccaaagagaacgaaacgagcacaagttgcagtggtgagaacaactcaataaatccatccccttctagcaatggggacgctaaggagccaactgaatcacaagacaacgatgatagtgacgatgactcatcagatgatcctgatggcgaggatgatgatgctttggcaaagcaactgaacaagcaaaggaagagggcaattgctgccgcgcatgggcggagaaggcctatctcctcaaggaatgcatacaagtacaagggaaagggcaccatgaattccaaaatcgagaggcaggcatgcaaatggtgattgttgtacgagtcatttatagcaggaatacttgagataagtcgagcttacgttttgtacggctgtaagaactgatgactgttatatggaacgagcattatgtgtgttcttcacagttttggtcgtaagagtgatgcttcgtccattattagcctgtcgaatagttaacagttaaagcgccatttactctatatgcatcatctgatgagtgttgttgcttgctgctggacagcctgaattgaagcaaagttcagtttttttgtgcct

SEQ ID NO: 23258 - DNA, 1070 bp, Oryza sativa
  ref <308>: DATABASE ACCESSION NUMBER: AK073377
  ref <309>: DATABASE ENTRY DATE: 2001-12-06
gcgtctcgtctttcccatctcgcggcggctgcgtctctctctcgatctctcggcggcggccatggcggactaccacttcgtgtacaaggacgtggagggggcgagcacggagtgggacgacatccagcgacgcctggggaacctgccgccgaagccggagccgttcaagccgccggcgtacgcgcccaaggtcgacgccgacgagcagcccaagtccaaggaatggctcgacgagcgggagcccgacgagctggaggatctcgaggacgacctcgacgacgaccgcttcctcgagcagtataggaggatgaggcttgcagagctcagggaggcagcaaaggccgcgaaattcggctctattgtgcctatcactggctctgattttgtccgagaggtctcccaggccccatccgatgtctgggttgtggtcttcctctacaaggatggaataccagaatgtgggttgcttcagacttgtctggatgaattggctacaagatacccagcaactaagtttgttaaaatcatctctacagactgcattcccaactacccagatcgaaatgtccctactatacttgtgtacaataacagtgctgttaaagggacttatgtcggtctgcagaagtttggtggaaaaaggtgcacacctgagtctgttgcattggccctttgccagtcagagccagtcctgaatgatgggcagagcggcggtgattcatcccgggacaatgtcatagaaggcgttcgcaggaagttcatcgaaaaggttgtcgcccagcatgaagagcgggaggaagatgacgatagtgactaaacatactctcctagtatgtctcagttcactgatactattgatgatgtgggtcaagttttgcctgagatcactaattgtactcatatttggttctgttctgaaaatgctgaattttctctctacgatgagctgcaaaaactcaggtttagcagcagcttgttgtggtacatgtggtaaattggtaatgtatcctggtgttccttgtattgattgtggcactttcagctaaaatgaaaatggataaatttcatgg

SEQ ID NO: 23259 - DNA, 996 bp, Oryza sativa
  ref <308>: DATABASE ACCESSION NUMBER: AK099352
  ref <309>: DATABASE ENTRY DATE: 2002-08-28
gactactactactccgtcctcctcttcaccggttagatcggcggcggcggcggcgatgatgagggcacggtgggcggcggggatgctgcgccgcgctagctctggcgaggcttcgctcgccgcgcgcgcggtcttcgcgcgcggcttcctcggcctcaacatgaaggcgagtaaggagaccatcgagaagaaggagaaggataaggccaggcttatggatgaaatgagcagggggtacttcgccgacatcgcagagatacgcaagaacggcggcaagcttgcgacagcgaataagatcatcattccggaaatcgcagccgtgaagttccctgatctttctgtgaagtcccctgatggcaggacagtgaatttgccgcttgtcgcacctccgcgaaacgatgatccccagactggcaatacagtggacacacaaaatgatgattgtaaggctggtgatatggtggttcctgatgcttcattggtgtgcctttcctttcgcgcaagctcccagaaaatggcagaaacgtggagcctaccttttcttgatgcatttagttctgctgggaatattcaagtgtatgaggtctcatttattgattcatggctgttatcatcaagtcctgtgagacaagtattcctcaaggtgatgacaaaatccaacaatccacagagacatgctgtatatgcctttggtgaccactattatttcaggaagaagcttcatatccttaaccttcttactgggtacatatacctggttgatcgcctcggaagagtgaggtggcaaggtttcggatctgcgacgcaggaagagttgtcatcgctaactgcatgtacctccattttgttagatggaaaatgagatttagatggatactgaaatatttggggttggagaaattttgtcattgcgaatccatagctgtatcacctctcgtttcagcatattgagggatgattttttttcctcgcggttaataagcgtaaattggattg

SEQ ID NO: 23260 - DNA, 1146 bp, Oryza sativa
  ref <308>: DATABASE ACCESSION NUMBER: AK073378
  ref <309>: DATABASE ENTRY DATE: 2001-12-06
gtgcgttccccatttgagctagctaagctgctgtactatagcagcagctcttgctcaccagctagcagcaagctatacacctctctttctctcctctctatctttctcaagccaatatctctctcgctaattcgattgggttatcaggccttcatcgtaatccagcttcagctgtgtgtctgtgattgtgtttgtgttgtgtgtgtgagagagagaggcgaagaaattaagaagagcgagagagagagagagctgctgctatacagacttacagaggacgaagatgatgtcgtcgagggaacgcaagaaagcggcggcgctacaggagaagctgcaaatcctccgctccatcactcactcccacgctctgagcaacacgtccatcttaatggacgcgtccaagtacatcaaggagctgaagcagaaggtcgtgaggctgaaccaggagatcgcttgcgcgcaagacgctctcagacaaaatcgggtgaccgtggaaaccctaagacacgggttcctcgtcaacgtcttctccggcaagagctgcccggggctcctcgtctccatcctcgaggccttcgacgagctcggcctcagcgtcctcgaggccacggcctcctgcaccgacaccttccgcctagaagccatcggtagcgagaacctgatggagaaggtggacgagcacgtcgtgaagcaggccgtgctgcgggcgatcaggagctgctccggcagcggcggcgatcaccacgacgacgacgacgacgacgacgacgagtaagcacagaagcggatcgatcgagctctgttaatttcgatctcctcctcctcgccggccggcggcgagcatggccgatcgatcgcagcaattgctcgaatgattagtctgtcctattctttctttctccattttcccccggcattaatttcttctcttttctcctgtctgatctgtcgtctccgccgtctacatggcggcgcatgcatgcatgataggctcctataattcggtgaaacgaagtacaccgaagcatttcctgtgtaataggactactgttaattagggggagcatatcatcataattattgatatatgtatatgtagtctatggcaaataagatcatgtaacatatgagatgggattcagaggc

SEQ ID NO: 23261 - DNA, 1482 bp, Oryza sativa
  ref <308>: DATABASE ACCESSION NUMBER: AK073379
  ref <309>: DATABASE ENTRY DATE: 2001-12-06
gggttgcgtctcctccacacgctagcgagtagctatacaacgtacctttcccttcctcttgctcctcctcgtcgtcgtcttgctcgtcctgcctgatcaatctttctcgctcttatctcctctcatctctcaatctctctcagataattaaaccaagtgtgcagatagatatatagctgctgctgcatgtgtagggattgcctctgacatattactattccttgcatgcgaaagagagactagctcttgtcactctcctctgcccttcttccttcgattcaagaaggcacagtagtgtgtatatatatacaggcatacataccgttcttgccgcctctagtttgggtgtgattgaatgacaaaggagatggccgatgatgtcgagtaccatgaggagtttgtgacgaatccgagggggttgcggctcttcacatgcggctggcttcctgcttcttcctcccccaaggcgctcatcttcctttgccatggctacggcatggaggtcagtggcttcatgaaagcatgtggggtcgagctggccacggcgggttacggcgtgttcggcatcgattatgaggggcatggcaagtccatgggtgccagatgctacatccagaagttcgagcatcttgtcgatgactgcgacagattcttcaaatcaatatgtgagctggaggagtacagagacaagagccggttcctgtacggggagtcgatgggcggcgcggttgcgctgctgctgcaccgcaaggacccaaccttctgggacggcgccgtcctcgtcgcgccgatgtgcaagatatcggagaaggtgaagccgcatccgttggtggtgacgctcctgacgcaggtggaggagatcatccccaagtggaagatcgtccccaccaaggacgtcatcgactctgccttcaaagaccccatcaagcgcgaaaagatcaggaagaacaagctgatctaccaggacaagcccaggctgaagacggcgctggagctgctgcgaaccagcatcagcgtcgagcaaagcttgtcacaggtgagcatgccgttcttcatcctgcacggcgaggccgacaaggtgacggacccggaggtgagccgtgcgctgtacgagcgcgccgccagcgccgacaagaccatcaagctctacccggggatgtggcacggcctcaccgccggcgagccggaccacaacgtccacctcgtcttctccgacatcgtcgcctggctcgaccgccgcagccaccaccaggacagggcgagcattaccccgccggcggcctgcaccgacagcgccgccgccgctgcggcggacagcccagtgtcgcctgagccgccgcggcaaggcgccgccggcggcttcctctgcggcctaaccggccgagcaaatccccagcaatgtaggatgtaaaatatagaaagaggggaaaaaaaaagaactcccttgatatacaaaatgaaaggaatgcagatgttgtgatg

SEQ ID NO: 23262 - DNA, 901 bp, Oryza sativa
  ref <308>: DATABASE ACCESSION NUMBER: AK073380
  ref <309>: DATABASE ENTRY DATE: 2001-12-06
gaaaatcccaccctccgccatgcctcgcctccacctcctcctcctcgccgtcctcgccgtcgccgccgcggcggcggaagcggcggcggagaagaagccgacggcgtacgaggtcctggagtcctacgacttccccgtcggcatcctccccaagggggtcacctcctacacgctcgaggccaccacgggcgacttcacggcgacgctcgacaccggcgacgacgacgactcatcctcctccacctgcgagttcgccatcgagggctcctactcgctccgctaccagcgcgccatcaccggccgcatcgccacggggcacctcaccgacctccgcggcgtcgccgtcaaggtcctcttcttctggctcaacatcgtcgaggtcacccgccgcggggaccgcctcgagttctccgtcggcatcgcctccgccgacttcaccgtcgacaacttcctcgagtccccgcagtgcggctgcggcttcgactgcgacgacgacggcatctcctcctcctcgtccctcccgccgccgctcgagcccagcctgctgcgactgcgaggtgcgttctagaatccccatccttcctccaacccaatctgcgatgacgtcatcaatggggagctctattaattactgttggtactagtactagaaatgattcccaattaactgtctaaataagacgcaagtgtccccagcttttagatgggactctcacgagttcagaacaccatttcattctcatatgtatgggtggggtcttgtattgtactctatcaaggcagttcataaatagtatgaaattgggatcaataacgaagtcttcttcagttcacaactcgtttgaggttctccctgttctgtaacctgcaacttttagcaaaaacttgcagtgttggatgt

SEQ ID NO: 23263 - DNA, 1227 bp, Oryza sativa
  ref <308>: DATABASE ACCESSION NUMBER: AK073381
  ref <309>: DATABASE ENTRY DATE: 2001-12-06
gattcagacaacggtagtggagtgtgtgagtagctgaggaggtcgaccatggcggcggctagggttgcgatgtgggtggcgtgcgtgttggcaatggcggcggcgtgccaggggcggcttagggttgggtactacaagcggaagtgcgcgccggcggagtacgtcgtcagggccgtcgtcggcaacgccgtccgccagaaccccggcgtcggcgccggcatcgtccgcatgttcttccacgactgcttcgtccaggggtgtgacgcgtcggtgctgctcgacccgacggcggcgaacccgcagccggagaagctcggcccaccgaacttccccagcctgcgggggttcgaggtgatcgacgcggcgaaggcggcggtggagaaggcctgcccgggcgtcgtctcctgcgccgacatcatcgcgttcgcggcgcgcgacgcctccttcttccttagcggcggcggcatcagctaccgcatccccgcggggaggctcgacggacgcgtctccctcgccaacgagacgctcgcgttcctcccgccgccggtgttcaacctcacccagctcgtcgccagcttccaggcgaagggcgtcgacgccgacgacatggtcaccctctccggcgcgcacaccatcggccgctcccactgctcctccttcgccgaccgcctctcgccgccgtcggacatggaccccggcctcgccgccgcgctccggagcaagtgcccggcgagccccaacttcaccgacgacccgacggtggcgcaggacgcggtgacgccggacaggatggacaggcagtactaccggaacgtgctcgacaggaaggtgctgttcgactccgacgccgcgctgctggcgtcgcggccgacggcggcgatggtggcgcggaacgcggcggcgcgcgggaggtgggagaggaggttcgcgagggcgatggtgaagatgggcgggatcgaggtcaagaccgccgccaatggcgagatcaggaggatgtgcagggttgtcaacgagtaactgttaatttcagaggaggatgcatctagctacgtacgtgccattttgatttgttttcttcagaattcagaagcatgaattgtcacatttcaatattatttcgttgcttgattcgagatgatctggggcaaatgttgtatttgcacctgacggaattaattgtacgctccattagagatatgatcgaataaagtttttcagtttttagcc

SEQ ID NO: 23264 - DNA, 1807 bp, Oryza sativa
  ref <308>: DATABASE ACCESSION NUMBER: AK073382
  ref <309>: DATABASE ENTRY DATE: 2001-12-06
gtgctgcacgcctgcacggtatccccattccataaccattccagcaacagctgtctccttctctctccgccgccggcgaaaccgcaacggcgcagaggagaaaatgtgggaagccgaggagatcgaggacgaggaaactctagaggcgcttctagaagcttcccgaagcgcccagggccgggccgcgctctccgacgccctcgccgacaccctccacctcctgccggcctccacccaccgcctcctgctcctccgcctccgcctcctccgcaacctcctcgccggcgacgacctcaaccagggcaccttcgtcctcctctccggccccgccgcggtcgtctcctccgccctctcctccccctccgactcccccgacgtcgcgcgcgcgggcctccaggcgctgggcaacgccgcgctcgccggggagcaccaccgcgccgccgtctgggatgcgctcttccctggctcgctgctggagctcgcgcgggtcagggagaagggagtcctcgacccactgtgcatggtgatcgacacctgctgctccggcgaaggcggccgcgggaggctcgaggagctctgccacgaggagttagggctgcccatacttgtggaaatcgtcactactgcctggcaagtggggcatgatgaagaatggttagaatggcttctcttcaaaatctgtgttgaggagcaaaagtttgaaacattgtttgtagctttatgctcacgcaatgatgctgagcacagtgatggtgatgaatgcaaaactgagtttaatgctaagcatgcatatcttttgggtaaattgtcaaaatgtttggctaaccgacctaaagaagtcagtgtatcgatcagttttgcacttgatattttcaatgcacagaagcatgctgctgagattgtggattttacttgccgagttaactctcctcttccaactggtcaccctgcaattgatgtacttggatattcattggtgctcttgaaggatatatgtgcttgggaatcccctccgtcagacacacaggctcctgttgactcactgatgcagactggtcttgtaaagcatcttctaacgtacttacgtgagctagaacccccaagtatgatcagaaaatctatggcaaggggacaaggagatcatcaaccagccttaggaactgcaaaagtctgcccatacattggttacaggagagatgtagtcgctgtgattgctaattgcttgcatagaagcaaaaaagtgcaggatgaggtgaggcacctggatgggattattttactcttgcagcagtgtgttgttgatgaagaaaacccatacttgagggagtggggtctttttgctgtgaagaacttgcttgaaggaaatgaggaaaaccagaaggaggtatctggacttaagatgcaagaagctgttataactccagagattgctgacataggtctaagagtggagatagacaaggaaacaggacatccgaaactggttaataactgatgatactttccattttgatccttcatgtttgaggtgaaaagaaaagggagatcagactcacgtaccgacgttcctctcattaacggaagcaaactaatattgccgctgccttctgcacccccgggaagataggtgttgctttttttcattaatgttagtcatgttaatattgatggcgagcatttgaaccaccgggattcagatactttcttggagaaatgaatgctaatggttttttacgttgcatcaaaacagtgatgtggtgagatgtttctagatccactcttatcataggcgtccgttttttaatcc

SEQ ID NO: 23265 - DNA, 1808 bp, Oryza sativa
  ref <308>: DATABASE ACCESSION NUMBER: AK073383
  ref <309>: DATABASE ENTRY DATE: 2001-12-06
gaattagttcttccatttccacaactactccatatttccttttttctcatttcttcgatttgtgcgtcgaactgcagctgctggtatccagccgccgcttctccgtagctactttcaggccggccgaccgagcggacaggggcgtgcgagcgagacatggagaacgcagctggtggaagaagggcacaacaaacgcaagtgactgaggagaggcagaagaagatgaagcacaaggcggctcaggagattgctgatggcagcagcactagtgacacagtacatggtgctgctgatggtgtctgcttcccgtgtggtacaagtacagctacagcccacctcttgcaacccaagcactcacagccacagcacgagggttataattcaagttatcagaaggtgcttgcaaatgctgacatggacagagatagcaatagctcgacaatgcaaacacaagtccctactaatactagggagggaccaactttcacacaactactactcggagacgaagattttgacctaccaccatatgttcccgaagccgaagagaacaatcaattctatcaacaaacaatgaatgagaacctaaacatgaaccaattgggcaacaatgggatagaaactgctgagttggaacctcaggagcatataatgacgtttgcatcaagttttggtgtaggttcacagcttttaggttctcaagcaatagaagtagttgatgttgtaggaggtttaacttcacagtggggaacacaactgcatgggggtcatcttgcacgtgtaatttcatatatccgtgcatttcatgacccagagcagcagatcctttccaacctcgtcacgcatcaatctattgagacaatgttgaaccactatgcccaaactgcagagatgtcatattccatgagatatccagaaaatgcagttactcgtggacctcaaaatgtttctgggtttcctcaaaccaatggacagatcaacacactgaacaacatgaattctgagttccatttcttgcttgaacaagcaaagaatccagagaacaattccatgcgactcatcaacatcaggggccatctatgtgctttcagcattgatccgtttggaagccgtttcatacaacataagcttgagagagcaacaccggcagagttagctatggtgtatgaagaaattgttcctcatgcccacatgttggctattgatgtttttgccaactacgcggtccagaagattttcccaaatggaaattgacatttattttcaaacaaaaatatttgttattgattattacatcatgaatatacattttaaactttttacaaaaaataatgaaaatgtggaacttatctgagcttttttttttttaccctttcagcttcttgggtatggacctaccttctacagaagggaactcatcggtaaactaactggtcatgtggtagccttgagccttcacgtgtatggatgtcgagtgatgcagaaggctttcgaagtaagtgatatggatcagaggatagagatggccaacgaggttggcagaaatttgatgcagtgtgtatatgatcaaaacggcaatcacgttgtgcagaaatgtttgcagtgtgtaccacctaaatatataaaactaatccatgcaagcttctactggaaggccatggttttatccacgcatccctacggatgtcgtgtcatccaggttgatagatatatatgcttttcgtttaagtagaatttaaacaatgctaaaataagtcatatcgcaccatttctacgccatgaaatagaatgtagaatttaatatattt

SEQ ID NO: 23266 - DNA, 829 bp, Oryza sativa
  ref <308>: DATABASE ACCESSION NUMBER: AK073384
  ref <309>: DATABASE ENTRY DATE: 2001-12-06
gaccccagctgctccattttgcgaagctacaaatcggagctaagctaagctatccaacgccctcatcaagaacacccagatctccagccatttttgcgagatgcatggctactccaacctcgcctgctcgtcgtcgtctcctcctccggtggccgccgccggcaacggcgccgggtgcagggcgaggcgatcgctggagctgaccaacaccaaggagaccaacgcgtgggaagggctggccatcggggcggtcaccctggccaggacattctccaccggctcccacaggatctcctcctcctccaggtccggcgccggcgagagggtcggcaggacggccggcggcggcggcggcctccccggcgcggtgaggagggccttctccatgcggaggcaccccgccggcctcggcaagggcgacgggtactactggaggatccacgacaacatggacggcgacagtgacgacgacggcgacaatccggccgccgccgccgccgaggaagaagagagggacaagaaagagcagctagctgaatccgccgacgagaagaagaaagagcagctagccgaagccgccgacgagaaggtgtcggtgactgcgacggcgacgccgaagaagaagaagggcggcagaatcatgaaggcttgcaagaagctcctccggctgtagtaacaatcaactgcaagtgtgagtgtgtgcgtcaatctgtaaaccttgctgatatattactgccgcgtgttccgagaatgatctcgtttcgggttcgtcgagttaaaatcgcgacgaacaaattaagcaagttaaaaaccagctgatgcagctgct

SEQ ID NO: 23267 - DNA, 2378 bp, Oryza sativa
  ref <308>: DATABASE ACCESSION NUMBER: AK073385
  ref <309>: DATABASE ENTRY DATE: 2001-12-06
gtgctggcctaagctaactcaatcaaacctccctagcttggcagaatagttaatgttaatcacctgattaaaattagattagtcccctcctacccagctaactactgcttctatttcacggagaaaaatgtcttcctaggctttctctttcagctcgatcgatccacagctcagctagctctctctctctctagcgacaagcaagcatggagcagctgttcgtcgacgacccagccttcgcgagcagcatgtcgtcgcttgaggcggacatcttctccggcgccggccagctgccgtcctcgccgtggctggacctagacctcgacgacgatgtccaagacctctccatggcgccgacgacggcgaacgcggtgtcctccggctacggctccggcggatccggctcccacaggaagctcagccacaacgcctacgagcgcgaccgccggaagcagctcaacaagctctactcctccctccgcgctctcatccccgacgccgatcacactaagctgagcatcccgacgacggtgtctcgcgtgctcaagtacatacccgagctgcagaagcaggtggagaatctggagaggaagaagaaggagctgacgacgacgagcaccaccaactgcaaaccaggagtgttggggagccagctgatgagcgagggcatggctcccatcgtttcggctacctgcatcaatgacatggagatcatggttcaggtcagcttgttgagcaatgtggcgggttcagttcttcctctctccaagtgtatcaaagtactggagaacgaaggtcttcacttcatcagttcatcgacttcctccggatttgggaacaggacattctacagtatccatcttcagagaagtgaaggaacgatcaacgaggagtgcccagcattttgtgaaaggttggagaaagtcgtcaggaacaaagcaaagctttaagcactagtaccgcgcgcgcgtgcctatgataatcctgaattaatcaagggccaaaatctagctagaatcctacaactagcgtagtgtggtggtggtcgtcttcgagttcgacgcgccgccgccgccgctcatcgcgacgacaagagcctcgccagcgtccgcagtagcagcttcctagtcttgttgcactccgagatcgtctccagcctcggcgaccacggctggttcctccgccccatcagcagcgcgtaatgccgcttcagctccggcgtgctgcacagctccgtcgccgtcgccgtcgccgtcgtcgacggcttccggcggcgcgcaccgccgccgttctcgtcgcagctgatcaccttctcgatgaactccgggaggactcggatgagcgtggcgccgccctcgcccttgacgtactcgaacgggcactgccccggcccagccacggacaccttcttcgacggcgccggcgacagcgacgcgagcgccgcggcggtgagcaccttgaagcaggagaagcgctcggcggggaggacgaagtacgtccgccccgccatcagctcctcgccggcggacaccaccgggatcgggaggccgacgtagaaggagtcggccgcgcagacgtggtcaccggggagctccgccgtgacgtcccccgccacggcgcacaccccgccatcgtcgtccagcatcctcgtctgcccgccccagtacaccagcttcacccccgccgccgccgtcgccggcaggtgcatgcacggggagaggccgttgcccatggcaactgatgtgtctagaaccttctagaacgagctcgagcttgcagatggaagaagaggagaagaggagatgcttgtgtgaattggggctcgtggttgcgagaggggaatatatataagcgagcgttgaacggggttgactttggaaaattcaaagatggaggaggtaaatactcctactactactggtctggcttggtcagcggtcaaaggcgatggcttttgagacggaagcgggtcacgtggcagctgccgattgggccgcggagggggagaagcgagttgcgcgtgcgcatcgtcgttggtcggtgtcgccgatcgggttggatccaaccagatattcagaatttcagatcagatgcacagtagtacagttgcaagttgcaactagaagttgccgattaatttgacagcgcctggctgcaggctgctaccgcactccaacgccgacatggcaggtgttttttttttaaaaatcttgttccaaatttggagctgactgaagagagttttatactccgtattatgggtatgagttcatttatactcctatgtcacttatcatcgatttgttttcggacttattcactttgtagctattttcaaccattacaaaatttaacaattcccataattttagcaaatt

SEQ ID NO: 23268 - DNA, 2582 bp, Oryza sativa
  ref <308>: DATABASE ACCESSION NUMBER: AK073386
  ref <309>: DATABASE ENTRY DATE: 2001-12-06
ggtttatgcttaatttgcttccattttgtttattactcctacaagaaattgatgagggggttcgcttgccgttgcagcacaccacatccccctcatccacctgtccgtgatgatactcccatagttgagacttgagattgcccttctcctcaatcttgttgatctcttctcccacctcgcgccttcgagctagtcgtgtttaggtttagccccattaatcttggtaagggtggtagtggttgttgctgttgttgttgttgttgccctgaagctttcttcctcaaggaccagaatttgtcttcagctgctaaaggagggcctaccactaaagatttgtgatcaatcccactttgatctattaccattgtggcgctgaatattcagtgataacaacggcaagatcaactccctattaattgttcggaagtgcatcattcctcagcgactccagcatataaataaaatccagaaggttgcaccagagaatatgtcaatgcaggcctctaaccgaccatacagatatccagacaattctcaaataccatactacagccggagttcaatgcatgtggggcaaaatggtacttaccatgtgcaacaaaatcatgaggatctttacgcgtcatctgatgatggttcacagaacggcaattctaaggctcaggggttgcaagcacagtactgcactctagattcatcctcaggcaattttgtgtatccagcacatagctctacatcctcccacataagtgggagccccatttctcagcaagatagccactcagagcacacatctggttcccctgcaagtgcttcatgtgttactgaagttccaggcttgaggtttacaacaattgaggagatagagaatgcaatgtttggacctgaacctgacacagttagctcggactgctccttacttactgattctgctttttaccaagataactggagggagcatctgggaatcaatacaggggacttgaagcaggtaattgcagcatgcggtaaggctgttgatgagaatagttggtatagggacttgctgatatctgagttaaggaacatggtttccatttctggagagccgatgcaacgccttggagcctatatgttggaaggccttgttgccaggctttcttcgactgggcatgccttatataaatccctgaagtgtaaagaacctactagcttcgagctcatgtcttatatgcatctcctctatgagatatgcccgtttttcaagtttggttacatgtctgccaatggagcaattgcagaggctgttaagggcgagaactttgttcacatcatcgacttccaaattgctcaaggtagccagtgggcaactatgatacaggcccttgctgcaaggcctgggggaccaccatacctgaggattactggtatagatgactcgaattctgcccatgcccgaggtggtggactggatatagtcggacggcggttattcaatattgcccagtcatgtggtctgccctttgagttcaatgctgtcccagcagctagtcatgaggttatgcttgaacatcttgatataagatctggggaggttattgttgttaattttgcctaccagctgcatcacactcctgatgagagtgtgggcatagaaaatcaccgggacaggatattgagaatggtcaaggggctctctccaagggtggtaactcttgtagaacaggaagcaaacacaaacactgcacctttcttcaatagatacttggaaactcttgattattacacagctatgtttgaagctatagatgttgcttgcccaagggatgacaagaagcggattagcactgagcaacactgtgttgcaagagatattgttaatttgattgcatgtgaaggtgcagaaagggtggagaggcacgagccttttggaaaatggagggcaaggctttcaatggctggctttaggccgtacccactaagtgcactggtgaacaacactatcaaaaagttgctggatagttaccacagttactacaagctagaggagagagatggtgccctttatcttggatggaagaacagaaagctggttgtatcttctgcatggcggtgacatctccgtgttaatttggaagaagcttctttaggttctttcgtggcttcttggtggacgcatgaatccaaggtggaacctgatcttcatagagcagagagaactccatagtccagaacaatgtggtcgcttgcttgttggcacccatctctaaaccctcgtatgcttaccatccgtcagatttaatcgccataggcagaatactcttcctgacttcccatagtccagtccagtcgcaatataggtgtacactgtactgttttacctgctcatggtagaatgtccgttttatgtcgatcagtcaagtagagtctggtcaccagaatccccgtcttaatagaacgtctgttttaaaagtcagtcaagaagagagtctggtcaccagagtccgtttcttgatcctgctcgttgtacaatacaatgacgtctcaatgtgaattctggatcctatgctactacaatgatgatatgcctcactgaattctgg

SEQ ID NO: 23269 - DNA, 2343 bp, Oryza sativa
  ref <308>: DATABASE ACCESSION NUMBER: AK073387
  ref <309>: DATABASE ENTRY DATE: 2001-12-06
gactccacacttccacaactccgaccatgtccgcggccgccgcttcgcctccgcctcccgccgccgccggcgaacacctccgcttccacctccgcggcttcctctccccggagacctgcaaggagctggagttcgtgcaccggagctgcggcacggccgggtaccgcccttcggtggtgtcgacgtcgcttccgcacctggctgccaccggctgcggccacctcctcctcccgttcgtccccgtccgcgagcggctccgcgacgccgtcgagtcggccttctcctgccacttcgacctcttcatcgagttcaccgggctcatcagttggtgcaagggagcttctattgggtggcacagtgatgacaacaaaccttatcttaggcaaagagccttcacggcagtgtgctacttaaacgatcatgggaaggactataaaggtggaattttgcagtttcaggatggtgaaccttcctttattactccagttgctggtgatgttgtcatctacactgcagataatagtaatacccattgtgtagatgaggtgactgaaggtgaaagactcaccctaactctttggttcaccagagacagtgcttatgacgaggacccaaagctcctttcctttctttctcagacatcactgaactatgaaccagttcatcagagttcttatattcctttgccagcctctgatataatgtattggtttgcctatgaccattctggttttgacgtacgatgtgctagagtgcacattcttgggttctctttccactcaagcattgatgaagacaataaatctgttgcacctgctgaagatgaccctatagagttgcttgggaagccagtacgacttggtaggggagatgatgtctttgacaaagtttttgccaatggcttgcatgctcttcaggtatctacatactttcactttttaagtagttttagtctgcagatcatgtccattagattacaatagtcaaactttattatcctttactgcacgtgtaagatgcctttatttcaatgttatagtctaaatcttcatgagaatgctataacaacagaaaattctgtggttgtattagagaatgacattcctcaaataagttgacatcttttagaaaatacaaataaaaaattatttatgccccattagaatatgctttttttttctaattcctttacaaaaggaactgtttcctatgatattcctgctttccaaacatggcattcaaatgtgttatatcctgttctgttaagcgtgtcagtgttctatgatttgcaaatctctgaaacaggtggtgcagttttactactggaaagcacctgagctgtcagcaaagaggaaacaaacttctggtggttcaggaacagtctgctgtcctgttagtcaatccagaggaacaaaactaccattgccatgcaaccatggccttgaacaaaccatatttggatcacataagaatgtagagattgattttgaatggagtgattttgaattagccgtatctatgtgggagaattattcagaagaattgcagagaaagctgttgacatttttgccatattggctgtccagtgaggccatttttattgtcagttcctgttctccccagtgatataggtggagggctggaggtagtttgctttgctcttgctccacttgtacaagatgttcccagaaacatcacaaaatatgaagtcagcttggtcctggtttatctggagggacatgaacccttgtccatcgtaaaagaactggagcttatcagaatttggctgcaagactcctctccatgcttttgaaccacctccacttgtgaagtattggataggactgtaacaataggagtgcatgcattcaggcagtggtcgtgcccattgatgtagaagtcgatgccattgacctgaaattccatgaaacagtgataaggaagtactctttttgtggatccttcagaacttaatatcgaggcaacttctgtataaccttcagaactggaagtagaagttgcagaagctccttggtgtcaccatggtcactgacgctcctaatggtatgatgcccaacagcaatcttccacttcgctgttgatttcttcattgcctcatccatatcctagatagtagaccccataaaataaaatattaaaacaattttgctcagcaacctaggaatagcttttttttgttcttaagcattgatgactgttccattccaaatgcgcaccttaagtagattagttatgtatttttgtcgaggtgccactcctctccagtcataatgatggtctttagggcgagtccaatatttcagctgaaatggagttgtgtcg

SEQ ID NO: 23270 - DNA, 1744 bp, Oryza sativa
  ref <308>: DATABASE ACCESSION NUMBER: AK073388
  ref <309>: DATABASE ENTRY DATE: 2001-12-06
gagcagcagcagcagcagtagtcatcaccatgtccgccgcggcggccgactggctcccggccgcggacgtgacggcggcggggcggccggtgctgaccgcgggggaggtcgagcgccacctcgtcgcgcagggggacgtggagcccgaggagagcccccgcctcggccccctccgcgcccgcctcctcgtcctcacctcccaccgcctcatcttcctccacgagccctcccgctccgcgcgcgccctcccgctcgccgccgtcgtccacgcctacccgccccaccgcaagcacggccacaaccccctccgctccatcttctcctcctcctcctcgtcctcctcgtcgcaccacccgcgcgtccgcctccagatctccctgcccccgtcgcgatcggaggtcgtcgccgtcgtcgtcagcaagggggaggccgacgtgttctacgggaggctgctcgaggccgtccgcgcgagggcgtgggaggtggtcgccgccgtggcggctgcccccgcgggcggctcctcggcggcgcagggggcccccgcggaggaggatctcgccatcaggatgcccgtggttggggtgtccgggatcctgcggatggagcaggaggcgtgggagagcgcggggcagaatctgcaggatgccttccaggatctcaacgccctcatgagcaaagctaaggaaatgatggagttagcggagaaaatgaggcaaaagctattgacgaactcatcagcccaatccaattccaatgatgaagagatgggatctaagcaagacatgcaggattggctattgagtgttggaatcgtgtcccctgtgacgaaagaaaccgctggtgctctgtaccaccagcagctgtcacgccagttggctgactatattagaacaccactagagaaagcaggtggtatgatggcactagttgatgtctattgtctctacaaccgtgcaagagggacagagttgatctcaccagaggatcttctgcaagcctgttccctttgggagaaatttgacgtcccagtcatgctcaggaaatttgacagtggagtgaaggtgatccagaccaagacgcatagtgatgatgaggtatttgcgagaatctcatcacttgcacaaaaggaggatgcccttcagaagggaataagccccagcgatgctgcatttacacttgggattgcacctgctttagcgaaggagcatcttctaaatgcagaaagcattggtatcctttgcagggatgtcagtccagatgggttgcgcttctacatcaatctatttaatgaaattgatccccaaaatatgtatatgccaaaaactcatggagtataccacacatggatatctgtcacggcagcatcacagtgacttatcttcggttgattggggagcatgacgagctcggcagttcgtatcaatgttcagttttgtctgcatattctgccgtgacgactttgtacaacaccccaaagcgtggtgtaacaaattcattagtatttgcttgaatgaatgacttgcataagacgtgactgcctttcttaaacagaagaggtgatgctttgaattagcttttgcttgtctttccgtcaagcaaagacatgtaatgatctgaggcaaccttttatctttgccagtcattactcaatacagaaaactggtagtactgaataccacttgacacacagatattcaatttggcatttgtttcgtaagattttgcacaaggcctacaacatccc

SEQ ID NO: 23271 - DNA, 3374 bp, Oryza sativa
  ref <308>: DATABASE ACCESSION NUMBER: AK073389
  ref <309>: DATABASE ENTRY DATE: 2001-12-06
gagtactagtactacaataatgacacattgaagagcagtagaagaggagaggagaggaggggaggcaagaacaccagcagctgaaagtgagtcctggtttgagctgcctgggcgggaaagagaggaggcgaaccgcgaagaagaagaagaagagaagagagaaaaaaggaagcaaaaaaggaggcggtttttggattcttgctgcgatttctacgcactcgaggctctcatctcgtcaaaagcagtggcctttttccctcctcctcctttcttgggcatggtgtcattcatggtgatgctgctgctctgacttcagtgatccaaaccatgctttttgatggtggctggtagaccaagtgatcactattgatgctttgattgtctgatgaccggtggttgcaagatggatctccaagagttgactctggaggcacaagtttgaatgccctggttcgatgtcattgcactccggtgatcaggtcacatgtttgatttccactttggtggcttgagagcatactctagttgtctgaatcaagttctctgaaagagagaccggagatgagagaggagggaggaattgcttctccgggcgaaaagcctattccgaatggtgcttccccaaatcatagccaatcacctaaaatttgctcaagaattacagataatgagactcaaggaactgcaacagcaaaatctttaaatgaaaagctagtgttggaaactgtgtcagatgattcttccacacagcattgtcagtcaccacagccagatgtcttcacaaatgtcaaagatgaagatatgcaagattctgtgaagagtttgagtgagaagcttgcttcagcccttttgactatcaatgctaaagatgacttggtgaagcagcatacaaaggttgcagaagaggctgttgcaggttgggaacaagctgaagctgaagttagtaccctgaagaggttactcgaagcttcaactcagaagagtgcctctttggatgatcaagtgaaccacctagatgatgctctcaaagaatgtgtcaggcagcttcgccaagctagggaagaacaagaggagaaaattcgtgatgcagttgctaagaagactcaagaattggattctcacaagtctgagctccagaaccatatttatgagctaaagcagcagctggaagccgctaaattagaagctgccactgtggctgtccagcatgatctgcaggataaacttcaggctgcagagaaggaaaacaagggcctgaagatcgagctgctcacgctagccaaggacttgaagagactgtcactggaaagagatctgagcaatgaagcagcagagacagcaagtaaacaacatttggaaagtgtgaaaaagattgcaagggttgaggcagaatgccgtaagctgcgccatctgacacgaagaacttccttggccaatgattctaggcctgcgcctaacaatgcttgcatggaatctctcactgatagccagtctgacagtggggagcgtatgctgactgttgacagtgaaatgagaaattctgattcatgggcctcggctctgatagccgaacttgatcagttcaagaacagtagtgccagctcaagagatgttgtaaacaatcatgttgagattgacctgatggatgatttccttgagatggaaaagctggctgcattgtctgaagtagaacgtgtaagctctagctttggaacagaaactgattctgaccaggctgtggctatagataaagcttcaaaagtcgaaactgaaacactaaagagccaggtcacagatttgcaggcaaaggttgaaaagcttgagactgagaaaagggatcttgaaatggcccttgcagaggctagagtccagcttgacgcgtcgtgtgatgccctgatggcagccaacaacaagttggcagaattacaaatgcagttcaacttggcaaatgagtctaaaattgctgctttgggacaagctgatcagttagatgctgagagaggatctttggcattgcagcttgagtcgaagtcaatagaagttgagaaacttcaggcagttgtggcttcgttggaagaaagtacagataagaaagagctggagtcacagttagagtcaacttctgtagagttagcggatctttgcaagacagtggcatccttgcaagagcagattgatgccgagagaactctgtctttgcagcacaaagcatatgcagacatggcagatgcagataaaaagtcactagaggcacaactgcagtccgcacatgcggatatcgggaaactgaggggatctattgaaacactggagagcgagttgcaaaaagagaaaaccatgtatgaagaacttgtggtccaaatggagtcaatgaagattgaatcagagaaaaaacttggcgtggaatctgccaaagaagcattggaggcacggctcctggtagtgaactcagaaattgcgaaactgcatggaacagtgaacgatctggagtgcgatgcagcaaaggagaaggcattttcttcggaactgaagatgcaactagaggcagtggaaggcatccgaaagatgttggagtctgagcttgagagttcacaccaggaaaccatgaagctccaggagaagatctcattgttggaattaagacttaaggaccagactgcattgttggtagaattcactgccaaggccgaggatgcagcggtgggaaggaaggcaatggaaggccaacttgaaggagctaaactggaaatcacaaaacttacaaatagggtaagcttgctgcaaggtaagattgagcaggagaagctgctgtcagaggagtacgaagcaaaatgccgcaagttagaggctcagctgtcaagagacagtcgggaggcaaggctttggcgactggccaacacaaatggtgacctgaaggtcaagcaggataaagagctctccagtgctgctggaaaactcgtggagtgccagaagacgattgcgaacctcggtcgtcagctaaaatcgctgaccgatctcgacagtgtaacagccgagcctgaaaagctagagtctggggatgcacttctggactttagagaacccgatgttgaggtgccaccagcaggctttgcaaatggcctgtacgatttggatcttccaaagagcaatgggagctgcctgtcacccattcctcgtgttcagtcgtcttccacacattcgcaaacgtcagtgttctctggcggtttatcgtcgcttggtagctacaggaacaaaacaagaaagtgaaatctgatgaaaaagatttgtgcataaacttatttaacagttcgtggatgtttgtcagttgtcacctgatgcttagatcagtgtacatttacaggaaaatgatggtt

SEQ ID NO: 23272 - DNA, 2584 bp, Oryza sativa
  ref <308>: DATABASE ACCESSION NUMBER: AK073390
  ref <309>: DATABASE ENTRY DATE: 2001-12-06
ggctgtctcgctggctcccaggaaaaaaaaaagaaagaaagaaaaagtagagctgaaaaagaaatcgatcgctcccatctccatccgcagctggggcgggcgaccgattgatccactccattcccctcccgatctccatcctcaagcaagctacaagcgcggctactctcctcctcgcgtcgcctgctcatcccgcgtcggagaaatcggtttcgttttttcttttccgctgtggtgtgattttctccccgttcttggtgggcgcgtctgctgcgtgagagatttttttgggtttctgctggttgggttggttagctgctgcgcttgctgaggtttctagttgttctttggccggattgtgtgactgcgtccccatttcgtgttcttgacttcttgttgggggaggggagcatttcgtcgagcaccttccgtgcggctcgagctgttgtgggctggggaggggagcggccgagcgggggggcggttgttgggtggcggcgttaattgggtttgttgggagccaccctttcatgccgtccttgcgggcacgggcctcagcttgcggatggattgctacatgctgaaatcaagaaggctcgttggtgtcgccgatgcgtggtccgtggatgatggtgcggatggcatcagcggattccccgacgcgatgagcgccgctgcacacaaacagatggtcactggtgccgaggaagccatgctggggaagctggaattggatagtcaatccaatctcttctccaatagtgatgattttcttctttccgggagcagtaagctgggaatttccgcatcagaagatatagatttgcctgggaaacagggattgcccgagtcgacaacagacaggcctggaagcaatggatcaagcagggttcccagactaagagtgcttggaacagccggcatggctggatttgggaaggcagttgatattttaggcactataggctgcttggtaacaacaagccttagcacagatggcggctttatttccagggctaaaaccaaaggatgtccgatatcaattcttgcttttgaggttgcaaacacgatattgaaaggtgctactattatgcaatctctttcggaagacactgttacatacttcaaacaagtggtgcttccttctgaaggcgtgcagaatttaatttccagtgacatgagtgtgttgatgcggattgtagccaatgacaaaagggaagagctgaaaatattttcacaagagattgtcagatttggcaaccgttgtaaagatccccaatggcataacctggaccgctattttgtcaagctagaatcggaaaatccaccacagaagcagctaaaagaaacagcagttgcagagatgcaaaagttgatggatcttgttcatcgtacaactgatttgtatcacgagctgcatgcgttggatagatttgagcaagattatcgctgcaagctgacggtaaagggaaattcatatcagaaagataatcttccaggagaaaatattgaggtcgtgagaatagaattgaagagtcaaaggaactatgtgaaaagcttgaagaaaagatctttgtggtccaagacattggaagatattgttgagaagcttgtagacatcgtgcagtacttgcattttgagatcaacgcttcttttggatcttctgatgaaggtgaattgagttctgaatctactgaagactgtcagagactaggacctgccggacttgcattacactatgcaaatattatcatacagatctatagcgttgtttctcgatcaggatatataccaccaaatacaagagatgctctctaccaaggattgccaccaagagtgagatcggcactacctaatagattaagaacttcgtcagtgcctcaggagctcaatattgatcaaattagggctacaatggataaaacattgaaatggcttgttccaatggccatcaataccacgtgtgcccgaggcttcttgcggtttagcgaatgggcgagatcagggactgagagggttggaaggaggccaggccaaccggacgtggtcgagacgctctaccatgcggacaaggcgaagaccgaggactacattctggacctggttgtctggcttcaccaccttgtcaaccagagtaaccggccggcaaatgcaaaagacaaagacaaagagcagtccacctcacctctaaccaaatctgatcttgacaaggcacaacaagaatagcactgcactgcactgcactgcaccgcactgcacagcagccgacaagagcaaaacaccagacgacgcctgtgacctgtccgattgtttgatgtgggcattgtttgtaggttgtaaatggaagctaggcttcttgctgttgtcctaaaacttgtggtggcgacgtgggcatgcgttgcgctctgtacatgtacatcagtcaagtaggtagtagaaatgaggagccttttttttttctctccgattatttggtcgttacagagagggttctataatttcattgttgcagccattcggttgtcacatgttgtacgaaggggaagatgcaataaaaggctggtgattcatagaaaaagagtc

SEQ ID NO: 23273 - DNA, 1315 bp, Oryza sativa
  ref <308>: DATABASE ACCESSION NUMBER: AK099353
  ref <309>: DATABASE ENTRY DATE: 2002-08-28
gatcgcttctcatcgcaaatcgcatcgacttcgattcgcttcgtttcgttctcgctgttgatttgttcgtgagatttgaattctagcaatggctcctctcggtgacggagcggcggcggcggcggcggcggagcccaacctggtggtgtcgttcggggagatgctgatcgacttcgtccccgacgtcgccggcgtctcgctggccgagtccggcggcttcgtcaaggctcccggcggcgcccccgccaacgtcgcctgcgccatctccaagctcggtggctcctccgccttcgtcggcaagtttggtgatgatgagttcgggcacatgctggtggacatcctgaagaagaacggggtgaacgcggaggggtgcctgttcgacgagcacgcgcgcacggcgctggcgttcgtgaccttgaaaagcaacggcgagcgcgagttcatgttctaccggaacccgagcgccgacatgctcctgacggaggcggagctcaacctggacctgatccggcgcgccaagatcttccactacggctccatctccctcatcaccgagccgtgccgctccgcccacgtcgccgccatgcgcgccgccaagtcggccggcatcctctgctcctacgaccccaacgtccgcctcccgctctggccgtccgaggacgccgcccgcgccggcatcctctccatctggaaggaggccgacttcatcaaggtgagcgacgacgaggtcgccttcctcacccagggcgacgccaacgacgagaagaacgtgctctcgctctggttcgacggcctcaagctcctcatcgtcaccgacggcgagaagggatgcaggtacttcaccaaggacttcaagggctccgtccccggcttctccgtcaacaccgtcgacaccaccggcgccggcgacgccttcgtcggctccctcctcgtcaacgtcgccaaggacgactccatcttccacaacgaggagaagctgagggaggcgctcaagttctcgaacgcgtgcggagccatctgcaccaccaagaagggtgccatcccggcgctgcccaccgtcgccgtcgcgcaggagctcatcagcaaggcagccaactagagctcctcggtttcgtcgtcgatcgccgccattgggggcctcggaattttaggtcgatttaatttagttgctgcttcgttttagacaaggaagaggaggggcttgggtgtgttcatgtctgtcttttgtgtgctaagttagttgcttccgtgtgagaacttttggcgtttatttttactattattattaataagaagctcttggatttgggggtgg

SEQ ID NO: 23274 - DNA, 1515 bp, Oryza sativa
  ref <308>: DATABASE ACCESSION NUMBER: AK073391
  ref <309>: DATABASE ENTRY DATE: 2001-12-06
gatctcccttcccatccacgttcggccacttcctcctttctcaagctctctctcctctcctcgcagtcgcagcgcagtagtctctagggttttagcgggcggttgtcctccacccgctcgccgcgtggccgccgccttctccccgcgccaccgccgatggacgtcgactccgacccagccgccgcgggcaagcccacccagatggacctcgaggaccagactgacgcgaaggggaaggggaagagcgaggagctcgcggactccatcgggagcctctccatcggcccggagcgcaccaatttcaagaagaagccggtgatcatcatcgtcatcggcatggccgggacggggaagacaacttttatgcaccgactggtatgccacacccaggcttcaaacatgaggggttatgtgctcaaccttgaccctgcggtgatgacgctgccgtttggggccaacatagatatccgtgataccgttcggtacaaggaggtgatgaaggagtatggtcttggccccaatggcggtatcctcacctctctcaacctattctccaccaagtttgacgaggttatatctgttattgaaagacgagccgaccagctggattatgtcctggtggacacgccagggcagattgaaatcttcacttggtcggcttcaggagctatcataacagaagcttttgcatcgacatttccaacagttgtcgcatatgttgttgacacccccagatcaacgagccctgttactttcatgagcaacatgctttatgcctgcagtattctgtacaagacccgcttaccgatgattctgacatttaataaggttgatgttgccaagcatgagtttgctcttgagtggatggaagactttgaggcgtttcagaccgccttggattctgactcatcatactcctctacatttacccgaagcctctctcttgtcctggatgagttttacaaaaatctgcggtctgttggagtatctgccgtatctggcgctggagtcaattcattttttgaagctattgaagcaagtgccaaagaatacatggagaattacagggctgatcttgacaagaggattgctgaaaaagagaggttagaggctgagcgtaggaaggagaacatggaaaggttgcaaagagacatggaaaactctaaaggacagactgttgtgctcagcactggtttgaaggacaaaaatcgtgctacggatatgatggatgatgctgatgaggaggaagaggaggcggcattagaagatttcaggatttctgaggatgatgaggatgaggatgaggatgaaggggaagatgaagaagtggagcattttggcttataaggtattaaaatattgctccgctggaatctgagttaccctaatgtactcacttgcagagctctattaaatttattaatctgagtatggtgtttctctgttgcagatacttgaatgtcattttgctttgaatgttaatcgctgttactatctagttattcatttgaacct

SEQ ID NO: 23275 - DNA, 1486 bp, Oryza sativa
  ref <308>: DATABASE ACCESSION NUMBER: AK073392
  ref <309>: DATABASE ENTRY DATE: 2001-12-06
ggtcctagggtttaccctgctccgcctccacacacaccccaccgccactcggcgccgccaccccgcaccaggtaagggaggaggagtaagaagatgtcgcacaggaagttcgagcacccgaggcacggatccctcggcttcctcccgaggaagcgctcctcccgccaccgcggcaaggtgaagtcattccccaaggatgacgtcaacaaaccatgccacctcacctcctttgtcggttacaaggctggaatgacccacattgtgcgtgaggtcgagaagcctggttccaaactccacaagaaggagacctgtgaggctgttaccattattgagacacctcctattgtcgttgttggacttgtggcctatgtgaagactccacgtggcttacgcagtctcaactctgtctgggctcagcatcttagtgaagaagtaaggagaaggttctacaagaactggtgcaagagcaagaagaaggctttcaccaagtatgctctcaagtatgatagcgatgccggcaagaaggaaatccaaatgcagcttgagaagatgaagaagtatgcttctgttgtccgtgtgatcgtgcacactcagattaggaaaatgaagggcttgaagcagaagaaggctcacctcatggagatccagatcaatggtggtaccattgccgataaggtggactatggatacaagttctttgagaaggagatcccagttgatgctgtgttccagaaggacgagatgattgacatcattggtgtcaccaagggtaagggttatgaaggtgttgtcacgcgttggggtgtcactcgccttccccgcaagacccacaggggtctccgcaaggtcgcctgtatcggtgcctggcatcctgctagggtttcctatactgttgctcgcgctggtcagaatgggtaccaccaccgcactgagatgaataagaaggtttacaagatcggcaagtctggccaggaaagccatgctgcctgcactgaatttgacaggactgagaaggacatcactcccatgggtggcttccctcactacggtgttgtgaagggcgactacctcatgatcaagggttgctgtgttggccccaagaagagggtcgtcaccctccgccagtccctgctcaagcagacctctcgtttggcgctcgaggagatcaagctcaagttcatcgacacctcgtccaagttcgggcacggtcgcttccagaccaccgacgagaaacagaggttcttcggcaagctcaaggcttagtttgtgcggttcctcagcaaagtcagaatttgtcaaaacgatcatcactactctatacttggttctcttctcttgatattttctggggtattaagttttgtagcagatgtttcaggacctgttgatctatgaatttgtgctcccttctgctgtccctaccttaactctgttgaaccctatggattaaatctcgtaatgcggttttgctagttgcttgttgttg

SEQ ID NO: 23276 - DNA, 2770 bp, Oryza sativa
  ref <308>: DATABASE ACCESSION NUMBER: AK073393
  ref <309>: DATABASE ENTRY DATE: 2001-12-06
ttggtctatcttctgttattcacatagagaaagttgcaggcgacaaagttgtacgtgatgagaagaacaaaattaaggaggagctgactgatctgtgcttctcagacccgctggatctccataggaggcttcatcatgaatatctggaggctgagtctgacttgtttaaattgaagcttcagaaggttgtggcaagtcgctttgtgttgccagatatttgcagatcttatattgacatcattgaaaggcagcttgaagtcagtgatttatctatgtcttctcgtgtgctgttaatgcaccaggttacagtttgggagcttattcgggtcttgttctcagaaagagcaactggtaaccagttagagcctactggtgatgaggaccaggaggggatgattttagataagaaagaaggtactgttgccatagaccttgaagcactccctttggttagaagagcagactttagcaattggttacaggacagtgtttgtcatcgggttcaaggagaggcgggctccttaaatgatgccaggtatctggaacatattattctgcttttgactggtcggcaattagacacagccacagaagttgctgcctttaggggtgatgttcgactggcaattttgctaagccaggcaggtgggtcaatgctaaatcgttctgacctttctcagcaactggatctatggaaaacaaatggtctggattttgattatattcaggaagacaggttaaagatatatgagttgctttctggtaatgtacaaggcgcgttggtagattcatcaattgactggaaacggtaccttggtttaataatgtggtatcaactatcacctgatgcatcacttgatattatcattcactcttatcaccagctccttggtgagggcaaagtcccatatcctgtacctgtatatatagatgaaggaccccttgatgagtcacttcaatggtcctcaggtgaccgctttgacatatccttttatctaatgctgcttcatgcaaatcaagacgagaagtttgggatgctaaaaactatgttcagtgcattctcatcttcatatgatcccttggactaccatatgatctggcatcagtgttccattctggaagctatcggtgctttcagttcaaatgatcttcatgtgctagatttgagttttgtttaccaattattgtgtctggggaagtgccattgggctatctatgtcattctacatatgcctcatcttgatgacgccccatacatccatgagaagttgatcagggaaattttgtcacaatattgcgaatcatggagcaaggatgaaactcagagagtttatattgcagaacttggtattccagtagaatggatgcatgacgctctggctctttacaatgaatactatggagatcagcaaagcgcactggagaattatattctgtgtggcaactggaagaaagcccatacaattttcatgacatccattgctcattctttgtttctgtcatctaagcatcaagagatctgggacattacaagctctttggaggttcacaagtctgaaattgctgactgggaacttagtgctggaatatacatagacttcttcattctaagaaattctatgcaagaaaaaagtaccatggatgatccagatcaacttgagaagaaaaatgaatcatgcagcactttctttggccggttaaatgattcattgatagtctggggaagtaaattacctgttgaggcaagggcatgcttctcgaagatggcagaggagctgtgcgagctactaatgaactcccccggcgagggcttgacgccagatctctacatgggctgctttcagacgatgcttaacgctcctgtgcccgacgaccacaggtcatcctacctgcaagaggcggtctctgttttcaccgacatactttgcagggactgatgcatgattgcttgaagatccatggcattctatgatatctgcagaattgttggaagtttccctgatctatctattgggttttaacctattggttattctgatcatacacgggatctgggtgcacaagaagctcccggctgccaagtcgcaagtcagtaatacagtgaagagctccaaaagttcgtcccttgcccgagtgcagtgaggaaatgtagatcagctattgatggtgcagataactgccatgctcatcaaactcctgaagaatgtataagctgtgtgctaagctgtaccaatcaactttcagatgtgagctgtacccgtcatctttgttcgtttttgtactgtaatactgttacaacggaaagcagcaaatcgtgtacggtgtatgttgtgctgaagagctcgacgaagataaagcatccagctgggcccaattctcggcaatacatgcacgattccacccttccatggacgtgggagcaagctgcatatttctcttcttcagtcgaggtactttttcacagcttatgatgaggttatcccgaaaatactgtggtgtactttttcagagcttatgggattattccgaaaatactgaggttttacggagctgtaggcctgtaacaattgcaaggggatatttttttttctcatcacacggaaaatgcacaaagcaacaaccccacacttgcacactcgtaaattggactgtgtcagtgtggcaaagatttgagagcttaggtagaatatttcttctgtcgtgcacgcgatgtcgcgatgaaatgaaaaatcacaatgttggagtgagccaaaactgcttttgcagaacc

SEQ ID NO: 23277 - DNA, 1707 bp, Oryza sativa
  ref <308>: DATABASE ACCESSION NUMBER: AK073394
  ref <309>: DATABASE ENTRY DATE: 2001-12-06
gtccagcccaaattcccctcactcccacactccactgtccactccaagctcacccgagctccagctactcagctcctcgtcgccgtctcgccgccgccgcaatgccgcccctcatcctggtaatggcggcgctgctgctcccggcggcggccgacgcgacgtcgtcggtgctgctgggcatcaactacggccgcgtcggcaacaacctgcccccggcgaacgccgtgccgccgatgctgtcgtcgctcggggtcggccgagtccggctctacgacgccgacccggccaccctccgcgcgttcgccaacaccggggtggagctcgtcgtcggcgtcccggacgagtgcctggctgccgtgtcaaccccctccggcgccgcgtcgtgggtccgctccgtcgtccagccggcgctcccggcgaccaagatcgcggtgctcaccgtcggcaacgaggtgctcaccggcgccaacagctcgtcgctgtcgcggtcgctgctcccggcgatgcagtgcctccacgacgcgctcgcgcagctcggactcgacaagcaggtggccgtcaccacggcgcacaacctcggcgtgctcgccacgtcgtacccgccgtcggcgtacttccgcaaggacctcctcccgctgctctgccccatcctcgacttccacgcccgcaccggctcgccgttcctcgtcaacgcctacccctacttcgcctacgccgaggaccccaccggcgtcgagctcgagtacgcgctgctcgagccgacctacgccggcgtcgccgacccctcctccggcctgcactaccccaacctgctcgtggcgcaggtggacgccgtgtaccacgccatcgcggcggccaacaccgcggcggcgcgggcggtggaggtgcgggtgtcggagaccgggtggccgtccgccggcgacgccaacgagaccggcgcgacgccgcagaacgccgcgaggtacaacggcaacgtgatgcgcctcgtcgccgacgggaagggcacgccgctccggccgtcggtggcgctgcgcgcctacatgttcgcgctcttcaacgagaacatgaaacccggcccgacgtcggagcgaaactacggcctcttcaagcccgacggcacgccggtctacgagctctcctaccgcctgcccaaggacaacaccaactccggcggcggcggcggcggcatcggcggcggcagcggcaccattggcggcggcggcgagtacaatggccatggcgaggatggcggctactacagcatctcggcctcagcaaagccggcaggttggtggacatggtggacacaagcagctgtagcagcatgtgtggctgtcctgatgaggatgatggcattgtgattgtgagcagatcaagtgatggtagtaggaaggaagcctctggtttctaatggagtcagaggaggcgcacattgggatgcattgcttcttgctgttgctgcagtggacaaaggcattgatggtggtgaatgtcccttaatttaatctctgtccttgccatgttgttgtaattgatatggccttgtaattgagggggtaatctaatgggttggtcagtgtcattaaactagacttttttttctctgttttgaagctcttcctctcttgaattttgatattaaattgttcattttggggagataacactagtgattaacagataatggcttagatacgatacaaagtc

SEQ ID NO: 23278 - DNA, 1416 bp, Oryza sativa
  ref <308>: DATABASE ACCESSION NUMBER: AK099354
  ref <309>: DATABASE ENTRY DATE: 2002-08-28
gggtggagaggtgcggggagatggtggtgtcgatggagatggggccgcacggcggcggcggcgcggcggcggggaagccggtgccggcgccgttcctgacgaagacgtaccagctggtggacgacccctgcaccgaccacatcgtgtcgtggggcgaggacgacaccaccttcgtcgtgtggcggccgccggagttcgcccgcgacctcctccccaactacttcaagcacaacaacttctccagcttcgtcaggcagctcaacacctatggtttcaggaagatagtagctgacaggtgggagttcgccaacgagttcttcaggaagggagccaagcacctcctcgccgagattcaccggcggaagtcgtcgcagccgccgccgccgccgatgccgcaccaaccctaccaccaccaccaccacctcaatcccttctcgctgccgccgccgccgccggcgtaccaccaccaccatctaatccaagaagagcccgccacgacggcgcactgtactgtcgccggagacggcggcgaaggcgggggcttcctggcggcgctgtcggaggacaaccggcagctgcggcggcgcaactcgctgctgctgtcggagctggcgcacatgaagaagctctacaacgacatcatctacttcctccagaaccacgtcgcgccggtcaccaccaccaccaccaccccctcgtcgacggccatggcggcggcgcaacaccaccttccagccgccgcctcctgcaggctgatggagctcgactcccccgatcactcgccgccgccgccgccgcccaagactccagcaaccgacggcggcgacacggtgaagctgttcggcgtgtcgctgcacggcaggaagaagcgggcgcaccgggacgacgacgacggcgtccatgaccagggaagcgaggtgtgagcgagctttgcagccgccatgcttgctcgatctcgtgtacatatagagaagagaggatgatgatgagctagctcgatcgatcagctcagctcatgctgctgcttgatttcttgaggaggatgacgacgacgacgacgattgatttgcgcaagggtgcaggtgttaattagtttgttaattagtctttgagatgagatgacaagagttgattagcgttaaggtaggagtagctagctaggaggtaattaggatcaatcaaatcaattagtagctagctgctactgctagtgcttaattgcacttaggtagctcttgttttgttcttgcttattttgatcttgccatgcatcatgcatgccatgcatcatgtgagagagtactgatcacctttcatgctggtgaagagtgatgatcagatgaggaactagcttaattagctagctaagtggatgttaaatggtactaatgaagtccaaggcatctaagtttttgc

SEQ ID NO: 23279 - DNA, 1467 bp, Oryza sativa
  ref <308>: DATABASE ACCESSION NUMBER: AK073395
  ref <309>: DATABASE ENTRY DATE: 2001-12-06
gtgcggcggccagggccctcctgcccgtcggcggcgccgccgccgtcgccgttcctcgacggctgcgctccggggaagcctcgtcgacgtcgctcagcggccccgtatcggatggcgcccgcctcgtccgccggatgcagctccgccctgctcccctcctcggttcgtcaacttgcgcgctgccttccctgcggggtaagcggctcatccgcaccccggctgcttcctcctcctcctcctcgttggactccaccggggaagcaaagcctgtgggatttgcagagagataccctgctcttgtcaccggtttctttttcttcatgtggtatgcttactcacctgagcgcactttagaatttacaattgcaggtattttctgaacgtgatatttaacatccttaacaagaagatcttcgactacttcccctatccataccgatcaactcaacggttctgaagctactgttcccagttgctgtctgccatgctattggtcatgtaacaagcaccgtgtcctttgctgctgtagctgtctcatttgcccacaccattaaagctcttgaaccatttttcaatgcggctgcttcacagtttatccttggccagcaagttccgttgacgctgtggttatctcttgctccggttgtgataggtgtttcaatggcatctctcactgaactttcattcaattggactggtttcgttaatgccatgatttctaatatctccttcacattacggagcgtttattccaagaaggttatgactgacatggatagcaccaacctgtatgcgtacatctcaataattgctctccttgtctgcatccctcctgcaattattattgaaggacctcaactagtgcagcatggattcaaagatgctattgctaaagttggattagcaaagttggtttctaatctccttgtggtgggcttgttctatcacctttataaccaggttgctacaaacacattagaaagggtgacccctctaacacatgctgttggcaatgtgttaaaacgtgtcttcgtcattggcttctcaatcattgcattcggcaacaagatcaccacacaaacaggaattggcacttgcattgccatagctggtgttgcactctattcttatatcaaggctaagattgaagaagagaaaacgcaaatgaagagcgcataaggagttgaatctgtggatatagttgggtagctgctttgatcgatctgtattgcctccgagaaataaaatgagctgtaagatttataacaatctaggtgcctgctgtatctcatcttgtttgttattgtcgatttcgctttgaacagcaaaagctaccgatgcatttttttttttttgtaaattataactgctaaaaacccgcagaaacaaagcctccatcatcccattttccccttccttggctatttggacttttgatgatgctcttaagtttgagcagctatacgt

SEQ ID NO: 23280 - DNA, 1107 bp, Oryza sativa
  ref <308>: DATABASE ACCESSION NUMBER: AK073396
  ref <309>: DATABASE ENTRY DATE: 2001-12-06
gtataactcaaccttttgatctcgctacgaagctcctccgctccacccaggcacgagcgccgccgcggccgactccaccggacaccacccaacgccgccagccgcctcctcccatcctccctcgatccgtacggatagcctccccgctcgctcggtctgcgcccgtcgtcgtcgtcccgccgtcttatccctcccgcgactcggcgacgcgcgaaggcctccggcgcggggctgaagatttaccatgaattctctcagcaatggattactgaagggcttgaggagggtcttagaacagcagagaaaaccaattgatttctacagaaaatctcaagcttggagttctactgtttccttttctgatattgatgagaagagtgaaatgggaggtgatgatgattatacagattcaagacgagagttagaaccccaaagcgtagaccccaagaagggctggggattccgtggtgttcacagggctataatatgcggaaaagtcggacaggttcctgtgcagaaaattttaaggaatggtcgtacagtgactgtttttacagttggaactggtggcatgtttgaccagagggtagtaggggatgcagatctgccaaagccagctcagtggcatcggatagccattcataatgaccagctaggtgcttttgctgtccagaagctggtgaagaattctgcagtttatgttgagggtgatattgaaaccagagtatacaatgacagcattaatgatcaagtgaaaaatataccagagatttgtcttcgacgcgatggtaagattcggctgattaaatctggcgagagtgctgctagcatttcattagatgagctaagagaaggattgttctagtttgaaagatctcagcacaagcaggccaggagtacaggttcaaaagataaagtggatacgtgcaggctcaacgatgatgctggcctctcaaagaaaagaaaaacgacgatgctgcttcaccgaagcgaaatttgttgtagcaggcatgtgaaccttgtcctggccgcccttccagtcgtattttcattatcaacatcctttaatgtactcttgattaacatcttagcagtcaaatttacagc

SEQ ID NO: 23281 - DNA, 2030 bp, Oryza sativa
  ref <308>: DATABASE ACCESSION NUMBER: AK073397
  ref <309>: DATABASE ENTRY DATE: 2001-12-06
gttcgcggaaaaaaaatcagatcaggttccgcatccactccgctccccgccccggcgagaggctgcagctcagctcatcgccggcgggcaagcccgatctcccccaacctgctccgctccttgcgctctcccaatcccgcatctcctcctcctccgaccccgcgaggtgggggtcggaggtcgtcgtcgtcgtcgtcgttgtcgcctgcctcctctccgggcgctcgctgagtttgccggcggcgtgggctgtgtgcggtgtgcggtgtgcgcgcgcgatttgtagctgggagacgcttgacttgttgcctccgctagctcttctggccttcgtgtcgacatggctgcaatgtgatttgccgcgccgcgcgctgttcctctcttctggagggtaaaatggcaggcagagcaaggtgggtagcaaagtatacaaagggtcttgttgatgtgcttcatgagaacaatatttcacactaccgtacccagaatggatggagaaccgatgggtggaggaaaattgttagcgaattcaatgataggtacccagatgcaaaatttactaaagttcaaattcaggagcatgagacacaactgaagagagattatagattggtaaaattaattctccagcgggaaggtgttacttgggatcaaaatgcttccatgattagaacgacagatgaaatctgggatgagataattgaggagatgcccaaggcgcggaagtaccaatttaagagctttccgttacttcaatcacttgaggtgttatttgaaggtgacattcctgaaggggaacacaacttaatgccgagcaaacctcaacttgctggtaggaatgttgatgagggaggcaataacatgagcacagctccgagcatacctggaagaccttgtagcacagttattgccggcattgatgatggggagaacaacatcggcatacttcagagaactccagagttagggcaacaaggtctggatgatgttgatattctgcaaaatccaacagaagaggtactggaaagaccacagcacggtgccgacccaaaaccacaaagtgctgatgaaccggcgcactcaagctcttgcatagaacctcaaaaggacaagcgaaagaagcgtaaggtccctgacatccagcaaaccatggaggcttttctggagttcagaatgaagcaagctcgcttgaaggaacaagcgaagaaggagaagaaggatggtgagccgttctcgatctcgacgtgtatcaaggcactgcattcaatgaccgacgtatctgatcaggtcaagattctagcctctgatgttttcaaggatgcagcgaaccgagagatcttcctttcctacgatctcaggcttcgcacgctgtggatcaagagggaagtcaacaggttactcacttgatcaagtggattgccgcatcttgttgcccttcgtctccggaagattagatgaacgtagaaactataattattatggatcagctgaaagtcatgaactgatcgatttgctaaaattatggatcgggtcagatctgaacctaggagtcatgcaagtcgtcaagcactcgttttccctatgctcagtgcttagtggcattggctgactggactgctgctccagctcctgcagccggaggatgggacacggctgctgcccctgcccctggatgggaacaaggcagtgcaccagtcccagcggcagcaccaacccctaactggggggagtgagtgaaagagtaactgatccagttcatgggtcagaggctgagtttgttgtcgggagcagctggtagacactatttaagtagctttaatctttttacagtactgagttatttagatgcaaatcaaattttgtgttcttgacaatgctgggactgcgaactagccagccttttttttgttacaatctcatggatagctttatttcaagagcaattctgctttgcgaacaaagtgtatgtgtttgcaacaacaaattgatggggttttctcctcatagttcttattgttcactgtcagacc

SEQ ID NO: 23282 - DNA, 1030 bp, Oryza sativa
  ref <308>: DATABASE ACCESSION NUMBER: AK073398
  ref <309>: DATABASE ENTRY DATE: 2001-12-06
gatgccaaaacacatagatctccattgcatgcatgcagtacattgctagccacagctataacccactataggagattattagtgcacaatatcatcaacataattgtgtgattttgtgccaagtaaattgatctgagctgcattcaattggtggttcattgttcattttggtttagaagatgaagaaggcgtccaggttcttgaagggtctcttgtcggccatcgtggcggcggtgaaggcgaggtcggcggcggtgcgcgccaagacgagcgccgtgaggacgcgcctcatcgtcttgggcatcctccgcaacaagaagctcctcctcagcgccatcaacaggaagatccacgccatcgtcagcagcggcggcggcggcggcagcagccatggcgagtacggcggcggcggcgagagctatggcggcgagcagcagcagcacctgagtggcatccaccttgtcggcggcggcggttacaggaaggccgccgtgctgcatagcctgccgagcttcgtggtggagcaggagaggagcgccgtcgtgctgctcagcagcctgccgagcttcgccatggacagggacgtctacggcggcggcggcgaggcggaggcggaggaggagcaaggagtgggtgggaagcagcagcagcagtcggtgatcgagctggcgcgcggcgcggccgctgcggaggcaggcggcggcgcggagttcaggctggaggacgaaatcgaccacgtcgccgacgtattcatccggaggttccacgagcagatgaagctgcagaagctcgagtccttcaagaggctctgcgagatgctcgacaggagctaatttaatttaaactaagccatcgatttagtgagaatttgcatggtactaaggcagagtctgagggcgtaattagaataagtgacgatggaactatatgtatgtactcatgctctttcgttttagaggagaattgatgtaccaacacgagtcctaatgaaggaataagagatcagactacttttttttttgggaacgcc

SEQ ID NO: 23283 - DNA, 1858 bp, Oryza sativa
  ref <308>: DATABASE ACCESSION NUMBER: AK073399
  ref <309>: DATABASE ENTRY DATE: 2001-12-06
gagccaaacagggcctgagagtgacagtgacagccgcgctccggtccggccgccggcgaggaggaagaggaagaggaagacgaccaccattaccatgcccgccaccgccacgtgtccaaaggccctccacgcccacctcctccgctccggcgccctcttcgccgacccctccgcggcgggccccctcgctgccgccgcctccctcgcctccctcccatacgcactctccatcctccgcgcccaccccaccaccttctcctacaactccgccattcgcgccctcgcccgcgggccccgcccccacctcgccatctcgctctaccactccatgctctcccactcccgctcccaccccaacaactacacctacccaccactcctcgccgcctgcgcgcgccttgccgattccgattcctcctcagctgcagctgcagctgctgcgggggttgccctccacgcctccctcttccgccgcggcctcgagtctcccgaccgcttcatcagggcatccctcctctccttgtacgccgccgcgggggacttgcccgctgcacgccaggtgttcgacctcagcccccctaaccactacgtccaggtgctccgcctcttccgcacgatgcgcactgccgaccacgtcaccctgctcgccctcctatccgcatgcgcccacctcggggcgctccacaccgcccgctgggcgcacgcctacctcgcaaccacctgcagcttccccatcacaacaaatcttgccaccgcgctcctcaacatgtacatgaggtgcggcgacgtccaaaccgcatgctccctcttccactccactcccactcgccacaaggacgtccacacctggaccgtcatgatcgctggcctcgccctcaacggcttctccaccgatgcactccatttgttcacacacatgaaggaccacaacatacagccagattccgtaaccctcaccgccgttctcagcgcatgtacgcatgctggcatggtggacgagggcaagaggatcctgcgccgtatgcctctcgactatcatctgcaacccaccatagagcactatggttgcaccgtcgatctgcttggccgagcaggcctgctagaggaggcattggctcttattagggccgtcccgttcaaggctgacgttgccctatggggtgctctcttggtggcttgtagatgtcacaggaattttgagatggggcagatggttgcgatggaaattctcaggttggatccccagcatgccggggcctgggtgttcttatcaaatgtatatgcggctgctgggaaatgggaccttgtacaagaggtcaggagctcgatgaaacaacacaggatacacaagcctccaggatcgagtgttgtcgaacttgatggtgttgtttacgagttcttgtctggggatcattcacatcctcagtctgatcagatatatgcaatgcttgatgagataggcaaaacctcgagcctcaaagggcacaagcctgccactaaactagttacctttgacattgatgaggaggacaaagaagtttgtatctcgcagcacagtgagaagctggcagttgcctttggactgataaacacgaggagaggggctgttatccgaatagtgaaaaacttgagaatctgcgaggattgtcactctgtcatgaaggtagtttccgaggtctatgatcgagtgatagttgttagagatcgtaaccgtttccaccacttcaaaagtggttcttgttcttgcctggactactggtagcacagtgacaacaatgtccccagtttcttatgttaagatcaactagctgtatgcaagtgtggttggaattacagaagtagcattttcctattcttg

SEQ ID NO: 23284 - DNA, 1004 bp, Oryza sativa
  ref <308>: DATABASE ACCESSION NUMBER: AK073400
  ref <309>: DATABASE ENTRY DATE: 2001-12-06
ggcacacgacaagagaaccaaagacacaatccgtacgcacgcacacatcatgccaatggagaagaagcacaggcacgcgaggtccaggagcttcagcggcggcgccatcgtctccttcctcaagagcacggcggcatccttcacggcgaccaccaccacggcctccgcgccgccgccgccgcacggcaggtcgtcgttcaaccaccgcaacgccttctcggggcccatcgtctccatcgtcccgccggaggcgcgcggcggcggcggcggcagccgccgggagcaccgctccgggtaccggacgcccgagccgtcgtcgcccaaggtctcctgcatcggccagatcaagaaggccaacgccaagaaggtcaaggcgagctgcaagaacggcgcgtgcccgctcccgccccggccgccggccgacgccgccgccgcgcgtaggcagaagagctcgctcgtcaggaggatgctcttccgccgcagcaggtcgcggaaggcgtcatcgtcgtcgtcgagggacggcggcttcttcaaggggaggacggccgggcgcgccggcgccgccgtggctgcggcgccggcaccggcggggctcgggcagatgaagcggttcaccagcggccgcgcggcgttcgaggacttcgactggagggaggcggagaggatggcgagtgacgacgacgacgacgtgctcgtcgcgcactcggcgccgctcgtgctcggcggcggcctggtggcgtcggagccgaggaaggaggtgaacctctggagccggcgacccatggctcctcccactccgcttcgacttccatagatgacgtcagcgtgcatgagcttttgcatgcgtgttcatcgatctgttcgtccatttctaggcccaaatgcgagcgtattcccattccaatgtaattttttgatttttttttgttcttggagtaatttgtacagtcatatacttcacacgaaactgatcaaaagtacatcgatagttgttttttcttccc

SEQ ID NO: 23285 - DNA, 2843 bp, Oryza sativa
  ref <308>: DATABASE ACCESSION NUMBER: AK073401
  ref <309>: DATABASE ENTRY DATE: 2001-12-06
gatcgattcctcccttggcaaatgaatggcacaccactcttcacgcacctctgctcccctctgttggtttccatcagaaagaaggaaacaagtttctctgcgtctccgatctgcagtgcgagccacgaaggttggcgtcgtctcctcctccctctcctcctcgcgcgcggctgccgtcgagaagacgctcggcctcccttgtgcggcctcacctcctcgcgctgaatcccctactccccgtgttagatttgaccttcataatccaaaagaagaggttttagttcaagcgaacgataatggggatatccaaggtgattggcatcgctggaacaactcttctagtcacgtctgttggtctgtggaagatcggcttaagaattgtcgcggttccttttctagcaaccagtactattgcctatatcatcgctgttgcatcccacaattccatcaacataccttggatcttgggaaagaattcaaaggggaggtttccaatttggtcaagtgtactttttggtcctttcttgatacttgcccgggtatatgcaactgtgaagagacatatgaggaagaaggaggctgtgtataacatgatcactgaaggtgtttatctgggaggatggccgtttatgttgaagcatttgcccccaggagacccgtctgttattgattgcacttgcgagttgccaagaagtgattttgtcccaacaaatgagtatctttgtgttcctacttgggatacaagagccccgacgatatcccaaattgaatttgcggcatgctgggcatgtgaaaagagagccaaaggaaaaccagtttatgtacattgtgcatttggtcatggaagaagcgcttgtgtcgtgtgtgcagttctagtagcattgggcattgctgaaaactggaaggatgcagaaaacatcatccgagaaaaaagaaagataaaaatgaatgctgttcaccggaaaaccttagacgattggtcaaaatatagagcttctcagaagaaggataaataactgacattaaatcatttgacatctcaggcaaattaccatgtgagttctatgcaatctgggttctgagaaatcttcctagttctggagcttgcattgtttcccagctcatatcagtgtttcccacacgtgtcagattacttccaaaatttgttcccagttttgcttacttctgctcctatctgaaggttagtcttcaaagtccttgtaaatcagaaagctgaaaattggctttcagatggttgtgctgctatgcttagctctccacagttgccttcatctgccaccaatatcctacaggcaaataaggctccagctataaatatatgatggatgcgtccagataaatagcactacagctgctgtcctattattcttttagacttttatagaatttagttagttggctgaaagcctgaaatagttgaaacatgcatagaaagggacaaaatccatatctagcccttattttgtacaccttcacatcattgtattttatcataatcttttttaggataagggactaccactagtttattggtgtaatgaccttcaaaattatgataaaataaagtgcatgcagtatgcatgatgtgcaaaaaaaagtttgctagcttttgactacctccagtaggaggctggtccattccatgctgatttaatagggtgcattccttatatttttttgtctagtaaataatggttcagttatatgtacttcgaactttccaatcagagattaaaccttcaacaactacaggtaggaggcttatcataaaataaagaaaggaaaagaattaattgcaggtaggactagagcatggtgcttactctcggggacgagaagcccagagggagctgagggcacggaggcgattatggtactcgccaattgccaagaaacatcgagctgcctgcctaattgtcagaattctgtgcatctgatgaagagtctgttgcctcaagttatcagcctggaaatccaatttgacagttgcagttttagtacatgatgaaaggatctcactcttggcactagaaaattgaaaactagagcagatactggtagtaagtttgttttactatgccatactatagttaatcagataagctccaaagtccaaaataaggataatgtcacatgtttaggtgaccattcttttctttgtatgatgtagagataacatctctacatgttgatgccatagcatattactgtaggaaaatttgttccttttcactctttattaattaacatgttggcatgtcgcattattaaaaggataaaaatgactgtttttttgctcgactgtcaagtgattggattgctcatctagacatccacaaagttgagtcaaacagggagagaaggatcagaactggaaaaagggcaggcaacaaggacttcacctgtatgacaaagccttcaaggttggacagcttgcccagggcaagggccatgtaacccatgaagctcccaaggctggcttcgttgaccacggagccgccattggcgacggtctcagctagtgactgatgcagctgctccaggccctgggagagagcttcctctgcctgctgcgatgattgctgaaggctgcagatgccaaccacttgctgttcagtcagagggtctagctggggtgccactgtctgcatcaacatcaagagtttgtaatgaaattagaaaaaccatacttgtacttagaagatgaggtcagatttagcatggttaaaacttgatttggcaaattgttttgcacattgtgaactgtgaagtgagcttcatgtttgatgtcagattgtcaggtgcattttcttatgaaaact

SEQ ID NO: 23286 - DNA, 2912 bp, Oryza sativa
  ref <308>: DATABASE ACCESSION NUMBER: AK073402
  ref <309>: DATABASE ENTRY DATE: 2001-12-06
gagcttggcccggcccgttgggaggttgcgcttcgagtctcctctccgatgctcgcgccatcggccggcggcgcctcctccgcccgccatgttcgggagctcctgcggcggtgcggctccgtgcaccgtctcaaccagctccacgcccacctcgtcgtccacggcgtggacgacgtcacctctcagatcctcgcgtcctactgcgcgctaccggctggtggtggggtgtggtatgcccgccaactgttcgacagaattcctgatccggacaggttcgtttacaacagtcttatcagagcctactgcaatagccattgcccccaagaagcgctgcctcttcttcgtggcatgatccggcgaggcatcctgccgaacgagttcacgctgccattcctcctcaaggcgtgcgcgagggtacaggcgtgggagcatgtgatggtcacccatggcgtggttgttaagctgggatttgtggggcaggtgtttgtggggaatgctcttctgcattcttatgcttcggccgggtcactgggggattctcgccggttctttgatgagatggtggacaggaatgtggtgtcatggaactcaatgatcaacggatatgcgcaggctggaaatactagggaggcgtgctccttgtttgaggggatgagacgtcagggactcttggctgatgagttcacgctggtcagcctgctttttgcctgctcagcggagggaaatcttgaatttggtaagcttgtgcactctcatttgctggttagaggatgtcggattgatttgatccttgccaatgctttggtggacatgtatggtaagtgtggggatttgttgatggctcatacatgctttgacatgatgcccttcaagaatgctgtttcatggacatctatgctttgtgctctggccaaacgtgcgtctattgatgccgcaagagattggtttgaacagataccagagaagagcataatatcttggaatgccatgatctcttgctatgttcaaggtggccgattccatgaagcgctggatctttataaccgtatgaaattgctaggcctcgctccagacgagtttaccttggctgctgtcctctctgcctgtgggcaacttggcgatttggcttctggaaagatgatacatgactgtatcagagataacttccataatccaggtgttgctctatttaattcacttcttgacatgtatgcaaggtgtggtcaggtagacactgccataagcttgttcagtgaaatgcctagtaaaaatgttatctcatggaatgcgattattggggcgctagcgatgcatggacgtgcacaggatgcactaatgttcttcagatctatggtatttgatgccttcccccctgatgagataacctttgttgctcttctttctgcatgtaaccatgggggcctactggaagctggacaatattactttcaagctatgatatgtttacaatgttaagcctggcgttgagcattatgcctgcatggttgatctgcttggccgtggtggccagctagcaaaggctgttgatctgatcaaagacatgccaatgaggcctgatgttgtggtttggggtgcgttactaggagcctgcaggatccatggacatatacagatcggcaagcaagtaatcaaacaattacttgagctggagggaatgagtggaggcctgttcgtcctaatttcaaacatgctttatgaaactcaccagtgggaagacatgaaaaggctcaggaagctaatgagagagtggggcatgaaaaagaatatgggtgttagttcaattgaaacaaacagtaacattcatgaatctggagctgaaggcattggacatgagagctcagacgacatgtatgtaggggatgataggttgccacatcatttggtctttccaaatgccttggctgtgccaccagaccaactaaatgtggaagaaagaaaatctattctaaagacctcctagaatcaattagaaccttatgatgtagagtaaagcactataccgaatcaagattggtactgtgaatggtctatgtcttctcaggcaaacgttcaccatcaagtagcttgactgttgaagcctgaaggtgttctgcagatatcatggtttcatggttcactggacagtccactcaaccatcatcagtacagatagttaggtgagtagcattacatctaaaaccctcagtagtcgctgccttcgctgtgatgtctcaacagtactgtgatttgcgggaaactcaagcttggaaacagtcgattcatcagattgaacaactgcaggatgagatcataatcaagcctagtacattgatcagctcgtgatgcttgtcacatctcacatggattcctactggtacatcagttaaccgggtcccttcacttcacagcttgccggtttgaagtgcaataaaagagtgccccatgtgttgtgcttcggcagttaagcgccgagtcgacatgagttgccactggagccacaccgccgcattattattggttattgacctccactgtgctcagtgtccacgtcaagccagcagatcttggtttcacaggcatgtggagataaacaaagggagcagccagcaccaaccagaatgatcaagattccgttttattaattttcaagtttcatggacaaactactacagtggttcagagatataaaaagaacaaaacaggcagacagatctatactgccgtacactttggcatgagtgacaggtctgtcttttccctccctcaccttttcttttctaaatacagatatgcacggacaattcttttttcgatcataacaccaaaatgagcacagttgctcattgaaaagacgaagcatccaaatttgtccaaatcaacattcacttgttaaatggtgatttttagacatg

SEQ ID NO: 23287 - DNA, 2138 bp, Oryza sativa
  ref <308>: DATABASE ACCESSION NUMBER: AK073403
  ref <309>: DATABASE ENTRY DATE: 2001-12-06
gagcggcgcgttggcggcggcggcgacggcggcgggttgaaggtgaggggggagctgatgctcgccgtgtggattggtacccaggccgacgaggcgttcccggaggcgtggcactccgacgccgccaccgtccgcggcgagggcgtggcgagcgtgcggtccaaggcgtacgtgtcgcccaagctgtggtacctccgcgtcaacgtgatcgaggcgcaggacgtgcagccgcaggcgcgcgggcgcgcgccggaggtgttcgtcaaggcgcaggtcgggaaccagatcctcaagacgtcggtggtggcggcgccgacgctgaacccgcggtggaacgaggacctggtgttcgtcgtcgccgagccgttcgaggagcagctgttgctgacggtggaggaccgggtgacgccgcgcaaggacgacctcctcggccgcgccgcgctgccgctcgcgctgttcgagaagcggctggaccaccggccgttcgtccagtcgcggtggttcgacctcgagaagttcgggatcggcggcgccatcgagggggagacgcggcgggagctccggttcgcgagccgcgtgcacgtcagggcgtgcctggagggcgcctaccacgtcatggacgagtccaccatgtacattagcgacacccgccccacggcgaggcagctctggaagccgcccgtcggcgtgctcgaggtcggcatcctcggcgccgccggcctccagccgatgaagaatcgcgacggccgtggcaccaccgacgcctactgcgtcgccaagtacggccagaagtgggtccgcacgcgcaccatgctcggcaccttcagcccgacctggaacgagcagtacacctgggaggtgttcgacccgtgcaccgtcatcaccatcggcgtcttcgacaacaaccacctcggcaacggcaacggcaacggcaacaacgccggcggcggcggaggaggaagcccgccggcgagggacgcccgcgtcggcaagatccgcatccgcctctcgacgctggagaccgaccgcgtgtacacgcacgcgtacccgctgatcgtgctgcagccgtcgggggtaaagaagatgggcgagctccgcctcgccgtgcggttcacctgtctgtcgctgatgaacatggtgcacctgtacacgcagccactgctgccgcggatgcactacctccacccgttcacggtgacgcagctggacgcgctccggtaccaggcgatggggatcgtggcggcgaggctggggcgcgcggagccgccgctgcggcgcgaggtggtgaagtacatgctcgacgtggagtcccacatgtggagcatgcggcggagcaaggccaacttcttccgcgccgtctcgctcttctcgggggccgccgcggcggcgcggtggttcgccgacgtgtgccactggaagaacgttgcgacgacggcgctggtgcacgtcctcctcctcatcctcgtgtggtacccggagctgatcctccccacggtgttcctctacatgttcatgatcgggctgtggaactaccggcggcggccgcgccacccgccgcacatggacacgaagatgtcgtgggcggaggcggtgcaccccgacgagctggacgaggagttcgacacgttcccgacgtcgaggcagcaggacgtggtgtacatgaggtacgaccggctgaggagcgtcgccgggaggatacagacggtggtcggcgacatggcgacgcagggggagaggctgcagtcgctgctggggtggcgggacccgagggcgacgtgcctcttcgtcgtcttctgcctcgtcgccgccgtcgtgctctacgtgacgccgttcagggtggtggcgctcgtcgccggcctctacctgctccgccacccgcggttccgcagccgcctgccagcggtgcccagcaacttcttccgccgcctgccgtcgcgggcggacagcatgctctgagcaagacgacgtacggcttcaaaatgtttgaaattttcagtccaaaaagatgagatttcgttttgtttttgtttttgtttacattttgctgatgaatttggacacttgagatatgagaatttccctcccatgtaactatgtttgtctcgaggattctaataagtgcatgcctggattctaat

SEQ ID NO: 23288 - DNA, 1957 bp, Oryza sativa
  ref <308>: DATABASE ACCESSION NUMBER: AK073404
  ref <309>: DATABASE ENTRY DATE: 2001-12-06
gtcacgcctccgccgccgctccatggacgccggcgacacatccgccgccgccgctgtagcccctaccccggcgcggctgcgggaagcgctcgccgccctctccaaggcgttcgagtccggggattgctccgatggatccgccgcggcggccgtctccgacctcctcaacgccgccgccgatgcagctgatgcggaggccgacgccgaagacgaggcggcggccggggtcgtcgaggagatgctccgggaggtgcacgcgttcctctcgtccccgtcctcgaatcagttggccatagatgctctctcactagagctggtaaaacctgtggcgaagctgggggcactgatgaggaattgctgggacattgccaacgctatcattgaattcttcgtgtcaaactgcaacccgagggacatgctctccatcctatgtgaggcagtagatgcaccattggcatcaaatggctcagtgtactttgttcttctattcaaggagctagccaaagtgcttgttttgattcagaggaggcatactgagcaagtaaaagtcacacttcctgctgtccttcgagttatgaatgctgttataccagaatgtgacgaggaacatggaaagatcatcgttgatatgtacaatgcagcacttagaattggcaatgccattcaagaaatgtgcaaaaaaatggtaaaccagacgaatgaagaactctgttctgtacttagtctatactcccttcagaacatagctcttgtatcaagatgcaaacaacagcatattctctctgcttgtggttcagttgttcttcagcattcaaaaattctgacattttgtgggttcacttatttgggtcttttgactggtaatgatgtcacctcagccaccgataagatttcaaaagatgaagatgcggatttgctcgagtgcttttcttttgcaatgaatggtgcaaatcttgcagttatctggacctatatggatgatgaaatctcaaaatatgctggcgctgagctggaatcagcgctgaaagatgttaagggcaaccatacgaggatgtggcaagcaattaacattcttagatatgtgttgtcttcaactcattacccatgggtaataaaatcccacagtttggacttactgctgactatagctaatgaaagtcgtattgaggaaatcaatgatcatgtagatgtttcatcttctggtcctcaaatttttgcaacactcaaggccattgaaagtgtcatgatttccgccccagatgcattaatgcggaagaaagcttttgctactttgaaacaggttatttcaatggtgccatcctctcagagattcaacatcttacaggctcttataaagaacagcatcttcccttcattgactgcacttctcctagatctggtgaaggatgaagtttcgagagagattcgtcgagctgatcaggatattgttgaatcggatcaattacaagatggtggcgaatggccaccaccttggttttctcatgcacttgagttggtggagctgatcttgaagcctccagaaggtggccctccttgtcttcctgatcatggtgaacaggtattatcagctttgaatttgctgcgatttgttctgataatagattcaagaggatcaagatcaagaaaaatgtttggggaagagactatgaggaaggtgtactcagagtggctgatgccattaagaccaattgttgcaggaattcaatcagaaagtgaagaggatggtagcgacgttgcaaatcatatcatgtgctcgttaaatcctgttcaattagtattgtaccgctgcattgagctggcagaggaaaagatgaaaggtttctaacgttttcagttcactggtttttgtacaatatactgctgtctcgaggcaaaacatgaacaagttgtgaatattatcccaatgatttgaagttgcgtttttttatgttgtacc

SEQ ID NO: 23289 - DNA, 933 bp, Oryza sativa
  ref <308>: DATABASE ACCESSION NUMBER: AK073405
  ref <309>: DATABASE ENTRY DATE: 2001-12-06
gctcgcgactttgcccgccgccgccgccgccgctctccatcccgcgagaagctcgtcgccggcgtcccgctgcatccatcctctccggcgatggcgattactttgtccaatgtcaactctgaggcaggcctccagaagcttgatgagtacctccttactcgcagctacatcagtgggtaccaggcttcaaaggatgacatgactgttttcacctcacttccttctgctcccgcagcaagctatgtcaatgtcacaaggtggtatgatcacatcagtgctctcctaagatccagtggagttaccgcagagggtgaaggtgtgaaggttgagtcaactgcttgttctgtgtctccaactgctgaccaaaaggcaccagcagctgatgaagaagatgatgacgatgttgatctgtttggtgaggagactgaagaggagaagaaagcagcagaagaacgggccgcagctgtcaaggcttctggaaagaagaaagaatctgggaaatcatcggttctgctagatgtaaagccatgggatgacgaaacagacatggcaaagcttgaggaagctgtgaggaatgtgaagatggagggcctgctctggggtgcatccaaacttgtaccagttggatatggcatcaagaagttgcaaattatgatgaccattgtggacgatcttgtttctgtggacagtctcattgaggattatttttacacggaaccagctaatgagtttattcagagttgtgacattgttgctttcaacaaaatctaaaatggagtcttgtcagaggcagccttactaaaagaggaatgctatatgctcatcatcagaatttcccaatggtttatgtttcgtctatggaccttgagtgtactgcgaaccagcgtttggtattatcatgagatttaaatcttggttggacttgttttggcc

SEQ ID NO: 23290 - DNA, 2779 bp, Oryza sativa
  ref <308>: DATABASE ACCESSION NUMBER: AK073406
  ref <309>: DATABASE ENTRY DATE: 2001-12-06
ggctctcccttcgcctcgcctcgcctctcctccaagagcgcaaccgtaaaaaaagaaaaaaaaaaaaaaaacccgaggcggcgagctctcgggctgcttccggctccgtccgtagcggcgaggagggggcggagggccattggcgcggcggcccgcgcgaggcgcgcttgcattgttggtggcggcggcggggggtcgacggggtggagggcgtgtttttttgttggcttggggtggaggcgggggatgtcttgctcgaaggtgcttctgtcgaagaagggggtgctggggacggtgtgggtggcggcggtcagcggcgtggcggcgctcagccgggaccaggtggttcgcaccaacgtcgtcgcctgcgtcgataagattttgcctgatgacaacgacaaaaccacatacagagtattgggactgcttctgcttggcattgttaggatttattccaagaaagtggaatacctctgccatgaatgcaatgagcttcttggatcatatggatcagcacattgcaatgaactaagtatcccaactggaggagcaacaaatagagtttcaaagcaagcgaagaaacctgttcgcgcaagaagattagttgtaagacaagaaggtgcttacaaggtaaaaatacctatgcaagctgtgcgaacaactagagcagaaacaagagctacttcacagataactgaagttcgagacacacatgctacacctgatcttccaactttcacaatacccaaaagatttgagcttgactcttttgatttggggattcctgaagatagggatgatgatgacgtggatcatcaccaattgccacatcaaggtaccatgttggaagatgagaatcaccatacatcctgtttgtttgagtcttataagatgatgacatgctcatacgctgatctagactctgcctgcattatgccagtacgcgtcactatcccaactgaaatgatgagtgtcattagtgaagtcaacagtctactatgcttgagtagcattgggggtgaacctgaaaatcacaatgctgaatctgcttgctttacaccagtgaaggatattcttccacctgagatggtggatatgatggctgaagtaaatgatccttcagataaaagcacaagggggaaaaaacctcaaagagaattgaatagggatgagaatgggaattctgcttgccacatccctttgtcaggaagtaaggaagtgcaaatacctgaaaatattgtggagaatgtgacttttccaagtcgtgatgcaaattgtcccacaattgaagaatcagaaaatgggtcactgcatggaactaacacaaatccatcatgtgatggttttgaggaacccgggtctcttgaacaaccaactttgcgctgtaagacaaagctaatcaatgagctgtcaccttccactccggagcccatgacagagggtggcacagggctaccctgctctcctaaatttatggttactacaccagctaaaaaggagaagcaccgggtgactagaaaacgaagaaggggattatacaataaagattatataccaacagatagaggagacaaacggaaggttagaagaagaggaacatgggtattgtatgatgaaaatattgttctaccaaatgaaacattgagaaacacaatagaggatgcaagtgatctagtgcagcagagaaggaaggcacctcatacttgtctttatacctggaaggagggcaaaattcgttctctgccagttactttcatggatccattgattttgtatccaacttcggtgtacgttagacacactattacagcagatacaccagaaaattcgtgcagggagtcagtaaaatcaagaaggcgactttcgttggagctttctgaatccaacaatatctgcgatgatgctaaaaatgtagaaggtgaaagcattccagatgaaccaagaaagagaaaattggatgaattgacagatagtgtacaggcaactgttgggtgttacactgaaagtgcacagtatcacaatgatgaagactatagatttaatgacgatacagtcaaagaaaaggatttctcaattggaggacatgaatctcattcaacagaactgcaagaaagattgaatgcattgaaaagtaaaaatccacagctcgacgaggcattggatgctgatatagatagtatggaagaggatactcatatggatgaacaacatgctagagatgaaggtttgctgcgttcaacaagaacaaggactgtagcaaggtacttccatcaactactcgtggaccagaagtgccaacaacggaacaattctgtatgccttggtcaagcactcgaaggaacgaaaagaaaaacttcagcaagattcttctatgaaactctgatcctgaagagtggtagtctcatagaagtcaatcaagagcagacttatggggacatcatagtctcagcgactccgcggctcgaggcggcattgcggagtagtgagaagcaatgacttaatttgacgcaacatgttcattggtagttttcgggaaaaagagatcccagcttcccaggagcgtttcaccttgttttatcttctgtagcatgtttatgatggtcagtcagatgtatatacttagttgggcgcatgtagcgctagatggttaggaacatgtagagatgttagttgtttcccccttttttttcccctttagatggatagcttagttatttataataactttaacagttgtaaattgcagtttcctatcagtgttagatcccgtgttcttttc

SEQ ID NO: 23291 - DNA, 1217 bp, Oryza sativa
  ref <308>: DATABASE ACCESSION NUMBER: AK073407
  ref <309>: DATABASE ENTRY DATE: 2001-12-06
gatcatccccttccccttcgccttccccccgatgatgcccaccgccacctccgcctccgccgccgccgccgccgcggcctcgccgacccagtcctcctcctcgtccgccgccacgtcgccatccagcgacctctccgccttcctcaacagcatgctcggcccgctcaacctccgcaccgacgagcggatgccgggaaccacctccgccgcgggcacggcgacccccgaggacgagcccgacgggttcgacgcggtcacgttcttccagaactacctccagaatctcatggacggcggcgccaacatccaggtcctcctcgacgacgccagcgtcggcctcgcccccggcatcggccgcgtcggcggcgccagcttcggggactacttcgtcggcccgggcctggagcagctcatcgagcagctcaccgagaacgacccgaaccgctacggcacgccgccggcggccaagtcggctctctccacgctccccgatgtcgtcgtgaccgacgccatggtcgccgcggcggatggcgccgagtgcgccgtctgcaaggaggatttctcgcctggggaaggggccaagcagatgccctgcaagcacatttaccacgccgactgcatcatgccatggctggatctccacaattcatgccccatatgccgctttgagctgcctactgatgaccctgattacgaggggcgtaagaaatcaaacccacagccaactgctggcgttgatgccggagctgcatctgggagttctactgctgctgaggagcgagaggagagtggggagagtgcgaggttggtcgaacggcggtttaacgtgtcgctgccatggccttttagtggattgggatcgcaaacgccgcagcaggatgggagcaatgggggcgctggtgccagtggctcgaaggatggaggcgcatccagtgacaaaaaataagcataaatgtgcgattgattggaggttttcctcttggatctggcgttcaaaggtctacaatatttatgtgtcgctgccacttatatactatagacatcaaaagaccaaagaaatttacagtctttttatccgctggaacaattgttcattcttgttctcgctgcccgttaggtcatgtacacaaggcacggaaactgccgaggcaggaaacgtgcgttgggagtttgagacttttatgtgtagatttgttaattaaattcatcaaagtacc

SEQ ID NO: 23292 - DNA, 1386 bp, Oryza sativa
  ref <308>: DATABASE ACCESSION NUMBER: AK073408
  ref <309>: DATABASE ENTRY DATE: 2001-12-06
gaatttccatccgccgatcccctccgatctcgaattctcgacctcccttcctccttcgccgccgccgccgccgctcgtcgccggccacctccaccgccgccatgaactacatcgtcggagcgttcaagccgccctgcgacatctccatcgccttctccgacgccaggtcgcggaagcagatcgcggtcaagaatgacaatgggaggacggtgatggtgccggtcttccagagcctggagaccatatccggggaggtgtcggtagtgccggttccgggcaagaggatcgagcacttgggtgtcaagattgagttactgggtcagatagagctttatttggagcgaggcaaattctatgacttcacttcattggtgcgtgagctagatattcctggtgaaatttacgagaagaaaacatatccattcgagttttccactgttgaaatgccttatgaatcttacaatggaacaaatgtcagattaagatatattttgaaggttacgatcagccgaaacattatgggcatgggcagcattgtggagttccgtgagttctgtgtaagaaattactctcctgcccccacaatcaacaacagtatcaagatggaagttggaattgaggattgcttacatattgagttcgaatacagcaaaagcaagtaccatctcaaggatgtgattattgggaagatctactttcttcttgtcagaataaagataaaaaacatggaactagaagtacgtcgtagggaatcaacaggagcaggctctagtgcatatgttgagactgaaactcttgcaaagtttgagttgatggatggtgctcctgtcagaggagaatccatcccggtgaggctattcttgacgccttacgagctgaccccttcgtatcggaacataaacaacaagttcagcgtcaagtactacctgaatctggtccttgttgatgaggaagataggaggtacttcaagcagcaagagatcaccatgtatcgccttctagaaaccccccaggcttcctagattccaaactggagcagcaagatgtttttcgattctcaggttttgtacaagctagcatcgaggttagggcaatggcgtacttacatgtatataaactccagaagagctcggcagttcactagtgctgctctccaaatcacatttctttgtttctgtatcttcttgtcctctgtgtgcttatggtagaccctttgattcatgtggagtatatgtgcattacctccccctgtttatttctgtttcttgaaagtaatctgtccgaagaccttatgtgtattatctcacaaggatctttgttaattcacttgattgaagttttgcagtgatgattgaagttttgcagtgatgcataacatgcttcatt

SEQ ID NO: 23293 - DNA, 1377 bp, Oryza sativa
  ref <308>: DATABASE ACCESSION NUMBER: AK073409
  ref <309>: DATABASE ENTRY DATE: 2001-12-06
gctttctgcgccgtcgatccatccatccggcctcgccgatccccatcacctgcgacggcgagcagcgtcgccggcgtccggctgcctccgccgcatactcggctcggtcgtcttctcgaccttcactctccggaggtctcctcgctagccccgccgcgccgatttccatccatccctcccgcgaggtgggtgccgccgtcctgccgcttccgcctccgctccggttggctcctgaagttgattaggtggtgccatgggttcaaaggattctcaagtcgaagctactttacaagatgggaacaaagaagatgaagaggatgattgggaggcgattgcagatcgtggtgaaaacgatgagacgctaacgctagcgcgttctctcgagcagcaagcaaaggtttctcctagtagttcttctgagaaaattagcactccatcttcagggcccaagaggaggggaaggggttcgtttctttacgacaagagtgttctatacagtgatcagtgtggtctagaaaatgatatggatgaacaagagtctaatgatcagagtggatcaaagggccgtgtggatgagcagaaacacaagagtaatgcagctgcgaaacaatatgggacaaggcatgtccttgttctttatgacttcccacctagcacactcgcagcagatttggaaaagattttcgacaagtttggggaccatggagttgccattcgctgggttaatgatactgttgcacttgcagtttttcggactccatcagctgctaatgaggcacaagcttgtatacctccaagatataaagtgcggccactaaaagaggatgacgatctcttgacaaaaaatgatggcatagaccttgaaccaccaactccaaggccgaagacatctgcaagaacagcacaaaggctgattgctcatggaatggggctaaggcagtttacaaacttcgggtcagacgagctgaagaaacaagaggaggcgaggaggagtcgaatcgctgctcgacaagctttgcgggacgacgcatggggttcagattgactgattcgccgccttcatggatcatcgcctctagcagccaggctgctcccaggcctggtgccattttgtgtgacctgtggctgtgggtgcttaagaccatgtctctgtacttgggttggtttgtgccgtttctttccgacagagaggaacagaggtagcgatcaagatatatagataaactcgcgtcgcccaagcaaatgtcaagcatggcggagtatgaatttactgtaagggaataccctgaattctggcggttttggtagaccgtaattccctggattgatacgtgcttctttcagaaattctggaaatgtgtcttatttccgtagttc

SEQ ID NO: 23294 - DNA, 1567 bp, Oryza sativa
  ref <308>: DATABASE ACCESSION NUMBER: AK073410
  ref <309>: DATABASE ENTRY DATE: 2001-12-06
gactgccacacatatcgctatctctgctagataccaagtgcaactgtgcaagtgcaagtccaagttcagagagagagagatcgagctagcctgactaaacttgaaaatattgcatttgcgtctttgatcttagctatagcttgctgctgctgctgctgatagtttagcttgagagagctagcggcaagagcaaagatggttggggccgtgcaggaagggatagtgcgtgagatgaacggaggattcgaggttatgagcgggtatgacaggtcgtccatggcgccgaagcagcagcagagggaggaggagagcaagtggtacgaggaggagatcgacgacgacctcaagctctgctacgctctcaacagtgtgttgcaccggggagcaagcaagtaccaggagatcgctctcattgatacaaagcattttggcaaggctctaataatcgatgggaagatgcagagtacagaggtggacgagttcatctaccatgagtccctcatacaccctcccctcctcttccatcccaacccaaagacggtgttcatcatgggaggcggcgagggttccgcggcgagggaggtgctccggcacaacaccgtccacagggtcgtcatgtgcgacatcgaccaggaggtggtggacttctgccggacgtacctgaccgtcaactgggacgccttcgccagcgacaagctctgcctcatcatcaacgacgccagggcggagctggagaagagtagggagaagttcgacgtgatagtgggagacttggctgacccagtggaggggggcccctgctaccagctctacaccaagtcattctaccaacacttcgtcaagcccaagctcaacgaccgcggcgtcttcgtcacccaggcagggccagccggcgttctgacccacaaggaggtcttctcctccatctacaacaccctcaggcatgtcttcaagtatgtcaaagcatacactgctcatgtgccatcctttgctgacacctggggctgggtcatggcatcagattatccatttagcatgaatgctcagcaaatcaatgagaggatcaaggagaggatagatggggagctggtgtacttgagtggggagtccctcatttcctctaccatattgaacaagagcgtttaccagtcgctgttgaatgagacgcatgtgtacaccgaggatgatgcaaggttcatctacggacatggaagggcacgttgtgcttgaatcccatatcttacacgcataaacacctgagcaaaatggtgataaattagtagctattttccaacttaagaggtcgagatgcacaagtgtggatagcaagtctgaaattgatcagttagctactagatctccagatcaaccgatcgagaacagaaaaaagaacaagtgatcgatgcaactttgtgaagaacttttttcgcctttgttttcctacgtgaggcgaggaaagaactgaaaaagaactagaatggaataaaaactatataatgctctccatgcatgtgcatgtttcactctttttgttcagcgtaaatgaatggtagctctcttgacaagc

SEQ ID NO: 23295 - DNA, 2671 bp, Oryza sativa
  ref <308>: DATABASE ACCESSION NUMBER: AK073411
  ref <309>: DATABASE ENTRY DATE: 2001-12-06
ggccatttcccccaacccctctgaatttccctccctttccctctcctcccctcctcctcctcccgcctccgccgccgccgccgccgactacgccatggccgccaccgcgacgaagaccatcgacttcgccgcggagagagcgctcgccaaggacttcctcgccaacttcgccggcccgcgcggcgagcccaagtacctcaacatcctccaagatgtcgcgaaccggaagatccgcgcggtccagatcgagctggacgacctgttccactacaaggatgcggatgacgagttcttgcagagggtcacggagaacacgaagcgctacatcggcatattcgcggacgccatcgacgagctcatgccggagtccaccgaggcgtacgccgtcgacgaggacagggacatcttgatgacgcagcgcgtcgacgagggagccgatggcggcgcagacggcactgaccccctgcagaggatgccgccggagatcaggcggttctttgaggtgtacatcaaggctttctcaaaggtgactccactcaccattaggcaagtgaaggcatccaacatcgggcagcttgtcaaaatatctggaatcgtgactcgctgctcggatgtgaagcccttgatgcaagttgctgtttatacatgtgaagaatgtggttttgagatataccaggaagtgactgctagagtatttatgcctctctttgaatgcccatctcaaaggtgcaagctgaacaaagccaaagggaatctaatccttcaactgcgagcatcaaaatttctgaaatttcaagaggtgaaactccaagagttagcagaacatgtaccaaagggtcacatcccacgttctctgactgttcatcttagaggagagctgactagaaaggttgcacctggagatgtggttgagatgtcaggcattttcctccccatgccttactatggattccgagccatgcgtgcaggattggttgctgatacctacttggaatcaatgtctatcacccatttcaagaaaaaatatgaagaatatgaacttaaaggtgatgaacaagaacaaattgaccgtttggctgaggatggtgatatctacaataagttggcaaggtctttggcacctgaaatatttggacatgaagatgtcaagaaagcactgctgttgctacttgttggcgcacctcatcggaagcttacagatggcatgaagataagaggagacttgcacatatgcctgatgggagatcctggtgttgcaaagagtcaacttctgaagcatatcatcaatgttgctccaagaggagtgtataccacagggcgtggaagcagtggtgttggtcttactgctgccgtccagaaagatccagttacaaatgagtttgttcttgagggaggagcactggtactggcagatatgggtatttgtgcaatagatgagtttgacaagatggaagagtcagacaggacagcaatccatgaggtgatggagcagcagactgttagtattgcgaaggctggaatcaccacctccctcaatgcaagaacggcagttttggctgctgcaaatccagcatggggaaggtatgatatgaggaggaccccagctgaaaacatcaatctacctccagcacttctgtctcgttttgacctcctttggttgatcctggatcgcgcggacatggaaaccgatcttgaaatggcaagacatgttgttcatgtacatcaaaaccttgaatcaccagctctggggttcacaccacttgaaccaccagttcttagggcatacatatctactgcgagaagagttgttccttctgttcctcgagagcttgaggaatacattgcaactgcctattcgagcatccgccaagaggaagcaaaatcaaatgcaccacactcctacacaactatcaggacacttttgagcatactccggatttctattgccttggcaaggcttagattctcagaaaccgtcgctcagagcgatgtcgatgaagcgcttcggctgatgcagatgtcaaagtactccctatactcagatgaccgccagcggtctggattggacgcgatttctgacatatattccattctgagagatgaagctgcaagaactaacagcatggatgtcagatatgctcatgcccttaacttgatctccagaaagggttacagcgaggctcaactgaaggaatgcttggaggagtatgcttccctgaatgtttggcagatccaccccaacacctttgatatccatttcatcgacgcgtaatgcaggaagaattgatcgatcgatctcctctccttcaaagttctaacatacccatgatgagctcatgatggaaaatctagagtttgaagctccaggaagttgtgaccatggctagggaagccattgatcaaggtctaacaaggctgtaaaagtactagggatcttagataaactataattttcaatgatgttattctgggtagatgtagcctgtgagaaatgtattagtagagggagccattgctatcattgtccaccttgtgagaagcattgtggttttttcagccatattcttgactcttgttcaacacttgatactgaagtgtatgtatcatgttgtgtttagttgctggcatttatgttctcagacagcagcgattaaaaaaaacagaaaatttc

SEQ ID NO: 23296 - DNA, 2223 bp, Oryza sativa
  ref <308>: DATABASE ACCESSION NUMBER: AK073412
  ref <309>: DATABASE ENTRY DATE: 2001-12-06
aaaaaaccctaaccccagccaacgcgtcttcctgcccatccccggcggcggcggcggcgtcagcggcggaggtcggcgactagtaccagcgaggaggaggagaagaaggcaaccggagatgccgctggggcaacgcgcgggggacaagagcgagtcccgctactgcggggtggaggtgctcgacttccccgccggcgaggagctccccgccgtcctctcccactccctctcctcctccttcgacttcctcctcgcccccctcgttgatcccgactaccggccgacgcccgggtccgtcctccccgtggcggcgtcggacctcgtcctcggcccggcccagtggagcagccacatcgtcgggaagatcagtgagtggattgatttggatgcggaggacgagcaactccggttggactccgagatcactctgaagcaggagattgcgtgggcgtctcatctctcgttgcaggcgtgcgttcttcctcctcccaagagatcttcttgtgccaactatgctagagttgtgaatcatattttgcaaggcctgaccaatttgcagttgtggcttaggatacctctggagaagtctgaacctatggatgaagaccatgatggagcaaaagataatagcgacatgagtgataccgtagactcttgggaatggtggaattcatttagactattatgtgagcatagcagtcaactgtgtgtggcgcttgatgttttgagcacactgccatctatgaattcactagggcggtggtttggggagcctgtaagagctgcaattcttcaaacaaatgcttttctgacaaatgccagaggttatccttgcctgtcaaagcgccaccagaagctgcttactggattttttaaccattcggttcaggttataatatctgggagatcaaatcataacgtatcccaaggaggagtgctctcaggtgatgaaaaccacactgaagatactgctgttcggcatgcattgagcccataccttgactacattgcttacatatatcagaggatggacccacttcctgaacaggaacgctttgagatcaattatagggattttctgcaatctcctctccagcctctaatggacaatttggaagctcagacatacgagacttttgagaaagataccgtgaaatatacccagtatcaaagagcaattgctaaggcattggttgatagagtttccgatgatgatgtctcaacaacaaaaacagtgctgatggttgttggagcaggccgggggccactagtgagagcgtcgttacaggctgctgaggaaactggccgcaagctaaaagtatacgccgtcgagaaaaatcctaatgctgttatcacccttcacagtttgatcaaattggaaggatgggaaagcttggttactataatttcaagtgacatgcggtgctgggaagcccctgagaaagcagatattttggtcagtgagttgcttggttcctttggtgataatgaactttctcccgagtgtctagatggtgctcagagattcttgaagccagatgggatttctattccttcatcatacactagctttattgaacctataacagcatcaaaactacacaacgatatcaaagcacataaagatattgcacattttgaaactgcatatgttgtcaaactacaccgaatagcaagacttgcaccaacacaatcggtttttacttttgatcatccaaatccctcaccaaatgctagtaaccaaaggtataccaagttgaaatttgagataccacaagagacgggatcatgcctcgtgcacggatttgctggatattttgatgccgtattgtataaagatgttcatcttggaattgaaccaaacacggctacaccaaacatgtttagctggttcccgatcttcttcccattgagaaagcccatctacgtaccgtcgaagacgcctatagaagtgcacttttggcgatgctgcggtgcaacaaaggtgtggtacgagtgggctgtgacggcaccttctccatcaccaatccataacagcaatggtcgatcatattgggtcggcctataagtaaagccatgaagccagttttgttttgttccgattttctttttagggattctttttgttgtcttttgaaagagaggagagaacagattccattgtatggtttcttgtgtggagtgactctttatcagatatgctgcgtgggagattgattcttc

SEQ ID NO: 23297 - DNA, 2167 bp, Oryza sativa
  ref <308>: DATABASE ACCESSION NUMBER: AK073413
  ref <309>: DATABASE ENTRY DATE: 2001-12-06
gaccctctctcgctcccagtctccctcgtcgtctcctcctcctcctcctccatccgccgccgccaccggcctcgtcctctctccttcgatggcgaccgccgccgccacgcagtcgcagccggtgcgcgtcgtgctacgggtgcgcccgcacctcccgtccgaggcgaactccgcggaggcgccgtgcgtcgggcttctcgggagccaccccggcggcgaggtcaccgtccagctcaaggaccagtacaccagccggaacgagtgctataagctggacgctttcttcggccaagagagccgtgtctgcgagatattcgatcaggaggtcagcgccgtgatcccgggaatcttcgaggggaccaacgcgacggtcttcgcctatggcgctaccggcagcggcaagacctacacgatgcagggcactgaggatttgccggggctcatccccttggcggtttcgaccgtgttggcgctatgtactggcacatggtgctctgttgagatctcatactatgaggtatacatggagcggtgctatgacttgctagagcccaaggcaagagagatcatggtgctggatgacaaagatggcaacttacagctaaagggcttggcctgggtgcctgtgcgatctctggaggaattccacgagatatactctataggagtgcagaggagaaaagttgcccacacaggcctgaacgatgtttcaagtaggagccatgctgtgctatcgatcaggattactactgatgttgttaaagggaagcttaacctcatcgacttggctggtaatgaggacaaccggagaacttgcaatgaggggatccggctacaagagagcgccaagatcaaccagtcgctgtttgcgttgtctaatgtcatatcggctctcaacaagaaagagccacggataccatacagagagagtaaattgacccgcatactgcaagattctcttggaggcaatagccatgctgtcatgatagcatgccttaatcccgtggaataccaggaggcagtccacacagtaagcttggctgctcgttcgcgccatgttacgaaccacatgagttcagcaagcaagcaagagactcctaaagataaggttgacatggaagccaaattgcgagcttggttggaatccaaggggaaaacgaagagcatacaaagaatggatggacttctctccccaaatgcaatcaagactcctctatccatgagccataagaagcaatcagcatctggcagggtttctggtagaggtaaagcaatggatcaagatggtggtaaaatcaagaaggtgctttttgactcagcagcccgtattccggctgaaaacttccacagagagggcacacaagatatagtaaatacaacaaagaaagtggtgctcccttcattaactccatgcaaagaggacaaaactggatcatctcttaggaaggcactttcccccatttcttcaaacatggatcctcaaaagcaacggacagctgatgatagcaattgcttgatgttgttggagctgagaactccaatgggatcatgcaacatagtagggaaggtcacaggtgctacaccccttgataaatttattgcacttggctctaacctgaaggaatctcttattcagcaataccttgatttcttaaatgttgcaaacaaggaagaactacagaagttgaaaggcattggtgaaaggagggcagagtacattcttgagcttcgagaagattcgcccagaccatttaaatctctttcagatttgggaaatattggtctatcatcaaaacagatacaagatattttgtgcaagacagcgactggaatcttcaaatgatcaccggaatggaaatgccaccgaactctaccactttgaagatgctggctcatattaacggtcagattgttgtgggctattgacttgtgattatcagccaggtctgccgctgaatcaagttagctccctcctgtattgccgaatttaagcaatctgtagtttgtgtaccatccatgattccttgggtgtaattgtagctgtagtcatctgatgtactactagagtatggagcaatggttgctcctctctgttgtagattttctccgagaaaccgccgtttaatttgagctgacttgcacgagcagcaggaaatgaaatttgtgg

SEQ ID NO: 23298 - DNA, 2025 bp, Oryza sativa
  ref <308>: DATABASE ACCESSION NUMBER: AK073414
  ref <309>: DATABASE ENTRY DATE: 2001-12-06
ttaaccagagccgaatccgtctttcctctcctcctcctcctcctcctccgaccaccggccagccggcgaagtcctccgccgcggagctcacctcctccggcgccggcgacgcccccctcggtagccccggggaggacgcctttcctccggcgaccacttccccagtcgccgcctccgccgctcctcgaaccactcacgcgccgcgcgggctcctgtcccaggctatcagccgcgatttccctacccctctcgccggatacctcgccgccgtccaagagctagcgtctctgatggaggaagagcgcatggagccgccgccgccgccgccgtacatccacatcgagaccaacgatttcttgcacaggaggcacaagaggcagaaagaggggacatagctgtgtgtgagtgccagtataatctgctggatccggacagcgcgtgcggggatcggtgcttgaacgtcttgactagcacggagtgtacgcctggatactgcctctgcggtgtatactgcaagaaccagcgatttcaaaaaagccaatatgctgcgacaaggctggtaaaaactgaagggcgtggatggggccttttggctgatgagaatattatggctggacaatttgttatggaatattgtggagaagtaatatcatggaaggaagccaagaggagatctcaagcatatgaaaaccagggtttaacggatgcctatattatctatctgaatgctgatgagtctatcgacgcaacaaagaaggggagcctggcaagattcatcaaccattcgtgccaaccaaactgtgagacaaggaaatggaatgttcttggggaagtaagagtgggaatttttgcgaaacaagatattccaatcggaacggaactatcctatgactacaactttgagtggtttggtggtgcaatggtgaggtgcctttgtggagctggcagctgttctggatttcttggggttaaatcacgtggtttccaggaggctacatacctgtgggaagatgatgatgacaggttttctgttgagaatgttcccctttatgattctgctgatgatgaacctaccagcattccaaaggacatcttaataaaagatgagccaaatacacaggatggcaacaacaacacaatccaaaatactgggattcctattattgcaagttcaagtgaattcacaccgatgaatgttgaaccatcgattgcgagttcaaatgagttcacaccgatgaatgttgaaccattgaatgtgagctcaaatgaattgacaccaatgactattgaaccattgaatgctattccaatgggagttgattttactcagaatggatcaattgaatatggtgcgcaatgtgctgaagatgctctgcaaaactcaacgcgtggagttgcaaacctccagaatcaaagtgcgccccgggacaacaaccatacagagttggttgcggtgaaacgtagacccacacttcgtggtggaaaagctaaacgtggtatgcgcaagcaactgaatgttgtgggtatctgtgatcggttagcatcagaggtggcacgtgaagaaatattgtattgcgaggaaatgaagaatgaagctgctgctgaaattgacagcctgtacgacgagataaggccggcgatcgaagagcatgagagggatagtcaagacagcgtggccacaagccttgcagagaagtggattgaggctagctgctgcaagtacaaagctgattttgatctgtatgcttccattatcaagaatcttgcttccacacctctaagatcaaaagaagacgcggcccctacagagcaaaatggattgatgtacttggaaaacggtccatgaaccgatttacaaattggacttgtaaaagctagaaaaaggctagagattgattgtcagacatagttgaggtttaggggattatcttccctgatacaatttggttaagaaaattatgcaaggtcatatttttcttattgcaaataccattaacgtgagtatgtttactcatggaaaccctg

SEQ ID NO: 23299 - DNA, 1250 bp, Oryza sativa
  ref <308>: DATABASE ACCESSION NUMBER: AK073415
  ref <309>: DATABASE ENTRY DATE: 2001-12-06
gataattcatctccacattcttcattctccattaatttcacggtttcatctcgacatctcatcatctgttttaagttgctagctgaggaggaggagcaggtgccagcaatggcgtcgtcaaagccaatcctgtacggtgcctggatcagctcctgctctcaccgaatccggatcgttctcaatctcaaaggtgtggattatgagtacaagtcagtcaatcctcgaacagatccagactatgagaaaatcaatccaattaagtacataccagcattagtagatggagacctagttgtttctgactctctcgccattgcattgtatcttgaagataaataccctcaacatgctctcctacctaaggatctcaaaaagaaagctcttaatcttcagattgcaaacatagtttgttcaagcatccaacctctccaaggttatgctgtaattggtttgcatgagggtaagctaagccccgatgagagtcttcagatagttcagcattatattgataagggcttcaaagcaatcgaaaagcttttagaaggatccaactttaaatatgctactggggacgaagttcaattgggggatgtgtttctagcaccacagatccatgctggcataaatcgcttccaaattgatatcacaaagtacccaaatttggcaagactccatgacacatacatggaaattcctgcatttcaggcagcacttccaaagaatcagccagatgcaccttcatgctaaaatcaagattgcaaacaagctgccatatccaaaggtgcaagacctgcttgcccttgtataagagggtcagtgtttgagaatgtggctctccaccaaccatgtcatattgtcattttgcatgaatgtctaaggtgaaaccctagcgactcttgccccggcggcggcggcggcggcagcaaaggcgaagatgatctacgacgtgaactcccctctcttccgctccttcctcagccagaagggcggcgcctcctccgacaagaggaaaatggaagagcaaaagccaaaggagcagaggcccaaggccagtgagaacaagcctgtgatgaatgaatgaaggctttctgatgtgtttggtccttacaaggaataggcttcaatcatgtgattcctagtatgtttctgtactggttctgtttaagtgagtttgatgtgaaccatgtctggaacatctgagaacttcccagctatcaatctttaattttacatctgagaacttcccagcc

SEQ ID NO: 23300 - DNA, 3852 bp, Oryza sativa
  ref <308>: DATABASE ACCESSION NUMBER: AK073416
  ref <309>: DATABASE ENTRY DATE: 2001-12-06
gataccatcgagctctccgagctccttctctctcctctccatgtccggccattgccgccaccggtcgatctccctcaccggtgccccactggccaaacccccgcgccaccaacttcgcctcggcgaggcaaacccatttccccacttccccttcctttcccccttcgaaataagccaccaccgccacttctccttgccgccggagataagcttttcccctagccgttccggcctcctcccttctttccttcgctagacgacagcttccctggatgcgtgttgctcgggaacacgcgtggccgccgacgtcgtcgtctcccggccaccagggcaccggcgccccttctctccttctcctgtgttggctggaaggaaaagaaaagaagagaacacgggaagaagaagaagaagaagaagagaaagaaaaagaagagaagatactgacagagtctattttattctgaatggcaacctgtggtatttcgagcatcgaataatcaggttgcctatttcggatttatttgcgttggagcaagggttagggaatcattttgcttgatgagaagagccttgatgttaaccaggaatcagaaaaatgggcaataccagcaaaggcaaggtgaagcagacatacctcattatttcaccatacctctccataggaaatgatgaaagagaaagagagtaatataccctgcagtaaacacaaattgccaggtaagtgcatttcaaaaacataaaagaatctagtcggttcaatgatctacctcaggacagtcctaagaatcacaaaacacaaaatggaagatgcatgtacatcgtagcgtgttataaaacacattggatatcactgttttttctgaaaagttcctagaaactacaccaagaattgtgactgatgagggaaagcacacaagaaaagaaccaattcatcaacagcgaatgcaaggcggcaagcttatcaggtgactgaatcagatatccaagagcttttcaaacggataaactaaaatcactattaaaatggtatgtaatttgccatatgaaatgcaccatttctgcaatatcgctatttatgtagtactgcaagcatatttttgctatcaaaacctatttcactgtatatggaaaaggtacataggcataatttcttctattttagatgctcaattagaaaagaacacagtagtgccgtgaagagataatatatctatttctagtgagtctagaagtgttactggccctgaagagataaccgagtggttcttaataattctcacaatttagaacccaagaccaaattgtagaacacatgcattaatagctagttacctgcatgaaagctagtgtatattgaattggtttccatgattagagtgttgccaatcataaaaatcaggcaaaccaagttatcatgtgtcaatgcttgtgccaaattaagaatgcatggacaattaaatcctgcgcgataaaagaaactgattcatacaaacaggtgaaataaatcaactaacatgcattggttgcatgagtatcaagatgattgcatccacaatccaaaccttaattggatgaaatggttcttaattaagtaaatgtagggcataaaataaataacatagaattattcttagcttgaaaagttatattgacattctgtcataaatgcaacatgtagaaacctaaacataggtgcaccaaaccatatctccatgaaagatgaccctttgacaactattggtatgatatccatctagatacctcaaagaagatggggatgccaagaataaacaatatacctacatataatatctgagcacctactacataaaatggaagggagaaacaccaagatcataggcaagcccaggtaacagccaacacttcgacgacattaatcatcctacttgaattgaaaaaaaaaagaaagcatcaattgtttagtgcccaagaattagactaaaagtgaggctcagatcagagaaaaatattttactaaatgggttactattaatataacaaagcactattctaggtacatatatgccagcacatactcttatcgtaaattggatgtgtcaaagagcaggggttagcagaggaggcagaaaagaaaggataaggtggactatttccatttaagaatatattgccactaatctgcaccagaagaactattgcaggtagatatctatacacaataattagcaaaattaagaaactgcaagcattatgctaggatgattttgtaatcaaaatgatatgagaaataaatagatgagtggtgctggagaggcaagtcaggccattggtacctatctttccatgctgaattcttcttcgatttagaaattcgtaatggttggacacttctacctggacacttctacctgtcctccatcaaggaatgcatcccatattcccattctgatgttctttaaaaaaaatatgcagttccgatcatttattagtacatatactatctatgaagcaaagggagagggagggagtgggagagagagcaagaagctaaaaatgcaaatggttagttttgtcatgtagagtacagataacacatcctcttttgtacgagtgtgttagattaggttgtccttcacagcaatcagccaagaaattccaaagcagaaacaaatatctgcaactgatgacaaagaacagctatatatccctggccaactgtatctgaagcgtgcttttttgcagaccttaaaaactacagggtgcatagccacttgcttgaactttaaagaaaaataaatccagttaaaaataacctaaaaatatgtagaattggaggaaggggagatgatacctgtggaagttagaaagggtttgatggtgctggcggctggagcagatgaaggaaacggatagtcttgcgaggcagtggagcagcttgggatggacttggcagcgatgagtgaagcgaaggtcttggtgcttgctagcagcttgctctgcgcgaagaagacgtccttgcgtccttggatcttgagctgcggaaagaacaacggcttggcatccacaatggcggcaatcatgtccttggcctgtaggtcgagccggcgcatctcatccccgcctacgggggcttatactacgatgcggacgcagcggcgctggggtctcagagctccaccacccaacctcctcatttgccagccgaggaggttaggtgaggagggcatgcggtagcggatgaggcctgcctggcggctgcggcggcggcggcgcctgttgctggccgatttcctcaatcgcgccggcagtcgcggcagccccacctcctcgcgacctgctcctctccatctgcgcgtgctccagagcctccaccggcgtcggcgtccaggcttagatgggaggggcggaggacagaggtaggggaagaggagccgacgagactcgataatggtggcgcggaagtcgagtcgtgcgtttgcgtacacacttcgtcctctcgttctccaagccaggctgtgtttagatcggcgtaaagtttggattttggttaaaattaaagatgacgtgactgaaaagttgcgtgtatgataggtccaaactttatatctaatcacagccccagagtagtagcaggaagcctcccactgctgatcggtggggcctacgtatatcaattcattgggaagttgaaccacccagccgtgatttgattgggcaagtgtgaggccaaggaaatttctcatgaaactacctaagagcaagtttatttgtacggtcaactactagctccaattcatttatagccaatctaatagtttattcatacaatagttacatactacattattaatacatagtctcatctgtcat

SEQ ID NO: 23301 - DNA, 4222 bp, Oryza sativa
  ref <308>: DATABASE ACCESSION NUMBER: AK073417
  ref <309>: DATABASE ENTRY DATE: 2001-12-06
gtgattcggaggggccaaaatcaaaatccacccgccgacctcttcccctcccccctctctttccctctcgccgccgccgccgccgattcccagtcgaaccggcgccgcccggtgctcggaggccgccctccgctccgcccgccggcgaccatggagggggacatggacgcgacgatgacaaccctggggccggaggacgacacgggcgcgcaggggctgatcctgccgagcagggatagggtcatgtaccggccgccgccggggaagtccgccctaggtttggacctcctcgcgcacaggaaacgggaagcagaaggcggcaatgccttcaagccgccgcctcagaaggtagtggcagctgctacttcaatcgatgaagatgagaagccgggacctgcggagagtgatgagaagagcctgagcagtggccatcgtggcagtgtttctcgccgctatcgaggagccaactctgatgagagaacctctttcaaagaacctaccatcactgatgaggatggaaggggtccttcacccagtcaccgagatggatcttatcgacaagatacccacaaatctagaagttctcaaggttcccattctcgtagcactcctcgtagatatgatgactatgaggataggggatcccgtgataaacatggagaacgggaaagatctgcatccattggctatagtagcagtggaaggcggggacaccatgatgatagagaatcgcataataggcgtgatgaacgtgagagatctacatccgttgactacatgaacaagcgaagtcggcatgagcatagctcaagaagctcaagaacacctgcaagatctgattgggacagtggccgatgggaatgggaagatacacctcgtcgggagtaccgtgatgatcgctcaaattcccatagacaacatccttcaccatctcctatgcttgcagctgcatcccctgatgcacgcttagtgtctccttggctaggtgggaatacgccacgttatgcagcatccccatgggataacgtatctccatcacctgcaccaattcgcgcttctggttcatcaaaagggtcttcttatccacgttctggtggaagatcccaccagcttactttttcgtctacatctgcatcaaatgacagggaatctgatagaagcccctcagatgccgatggcaactatgagatatctgaagaaatgatgcaggagatggattataatgctgatcgtgcgtggtatgattgtgaagaacacaacaccatgtttgatggtgataattctatgtatcttgaagatgatagttcctacaaaaagagggaagcacaattaccaaagcggctgactcgtaaagatggcagtctgatgacccttgctcagagcaagaagttatcacagatgactgctgataatgctcaatgggaggatagacagttgttgagatctggagctgtcagaggaacagaggtgcagacagaatttgatgatgaggacgaaaggaaagtaatacttcttgttcatgacacaaaacccccattcctggatgggcgagttgtattcacaaaacaagcagaacctgtaatgccactgaaggacccaacctccgatatggcaatagttgcacgcaaaggttctgctttggtcagggaaattcgtgaaaaacagagcatgaataagtcacgccaacgcttttgggagctcgctggatctaagcttggaaatattttgggtgttgagaaaacggctgaacaggttgatgcagatactgctactgttggtgaccaaggtgagattgattttaaagaggaagcaaaattttcacagcacatgaaggtaaaagcagaagctgttagcgactttgcaaaatcaaaatctctttctcaacagaggcaatatcttccgatatttactgtacgggatgacttgctacaggttgtgcgtgaaaatcaagtagttgtggtggttggtgaaactggctctgggaagactacccagctgactcagtatctgcatgaggatggatataccaccaccggcattgttggctgtactcaacctagacgtgtggctgccatgagtgttgctaaaagagttagtgaagaaatggagactgagttgggacataaagttggatatgcaattcgatttgaggacatgactagtcccaacactataataaagtatatgacagatggagtgctgcttcgggaaaccttgaaagatgctgaccttgacaaatatcgtgttattgtcatggatgaagcacatgagagatcactcaatactgatgttttgtttggcatactgaagaaggttgttgcacgtcgacgagattttaagctaattgtcacatctgcaaccctaaatgcggacaaattctcaaaattttttggaggagtgcctgtcttccatattcctggcaggacatttcctgtaaatatcatgttcagcaaaacaccatgtgaagactatgtggaagcggcagtgaagcaggctatgacaatccacataaccagtggccctggggatatacttatatttatgacagggcaagaggaaattgaggctacctgctatgcgcttgctgagcgcctggagcagctgatatcatcatccaccaagactgtacccaagctctccatcttgcccatctactcgcagttgcctgctgacctgcaggccaaaatctttcagaaggcagaagagggcactcgcaaatgcattgttgctaccaacattgctgagacctcgctcactgtggatggtattttttatgtcattgatactgggtatggaaagatgaaggtgtacaatccacggatggatatggatgctcttcaggtttttccagttagtcgagcagctgcagatcagcgtgcaggacgtgcaggaagaactggtcctggcacatgctacagactgttcacagaatcagcttaccagaatgagatgctacctaacccagtgcctgagatccaaaggaccaatctggggaatgtggttctgctactgaaatctctgaaagtcgaaaacttgcttgactttgacttcatggacccacccccgcaggagaacatcctcaactccatgtaccagctctgggtgttgggtgccttgaacaatgttggtgctcttacagtaataggttggaagatggttgaattcccgttggacccaactctagcaaagatgcttctcatgggagaacagctggagtgccttgatgaagtactgaccattgtgtcaatgctctcggtgccctcagtcttctttcgtcccaaagatcgagcagaggagagtgatgcagcaagggagaaattttttgttccagaatctgatcatttaactcttctgaatgtctacctgcaatggaagtcgaaccaatatcgtggagactggtgtaatgaccacttcctccatgtcaagggtctccgaaaggctcgagaagtaaggtcacagctattggacatactgaaaaccctgaagatcccactgacatcatgccatatggaatgggatgtggtgagaaaagccatctgctctgcatacttccataatgccgcgaggttgaagggtgtcggggagtatgtgaactgccggaacgggatgccatgccacctccaccccagcagtgcactctacggccttggttacacccctgactatgttgtctaccatgagcttgtcctgacgaccaaagagtacatgcagtgcgtcaccgctgttgacccgcagtggctggcagagttgggccctatgttcttctctgttaaggaaaccgacacctcgctcctcgaccataagaagaggcagaaggaggacaagaccgcgatggaggaggagatggagaagctgaggcaagaacaagccgaggccgcacggcttgagaaggagagggagcgagagaagagagctaagcagcagcagcaagtttctatgccgggcttgaagaaaggctcgacatacttgaggcccaaaaggatgggtctatagatgagaaaacttgatgaaagtattcaatgtactgtgattttgttatatcgagggctcttgtacaaatacagctacgctgactcctgagctattgtagtatgtaccattctgcatgtataacacatggatgaatgtaacgattacgccacatttggcaagtctgcagtgctgtaatgatccttgtcttctgtgttgttgaaacgaagactgttatccttgtttatggttc

SEQ ID NO: 23302 - DNA, 2731 bp, Oryza sativa
  ref <308>: DATABASE ACCESSION NUMBER: AK073418
  ref <309>: DATABASE ENTRY DATE: 2001-12-06
gaccgtaaactgttactccacgctgcgctgcacggcttcctcttcctccctcctcttcttctcctcagatccctctcgcggtcgcggccaacaaccacagatccacatcccaaagctgcagcgcggggggccgcagcagccgcagcagcagcaatggcggtgcgcgcgagcctcgcctgcttcccctccgacgcggcactccaggagtcctcgggcatcccgtggggcgtcgccgtgacgcccttctccgccgccgacgagcgcggcgcggcgcccgccaccggcgccgagggccacctcctcccgcgctgcgactcctactacgcctactttagcaccctctgcccgctccaccgctggtcgtggtcctgcgccatctgctccgccgacaacgacctcacccccgacgcctccgcgcggtacgcccgcgacggcggccaggacccgcccgagatgcgctccgccttcgtggacctcctcctccctggggaagagggagaggcggcgacgacgacgccagtgtacgtggcggcaatcgacttgtcctcttcggaggagttcttggagctagtcaaaagtgctctcctagcagctcttgaagctatccctccaggatcattgtttgggcttttgacatttagcagcaagataggtttatatgatgttcaaggtccgataccgattgtgaagaatgctttcatccctcctgattctgatggtaccttacttgtcgaccttgaagatgtcatgccgcttcgttcctttttggctcctgtcgacgggtgcaaagatcgcattgctgaagcacttgaaacaattaaaccaacatcttcctgggaaataacagcaactgcctcagaagtccaggatcacgcgttgcatcatgcccgcggttttgggttagcaatggatgctgttgtcaactacctatgtacagagtacggaagtttgtttgaacttgcaaggatattcacatttttgtctggtccaccgaattacgggcctggccaaatagaaacaagaagtgacgtggaccataatgctgctaaaatgctgggatccgaccatacattcatttccgagcagacaaatttctacacaaatctggctgctagtgctgttcaagcaggtgtatgtgtggacctttttgcaattacaaatgaatacacagatctttcttccttgaaagttcttagtgttgagagcggtggctcattgtacatgtattcaagtacagatgaatcaacacttccgcaagatatatacaaaatgctaagccgtccttatgctttcggatgtgtgctgcgtttgagaacatcttcagagttcaagattgctgattcttatggccatttctttccggatcctcaatacatgcatgttcagcacataaattgttgtgactcatttgctacctacgtctatgactttgagtttcaaaaggattctcagttttccaggaagtcaagccctcctatacttcaaattgcattcaagtacacaacgattgtgcaacagggtgatacttctgatgatgtctcaaattctgtcagcagatcaaagttcaccttgcaaaggcggctaagagtgcggactatccagtacaacataactgctaatatctgggacctgtatgattttgttgatccagatgttgtattgactatactagtacaccaggttattttggcttcgttaagtgatgtgctagaggcaaggatatggctccgtgattggttggtgaatttcattgcccagtacaacaaggcatacaaggtcgttagatctggtggaactggaatgtctgatattgatgttgatttcatacactgctcacaactgcaacctctgtcaagacttgtatttgcttttctattaagtccactgcttcagcttcacggtcaaggtattcatccagattatcggacatatttgcaatgcctcttcagtgcactggaggcatcatcgcttcgccaagctatatgtcctacattgatttcatactcttctcctgatgtagaagcagaagtgcatcagtcactaagtcgaagtgtattcaacagtgagagcccgatattccttcttgatgcctacactgatcttctggtgtattactcacctacagtcagtagcacaatccccttccctcctccacgtgactgtctgttgagatccaagattgatagattgaagcaagaaaggaatataacccccaagcttgtctttatccatggtgcacacgatgatactacagcattcgagagatacctgattgaggatcaaagtgtcgatggttctttggtagctagcgccacaggttttagatcgttccttgagggcatccgaagcaggatagctgagtacagcagataggcgcccgtttcagccgttgcttgagctgcccagtattcaaggattgatttttcttgctatcatggatcagctgctccctttgccttgaagccatgttgttcctcatctgctctgtatccatggaggtgatctaccagttctcgcgggactgctaggggaaccgatttttaaatgcatttgtaagttcagactctgcaatgttttacaatatgaacatccacaccggctgaccggctttgcatggtgggttggactgtatactagagagcatatgcatatttgatacatgtttgtttaggcggcgattttggccgtgtactgatgtgttcctcttacatagtacggttatggtgcatgc

SEQ ID NO: 23303 - DNA, 1097 bp, Oryza sativa
  ref <308>: DATABASE ACCESSION NUMBER: AK099355
  ref <309>: DATABASE ENTRY DATE: 2002-08-28
gtgcacacacgatcgagaaacacaattgacagtacagaatttgtaagttgttgatttgcgccatgagaaggcttctcccgctcgccggcgccacgctgctgatcgcggcggccggcggcgccagcgggcagcaggcgggtgttgggtcgatcatcacgcgggcgatgttcgagtcgatgctgagccaccgtggggaccaaggttgccagggcgccttctacacctacgacgcgttcatcaaggccgccggagatttccctagattcggcacgaccggcaacgacgaaacgcgccggcgcgagctcgccgctttctttggccagacctcccacgaaactacaggtggatgggcaactgctcctgatggaccctttgcttggggatactgccgggtgaacgagatcacgccgtcggacccgccctactacggccgaggacccatacagcttactcataagtacaactaccagctagccggggacgcgttgggtctggacctggtgaacaaccccgacctggtgtcaagcgaccccgtggtggcgttcaggacggccatctggttctggatgacggcgcagtcacccaagccgtcgtgccacgacgtaatcaccaaccagtggacgccgtccggcgatgaccgtagctccgggaggctccccggctacggcatggccaccaacatcatcaacggcggtgaagagtgcggcaagggctactccaccgacaacgccaaggaccgggtcggctactacaagaggtactgcgacatgttccgcgtaggatacggagataacatagcctgcagggaccagaagccctacggaggaggttaagcactggagacgatcgactgggagtacgtcgtcataagcggattctcctagtgctagtacagctgctggttgcttgctaatggctagcttagccttcgcgtacatacgtatatgtacgtgatactagtacgaataaagctagcagagagcgttcgcggatatcatgtaacagatatgagtatatgacacatggtcgcttatctcacatgttattgtgaaataatattattactggtggaacgatgcccctagttaaactgatcg

SEQ ID NO: 23304 - DNA, 967 bp, Oryza sativa
  ref <308>: DATABASE ACCESSION NUMBER: AK073419
  ref <309>: DATABASE ENTRY DATE: 2001-12-06
ggtgactcttggttcgctttgggtcattccgttccgccgcatcctcctctgccgtagctttaggttttacctcctctcccgactctcctccgctttaatcgcaccgccggccgccggcgaccatgttcaaaaagttctcttttgaagatatatctgcgcagaatcaagttaaggcctctgtgcagcggaagattcggcaaagtattgctgatgagtaccctggcctcgaacctctactagatgacttacttccaaagaagtcgcctatgattgttgttaaatgccaaaatcatctgaatcttgtggtggtgaataatgtcccactgtttttcaatatccgtgatggtccttacatgccaaccttgcgccttcttcatcagtatcctgacatcatgaagaagttccaagtggatagaggcgctatcaagtttgttctctctggtgcaaacataatgtgtcctggattgacatctccaggtggttccttggatgttgaagttgaggaggaaacaccagtggctataatggctgaaggcaaacagcatgcattggcaattggatatacaaagatgtcagcaaaggacattaagactatcaacaaaggaattggagttgacaatatgcactatctaaatgatggcctgtggaagatggaacggctcgaataagtaaaatccactagggaagcataatttgctgcgccatattgaaatgtaatgagggctggaattatgtatcaatgcatcttgtgtcatgtaaacacataaaatagccagcagctacatggtgctccaagcctgttcgagtttactgtgaccatcaagttttggagatgtttggcaaaactttgactgatagtgctgtgttcaacgcttcacttggtattatcaatccagaacactgtacaatgttggtaatcctatcactaatgatttgcacttattaccaataaaatttcagatgagct

SEQ ID NO: 23305 - DNA, 2119 bp, Oryza sativa
  ref <308>: DATABASE ACCESSION NUMBER: AK073420
  ref <309>: DATABASE ENTRY DATE: 2001-12-06
gtcgatttgtcgcgccgctcccctccccgtcacggccgccgccgccgctgccgccgtttggctgagcacctcgccgccggcgctattccccaccggggcggcctcgccggcgtatctgtggtgatttgtgctgcgagagaaacttctttgtcgactccgccgccgcggttgcggttcaggagcttgccgagctcggcgaggggcggcggcaatgagggaggcggtgacggtgcaggtcggcggcttcgccaactacgtcggctcccacttctggaacttccaggatgagttgctcgggctcgccgacgaccccgacgccgacccagtcttcaagaacgacgcgctggacatggacgtcctctaccgctccggcgagacgcaccagggtatacccacatactgccctcgtctggtgtcggttggttctcgagggtcccttggttctttgagttcatctggtaatctcggtcagaccagtgcttctgcagatcagctcaatgttgctacatggtctggaagtaacaagatcagtctcaaaacctcatgggcggaacttgtttctgcaaagcttagttgaagaagggcagaatccaagcactagcaatggtgccagcaactcccagaaaagtgttgaggataaggacctgatcgactgtctagagaatagcgtcaacttttggacggattattcaaaagttcagtatcatcctcagagtttatatgagttacatgggtcatggacagactttgacaagtttgataactatggcagcgcacaagaggttgtttcagactggtcgcaaatagaggaaatgaatgagaggctaaggttctttgttgaagaatgcgaccatattcagggcatccagtttattgtggatgattcaggaggtttttccagtgtagctgcacagtttttggagaacattgctgatgattacacaaatacacctgtattgctttactgtgtgagggatccaatgacccttggatcatccaggaggaatcaaagggagtccattatgagagctcttcatgatgctgtttcattttcaaaactttcgtccttttgcaacctgatggtacccataggaccgccttcattaagtagaagttacatgtcatcgtatctttatatacaagacgagaaaccattccatgctagtgctgtttgtgctgcagcaatacattcaattactgttccatttagattgcaacgaacgggcccgagttcagacttggcacattcatctggtaatcttgacattggtgaacttctgcacattttatctgatcaaggtcggcagaacatggttactgctctggatgtagcgatgcctgccccttctttgacagatagagatgctatggggaacatagagatgaagttgcactctttgacccctgaaatcagcgatgaggatgaagatccttattcagttgaatcgctggtggttcatggggctcttgataaaggtgggcaaaggacttccatatcacaagtgaaaggctcggtatgttcagtctatgaagccagagagacaaagccaaaattttcccatctctcagcatctctttgccccctccctgtcccccttccgttcccgtcaatcttcagaggcaacattggccggcatggggagatccttagcgaccatgcagaagaatcccagccaaagggctcactcgatattgaatcgataccgatggcggcacgattacgatcaagcagcgccgtcctgcctttcatagagaggcgatcggggagcctccagaagcacggtgtcgcaagaggtgccatcgggtctctggtcctccgtgactggggcttcgggagggaggaggtggaagacatggcggagcacctagcaaagttactcggcccgtttcaccctgaaatggatcttacttcggattctgactagatcatcttcaaaaatcttacttggagaatcaagcatgatctatctgttacaatgtatgtggattgttgtaatactgaatttgtttttcagagggttttcagatactgaaaattcatgctcatgtggctggctgttttgaaatcaagaatgagagatctgaatctatgctatggtagaatttctttttcttgtgc

SEQ ID NO: 23306 - DNA, 2190 bp, Oryza sativa
  ref <308>: DATABASE ACCESSION NUMBER: AK073421
  ref <309>: DATABASE ENTRY DATE: 2001-12-06
gctagggtactgttctgtacccatcccatctgcagaccgaatttccgatcgatcctcccttcccttcccttcccttcccttcctcctgcgccgccgccgccgcctctcatcttcggttccaatccaatccaagcaatgcccaacgttaggtcctcccctgtcgcagatcttcctggatggccattgttttcgcctcctaagcttcagttgcaaaagtgtaccaagtgtcccagggaattttgctcctcaatcaactacaggcgccatacccgtgttcaccgccgaactctccaaattgaaaaggatttcctgaagaacagagacaatattgctgcattctgggacaaacttacgttggatcaggccaaaacaattttgtccttggcagatgtggatatagagggtgtcactggtccttccattttagcagcactgtccacatggatgtgtaagccggggtatgcttcattaccgctgccatatgccagagctggcaatcaacttctggacctaattgaaacaacagcttcaaggttacctgtatcatcgaatgaactatttagcatgcttgacgaagcaagtgagaatacgtttctctctactaacccaaccgcctgtatacaaaagtttatatttaacggggaggctgacaaagttgcacctgagttgaaaaatgctgttgcatgcactagttatatgcttgaacaaacactggtcgaagcatggtctgctgataaggctgctgaagcattaagatgccagaagttgctcgtggaggaagaggaagctgctcagaaaaggcaagctgaactgatagaaaggaaacggatgaagaaactgaggcagaaagaacagagattgaaagacttgaaggatgaggatgtcacagaccgttttcctggatctgtggatgggacaacagattcttctggaatactaagtctgaaggaagccacttcggatcctggcctttatgagcaagaagatacacagttgccaacgccagtggcttcggaagataatagtagttttgctgacctacctgtagaacatgacattcatgatccaggccatgaagtgaatccaagtgttactttgaatcaacaagtcttttcaagacatcgtgtaggaagaacagaaaactttgcccaaaatagctttgcctctggtggttctgcaattggttcaaagcatccagcttcagtaaggcattcacattacaggggtgcaaatgccggtgcagtgtcaaatggaaacaaaacatggacatggaaagtgcgaactgagattgaagagcacagcccaaaagatgagttgaatatagatgatgggcaagagattgttctgaacaagaagtctcgtgtattaataggatccataagtgttgccattgaagacggcagcgaatgcttggaggataaccaatattccaaggaatacccgactcctgcttctcaattgaatattggcaaccatcctgtaacgaaggtgatgcagccatttaaccatggagaagagggaaacggatacaatgctcataatgatgttgaagttagtattactccaacagcacaggatcattcttcatccggcgttatgacagatggaaacaattgttcaagctgctgcaatgcagggttggcagagggtggaggcttacgaggcgccatcttttccagtaaagaagcagctgccttcctttctcaaagatggaaggaagcaataaacgcagatcatgtgaagcttgtcctgtgccctgaaggctgaagcaagtaacgtgggatcctgttgagccggcgaagtagcaagggttgagtctgcatcatcaaccaatcggagttactagaactagtgaagttggcagaggggggttcctggcgtgtgggcactactccgtaggaaatgaagtgatggctttttgttagacgagcagggaattaagctgcattttaatttggtttggagtagatgacagccggggttcatgaacattgaatttatttgtttatatatacagttatagttatatgatatgacagccggtgcgtgcgttaacattggattcgttgcaaacatggacaagattagtgaatgttgtgctggttttggttttggttttgggttgcatgtatgtaattgtaatatactccatcatatcatatcaggagtaaatggggtatttactgctcc

SEQ ID NO: 23307 - DNA, 1171 bp, Oryza sativa
  ref <308>: DATABASE ACCESSION NUMBER: AK073422
  ref <309>: DATABASE ENTRY DATE: 2001-12-06
gattccccaaccccaaccattcctatttctaaacaacacacctcctctgcacttgctccttctcttcttctgtccatcgaatcgacaagaagaaatttacaagcaagaatggccgccaaggtgcatcctaacgtcgccgccgcgccacagccaccctgcattagcagcatcgtctcccaacaacaagaagaagaggagcccccggtggtgctcacggtgtggcgcaagtctctcctcttcaactgccacggcttcaccgtcttcgacgccaagggcaacctcgccttccgcctcgactgctacgactccaccagctcaaggcgcgccgacctcgtcctcatggacgccgccggcaagccgctcctcaccatccgccgcaagaggatgagcctctccgacagctggatcatctacgacggcgacggcgccgccacctccaccgccacgccgctcctctccgtgcgccgccgccgcgtcggcctccgcgcctccaagtccaaggccatcgcgcacgtcacgccgctctcctcctccctgccgctcccggaggcctacgtggtggagggctcgtacgggcgccggagctgcgcggtgcgcgacgcccgcggggacgccgtggcggaggtgaggcggaaggagtcggtcggggacgacgtgttccgcctcgtggcgcagccccgcctgggcgcgccgctcgccatggccatcgtcatcgccatcgacgagatgctccgcggcggcagctcatcgctgctgcggaggacatgctccgcgtaagtccaaaattcttccttctgtacagtagagacattgagctcgctgcaaggggatcagaagctcggggtcccacctgtcagcgactcagaagcagtgttcccgcagcagagtctagctagatgcagggcactaaacacccagaaaagaaaagcacaggaattatgacaaacttattagagttggtgctgtatgctacaatcaagttttagctagctgctgggttacttaagcatcatccatgttgataggaaattaagcaggactgatacagtcaggcttgtgaaagtaaagcacaagtaggacaatacatatagatacagcctagtacaggggagttcttttttttcttccccggatgtaatattacaaaagattattgtttattattatatgg

SEQ ID NO: 23308 - DNA, 2868 bp, Oryza sativa
  ref <308>: DATABASE ACCESSION NUMBER: AK073423
  ref <309>: DATABASE ENTRY DATE: 2001-12-06
ggattggttttgttgttgttaataagtcaagtgatcgagcggcgtcgcgggcagggggcaggcaggccactactagtactagtagtagtaaaagatctagcgccgcatacaccaccacacgagacgaagcagcagcggagaggggcctctcgtcggcgacgcacgccggccgtcgtcgagttcgtctcgcaatcgcctcctcctctccccctgggccgtgcttaggagtatcttcctcgcgactgtgggttagtcctcctagtgggtttatgcatgacagcccctgcagtccttccaaatgagttagaagggatctcccgttctcaaagagtagagctgttccgagacgctagttgcaatatcgaaaaggaggtactgtccagtttagcaaatggccaagattctcatgcttctggaacaaaccctggcttcagagttggagagatcaggctctccaacagggatatttatttcggcacattattggggaacacaccagagggttcagggaggtatgtctggtcagatggttgcacttacgatggtgagtggaggagagggatgaggcatgggcaaggaaagacaatgtggccatctggagccacctacgagggtgagtactctggtggctacatttatggtgaaggcacatataccgggtctgacaacatcgtctacaagggaaggtggaaattgaatcgtaagcatggacttggatgccagacgtaccctaatggagacatgtttgacggttcttggattcagggagaaatagaaggccatggcaagtatacgtgggcaaatggaaacacttacgttggcaatatgaagaatggcaagatgtctgggaagggaactcttacttggaaaaatggggattcatatgaaggaaactggttagatggcatgatgcacgggtatggaatctatacatggaatgagtgtgggtattatgttggtacttggaccaagggactgaaggatgggaaaggcacattctatccaaaaggttgcagagttcctgttaatgatgagctctacatcaataatctaagaaaccgaggtgtgctgcctgacattagaaggcagaatcacggctcacgcatccttcactcttcttcggttgacatggggaacatgaaggttggcttaactcgggaatcttcaggtccttcatctagaaggaactcaagtgagcaacctcattcgaaaaatgtatccttggaaagacggtggagccttgaggtggccattgaaaaattcattggccatgacgcaactggaagctctggcctagaaagatctgaaagcattaatgattctgatctgcctatgctggaacgggaatatatgcaaggtgttctaatcagcgaggtagtacttgacaggagtttttcggattcgtccaagaaggcaaaacggcgccagaagaaaattgttagggagacaaaaaagccaggagagacaataattaagggtcacagaagctatgatcttatgctcagtctacagcttggaatcaggtacacggtaggaaagattacgcccattcagaaacgtgaagtccgtgcttcagattttggtccacgagcaagtttctggatgaccttccccaaagaaggatcacgacttactccttcacatcctgcagaagacttcaaatggaaggactattgtcccatggttttcagaaatttgagggagatgttcaagattgatgctgcagattatatgatctctatatgtggaaattctgcacttagggagttatcttctccaggaaagagtggaagtgtctttttcctatcacaagatgatcgattcatgatcaagactcttcggaaatctgaagtccaggttcttttacgaatgcttccaaaatattaccatcatgtccgtacttatgagaacaccctcataactaagttttttggcctccacagggtgaagccttctagtggtcaaaagtttcgctttgttgtaatgggtaacatgttttgcacggaattgaggattcatcggagatttgatttgaaaggttcatccttaggccgttctactgacaaaatcgaaattgatgagaacacaactctgaaggatttggatcttaactattcattttatcttgaaccttcctggcgtgaggctttacttaagcagattgaaactgacagtgaatttctaaggacccaacggataatggattacagcttattgcttggtgtgcactatagagctccccagcaccttcggacgcgtgcatcttatcatcgaagcatggcagcagatagattaactgttctttcagaagaagacgctcaggaggacgatgctttcaactacccggaaggtctagtgttggttcaaagaggtggtgatgaaaacagtgtggttgttggccctcacataagaggtagccgtttacgatcaacagccgctggatttgcggaagtagatctactacttcctggtacagccaggctgcagatccagctaggggttaacatgcctgcaagggcagagcagaaccctaaagaagaggaaagcaaatcgtttcgggaggtgtacgacgtggtcctttacctgggtatcatagacatattgcaggagtacaacatgtcaaagaagatagagcatgccgtcaagtccatgcagtacgactccatctccatctccgccgtggacccccagttctactcggagcgtttcctcaagttcatccagaccgtctttccagaaaattcatagtgccccagccagcagccattgcgattatttcgtccgcggattgattctcctgccttgtgttatgacatgaacttcattcatagtgcctcagcagcaggtactaattttttgccgagcagc

SEQ ID NO: 23309 - DNA, 3433 bp, Oryza sativa
  ref <308>: DATABASE ACCESSION NUMBER: AK073424
  ref <309>: DATABASE ENTRY DATE: 2001-12-06
gaaggatatgtgtgggtgggttcctggatccggcgcagaggtgtgctggggcggccatcggctggcagccggctggatccagtgcgggtgggggctctgctcctaccgacatgcagcggcggcggcgaccgacgacggtggtgtctcccctctcccggcgttgccatcgacagcgaaagcagcgatctcttaaaatttgagagagtatttatccaagctaataattcagtgaatttacaaatcgagagtaatggcagaagcagtgatacttttagttgtgaagaaaattggtgctgctctaggaaatgaagtaatcaaccaagcaagttcactgtacagaaacttgtttgcacagcttgcagaactccaaggcagcatgagccgcatatgtcgtgagcttaggttgatgcatgaatttctttgcagaatggacgtacgcaatcgaaatgatcaggcatatgaaatttgggtggatgaggtgcggaagctagcacatggaattgaggacatagtagatgagtatctacacttagtaaggcagagacatgacaaaggatggagcttttatctgaagaagggaatcaatcaacctgaagctttgcgttcattaaaccggatggtctgcctcataaaggaagcagagtccagtctcgtccacctatttcaagtaaaagatcgatggattcctaatgcaagccctgggtatgccaacaattctggctatattgtcgagaagtcccaacatctagcaagtacttcccgttctatttgcgaagatctcgtgggaatcgaagaaaacagagatacattgttcaattggatgagagaagatgggatggcatgctctacaatagttcttcatggcatgggaggccttggtaaaacagctctaactgcaaatgtgtacaagcatgaacaagaatattatgactgtcatgcatgggtatctgtttcacaaacatattcgctgatggagctcttaaaaaagctaagcgtccagctttttcatgaggaaaatattcagagtaatattggcagtatcgacataatcaatcttcaggagatacttaggagattccttgaagagaagaaatacttgatagtgttggacgatgtttggacaccagaagtaatcatcgatatgtcaagagctcttgctcagaattttaagggaagtagattgctgattactacacgtattggtaatgttgcagaattcgcatcggaaggacgtgtgctaacactagagggtttgtcagaaggaaagtcttgggaacttttttgtaagaaagctttccggagagaagcaaatcacgaatgtcccactgagctgaagaatttggcgacacaaatgttgaacaagtgtaaaggcttgcctcttgctattgtgtctgttggaagcctattgtccgtgcgtgagaagaatccaacagaatggagacgaatttatgaccaactcagttgggagctgaataacaacccaggcttagaccacgttaggaatattctgtacttaagcttcatatacctcccaacttatctgaagagttgtttcctgtattgtaccttgtttccagaggactatattcttcatcggaagatgcttttaaggttatggattgcagaggggttcattgaggaaaagggtgagaatacattcgaagatgtggcggaaggctatttaattgagctggttcacagaaatatgctgcagcttatggaatgcaactcatttggcagaataaaatcctgtaagatgcatgacattgttcgtgagttggcgattgacctgtctcagaaacaaagttttggtcttgcatactacgagtatggaaatcgttgtagtaccatggacacaagcatacgccgtctcgcggtagctaaatgcagcaataatattttatcaagtatatgcttacctcgtcttcgatcttgcattgtatttgataaggccatgccatccttgagaataattaagtcaatatcagacaagtcaaagtacattgttgtactagaactacgtgggctggcgattgaaaaagtgccagatgctgttggatgccttttcaacctacgctatttgggtttgcgccattcgaaggtgaagtttctccccaagtccgtggagaggctctccaacttattgacgttggatattttcaactcctacatacaagaactgcctcaaggaatagtcaagctgaagagtctgaggcacttacttgttgagagaatcaatgatccgtcatggagggattttagaagtcgccacggtgtttgcatcccaaagggtctttcgaatttcacaaatctgcagacattacatgcaattgaagcacaggaccggactgttaaagacttgggggagttgacacagctaaaaagcttaagggtgtggaatgtgaaggaaatccactgtgaacgcctctgcgtgtctatacttaagatgagatttttgtaccacattcatatagctgcatgtgacgagagtgaggttcaactgaataagctagatcccccaccgctaagccttcagaaactctgtttgagagggagattggcagaggggacacttgagtctcctcttttccaaactggtggacagaaattgcgtggactttttcttgtttggtctcagttgaaacaagatcccctcccgcctatctctcgattatgtaatctgacacagctgaatcttacaagagcatatgttggggaactgttaatattcaggagcggttggtttcccagtttgaagtttctgttactgcgggacttgcctaatctacatcggttagagattgaggaaggtgccgggataggtattcgtgttttgcagcttagacaccttgacaagctgatggatattccacctggcatcgagtttcttccatccctccaacgtctatgctttgtccatatcagtgaagatttccttgcattgctaaatcggtgttctaggctcaagcacattcagtggtggtattcaacgcatgatcagcctctgacgaagaaatctcaatcttgatggcttgctagggctggcagcctgtcgaaggcaatggagaagcagagttcaaacatgtgtgtgattccttgcctcattcatcatccttgacaattgtgtatgcacccagtattccatcagatagggctagggagcgaaattgtttcacgtttcactctcacttataaagtcatatttgttgtatgtgtaccttgatgtgtttttctttggtataatcggttacacgaccttactggtggcctgtacatttgtagtttacaccaatgtggcatttgtaaaatcttccaaaagttactggcatgtttgacaagacatatttccttaggaactctgttaatgttttagtgtagtctgtagagccatttacagtttgcggagtattaaagagataaatatgtttgttct

SEQ ID NO: 23310 - DNA, 1501 bp, Oryza sativa
  ref <308>: DATABASE ACCESSION NUMBER: AK073425
  ref <309>: DATABASE ENTRY DATE: 2001-12-06
ggctacttaccccgcgatttctcttcctcttattactcttcctctcggctctcgctcgctcgctccccgcgcgatttctccacgccgcacgccgctcgcgagttagggatcgatctcgtcgggggcgggcgggagagggagagggaggagagatggcgggggatggtgtggactgggagagcgtggcggaggccacgtccggggcggtgggcgcgctcgtcagcaccaccgtgctctacccgctcgacacctgcaagaccaagttccaggccgagctccagacgcagccgggcgcgcacaagtacaggaatctttcagatgtcttttgggaagctgttcagaaaagacaaattctatccctatatcagggccttaagacaaagaacatccaatctttcatttcacaattcgtttacttttatggctatagctactttaagagactctacttggagaagagtggagcaaagtctatcggcacaaaagcgaacttgttagttgcagctgctgctggtgcttgcacagttgttgttactcagccactagatacagcatcttctagaatgcaaacaagtgcctttggaaagtccaaagggctgcgggcaactcttgccgaaggcacttggcttgaggcatttgatggcttgggaatttctcttatactaacgtgtaatccttctattcagtatactgtatttgatcagctcaagcagaagctaattcagagacagagacgtaaaaatgcagaagcagggggtggttcttcaccagttgctctttctgctttctcagcatttctccttggtgccatctcaaaaagtgttgctacaatattaacctacccactaatcaggtgcaaggtcatgattcaggctgcagaccctgatgaggatgatgacgatgaatctgaaaggccaggaaaatcaaaatctcccaaaacaatgttgggcgctttgcatgccatgtggagcaaggaaggcatcccaggcttcttcaaaggattacatgctcagatactcaagactgtcctgagttctgcattgctgctgatgataaaggagaagatttcaagatttacttggatttcactgcttgccctgcggcgatatctctttgtttctcagaagagaatcaagagtgcataacttttatcattatcccttcgtaaagaaaatgtaatccatgtggtattgcggtattttgagatcctgtaccaaagaataagtctcaggaataaggaacagatacagaaaagcgaaacatcacgtcatacatgtggggtctttttaatagcgtcagggaatgtttctgaataaattcgtttgtttcttcttttacccctgaatgtctacagctattgaaatgaaataggtgttccacagatcgaattagttgtagtgactacgtatagtatgtagcgtgtaaacatatcagttctgttcatattccttctttctttgctggaaatgaatcagttgcaataaatttatcttgtaatgtc

SEQ ID NO: 23311 - DNA, 2164 bp, Oryza sativa
  ref <308>: DATABASE ACCESSION NUMBER: AK073426
  ref <309>: DATABASE ENTRY DATE: 2001-12-06
gagtctcccgtcacctcgcttgcacttctctaagcttccacccacccacgtacgtacgcacgcagagcagcaagaaatggatgcggtcgccggcgccgggcagctcgttggcctcgccgcggccacgctcctcacggcggccttcctcgtcgcagtgaagatggggtggcggcgccgccgccgccaacgggaggtcgcgccggagggtggctgccgggttgttggcggcgatgggggtgaccggacggacatcgtcattgttggtgccggggtcgccggatctgcgctcgcctacacgctcggaaaggatgggcgacgagtgcatgttatagagcgggacatgacggagcctgatagaattgttggtgaactgctacagcctggtggctatttgaaattgatggagctgggtcttgaggattgtgttgaagaaatcgatgctcagcgtgtccttggttacgcattgttgaaagatgggagaaacacaaagctttcttatcccttggagaagttccattcagatgttgctggtaggagctttcacaatggacggtttatacagaagatgcgtcaaaaagctgcatctttgcctaatgttcatttggagcaaggaaccgttacatcattgctcgaagaaggtggcacggttaagggtgttcaatacaagacaaagtcaggtgaagaattaaaggcctatgcaccattgacaattgtatgcgatggctgtttctcaaacctacggcgtgtcctgtgctctccaaaggttgatgtgccatcctgttttgttgggttggttttggagaattgtcaacttcctcacccaaaccatggccatgttatcctggctaatccttcacctatcctatgttacccgataagcagcactgagattcgttgtttggttgatatccctgggcagaaggtgccttccatggcaaccggtgaaatggcaaaatatctcaagactgtggttgcacctcagattcctccagaactccatgattctttcattgcagcaattgataaaggaagcataaggacaatgccaaataggagtatgccagctgctccacttccaacccctggcgcgctgttgatgggtgatgcattcaacatgcgacatcctttaactggtggtggaatgaccgttgcgttttctgacattgttgtcctacgcaatcttctcaagcctctcggcaacctgcacgatgcaccttccctgtgcaagtaccttgaatcgttctatacactgcggaagcctgttgcttctacaatcaacacactggctggtgctctgtacaaggtcttctgtgcctcaactgaccaggctaagaatgagatgcgagaagcttgctttgattacttgagccttggaggagtcttctcaaatgggcctattgctcttctctctggcctcaatcctcggcctctgagtttagtagcccacttctttgctgttgctatctatggcgttggacgcctaatgctccccgtcccttcacctaaacgcatgtggatcggcgcgagactggtttccggtgcatgtggtatcatcttcccaatcatcaaagctgaaggtgtgaggcaaatgttcttccctgctacagtccctgcatattaccgggcccctcctccaatggaatccggataacgcatatcaatgctatcctgcatcgatcatgccgtttgtgtcccctgatctcggagctgctggaagcagaaaaaggaacagaagtaccgtgtttgtttcggcatcgaactcttcccttcaaacgtctagatgcatgcacaggcgatatgacgtacacatacatgcagtaattaagcgccggtgggtatttggatatttggattagcatacccacgtggaggtcgtccaagaaaacgaccacttaacctcgtgtcaaaatcggcgtgtacttccgtttcgtgtcactgcagctagagtggcaaatttggccacttccctttcgttgccactgtgaactgctagctgcggctgtcctgctgctacttgcttcacgcgtgcgtgaaagtacattaggagaaatcaacatctgatgtttatggattgggaaaggaacaacgacgtcaaggctgtcacaacttaaaattaattgtaaacgttgtacatcaaaacagttgccttcaatcggctttgtgc

SEQ ID NO: 23312 - DNA, 2846 bp, Oryza sativa
  ref <308>: DATABASE ACCESSION NUMBER: AK073427
  ref <309>: DATABASE ENTRY DATE: 2001-12-06
ggcacatcacgaaccggaccaaacctccgccgccgcccgccgccgccgccgccgcctacacaaccccccctcgccccccgccgcgccctcctctccgtacgtggagcgcatgcaaatcccctcgcgctcgattcttcgcctcctccgacgccccatcgtcgcgccttattctgccctgcggcaccgcatctcgatcccctcccgcgatctctcctctcctccatggctacctctggtccggctcgcgggtggctaccggcgcttgcgcgaagaatcgcttcagtcacggggacgcttaaccctcctgccagtcgtgtttctcgatttcctggatctcggaacatggccagcggcagtggagtggaaggcgagggattgggtataccatacaggcgccgcttcatcccatttgccaacgatcctatccacacaaccaaagataatatcatttctatggacaagcaccttcccatcacccaaggcaaggacagtgctgcaactaaggagttcatctcttgttatgaccattgccgtcctaccacgtatggcgatgaagatgcttctaggacagctgtggaggtcaccggtggtaaacaagatccaaggggggcagttcagaacctaatagatggtgaagtggcagttcaggagctaatagatggtgaagaaattgcaaggaaccaaagggccagtgaggttagtgacaacgatggatatgaagagttcaatgatcgtgctgttaactaccactgtgactgtcatgtttggacgccacttattgcaagcagccaccgtgacggttctatatacgataccaggggcacctttggatctgggtggaaatgggattatcgtattgcagatcgtaacgagactcggttggaggcaatgatgttatcacatcccacgaaagattgctacatgagggatggaacttgcatatggcatcctgcaaatggcatgttgcaaattttctcagtaaagttggctaaaactcctgtagttgatggctcaattgaattgtatggatacattgctgtgcgggaccttcaggatccattacttaattatatagtcaaaattggcagggatgatcccatcattgtggagcagggttccctcatcgaaatgactggccctaagcgagggatcgacttttcttgtgctgttctagttgaatatgacatgagaatcaagacaggagaacgagaggaagatgatctacaactgattgatggtgcaacagatcttgaccatatattgacatcacatgtaccagtgagaaatcgcatttatggagattgcggcgcagttgacataactcaagcgaatcttttgtatgcatttgaggcgactgtagaagtcgtcatatcagaagtgcagactagttttgatttgtgtctcagctgttttaccagtgggttacatgaggaaattcggctctttgatggtgcgatcagtgagtcacgtgacttgaggaggtatgtgattgctgtcatggaacatgagtgtatggatttgaagttcaaggtaggtttagggtctgggtgtttcgctgaacattgtcgatccttcaaagcaactaatcatggatgtgccagtgaacaaataaagattgagttcgcctcaatctcggtgaaggtcacttggtcggctatggagttctagaagggtacttagcgtttggacatttttttttgttactccctcagttctatattgtaagactttctagcatgttcatattcatctagatagatagatagtgtgaagctagtgttgctagtgttgagtgtaggcatgtgtgtgtttcagcccaacagggcccattacaccaatgcatatgtatagtagaagagagaggaaatagtgtgaagcttctggagaaaaacaatcacctagcaacatggtatcagagggcgaccgcgtcgaggctaaaccctagctagcggcgcgccggtttgtggtgctgcagcttggagcaacggagtggtggcgttgacagcggagacggcgacagctgctacagaggatctcgacgcagccggcgtgaaggagggagcagggtgtgcgctcgctggttgagccgcgcaaggggaggacgcacggcgggtgagaggcgcactgtacgagctgcgtctagacttggctgtggtagtgttcccgaccattatgggtctagacttggctatggatacaaaagcacaagctaccgtcatctcggaaatgcatgccaactgtttagagttgagccatggagccatggtgtccatactagcaatcctgatgtcttgtcaataccaatatctaaaatggccagtgtcaaggctgctaacaacatcaccatcgaaccagtggttcagtatgttgataaagagctggacaaggcatccaatagggataaaggggccaaaggcaacagaggtatggtggtggctgatcatttccaactgtggccatctccttatcagcttaattgtgaatgttctcacactgagcagcaaccatggccaccgcctactcaagcaggagacattggttgtcaagttgcgctgcgacgagtgctagggtcatcatccaaatgcagccaaggtgacttaatgccggtgacaccaccaaggccactgacaataggaaaattgcataactcgaggagccgttctgctggaaacacaactgaagccgtacaatcaattattgagtctcatgcaatatctttacactgtagaatttccaagtcaatgtgcattgcacttaattttgttgagagctggctacaaaacacagccaagaaattatgcaatggccagttgcttaacctttcagttgggatacattttgacgac

SEQ ID NO: 23313 - DNA, 1885 bp, Oryza sativa
  ref <308>: DATABASE ACCESSION NUMBER: AK073428
  ref <309>: DATABASE ENTRY DATE: 2001-12-06
gtaggccgccctccacagatttcttggcgatttgtctggttctgcctgctcttgctggtttcagatccgggaggggactgagcctccgaagttatcaggagagtgaaagacataatggggatcagcagcgaatcgccgaatgggagccagcagattgtacaaaaggaaacacgagatgagacaacaccacttctgccggtcaaggtggaggaggaggggtttcatgagttcaatggagcttcattttccggggcggttttcaatttatcgaccactattgttggggctggaattatggccttgccagccagtatcaagatgttgggcatcatcccagggattctgatgatcatcgttgtggcgttgctcacagaggcatcaattgacatgcttgtcaggtgcagccaccagggcaagattacatcttatggttggctaatgggtgaggcttacggacagtggggaagaattgcactgcaggcctctgtcgtcataaacaacattggcgtgatgattgtttacatgattatcattggtgatgtattatctggaacatcatcaaccggtgttcaccatcgtggtatacttgagggctggtttggagctcatctctggaattcacgtgccattgttcttcttgcgacgactcttttcgtgtttgctccattggtgagctttaagcgtctggattcattgagatacacctctgccctatcggttgctcttgctgtggtttttgtcgtcattactgctggaattgctatcatcaaactcttcaatggaactgtagcgatgcccaaactttttccagaactagatggtcttagttccatctggaagctcttcacagctgtccctgttcttgtcactgcctacatctgccattacaatgttcacagcattgacaatgagcttgaagacagaacacaaattaaacctattgtgcgaacatccctgttcctctgctccagtgtttacattgctacaagtttctttgcatatctcctcttcggcgagggtaccctagatgatgttctcgctaacttcgatgcaaatcttgggattccatttagttccgtctttgatgatatagtgcgagtgagctatgctgctcacgttatgcttgtctttcccatagtcttctttgcccttaggctcaacttggatggactgctcttccccacatcaaggcacatttctcgtgacaacaagagatttgccataatcactatctcactcctcacagtaatttatcttgctgccattttcataccgagcatttgggatgcattccagtttactggtgcaactgctgctgtcctgattggtttcatcttccctgccatggttatacttagggatccttatggaatcgcatccaagcgtgacaagatcttggctgtaaccatgatcgtgcttgctgtcctctccaattctgttgctttatacagcgatgcaatgaatatcttccgtaaggaagaggaggcatgaatgtcagactccaaaggaatgtcatcaaatatcagtgatgaaggaagcgtggcttcatgttatgagacacagatgctgtgaagggaaattatttcctggaatccagcgaacgaagatttcttggtcagcggtcgaggttccagtcactcgaatgaattggatggttgaatctgcgtggcttctgtgcgaaccggctcaaattcgaattgagctgctcgcgatatctgtattgttagtgttcttgtatccacaagcaatgtatggctttaaaatgcctggtttacaataatgtacagtttcaaaaatacttcagatgagttaaatgtctatgtgaacctggactcagtgtcgatttaaaattggaatggctgttgttgccatctttcggactttc

SEQ ID NO: 23314 - DNA, 3674 bp, Oryza sativa
  ref <308>: DATABASE ACCESSION NUMBER: AK073429
  ref <309>: DATABASE ENTRY DATE: 2001-12-06
gggttcccatggccttccttcccttctcctcctctacatggactcgtctgtctctgcctttgcttcctccacacttcagaatgatgtgctcctgtgctgcccatgtccacctgatctttatgcttggctttgcctttttctctggtgttgcaagattgggaattgagcagagattgccatgttttcttggttcttgatggcttgctcttgttgtgtgtcctgttcttccccacaagatttcatcttttttcctcactcttgtttaagttaggattgtactctggtttctcaggagattgtagaattggttttattcagtacattgcctgttcatatatttgctccaagattttggtcatctgtttcatcagggattctgaatgtttttttaaatttttttctgcaaggagaaccacgattctgaatattttagagtgagaattcgtctgtaagctcacgggtcgcgtttgtctaccatttgatttgtccgttgtagcaagataatttgacattaaattggaggcttggagctaagtccaagacttgtttttttcttttgggggcactatgagacaagagctgttacttattattacccataatcatcacctgagctttgtctttggcctgtagtttttacatcacaagattattattttttacttctgcctgattccttgcttatacagcagaagagtgtctagcatggtccatctgttctgaaatttagaatcctgcacttattttactgttaaatcttcagaactaaatcattcgtttcttctgtaacttgaagacagtaaagatgattctgtctgtactgttttaccctgaaaaaaagtgtgactttggaagtccaatgcagtacaacccctggtgtgtgttcatagcactagcctcacacactcacactccatactgtgtactgaactgaatttagtttagttgtcaagtccgttcacttactgcaagttgaaggtagtagggccaaggattaatattcctcactctcttgccttctcagccctcttttgggagaaaaagaatgctggtgctaccgaacaaatgtgtagtgtagcgtatttgcagtggggtatttcacctgcaaaggagcatctttctgtagccttgtagctttcactcccctttctttgtaaagatatttcaggtttccagataaatagatgcatctcatgctctgtttggttttcagtagcttgcagttgttgcctgtggcttctgagtggccagtttttgtggttgtattcaaccagtttcaacattcatgactgctgttgcacttcattagcttatgcctaagctcccttttgctgcatgatttgattgcatataatcattctgcattgtttctgcagcttctgaactttgggaaacttgtcagacagcagggttgattcaggtcatcttcttgcttggaatgtgctcatcaccaaatgtcgattcttgtacagtattagaagttctgatccaagcatgacgggttcttgaaagttgaaactacacaaaggctttggagacatgggatgtgctgcttccaggttagaagatgaggaggctgtcaagatgtgccgggacaggagggacttcatcaagcaggcgctggagcagcggaaccgcttcgcgtcgtctcactttgcctacattgagtccttgaggcttgtcctaaccccttctccagctctcaaccgtatatcctttcccttctcccgtcgtcactgccgtagtgctgctcctcctcctcggtggaggcccacgcggtgccgcgggaagcccggtgtcacggaagttgtagccgagaaggagacttcgccggatggcgaagaggaggaggtgcgcgggcgcggatggttcatggttgatgagattggtatggacatcctcaccatcgccttgcctgctgtgctcgccctcgccgccaaccccatcacggctctcgtcgacaccgccttcgttggccatgtcggttcgactgaacttgctgccgttggagtatccatttctatcttcaatctggtatgcaagctgctcaatgtgccattgctcaatgtcaccacatcctttgttgccgagcagcaggcagtggatgcagctgaaatcctcgcataggaaatgaaatttcaataccccaagagaaagcaagtaaacaaaggaggtttcttccagcggtctcaacatccttggctctagctgctggcataggattgatggaaatggtggcactgatacttgggtctgggacactaatggacatcgttggtatacctgtcgattcagcgatgcgtgtacctgcagagcaatttcttactttaagggcatatggtgcacctccagtcatagtagcacttgcagcacaaggtgcttttcgtggattcatggatacaaagacaccgttgtttgccgtgggtgttggtagcctagtgaatgcattgctggatgccatatttatttttccacttggtctaggtgtaagtggtgctgcattggcaactgtgacttcagagtacttgacagcatttatcctcctttggaagctgaacaacaaaattgttctgctctcatggaatatcattggtggagacgttgtccgctacctaaaatcaggtgcactgctaattgcaagaaccattgcggtagtcctgacattcacactgtcgacatccctggcagccagggaagggtctgttccaatggctggatatgagatatgtttgcaagtgtggttaacaatctctctgctcaatgatgcactagctcttgctggtcaggctctactcgcaagtgaatacgcaaaaggaaactacaagaaggcccgcgttgtcttatacagagttctccagattggaggcataactggtgtagcacttgctacaatcttgttccttgggtttggatatttgtccttgctgtttacagatgatccagcagttttagatgttgcccaaactggagtctggtttgtcactgtttctcaaccgataaatgctgttgcttttgtggccgatgggctctactgtggtgtttctgactttgctttcgcggcgtactctacattatttgctggagctgtctcatccgcagtactgcttgtggccgctcctaagtttggtcttggtggaatctgggctggccttgctctatttatgagtttgcgagcaattgctggtctgtggaggttagggagcaaaggtggaccatggaaaataatctggtctgaaactgagtaaacaaaaaagatagttatgtgtactcaattattcgactaatttcttacagtcaacatctaaaggcaagtacagaacggcaagcaagaaagcagatagctggtagtcattgtccaggacaagattttctttaggagatgacagggtagctcatgtggtgatttggttacaacttacaagtagatatacttgctgctgcctctagatagatagatatagatagatagatagatagatctctttggtgttgactggtataggaagttgattcgacttgtacagtgctgtgttatagtagaatggataccctgtcagtatacaagaaagctgaaagctcatagatacaaacacattcagagccatccgtccatgtaaataagtgaatcttttccttgggagaagcatatataagtgaattcttcctctctgttt

SEQ ID NO: 23315 - DNA, 1653 bp, Oryza sativa
  ref <308>: DATABASE ACCESSION NUMBER: AK073430
  ref <309>: DATABASE ENTRY DATE: 2001-12-06
gtgctgctgccgaatgtattcagatctcacttggtcattcttccttgctggaaactcgtggtttgtcactttcgtctgttctgatgaagcaattcaaaccctctgttgagcaagcactggagtccagtttgaggagaattgaagagagtactgctgctttagctgcagctgatgactgggtactcacctatcctccatctggtatacggacgtttgctagatcatctgctagtagtttgttgctccaacctaagctctcaaacagtggccatcgcttcagttcaatggttcaggatttctttgaggatgttggcccactgcatagcttgcagttaggtggttctgcaatggacgggcttctgaaaatattcaattcatatgtcaatctgctcataagtgctctgccacactcactggatgatgaagcgaatttggaaggtttaggaaataagattgttcgagtggcagagactgaggagcagcagctagcattgttcgctaatgcatccttactagctgaagagttgctacctagagcagctatgaagttgtcgtctgtaaaccatactggtgtgaatgatattcgtaaaaaaagtgtagacaggcaaaaccgtgtagcagagcagcgagaatggaaaaagaagctgcaacgtattgtggataaacttaaagatagtttctgcagacagcacgcccttgatcttatattcacggaagatgatgacacccgtctgagtgcagaaatgtacatcaatatggataatactgttgaagagccagaatgggttccatctctaatttttcaggaattatatgcaaagttaaacaggatggcgagcattgctgcagatttgtttgttggtagggaaaggtttgctacattcctactgatgcggcttacagaaacagtcatactgtggctatcagaggaccagagcttttgggaagagattgaagaggggccaagggctctgggtccccttggacttcagcagttctacctggatatgcaatttgtcatcctttccgggcgaggccgtttcttatctcggcacgtacatcaagtgatactgaaaatcattgatagagcaatggcagcattttctgctacagggatgaaccctgatagtgtccttccaagcgacgattggttcatcgacgttgctaatgacactatcagtaggatcagtggcaaccctcgaactgccaatggggatagggaggtgaacagcccgacagcctccgtttcagcgcaatctatatcgtcggtcagatcccatggcagctcctagtgtacatagtagccttagtaaccaggtcttgtataggagtgagtgtgaaatagtttctccatttccctgttgtattctctccttaggtcttgtataggagtgagtatctcctagctttgttccccatctggtgtacatgccagtatatagacctcgtttggatgggcctcaatcccagtccatccatgtgtataggccaggattctgaactaaaatcctggcccaaactcatggatggaatgggattctgcatattccaaaggcggccttaggaaaatatttgaattgaatcggttgttcagagatgtgtctttgtaaatttggtgagaaatgtatgacccagtgtagtttgtcttcttgg

SEQ ID NO: 23316 - DNA, 1124 bp, Oryza sativa
  ref <308>: DATABASE ACCESSION NUMBER: AK073431
  ref <309>: DATABASE ENTRY DATE: 2001-12-06
gattccgcctcctccggcctctccaccgctgcccccctcgccgccgacgaaaaccctagcggcatcgcctccgccgccgccgcgatgtactccgatagtgtctccgggcggaagcgctccgtcatggaccgcctcggatcgggcggcggtggcggtggcggtggcggtggcggtggcggtggaggcggcggaggctctcgcccgcggcctgactccgtgaagaggtttcgtcaggcagatgggacttggagacgtgaactttatatggactctgtgggagttcaaagttcatctggagttccttccagaaatatccaaggaaaccagaaaccacatttgcagcaaaacactcaggttatgaggaaatcatcagttccagatcttcgtgaaaaattgtctggagttcagcggcctcagttgaatagtactgtacagatcccaaagtctgtaccggagatatcaacgagcgctaaacctgttcaaaagagggaacctgtccaaaagagggaaccccctgttaatgcggcccttcctgctactaagaaagtgaacgaaccatctgcaccaaagcaatgccaggaaaagactgattcctctcttgatagattactgaagtctcttgatgtagagaagtactcaataaattttcaggctgaagaggttgatatgaaggctctgcttcacatgaatgaggaagacatgaagtctttaggaattccaatggggcctcggaaaaagatattgtcagcattggcttccaagaagaagaaattatcaaaatcattacctaccagttgaatagttgatgcatctttaaacgtagtagctagatgacatgttgatttggatgtgtgcactgccaggatcaacccaagtaaccccatttcttgtataagatttccatcgagatgatgtacaaatagagaactgtgatctagcagtgctgttgtgaggcaattaacagcttgtcaataggagttatgttctgatattaagcggatatttagatgccaacatatgatgcatcggaattattttcccgtatcatgtaaacccagcccattattagcgtgcacagctagggagataaggagattttatttgtatcggcttttgggggtttc

SEQ ID NO: 23317 - DNA, 1516 bp, Oryza sativa
  ref <308>: DATABASE ACCESSION NUMBER: AK073432
  ref <309>: DATABASE ENTRY DATE: 2001-12-06
gttgcggccccgggaggggggcgtggtggaggacgaaggcgacggtggcaaaatcggcgacggcgacggcggcggcggcggcgatggcgaaggggagggacgcgcggtgggagtagatactgtagtcgtgcgtgctccggaccagcagcaggtagcggcgcggggaaggaagctactggtgggggacaacccagatccctcgcccgcgactcttctactcgcgctcgcacgccctcgtcggccgcgccgccgccgcggtgatggagtcgccgccggagtcctcctcctcctccccggtcctcctcaacatcgggggcaagaggtacgcgaccaccgtcgagacgctcacgcagcgggagcccagctccatgctcgccgccatgttcagcgggaggcacacgctcccccggcacccggacacgggcatggtgttcgtggacagggacgggaagcacttcaggcatgtcctcaactggctcagggacggcgccgtcccagacatgtcggagtctgagtaccagcagctcctgcgagaagcggagtactaccagttgctcggcttggctgattgcataaatgatagattgggttggaaaaatgatgagaatttctcggaggccgaattgacacgcaaagatgtgatcaagtgcatccaagctccgagagtcagatttcgtggtgtaaatctatctggccttgatctatccaaacttgatttatcagaggtggactcagctatgcatgcataaagaatgccaatttttcctctgcttatcttcgtaaagcaaagttcaggctgacagaagctacttgttcttcattccaaagtgcaaatttacatgagtgtgagcttattggagcaaatcttgaaggatctgttctagataaagcaaaccttcaaagtgcaaacctacaggatgcatgcttaaagcaatgttgcttcattgaaacggatcttcgttctgctcatctacagggtgctaatcttatgggcgccaacttgagtggagctaatcttgaaggggccaatctcaagggagctaagttggccggtacaaacttggaatgtgcaaatcttcagcgagcctacttgcgagaagttgatttgcgcgaaactcatttagctggtgctaagcttggaggtgcaaatctgcttggagctatcaggtaataccaagggaagaagcttatatcttctacatttacaattaaactgaaactggtgctttggtacctcgaacattatcttgcctgcaccaacggtttgttcatgagtaaatagtttcttgctaccgattctgcagatagtcatacagctttagtcggcggttgtacatatacccttgtcacattcctctgattcgaaaattcggtgatgaactgttggatacagctagttgcttagtatcatcatggatagaagctgttctagtaggaaaatttcctgcatactttgggatattgttgtgaacaatgactgaaaattttagtgggaaatatatcttcgttaatgtgc

SEQ ID NO: 23318 - DNA, 1309 bp, Oryza sativa
  ref <308>: DATABASE ACCESSION NUMBER: AK099356
  ref <309>: DATABASE ENTRY DATE: 2002-08-28
gactcccggcgatggcatcggcggcggcggcggcggcggcggagtgggaggaggctgagcggaaggtgctggtggcgaggaaggccgccttcgggctgcccaccgcctgcccgacctgcctccccgtcctcctctacctccgcatgtgcaacgtccccttcgacatccacgtcgactcctccttccccgacgccgatcacataccatatgtcgagtttggtgaatgtgttgcattcaacaatgaaaagggtggtgtaattgaatatctcaaggaggagaaaattgttgacttgaactcaaagcatcctagtgtttcttattcggatgtattatccacaaaggccatggttatgacctggctttcagatgctttgcaatatgagctctggctggcttctgatggaagcattccacatgatatctacttttctgatctctcctggcccattggaaagatactctattggaagaaaacgagagaagtgaagcaacaactgggcataactaagcttaatgctgcagaaaaagaagaggagatataccagaaagcaaatgctgcttatgatgccttatctacgagattaggagatcagatctttctctttgacaacagccctacagacgttgatgctctttttcttggacatgcgctttttgttcttaatgtattaccggatacgtctgtgctgcgaagctgtctgcagaagtatgacaacttggtaaactttaccaagcacctcaaggtccaattactggaagctgattctgattcatcagcaacaggattgggatcaactgatccatcatcatcctctacacccaggaaaagagcgtcttctggtcggagttataagccaaaacccagagctaagaaggaacgaacagaggaggaaaagaagttcaggcgaaaagcaaagtatttccttgcgacacagctcgttgcggttcttctattcctatcgctcatgggtggagccgatagctcagagctagacgatgaggacggtgtagattatgaagattaaatcctccctttgttgtactgcacgattctttctgaagtgttaatttgccaaagcaccggttgtggtgcttgaaaatgttcttcccatggttagtcagagagatcgcatacttcatcatattgtagttagcaatacactgagttggtcagcagccggcagttccatagttttggtacttcaaaagtaaaacataatctgtggaattttgtattggtttcgttggacgcaactgtaagcatatgcaaagtagttgtgccgaatgccctttgccctggagatttgct

SEQ ID NO: 23319 - DNA, 1466 bp, Oryza sativa
  ref <308>: DATABASE ACCESSION NUMBER: AK073433
  ref <309>: DATABASE ENTRY DATE: 2001-12-06
gggttcccctcgcatccgcgtctccaaaaacccccaactctgcactgcaccgaccgcgccgagaggagagacgagagcccccgagaccgcgcgccgccatggccttccactacgcagcaatgccctcctcctcctcctcgtccctctccggcgtctcctcccagcccccgcttcacctcccccgtctccgatcccctcaccaagcgtcccgccgcctctccgcgctccccttctcccgcgcgctcccgctttccctccgcctccgcctccgcattccccgtccccaacttcctccgctgcccctcgcgttctcccacggtgggggcggagataacgatggcgacgataataataacaatggcggcggagatggcgagggggatggcggcgcgcccgacaaccggagggaggcgctgttcgtgctcgcgcaactggggaggaagctcgagagcctgccgtccgacctcgcggccgccgtggagggtggccgcgtcacgggggagatcgtgcggcgcttcgctgagatggagggctcggcgctgctccggtggctgctccagttccaggggttcagggagcgcctcctggcggacgatctcttcctcgctaagcttgccatggagtgcggcgtcggcgtcatcgcaaagactgctgcggagtatgagaagagaagggagaattttgtcaaagagattgatatcgtgattgccgatgtggtcatggcaatagttgctgatttcatgcttgtctatcttcctgctccaactgtatctctgcaaccaccacttgcaacaaatgctgggcatattgctaattttttccacaattgcccggataatgctttccaaattgctttggctggaagatcatactcaattctgcagaggctaggggctattctgagaaatggtgcaaagcttttcactgtgggaactagtgcttctctgattggcaccggtgtcacgaatgcactgataaaagcaaggaaggctgttgacaaagagctagatgacgaagttgaagatattccagttttgtcaactagtgttgcttatggtgtatacatggcagtatctagtaacctcaggtaccagattttggctggtgtaatcgaacagaggatgctggagcccctactacataaccacaagcttctattgagtgctctatgctttgctgttcgcacgggcaacacattcttgggttctttactatgggttgactatgccaggtgggtaggcgtacaaaaggttcaagaagaggcctaatgttggcataccgtaagttactacgatatgtattctacaacgtcacgacattcttctcttcatagggaacatctttactggtaaaggcagaagataggcatctccatatgtcgaattcatatcaacagtgtcaccgtatttttcttcatagcctgcaacttgtaagacttgtctttgtaatatacgagtttttgaccc

SEQ ID NO: 23320 - DNA, 2219 bp, Oryza sativa
  ref <308>: DATABASE ACCESSION NUMBER: AK073434
  ref <309>: DATABASE ENTRY DATE: 2001-12-06
ggatctctcttctagtcttcttcgtgggtaggctcgtgctgcctctgcctgctggtgcagcagatcagatcaggtctccggcgatggcgatctgaggccggaggctgcttgcttctgcttgcatggagcgggtgctcaaatccgccagggagtcgggctccctcaacctctccaatcgatccctcagggaggtacccaaggaggtgtacaacaacttggacacgggggctcaggatgagaaatggtgggagggagttgaccttcagaagctcatattggctcataacaaccttgaggtgttgcgtgaagacctcagaaatttgtcttcgctcgttgtattaaacattagtcacaacaatatttcttccctccccgcagctattggagaccttcctttgctaaaatcgttggatgtatcttctaatcaaataaacgcttttcccgaagagattggttttgcgaccgctttagtcaaggttgactgctcaaataattgccttacagatctcccagttagtcttgccagatgcctggagttgtcagaactcaatgcgtcaaacaacactatatccgtactgccagatgaacttgctggctgttccaagttattcagattgaatctagagggtaacaagctcgtgacgctatcagacaagatgtttatgtcatggacaatgcttacagagatgaatgctgcaaagaatctactgacagccatcccggatggtattggtgcactgtcaaagctaattcgtctggacctgcatcagaacaaaataaccctgattcctccttccataaaagattgctcttctctagcagagttttatatgggaaataacttgttgacatccataccagaggatattggcatgctatcgaacttgggaatacttgatctacactctaaccagctaaaggagtatcctgtcggggcttgtagactcaagctctctttccttgatctatcaaacaactcattatctggtctgcctgctgaactaggtactatgacaaccctaagaaagcttctgcttactggtaatcctatgaggacacttcggagtttcttggtttctggaccaacaacagcattattaaagtatctgcgcagtcggctttcatctgatgaaggagcatcaggatctggaagcactccaacaaaagatgatcaaattgctgcagcaagaagattgtctttatcttctaaggaactggacttgagtggtcttggtgtgaccagtgtaccacctgcagcttgggagacaaatgatgtgatgaaactagatctttctaagaattcaatagaagatctgccaaacgagttgtcattatgctcgtcacttcaatctttgattttgtctaacaacaaaattaaaaggtggcctggcaccgtattctcctcccttgccagcctttctttgttaaagctagacaacaatcctttggcagagatattggctactgatcttgaggccctgtctaaacttgaagtactagatttaagtggcagtgcttcttctctacctgaaccctctgcggtttcgaaattacctcacctaaaggaactctacctaagacgaatgaaactccatggatttcctgatagtttattgggcttaaaactgctgcgaattcttgatctgagtcagaattatcttacatctgtgccagagggtatcaaagatttaacttctttgattgagcttgatctgtcggacaacaatataacaacactcccacctgagctgggtttgcttgagcctaacctgcaagtcttgaaacttgatggaaatcccctcaggagcatacggcggactctgctggagcgaggaacgaaagcaattctgaagtatctcaaagaaaagctacctgctgaataaattctggtgggaattaatgtatgctgcatgatgtttattgatcagttcggccctctcgaactgcagttaccttttcctggagtccatttatccccaaattgttttttccttgattgatgtaatttttgcttggctatcttcttggtgatcgttatcattctcctcattttatccgcggattgctgtcacactgaaagcttctcagcttgtgtataaccaaccttgtatgcagtatacagcagatcagaattcggttatgttgtagtattttgacactggaagtcccgcacgtgtgaaaaaaaatctgccgccacaagtgaaactttgtttcttgcc

SEQ ID NO: 23321 - DNA, 1432 bp, Oryza sativa
  ref <308>: DATABASE ACCESSION NUMBER: AK073435
  ref <309>: DATABASE ENTRY DATE: 2001-12-06
gatggtcttctcaattaaactccactaaacctccctatggcctatgccatccaccaaacaagcaactgaatcggaatcgcgtattgctttcgagctccaattcaacagattagcagaacacagggcgctgagctgatggcgaattgtggccggaggtttgccgccgccggcgctccggcgacggcgagacggtgtaatctggagctgttcctcgaggccaccacgccggttgtcccgacgacagcctgctcctccaagaagagcatgaatggttggaagcaatctgatgaagaaaatgcgctgccattcttcagtttgggcgacctctgggatgggttcagagagagcagcgcatatggtatcgctgtgccaattgttctgaatggttgcagtgacggtgtggtgcagtattacgtcccttacttatctgcaatccagctttatggaagattaaggaggcatttctaccattccaggccaagtggagaagacagcgacggcgactactgtcaagacacaggcagtgaagagatgagcgaccttgagcacgactcatgtccaagcagcacggatgcgttctcagtccaagataccacctgcgaaacctccaccagcgaagcatcgagcgacgaaagcgaatcaacgagaatttcccacgagcagctcatcttcgagtttctggaatccgagcctccctaccagcgtgaaccgctagctgacaagatttgtagtcttgccaggggatttccggagctgaatactctcaggagctgtgatttgtcgccaaccagttggatgtccgtcgcatggtatccaatataccgaattccgacgggaccaacactatgcgatctggacgcctgcttcctcacatatcatcccctctccacgcagctcacaggcggcatctgcccggagccaaaaggcaacaacagcggcgtccccgtgacgacggcgatgtgcctcccgacgttcgccatggcgtcgtacagactcaaggtcgcggcgtgggcaccgggcgggcgagacaggcagctggtcgcctccctctcgcacgccgccgacgcctggctcggcctcctcggagttcaccacccggatcaccgcttcttcgccgctcgccgcgtcgtgtccagaagatgatgagtcgatggagatcgcctgccaacctgagagtgcagagaagttctctgtgttcttttttttttttttttgtgtgtctcattcagttcgtatattgtcagggttcagactgtactcggatagttggatcacaaagcgtgcatcctgtttttgttttccagtaatggtttcagagaaagattaaccaagaatgtatatagaattagaagacaattaaaaatgtgttttcttttatgccagctggtctagtgtttatgtttaaacgtgatattttgttgtaccaaaactc

SEQ ID NO: 23322 - DNA, 2477 bp, Oryza sativa
  ref <308>: DATABASE ACCESSION NUMBER: AK073436
  ref <309>: DATABASE ENTRY DATE: 2001-12-06
ggcctcctccggcgtggcgaccgccggaggaggggaatgggaggagggctagcaatgccggcggcgcctagcaagcgcgacggagccggcgcgccgcggcagaacatgtgatattattggacagaccaaacgaggatcttaatgcctatcttgaggcgattgataagttgactagtgtcgaatacttttttacttccaagataagatgtagagttggtaatgatgttcacgaacgtgttaacgaattgctttctaaagcaatccatgggttggagaatgaattccacaggctgttaaccaaatgcagcaaacctgtagatcttgagaatattttcaactgtctatcaagtcttaatcggcaattgtcaagtgaggaccttattggcccatcagccggtgattattctgaagcaccgctaaaacagtatgctgagtgcactcttcctacactcgttgatccctgttacttgactttgctctcaaagttagcacagaaatcaattcaacttgattgccatcagaagtttatggaaatatacagagaaattcgtagttcaactttggaacggactcttaagcgcttgggagttgaatatgttacaaaagaagaaatgcagcaagttgaggctcagagcatggaagctaaaatcgccgagtggacacaattctcccgaattacagtaaagttgcttttcggcgctgaacgcattctgtgtgatcaagtatttgaaggaaagtatacatggaaagaccattgttttgctgaagtaacagctaaaagcctttcaattctactcagttttggagatgctgttgttcaatcccaaatattgccagacaaactatatatacttctagatatgtataaggcaacattggaacttcaatccaaggttgatgcaatctttgagggtaatgcatgctctgaaaaccagaaatctgcccttactttaactaaaagccttgcacagactgcgaaaaagacaataggtgatttcatggaatacattctgaatcactcggtgacgagtacgactgttgatggggctgtgcattatatgaccagctatgtcactgattatatcaagtttctttttgactatcaaactgatgcagctatcaatcatcaataaagcagatctttggagatccctgtgttgaagatgaaaaagatactgatgtggtctctcaaattgttggtgcaatacatgctctggagaccaatctagctatgaaggcaaagcaatacaaggaccttgctctggggcacctctttttgatgaacaacatccattatattgtcaagtatattggcagatcagaattgaaggatttattaggtgctgattggattgaaagacaacgaaggattgtgcaacaacatgctactcgatatagaagagttgcttggctaaaggtattggagtgtctatcaactcaaggtctcacttcatcagtaggctcttcaattgatgtcactcaaggaagttttagaaatattaagaacagtacaacctccagatctgtgatcaaggagagattgaaatgtttcaacatgcgatttgaagagatttgccagaaacagatgaactggggtgttcctgacagagatttacgagattccctaattcttatgattgctgaaatattgttacctgcttatagatctttcctgaaacactttgggcctcttgttgagaacagccacagcgctttaaaatatatgaagtacactccagaatcacttgagcaagctcttggtaatctatttgcaaagaagttacgaagtgatcaggtcatcagggattctgattgcatcaaacatcccatttaactgtttgactcctgtaggcgaagtcagcgaacgaggtagcaggctccaagccttattcatcatctgccatagctaaagcgcatggaaaccacgagggcatatttccgaatgccaacttggagcgcagctgcacaggtgagcccctaatgcaacagctctttgtatttccacgtaaccatctgcgcgtactgccgttggcatttgatgctattagtcgacatctgcccatttagcagtgattatacggcaggcatcaggtgtacagtaattggaaggcgcaccgttccttgcatcttatgtcctagtggagacaatcaattatcagaaactctggttggctggttcaaagtctcgcgcattagtgtgaaagatactcctatgtgacctttatggtaccacaaattcactgcatctaatcatacttttcttaatacaattatgtattggaagattacagtgcgcatagcatataacaagagcccatttggcttaagagacgtccctaacatgggttccctatgtgagctgtcctttggactctacctgccaacaacccttcttctctgcccttcatttccgcacaagctcaaacatggtggacggctgtagcataagaagcttccatgctgtgtgcttgtgtccc

SEQ ID NO: 23323 - DNA, 1453 bp, Oryza sativa
  ref <308>: DATABASE ACCESSION NUMBER: AK073437
  ref <309>: DATABASE ENTRY DATE: 2001-12-06
ggtccgccgctcccaccaccctcgtctctcccctccacttcgcgagacctccaaaaccctagtttcgtcggcgatggcggcggcggcggcggcgggggcggcggcgggtggggggttcgttggggagaggaggaagctgttcgtgggagggatcccgacgtcggcgcaggaggcggagctgcggggccacttcgggcagtacggggcggtgaggtcggtgatcgtgatgcgggacaaggagaccgggcatggccgggggttcgggttcgtggagttcgaggaggaggaggacgccgccagggcgctcggcgacggggagcaccccaggcacctcatctgcggccgcgtcgttgatgtcaagagggctagggcaaggcctcaacgaaaccatgatgatcaatcttcacagcatcagcacttcggacagggtcaggatcagggtcaccagccagcacctgtgagtggtacagaggatggcggcgacggcatgaactatgcttcgaagaaggtctttattggtggtctgcgggacaacatcactgaggaggagttcaagacatatttcgagagttttggcaccgtaacagatgtggtagtcatatatgacagtatgacaaacgggtctagggggtttggtttcgtcacctttgactcagaggaagcggtgaggaaggtgatagaacacagttttcatgacttgaaaggaacaagggtagaagccaagattgccatccccaaggatgcttcgtattaccgtaatggcagaggtcgtggctcaagaaactttggtggaaggggtcatgctggttttgatggtccctcgtaccaaccatacaatgacagatatggtttctacaacagctataatatgcctcaacctgttccaccacatccctactatcctggtgtatattatggtatgggaggaggttatccctatgcgaatgcatattcaaacatgggagcccctgctaatattcctccaggcatgatgacaaggcgtccagtttatggtgcatatcctccaatgtttccagggtacggcgttatatatagaggttatgtgggtgccgcaccctctattcagcatgatagtaatggtgggagcgatagcaaaaaggatcaaacttcagtagatgtacaagaagttgacagtgctgcttccgttgcaacaaaacttgagtttatgaagctagggtcacaatgactttctggacaaattacttctaaattgatgacaccagagttcgacattttgggaaccctcaattgtgaagacttgagctgagattctttggttgacaagtacatcattggaattcaacttacccaccctcattccttgcttcatctgcctgtacactgaaaacgtgcaagttgacctcactgcttcttgtaccgatgtttaaattctttgttgatttaatgtaccaggatcagaacatccaatcct

SEQ ID NO: 23324 - DNA, 1699 bp, Oryza sativa
  ref <308>: DATABASE ACCESSION NUMBER: AK073438
  ref <309>: DATABASE ENTRY DATE: 2001-12-06
tgagtgtatgaccgtactgtatagcagagcagcagcctccgggcagacgagagccaaaggctttgctcttggcggctagggttttgtgtgccaaaccctaatccccttccttgcatcaatctcatggcggcgatttcgtcggggatggtggcttgaaaggtctgtgtgttcttgtttgggattgaggaatagagaggagctaagtggtgtggcggcgcggagaaatggggtccaagaaccagttcgatctcctcgtcgacgtcgacaacgatgacccctcccacctcatcgccgccgccgagaagaaggctgcggcggcggccgcgtcgcccaagctcgcctcatcgccggcgcccgctccggccaagctgcccaccaagcccgcgccacccgcgcaagccgtaagggaagcgaggaactacggtgctccacgcgatggggctggccgtggtggcccagggcgtggaagaggcggcggccgaggaggcaggggcggtccgaggcgagatttcggtgagggtgatgccaacggctttgagggtggctatggtggtggtggtgggtttggtgatggtggattggctcgcggtgaagacggtgaggggagacaggcagagaggggccgtgggccacgccagccctaccatggaggtggtcgccgcggtggctatagtgatgggcagagtggagacgactatggacgtccgcgcagggcgtatgagcgccacagcggcactggccgtggctatgagttgaagcgtgaggggtctggccgcggcaattggggaactgtcaccgatgaaggccttgcacaggaagttgcggaggctgttaacactgaggaggctcctgcaactgcagaggatgagaagaaacctgaagatgtgccacagtctgaggtcgacaaggacaaggagagtccagagaatgaagaagaagaaaaagaacctgaggataaggagatgactttggaggaatatgagaaagtgctggaggagaagcggaaagctttgcttgcactgaaggctgaggagaggaaagttgaagtcgacaaggagttgcaggccatgcaacagctctctgtcaaaaaggctaatgaggaagtgtttatcaagctgggctctgacaaggacttgaaaaagaaagaaaaggatgaaaaggatgaacgtaccaagaagtccctgagcatcaatgaattcttgaagccggctgaaggagagaggtactacaaccctggccgtggtcgtggccgtggcaggggtcgtggtgatcgtgggggtttctatggtggttacaatggcaacggtggtcgcagacaggctgccgctccggtgatcgaagatcaggcccagttcccctcgctaggtgggaaatgaaacgaacgctcggatctagcggctcggttgtcttgttggttcacctgaaaactgtgtcgtcgtcgagttgagtactgtgttgttatgtcgcccctcccagataggagtgttgtgtttatcgcctgtctgtatccccgtgcatatccgaggtgcacccatccatcaccattgctgtgtttgtcagacatagtagctcatgtgctgcttctattttccgacaggagtggacagtgtatgccatgtttctgatgagtagtcgtgtgtgcgttggttcagagattttgctcagctgagaatggatcccatggtttattaaagaggcc

SEQ ID NO: 23325 - DNA, 1988 bp, Oryza sativa
  ref <308>: DATABASE ACCESSION NUMBER: AK073439
  ref <309>: DATABASE ENTRY DATE: 2001-12-06
gattcaccttgctcccctccgcaagccgccgccgcagcaactccggcgaaatccccggccacgcgcgccgcgggcagcagcaacacggcggcgccgacgaggtggtgcccagctacgacttccagcccatccgcgccgctcccgccgccgcggcgccggcctccgcggcgagcccttgggggtcgctcgactccaaggcggcgtcctccaacctcaagagcgctggcatgttggagtctcatgtgctcaagaaggtcagtcacgaagaagaaaggggcaacttcagtgcagtctccatagcagatattgatcgcacaatgaagaaatatgctgataacctgctacatgcactggaaagtgtaagctcaaggctatcacagctagagggcagaacacaccatcttgagaactctgttggtgagttgaagctaataattggtaactacaatggcagcactgatggaaaactgagacaatttgagaacacactgcgtgaggttcaagctggtgtgcagattttgcgtgacaagcaagaaattgttgagacacaggtccaactttcaaagctccaattgtcaaaagcagaggatgctcaatcagaaaaggctggtgttggtcaggcagattcaaggcagcagccaactctaccccaacctcagcatcaagcccctccgccttcccatccaccggcattgcctgcccttcctgctccaaatgcaccacctccacctgcaccccaaagccgacctccatcacaattcccaggccatttaccacattcccgggtgcaatcagtcccacctgctccaccgactccattagcaccaaccataccacaggagtcctactatcccccgtcagcagtacagccaactgacgccacacaccagcagtatcaagctccacccgccccacagtcgcaggcacctccagcaccaccacagcattatcaaacaccacctcagtatgctcagtattctcagcctcctcctgcaagtgctaacccctcaactgcagtcccaccgtcagtgcatcagcagcctgaagaagtagcagcgccgtatggccctcctcctcagagctatcccccaaatgtgcgcctgccatctccttatgtgccaccacctagcgggcctgcacctcctttctatggtccaaaccctggcatgtatgagcctccagcagtccggccaaactccgggccacctccatcctacaatactggatacaaaccacagggtggaggcggtttccccgagccatatggttacagtggatctccatctcaccgtggcaatgctggaatgaagtcgccctcgccgtttcatccaacaggctctgcgggaagcggcaactacagcaggctccctacagctcaaatgctgccccaagccgcgtcagcgagctccaccccaagcgcctcctcgggcaacagggtgccgattgatgacgtggtagacaaggttgccacgatggggttctcgagggagcaggtgagagcggccgttcgccagctgaccgagagcggtcagaacgtcgacctgaacatggtgcttgataaggtgatgaacggcgccgacgcccagccccagagaggctggcacgggcgttaaaagctcagctgctatccagggccatgaagcgctctcccatcaacctgtgcatatcactgaacatccaatccacggagtcattttgtgcattcgcgtgaacgtcagattcggaattcatattgtcgatttggtggggaacagaccaggtctgctcgatttgctgttggtgatcttacagcaagtgttctttatctctttgattcgcctggtgttggttggtactagcagtagtactaaaacttggtatctgatctccaaaaacgagtttttctagagatggtgttatggttgttatccactgatgatatgttaatgattcacgggctgcactgttctgtttaactagtcacgctgctaagctgccttccagtttcc

SEQ ID NO: 23326 - DNA, 1284 bp, Oryza sativa
  ref <308>: DATABASE ACCESSION NUMBER: AK073440
  ref <309>: DATABASE ENTRY DATE: 2001-12-06
ggaggccacccgctccgccgcctccatttcgtcgccgtcgccgttgccgtcgccgccgcggcggcgtctctctcctccgcgtgggctgctctgcttcgtttccgcggcggaggcggggcggggctgggcctgtcggccagggacagggagccagggaggttgccgctcatggagatggaagatagcggtcgcggcgtcgtgggcgccgggaagcgcggcgtcgcggagaccttctccaggctccgggagcagggcaagactgcattcattccattcatcaccgccagtgaccctgacttggcaaccacatcgaaagcgttgaagatccttgattcctgtggttcagatgtgattgagctgggtgtaccttactcggatccgttggctgatgggccggttattcaggctgcagcaacgcgtgctcttaagaaaggcgctacatttgattccgtcatagctatgctcaagggggttatacctgagttgtcttgtccaatagttatcttcacatactacaacccaattttaaagcgcggagtgagtaacttcatggctatcattaaacaagccggcgtacatggtcttgtagtacctgatcttcctttggaagagacagcgctgttgaggaatgaggctgtcatgcatggcatagagctggtgctgcttacaacaccaaccacaccaacagagaggatgaaggagattgcaaaagcttcagaaggatttatttatcttgtaagttctgttggagttacaggtgcacgctcaaatgtaaatttgcgtgttgagtaccttcttcaggagatcaagaaggttacagacaaacctgttgctgttggctttggcatatcgactccagagcatgtaaagcagattgcaggctggggagcagatggtgtgatcatcggcagcgctattgttagacagttaggagaggctgcttcacctgaagaagggttgaaaagagtagaagagtatgccaagaacatgaaggctgctatgccttgagatgagcggttccatgcctccacccatgcaagccaacaagaaggcagtacatcgttttttttgtctgattaaattgcatagcattttaatccagtattttcttgtatgattcatgaatcatgactgtatctcactctagtactatccttctgttaacatacagatgaataataaagaaggtagctcagaaactgtctgaaatagctgtcccagaattgcatctccaattttgtaagttcataaataaaatccaatgaacatttatggagtagtagt

SEQ ID NO: 23327 - DNA, 2716 bp, Oryza sativa
  ref <308>: DATABASE ACCESSION NUMBER: AK073441
  ref <309>: DATABASE ENTRY DATE: 2001-12-06
gtaggcccgagaccagacaacccacctcacctcacctctccacccatctcggcgtcgtcgtcgtcatctccgccgctccaccaatcccccttccgctagtgtgctacacatcactgctgctcccctccaccccaaccccaccacgtcagtggagacccccccgatcgccgccacctcgccgcgcccggcgatgctcgcctcctccgcctccggccaaatggcggcgctctgctccccctcgccgacgctccccaccgcctccctcctcctcctgcgtcgccgccgcctccgcctcctccacccaccgccttccgccgccgcgctgctgctcctcctccccgcccgccgccggggccgccaccaccaccgccgaggtggggtcctccggtgcgacgccgccgcggcgtccccctccgcgggttccacgctagaaaacccagttcgcagaaagtgctcaccattacttgagagtgctctattacctggtggaaatggtttgactacgcatgattggatggctgttccagacatttggaggacagcagcagaaaaatatgctgaccgtgtagctttggtagatccttaccatgaacctccttcagaattgacttataagcagcttgaacaagaaatattggatttttctcaaggtctaagggccattggagttgctccagatgaaaagatagccctttttgctgataactcatgccgatggctagttgcagatcaaggaatcatggctactggtgctataaatgttgttagaggaacaagatcttctgatgaagaattatttcaaatttacactcattcagaaagcattgcacttgttgtggacagtcctcaattctttaaccggcttgcagaatcttttatttagaggattaacgcaagatttattgtgctactttggggtgagaaatcgtgcctaaacagtgaagttgtgaatggaataccactttatgacttcaaggatatcactcaactcggacgagaaagccgtaatacattgcgtcactctcatgaacaaggtcagcaggtcgtctttgaaactattactccagatgatgttgctacactaatatataccagtggaacgagtggaacaccaaaaggagtgatgcttacccaccgaaacctcttgcatcagattaaaaatttgtgggattttgtaccagcagtacctggtgataggttcctaagcatgcttccaccatggcatgcatatgagcgtgctagcgagtacttcatcttcacttatggaattcaacaagtttacacgactgtcaagtacctgaaggaagatttgcaacgataccaacctcaatacatagtatcagttccactggtctatgagattctctacagctcaattcagagacagatatcttccagttcaactgctcggaaatttgttgctcttgcacttattaagataagtttgctatatatggaggcaaagaggatatacgagggaacagtcctatcgaacaatcccgtcaaaccatcctttattgtgtatatggtcaattggctatctgcaagaattgttgctgcacttctgtggcctttgcataatctggcaaagacgttagtctacaagaaaatccattctgcaattgggatttcaaaggctggcattagtggtggtggaagtctcccgatgcatgttgacaaattttttgaggccatcggtgtcaaagtgcaaaatggctatggtctaacagagacatcccctgttgtagctgctagacggccattctgtaacgttcttggcacagttggccacccagtaaagcacacggaaatcaaggttgtggatatggagactggtgaggttcttccagatggttcaaagggggttgtgaaagtcagaggaccccaagtgatgaagggatattacaagaatccgtcagctacaaataaagttttggatcaagaaggttggtttgacacaggggatattggttggattgcacctcactgtccaacagggccaagtcggaagtgtggagggatgcttgttcttgaagggcgtgcaaaagatacaatagttctcacaacaggtgaaaatgttgaacctgctgagattgaggaagcagccagcaggagtgacttgattaatcagatagttgttgttggccaggacaagcggcgaattggtgctcttatcgttcccaactatgatgaagttctagcaacagctaaaaggaagtccattcttgatgggaataacgaactagccaaagataaggttttgaacttgctatatgatgagctgagaacttggatggtggattgttccttccaaattggcccgattctaattgtcgatgaaccatttacggtggataatggtttgctaacacccactttgaaattacggagggacaaagtgactgccaaatatcatagagagattgatgcgttgtacaagtgatgtggagtgagcatgagtacatacagacagtagtttgcattttctttgccttggaagacatctcttgagtagacagtagctagaacatacaataatgcaaccattttaaaatttttttggagtgaaatggaataaggttgctgattcagtatgtataagcattatttctcctccatatcgatgtgatctcaccacaatatatgcatcgggagggacaatttgtggacgatgcactgtgttactgtgactgaatttcgtagaaccgaatttact

SEQ ID NO: 23328 - DNA, 1342 bp, Oryza sativa
  ref <308>: DATABASE ACCESSION NUMBER: AK073442
  ref <309>: DATABASE ENTRY DATE: 2001-12-06
gacagttgcaggcttgcagcagtggtccagtggatacggaggtggtggcaaccggagatgacgcctccgcctccgccgccgcggcgccccgtgtgcgtgaccggcgccggcgggttcaccggctcgtggctcgtcaagctcctcctctcccgtggctacgccgtccacgccaccctccgcgacccagatgatcccaagaacgcgtttctgaagcagctggagaacgctccggagaacctgcgcctgttcaaggccgacgtgctcgacggcggctcgctgacggcggcgttcgccggctgcgagggggtcttccatccggccactcccgtgccggaacacaagacggtcgatccggagaaggagatgctggctcctgctgtgaaaggcaccagaaatgtgctcgaggcttgctctgctgcgagcgttcagaaactcgtcgtggtctcatccatctgtgctgtttgctttaacccgagcttgcctcgagacaggctcatagatgagacttgctggtcagacaagaagtcatgcaaagaaaatgagaactggtactgtcttgccaagaccgaagctgaagagatggccctggaatattcagagaaaaatggactgcatgtcattacggtttgccctggcgttatctttgggccactgttgcagactgtgctactcaacaccagcagcaaagttctgctctacatcatgaaaggaggccctgatgcactaagcaacaaattctttcccatagtcgatgtccgcgatgtcgccgatgctttacttctagtgtacgacaaggcagggccatctgagcgatacatctgttctcaagaacaaatggacatgagggatttgttggatttgatgaagagcatgtaccctaactacagctacacagccaaagtggttgatgtggatatgactacgagtgttgaattgacatcagagaagctgaagaagctgggctggaaacctaggaaactcgaggagacgcttgtcgacagcgttgaatcctacaagaaggcaggctttgtagatgacgaaccttgccggcttccccatctttaccgtgcaccagatgctcaggagtgaacagccggcgccgtcttgctgctactgttcttgatctaattgtcactgaaaaaaaaagtttccaataatactgtaatagatgagggatcaggtgttcctgtccagtgtccacattatcatctgctctgttccattagtgaattgattcagcctgtgatcaatgacacaatttatgcctggcaataattgaatattgtctactgattaagatggacaattgtgtgtgtaattttaatatatccgccacccgatt

SEQ ID NO: 23329 - DNA, 1417 bp, Oryza sativa
  ref <308>: DATABASE ACCESSION NUMBER: AK073443
  ref <309>: DATABASE ENTRY DATE: 2001-12-06
gatcgccgatcgaagcttacgagctatctgctcttctctctctctccgccatgaggaggatcacgtggctcgcgacggcggctgcggcgctgtgctgcctcgtcgcggcggcgagtgcgacggcgcagtgcaggttcccggccgtcttcaacttcggcgactccaactccgacaccggcggcttctgggccgccttcccggcgcagcaggcgccgttcggtatgacctatttccgccgccccgccggccgcgcctccgacggccgcctcgtcgtcgacttcctagtgcaagcgatggggcttccgctgctgagcccttacctgcagtccgtcggctccggctaccgccacggcgccaacttcgcgacgctggcgtccacggcgctgcagcccaacacctcgctgttcgtcaccggcatcagccccttcttcctcgctgtccagctcaaccagatgaaggagctgaggaccaaggtgctcacctccaatggcaacaacgaccaacttcctgcacctgatgttctgcacaatgctctgtacacaattgacattggtcaaaacgatctcacctccaacctgggatcacagagcattgagacggtcaagcaaagtctcccttcagttgttagcaagatctcctctactgtgcaggaattgtacaacattggcgctcgcaacattatggtgtttaacatggcgcctatcggatgctacccggcattcctcacgaaactcccgcataccagcaatgacatggatggatatggttgcatgaaaacctacaacagtgcagtgacctactacaatgaactgctgaacaatagcttggccgaggttaggaagaagctgcaggatgcatctattgtgtatcttgacaaacacgctgtgacgctcgagctgtttcgccatcctaaagctcatgggctgaagtatgggactaaggcttgctgcggatatggtgatggggcttacaatttcaacccagatgtgtactgtggaagcagcaaattgctgaatggccaaacggtaaccgcaaaagcttgtgctgatccacagaactacgtgagctgggatggaatccatgcgacagaagctgcaaacaagatcatagcatcttccttgatgagcggctcatattcatatccaccttttgatctttccaaactttgccacctacagcccatagcataatcacagcaccaatctagtcatacttagttgctgaaaccagaatatgacaggaaagcacatcttctggaaaagagatgttgtaaatagtatgaaagtctcagtagtcagtagtacataaagaggtttgatattcaaaccttcaactaagaataaaatcatgtttattgtatatcctactaatacacagtactacggtaccgagacttgaattgcagattttgagcatt

SEQ ID NO: 23330 - DNA, 2410 bp, Oryza sativa
  ref <308>: DATABASE ACCESSION NUMBER: AK073444
  ref <309>: DATABASE ENTRY DATE: 2001-12-06
gagttctccgataaactaaaccacaccaagacaccaagttgatcgtcggcgacatgtcgtccccaattgccattggtcgtcgacacgggccaccaccactgctactacacctgctcatccttcatctcctgttaggcttccaacacctctgctactcccttgccacgtacagcaaccgaagtactgctgccatgccggccccgtgcttgcccgaccaggcagcggcgctgctccgcctgaaacattccttcaacatgaccaacaagtccgagtgcaccctcgcatcatggcgcgccggcacggactgctgccgctgggagggcgtccgctgcggcgtcggcatcggcgttggccatgtgacctcgcttgacctcggtgagtgcggattggagagcgctgctcttgaccctgcgcttttcgagctcacttcgctcaggcaccttaacctcgcgtggaacaatttcagcgggtctcatattcccaccattgggttcgaacggctcactgagctcacctacctcaatctctccaactccaaatttgcaggccagataccaaatacaataggacgtctcactaatttgatatcccttgacctctccactgattttttccttattgatctagatgatgagttcttatcagttgccacctattcacccgcttggttacttgtggcaccaaacattgtgtcaatagtcgcaaacctccacaacctgaaggaactttatatgggcacaatagacttgtccagcaacagcatggtacagtggtgcagtgccttttcaaactccactacccctcaacttcaggtccttagcttaccatattgctacctcgaggttcccatttgtgaatcattgtcgggtatacgctcactgagtgagattaacctacagtacaacttcatacacggtcccattccagagtcctttggagatttaccttccctaagtgttcttagtcttacacacaacagtctagaagggagcttcccaagtagaatcttccagaacaaaaacttaacctctgttgatgttaggtacaacttcgaactctccggttcgttgccaaaaaatatctcatcaaatgacattttggtagatcttcttgttagcagtactaacttctctggtccaatccctaactcagtaggcaacatcaaatccttggaaaatttgggtgttgcatcaagtgacttctcccaagagcttccctcttctattggccagctgagatcgttgaattcgttagagattacaggggctggtgtagtaggagcagtaccatcttggattgcaaatttgacttcattgacccttctcgacttctcgaactgtggcttatctgggaagataccatctgcgataggtgctatcaagaatctgaagaggttagcgttatacaaatgtaacttttctggccaaatacctcaagatctatttaacctaactcaattgagagtcatatatcttcaatataataacttcattggtacgttggagctcagctcattttggaaactaccagacctattttctttgaatctttccaacaacaaactatcagttgtagatggtgagaaaaataattcttcatgggtgtccataaactatttctacaccttgcgcctagcatattgtaacatatccaatttccctagtgccttgagtctcatgccttgggttggaaatcttgatctttcaggaaatcagatccatggtactatacctcagtgggcgtgggaaacttcgagcgagttgtttatcctcaacttattacacaacaaattcgacaatataggatataattatcttccattttacttagagattgttgatctcagttataacttattccaaggacccatacctataactggacctgacacttggttgctcgattgctcaaacaaccggttctcatccatgccatttaacttcagttcccagcttagtgggatgtcctatctcatggcctccagaaacaacctatctggagaaattccactctcaatttgtgatgcaagggacattctgctccttgatctttcttacaacaatttaagtggcttgattccactttgtttactggaggatatcaattcccttagtgtgttcaacttgaaagcaaatcaacttcatggtgagttacctcgtaatatcaagaaaggatgtgcattagaggcattagatttcagtgagaacatgtttgaaggacaactacccacatctctagttgcttgcagagatttggaggttttagacattggaaataatcagattagcggtggttttccatgttgggctagtatgcttcctaaacttcaggttcttgtcctgaagtccaacaagttcaccggagaggtggggtcttctgccatcgaaaaagataacacttgcgaatttgc

SEQ ID NO: 23331 - DNA, 2014 bp, Oryza sativa
  ref <308>: DATABASE ACCESSION NUMBER: AK073445
  ref <309>: DATABASE ENTRY DATE: 2001-12-06
gaccatcgccgccaccgccaccgccgccgccgccgccgcctcctccattaacgccggccattcttcccttgtcctccgccaccacaccaccattgccgcgaatgcatgcctcttcttcgattgattgaattcaaagtgtgacctttttgttgtctcaaacgaacgacaaggggtggaaaggtagtcgacgcaagtcgccagttcgatcttgacctcgctcatcggaactagacagcccatgaagaacaagaagaagggtagtcgttgcaaccgcaacgtgagcagcattacatcttcctcttccttaatttgcattgcatctctcaatcttctcttgtctgttgatccatggattgatgctcttgtctgttgatccatggattgatgctctagtgggttgctgcaatatcttgatgcagaaatcagatcccgtgatgctggatgggttcaccaagctacctgaagatgtcctgctcaacatcctggaccgcctcaacacccccgacgctgtcagaacctgcctcctttctaagaggacactccatctccgccatatgctctcaaacttacatattcggatcaattcctttgtgccccgttgtggctatgccaccttgaaggatacaattcccatgaacgctgctgtggctggtgcaactgacaacattctcagtttcagaagacaagatattccccttcgcaagctcagcataggtttctacttgagatactatgattgtctcaccattggcaaggctgttgcccgagccatggccacccacaacatccacagcgctgagttcaacattctgacagagaagccgccggactattcaactattgatgatcgccgccgcgatgggaagcagctgatgacatttttttgttcctgtactgatgcatttgccggccttacacgtctccacctacgcaacttaaagctttgctgaaactgacattcccaacatcatcgccacatgcaaacggttagagtatctgcgtttggccttgtgtcaaactgaggatagcgttttgctgctgtagttggaacacccacgccttgttgagcttgatatctccaatgccaacttagaactaatcgagctcaactccctaccgaacctcaaacggctgggttttggtgtgtgggtctatccccaagaaccttgtctttttgcaacgtcccattgctttcaagcctaagcctcactaatgtggccatgagatggcataaggttattaggttaagtcagttcctcgctaatatcctcttcgtaaaagacctgcacctcaactttgcaagtgaaaagataattactttaagcaatcctctctcccatgttatttgttcctcgttctcaacttaatctggatcctttattattggtatgtattgcagatttgggttcatccggagtgcccaaaactgctggagcctgttcttcagaatctgcaagttttgagtctggatgaactcccagaagaatgtgatatcgcttagacaagattctttctcgaggctgcaccctccctgaaggagatgtgcatcacagtttgggaccattggtgtgagattgagacagacaaggtgaaacgggaaaaacagggttactgtgacaaaacaaacgtggaatgggagtcatccgcacctgatggttttaggcattacaacctgactaagctcaccatctatggtttccaaccaaatgagaactttatgggatacatcaggcacgtcatggaagctgcggttaacctagagaacatatccctgcatgacaggaaggtgctcaagtgctgtgaagagttggatcccaagatcaaggttgctccgtcaaggtatccgcagaccatcgaggagcaggagctgctgaggaagcaaattacagagggattggtgatggcgtcgcctcatgcagttcacttccggtcttaattttgctcggtgcaaaactgtgattcactgtatggtactggtaataatatatgctgaatgttccaatcgtttcatggc

SEQ ID NO: 23332 - DNA, 1170 bp, Oryza sativa
  ref <308>: DATABASE ACCESSION NUMBER: AK073446
  ref <309>: DATABASE ENTRY DATE: 2001-12-06
gacagactcggacaccaccggtcacttgaattgtcaagctagctagccttctcatcagcctggctctcagtctcaaagaaagcacaaaggtagctagcttagcatcgattgaagctgaccagagagatagttaagaatttgccatagcttagtgtttggtgcatacacacaactgctctcgttgtttttgctcttttgggttcgctcggaagatgagccgtgaggaggatgagaagctgctgttcccttcgttcgccttcccggcggagtgcttcccggaagccgccacctccggtggcgagcagaagaaggctcggcagcggcggaggaggaaggtgaagccggaagcggcggcagcgttggctggagagagcggaggggatgagcaggcgaagaagcggcggctgagcgacgagcaggcgcggtttctggagatgagcttcaagaaggagcggaagctggagacgccgcgcaaggtgcagctcgccgcggagctgggcctcgacgccaagcaggtcgccgtctggttccagaaccgccgcgcccgccacaagagcaagctcatggaggaggagttcgccaagctccgctccgcccacgacgccgtcgtcctccagaactgccacctcgagaccgagttgctgaagctgaaggagaggctggcggatgtagaggaggagaaggcgaagctagcagctgtcgccgcggcgacgaccggcggcggtggtggcggcggcggcggcagcagcagcccgacctcgtcgtcgttctccacggtgacgtaccacccggcgctggcggggcagttcggcgtggaggcggcggccgaggaggccgacctcacctacatgagtgagtacgcgtacaacagctacatgctggagttggcggcggccggctactgcggcggggtctacgaccaattcagctgagcgccgccactcgccggggccggcgccgacggaggattaactagctacagtagctgttaattaatggatcgatcaattgcagggtagtaattcagtagtggtggtgtttattagtagtatcaatgatcgatatatcatcagtcgtgttgccctaacgaaaaatctttagcggtgactttgctaagccatgtagattattaaattggatgtctttgtaagtatatgtgtttagaatacc

SEQ ID NO: 23333 - DNA, 4296 bp, Oryza sativa
  ref <308>: DATABASE ACCESSION NUMBER: AK073447
  ref <309>: DATABASE ENTRY DATE: 2001-12-06
ggccggatttttgtcagactactcccttcctctcctctcttctgtatcccatacagcctctcctctcctccccttctcctgcaggttttcgtttcgcctccccccacctcgcgccgtctacttgtgctagaattcggactccatccgccattactccccgaatcggcctccggggcaatcaatcttcggtttcttggccgaaaccctggctgtggaagatggatggtgttgacaaggataaagggaatgggaaggtgcatttcagggattcctctccccaggaagctttccgaacctacaagaggcgccggcagccacggccggagccgcaacagcaaccgcagccgcagccgcagtcagagccggaaccacagcaacagccacagccacagccacagccacagccacagccagaggcagaggcagaggcagaggcagaggccaaggctgcagatgttctggcacggcaggtgactgaaacattttggaaaagtagggacattggatggaagcatggcataatgatcgacgagaacagacaacactggaagtgcatgtattgtcacctgactagatatggtggtggtgtctctagacttaagcggcatcttgctggtgatctggatgtcaaaatgtgcccaaaagttccagctgacgtctctgaaaaaataagggagcatttgcggaagaaaagagaaaggcgaaagaagcgagctgcacaaaatcgtgataactgtgtgacggctaagagcacctctgatgatatcaagtctggcaaagatcctttacccgttgattcagaggtgctgactggagtagacactgttcttgaagaagttactaaccaaacgaaccatgataatcaggatcttacttatcccaaggctaccatgttgttacgagggataagagatattgggtgggagcatgcagtggatcttgatggaaataaaagacgatggaagtgcaagtggtgttctttatgtcgaagtggtggtgtaactacattgaaggctcatcttactgatagtagttgcccaaatattcctaaggaaatatcaaaaaaagtgttgaactttattgaagagaaaagggcagcacgccatctttttaatagcgctgcaaaatctcctttcaatgtcaaatttgacgaggatgcagttaatctctcagaaatacaggtggaaggtactccaccattgacagatgatcgacaacctttaggaaattccttgcatatacaaacatcagagtgcaccattaatgagtttgaaaaggtggcagctggaagcaaccaacagggtgcagaacatagcaaccaactacttaaccatggtgaacagctgatgaaaagcagcgatcaacctgaggagcactgcaccttggaacatggaaggtgccaagtacttgacaataataagcagcagactatggacaataaaactgataatccggaacacaaagaggtcttgaaacaccctaaaaaaactaggtttaacataaggaagcatatagttatcgttgatgaatctgcaaggcattggaggtgtagatattgtggtttggatgggtatggcaaaacgtctaggctccattttcatcttgctgctgtgtttcgacatcctaagtgcccaagtgttccaaaagaagtttttgcaaaggcacggcatcatattcacttaaagagaaggctcaatgtgaaaaaggctgggcaacaagctcgttcaaggccacatattcttgggcaatcgagtcagcaacagcagaacaacaatccggtactttccaattacccaacaagattgagggacaatgcatgggaacattcgcttattcatgacaaagagaagggccattggaagtgcaagtggtgcagtttagagggttatcatggcataactagattgaagtggcatcttgttgggtggcagaatcgtcctcaatgcctaaatgttccagaagatgttgctaaaactattcgggataaaatgatatcaagagagaagcagaaagaaggaagattgaatcttgatgttattgacagttgcaacatgccatgctcttctgagagtttacagtttgatcaagagaattttgctgaggtaatgcagggaaaaggttcttctgaagattttaatcaagctgaaagacaatcaaacacattgaacacagtatgcaataccactcatcctccacagaacagcaacaattatcagggacttcaagaaaatgggttatatagtagcaaaaacaaatctgagaagcaaactgaaaggtatgactgttggagtcactggcgatatgttttagatggactgatgcatttgccaggtgcactagagggtcctggcattcagagttgcatccgtgatgtacttctttacggttctgctgaatttggaactgttggggacaaagtggaaatggattccaacagaaaagtgtcaagtgatgggaatattgctaagtgtcagagtgttcttgtggatgttttaaagtcagagaattttgccttattgtgcaatgtgcttggcagaactgtccatcaagatgagcaaaggactaagtattttgattttaccatgattgactcaaggatgaaaaatggagattatggccgtgcaccattattattcaaacatgatttgaaaatggttaccccactactttagaatatactccactccagttatctctgacttatgtttgtatctcagatatatgatgccttttatttcagtcatgtgtttatcagctttttttttttaccaaaactgagtttgcattttatcatgcgaggcatctattttctaaacctttttttttcttttgaacaagtcaagagagctgcatgtcatttcattaattttcaaaacattttcgtagtgataaatggtgaataaaatagttttgatatggttgcagttatgggaagatcttaaaatggctggtcaagatatcattgacctagcaaataatctttcaagcctcacagaaacgtcctacacaaagcaggttgaaagagagaggggatcagatgatagtgaagagaatctgaagggagctgcggcgaccaatttggaacccatgaacatggtcaagtcaaatgcattggtactttcaacctcacaaggcttcaaccagttggatcaaccagatccaatggatgtttgcgatgaacaaaacggtactaactgcaatgaatgtggcaaggtagcgaaaattgatagcatcctcacatgcaagagatgcatgctagcattccacgtctcatgcattgaacctcctgtgccatccacttcaactggaagctggtgttgtaaaacctgcagcaccatctgtaacgaatcagctgaagttggcatggccttggtccattatgaaccaaatcgtttgcacggacattgcgtcgcatgcaaggaccttgagttttgcaggcctccaaggtgtgagaaaactgccagtgaaagggcacctgctgataactccagagcaattgtgattcccagtgcagagcctgttgaggatgtggaattgtcagatattgatgtcaggggcttatgcaagatgtgtggaaatcccgaggagaaggacaagagattcttggtatgtggtcacacccattgtctatataagtactaccacatttcttgcctgaaggctacacagatcgctagtgacaagcagctggacaagccctgctggtactgcccatcgtgcctttgccgagtttgccattctgacagagatgatgacctgaccattctgtgtgacggctgtgatgaagcttatcatctctactgcataacaccccgtcgaacttcaatacccaaggggaaatggtactgctcatcatgtgcgatagagagagcaaaggaggggatggcgcggcatgagaaaaggatgctgaaactccataggaaggatgatcctgggctgcaaggcatgagatatgaaatggtggacatgatactcgctgctgcggagatgcttagcgatgatgagcagcaggggacctgaatcaccttttcttttttcctgatcaaacagaatcatttaggaagttgaacctgtcatcttttttttttttgcttcacctcatttaggttatacctaattaaagttaaacaacttgtcgtcgtcggaagtttaagggatcgagttaagtactcaggtggttgaatattggttttgtctggggaacagtggtagcgaaatgtcgctatattgtgtacctgtgggtgcaattttgtgaacaggctccaattgaagtgaaaaatgctgaagaatttcacc

SEQ ID NO: 23334 - DNA, 1618 bp, Oryza sativa
  ref <308>: DATABASE ACCESSION NUMBER: AK073448
  ref <309>: DATABASE ENTRY DATE: 2001-12-06
gggcggagataaaaaggcacgcagccgctccaagaaaccctcgcccccacgacgctcgctctctcctctctctccctcttccgccgccgcgcttggggaaggaaggagaaagcaagccatcggcccccgcctccgcctccgaagggacattgttgctagttggtgatggctgagcaggctaatcaaccgactgtccttcagaagttcggtggccagttccaccttggctccagcttttctgaaggtgtacgggctcgcaacatctgcccatctgtctcatcctatgacaggcgctttaccacaaggagctacatgacccagggccttgtcaatggtggcatcaacgtcccaatgatgtcgtcctctccaatttttgctaatgctccagctgagaaaggtggcaaaaacttcatgattgatttcctcatgggtggagtgtcagccgcagtttcaaagactgctgctgctccgattgagcgtgtgaagctgcttatccagaaccaggatgaaatgatcaaggctggtaggctctcagagccatacaagggtattggggactgcttcggacgcactatcaaggatgagggttttgcttcattgtggagaggaaacactgccaatgtgatccgttacttccccacccaggctttgaactttgctttcaaggattacttcaagaggctgttcaacttcaagaaagacaaggatggttactggaagtggtttggtggcaaccttgcctctggtggtgctgctggtgcttcatctctgttttttgtgtactcccttgactatgctaggacaaggttggccaatgatgcgaaggctgccaagggaggaggtgaaaggcagttcaatggccttgtggatgtttaccgcaagactctcaagtcagatggcattgctgggttgtaccgtggatttaacatctcatgtgttggaatcattgtctaccgtggtctgtactttggaatgtatgattctctgaagccagttgtactcactgggtctctccaggacaatttctttgcaagctttgcccttgggtggctgatcaccaacggtgcaggtcttgcctcttaccccattgataccgtccgcagaaggatgatgatgacctctggagaggctgtcaagtacaagagctccatggatgctttctcccagatcctgaagaacgagggtgccaagtcactgttcaagggtgctggtgccaacatcctacgtgccattgctggtgctggtgtgctctcaggctatgaccagctgcagatcctcttctttggaaagaagtacggctcgggcggtgcctaaactggcagaaaatgatgacgaacaagtgtttattcctggtcctgcactaacgggatctggtgaattttgcctttttaacattgaaaacaataataattcttgtaggggagaacactccccgacattcgttttttggtggaagcgtttatctccaaacattgtcataggcggaggcgttaatcgcaaacagtttaccatcatagggttgagtttgagttgagtctggccggctctgttatgtctggcgattttcctaccatacattaccctcggtgaaatatcgaaagattattgagttgctgtc

SEQ ID NO: 23335 - DNA, 1108 bp, Oryza sativa
  ref <308>: DATABASE ACCESSION NUMBER: AK073449
  ref <309>: DATABASE ENTRY DATE: 2001-12-06
ggcttggccttgtcgcactccggcttctccaggaagaagacgtgcccctccccctccgactccacccacgtcgccgtcccgcgccaggggctcgccgccacggcgtcgtagtacgcgcggtccctcgccgccagcccgtcggtctgccccgccgccaccagcatcctctcgcacgcgagcttctccagcgccggcgcgccaggcgcaagcgggttcatcctcgggtcgtccgcgccgccggacgcgccggggcacgcgtagcaccatatcataccggtgagcgcggccgcggccgggggctccccctcgagaaccgtgctcccgccgaaccacgggtgcagcagtaacgcgccctcgatcctcggcccgccgttggaggccgccctcaggagcatgtcgtgcacgatgttgccgccggcgctgtcgccggcgatgaacagtcgggacacgtcgccgtgctccgcgagccagccatcttgcgctgacgccgcccacagtagcccggcccaggaatcgtcgtaggccgccggcagcgggtgctccggggcgaggcggtagtcgacggacaccacgacgacgccggccgcggcggcgaaggggttgacgtagttgtggtacgtggaggagtcggccgactcgatgaggaagccgcctccgtggaagaagacgaggacggggagcttcttggatggctcttggatcttggggaggtagaggcgcacggagaggccggtgccggcgtcgatgacgacgtccttggaggcgacgccggtggcctcgtcgacgccagcgggcaggcagggtggtcggtgaaggcggtccatcttgccgctcttgtagatgcggaagtgcgccggagcctcgaacaccacggcgtcgggctcggtctcggaggccatggcgaattggtggatgctgccgcagaaggcgttttggcctccggcgggctcgatggcgaatggagagatgataaggtacgtcttgaatcagctaataaacccctggctgggacctgggagggagagcgtctgccgcacgtcctttttcgtccttggatcttgtctttgatttttttagaaaaaaatcaaatgaagtttatttagaaccg

SEQ ID NO: 23336 - DNA, 2182 bp, Oryza sativa
  ref <308>: DATABASE ACCESSION NUMBER: AK073450
  ref <309>: DATABASE ENTRY DATE: 2001-12-06
ggtcccgctcctctccgtccttttctggacggactcgcctcggcggccgcagccagccacagccgccgcttacttgagattgagattgttgccatcccgttgccgatggcggcgatgctcgcgccggccgcgctcccgccccgaggtttacagagtaaggcggttggaaatgcggagtcgcagttgttgctacatggaaaaggttgcatagtggccgacgcaatgctgtcagaatatttgcagcaaagagtaatgaaaggaggaggaaatcacaaagtatatctcaaggtccaacatttataagtgaagaagcttcttcttcaggcagtggcgaaaaccccaccaccagccttgaggtcaatgccaatgatgttactactgacgagaaattcacagttgccccaaggaatgcggttcttcaggcttgtactctcacatctagcttactccttgcaggaggtctcgttcttcgtgaggcatcacattttgcatctttgaatggatggccggttgctgaccctatgaatttgtcatgtatgctttcttcttatctttacaaataaatgatgtgccatgtaataatgttgagttacctaaatgtatgtaagtcgatttctgtattgtttttctgcagtcaattttgagacctggcatcttgagttgattgcaggacttgtaataataatatcatctagcagatatattcttctacagacatggccagatttcagatattccagtgagactgcaaatagacaagtatatacaactttacaatcagtatttcctttttgttttattttccttctcatgaaggtctgtcattggcaaatacagtttctcaagtagctgatgaatctatgctgttgtctgaatgaacataataacttttagagtacattgtaacaattgcattacctcaccagtaaatgatgtacattttcacctagtcaataaatgctctgctctttttatgaactgagtggaaccaaggttccaaaaactggagtagatcagtaactggtccagagccagggacttgttagaggttgtctattggctagaagcctatagattcaaaacttatatttaaataattccaactggttgctggtcaaaattttgaacttttggatttgaacccttttcctgtaactggccagttactggatttaaccagtggctggtaatctagacagaccagtatttagaatgctgagtgcaacgaaagattttaccaagtctggcacataatcgcaaagttcccgggtcgatgggatcgaggaatgggtcgaggaatgtggtatgctacttgcgagaggtttttacaaggtggggacaaaaatgaccccgcgttcccgggacagggatggctggcgttcccgggttgaggaacgttgccaccaaccccgtttccaaatatacaaagttgagttgcatagttgcattagtttcccctaatgcaagtgtttccgttatattgtaatatgtcatagatctttatttcaagatgcaaaaaagtacattgtatccagtactatcaggtgtcttttctttataatcatttgagacttcggccctggaacacttcaaattcttagatagtgcaagttccttcactacacttcaactcttaatggtttcaatttttgtcaactagatccttacttcactggagactttcgattatatcgtagttgcttgtcttcctgggataagcgaggaggtgctgtttcgaggggcattgatgcctatctttggactgaactggataagtgcctttgtaactagtgccattttcggtattcttcacttgggcaatggcagaaaatattcatttgcaatctgggcaacgtttgttggcgtagcatatggtttagctaccatagcttcttcaagcatcatagttccaatggcttctcactccataaacaatattatcggaggcctaatttggcgctttaccaacaatacagaaagagaataggtttctccttagtatatttggaaatatatattttcagttttaggtgttatttgtttttttgctttagcatagaccttttagtttgtctatactggttgtttttgtaacttgtactgctaggatgcttgaagaaatgttttgccttactgttctttaagatcatttgggcacgatgtgtattacagataactattt

SEQ ID NO: 23337 - DNA, 974 bp, Oryza sativa
  ref <308>: DATABASE ACCESSION NUMBER: AK073451
  ref <309>: DATABASE ENTRY DATE: 2001-12-06
ggtgcgctctcccgtgccgattcggggctcgtccggaagcttctagagcggtagaatccaaaactccagaggcgaacgcgatgcgacgagacgagacgaaccgaagaagcattccctccctccgctcgagcccctccgttttgatccgattcgctcgcgattgatatggggagaggctacagttacagcccatcaccacctccaagaagctatcggagaagggccagcagcccaattccccgtgaccgttatggtggacgtggtagaggtctcccgaccagtcttctagtcaggaatcttcgtcgggactgccggccagaggaccttcgtcggccattcggacaatttggtcgtctcaaagacatatatattccaagagattactatagcggtgaaccgcgtggatttggatttgtccagtactacgatcctgatgatgctgccgatgcaaaatactacatggacgggcaggttattctgggcagggaagtagctgttgtatttgcagaggagaacagaaagaagccttctgagatgagatctcgcgacagaataagtggcagcagaggtcgttcctatgaccaaaggtactctaggtcaccgcgatactctcctcctccaaggggccgctcgccttaccgcagcccgagctactcaaggtctccttcgcctcggtatgcaaggcgcaggatgagggagaggtcctactcaccagttgagagcagatcaaggagcaggagcccggtcgaggaaggatacggtggtggatccacacggagagagaggtcgctctctgtcagtgaatgaggtctagagcgctaccggtaatcttcaactagtagtcgctatggctttgcgaaccatatgttactgtcgtgctgtagtggtatcaataacttggcaaatgttgcgtcattacgcctttcctggaagatcgcaaacatattaagttacaacgccggtgaattctgctc

SEQ ID NO: 23338 - DNA, 1607 bp, Oryza sativa
  ref <308>: DATABASE ACCESSION NUMBER: AK073452
  ref <309>: DATABASE ENTRY DATE: 2001-12-06
gtggaggtacgaccatcacccgtcccatccatctcctctgctccaagaagcaaacaccaagaaacaaagagggagggagagagagagatagagggagagagtccttttctctcaccagctctcctttcaagctcagtacggtggccgctcaccggatccaagaagaaaacctctcttccgtttatgattctttctcttgagttcttgaggttttatttggtttttctttgagtttttactcgtttttctcgatttctcgatttcgatgactcggaactatataggttctctaatgacaagtaagagcaagaaatttctagcacggagaagctctcatgagattgacagaagagagtgagcacacggcgtgatggccggcataaaatctatcccgtcctcgccgcgtgctcactcctctttctgtcaccctctttctctcagggctcaactcctatccagatctattagcaggcttacaaaatcactaaattactttgatttggtgttactcaatttgattgttatgatctagccttttcctccaaagaagcactagaaaccaccccttatgcttggtagagagaaacctcatgcttggtacagagaaattcagccacaagaagacagagaacgcatgcttgaagtactctgtcttttctcccacactttaccctgtcacctccttatctcttagatgtgcgtaaaatgcatatgtttacccctgtttttctcaatctttttcagccgtgctgtcgccggaactactaccgaggagagtgatacggatgctggtgataatgtggtagtactactccttgcgttgggagctgaagcatggagatgctgccagtacactggagcactgtggtgattcatcaacaggattaaccggatcttctctctctttcttcttctaccccatctcttctcttcacttctctctttgctctcttgtttttcagctaaagctccttgtgcaggttgttggccatggtggtggggttcatcaagttattgcttggtcaaaaatggagcatggaagaggctaacagatgacccatatttggcatgcaaggttgtttcgctatgcgtttgccagatctggctcgcatcttagataaaggtcatcattcatgtttaatggccagcaaggcagcaactacaccattaatttccacaagggattgggatgagatatgattcaagctgatggatgctttacaaaagtcacttcatgtgcttgacatgcatgcgcgtgcagtcccattctgagagggcctcaatcttggcgcggctggagacggacactgttgaataaattggaactgatcgaaggctcgaagcacagattatactagtatacacgagttctagatggatgcatgttgttagcctccagatatcgtgtttatgttcttcctgtctctacaaaatcttttctctgtatcctccaatgtacagttatgcttttttatttaatttgttttgatttctgtatgtataaggattgcctcatgatcacaatagtgtatatgttgtatatatctatcaacaatgtataccaagtttttccacataaccttatctgaagcatcctttaataattc

SEQ ID NO: 23339 - DNA, 1612 bp, Oryza sativa
  ref <308>: DATABASE ACCESSION NUMBER: AK073453
  ref <309>: DATABASE ENTRY DATE: 2001-12-06
agccgccaccggggtcaccaccatcgagctcgtatggagcggagggcgcagccggtgtcggcggcggtggcgccggtgacggggaggaggaagggtgcggcggcgagccggaagtggatggtggtgccggcggtgggggaggagcggagggtggagtttgggaagcaccagatcatgaagatgacggggctccccgggcgcgacctccgggtgctcgacccggtcctctcctacccgtccaccatcctcggccgcgaccgcgccatcgtcgtcaggctccagggcgtcaaggccatcatcaccgccaccgaggtgctcgtccccgaccacgacgacgtcctcctcgcctccttcctcctcgacctccgctcccgcctctccctcccggatgcggcgcctagcacgaatccggcggcggctgatcgcgggaacgggacggagcagggcgatcaggggagcgtgccaggtctggcgatcagcggtgctggcaacgccaagatcccgccctttgagttcaaggtgctcgaggtctgcctcgagcacgcatgcaaagacttggaatctcagacacgctctctggagaaggaggcgtatccggccttggacaagctgggatcgaaggttagcacgctgaacctggatcgcgtcaggaatctgaagagccgcatggttgatctctcagggcgcgtgcagaagattagggatgagctggagcacttgctggatgacgacatggacatgtccgagatgtacctgacgaggaagctgtcgttccaagggctcagcggatcgctgagcagagcggattcacacaagtacgcatctgttgatcatgacgacgatagggaggaggaagaccatgacgatgagacagagagtggccgtgaaagttctgtttatgttaagcctgatatagaagagttggaaatgcttctggaagcttactttgtgcagatcgatggaacgctgaataccctgtaccatatccgtgaatacgcggacgacacggaggattacatcaacataatgctggacgagaagcagaaccagctgctgcagatgggcgtgatgctgacgacggcgacggtggtggtcaccgcgggcatcgtggtggtgagcctgttcggcatgaacatccacatcgacctgatgaaagacccggagacccccgagatggtgaggatgtccaacatgcacttttgggagaccaccttcggcacggtcgccggctgcatcgccatatacctcctggcgatctacgctgggaggaagagcaagatcctgcagtgatgcttcccaacagaggaagctaagcgtcaggttgcgagttctgcagcctggctgcgattttgctgggcagtggcgtagttgataggttgtgtatggatgtgatgcatttttgttgatttcgtatggtgtgggagcaataataatcgaacgatctctctccatttcctgctcttattagaagttagcacttagcactactatgttaaatttcggccaaaggaaccactatgttaaatttcggccaaaggaaccctttcagaaatgctcttgccacatttcgcattcgaagtaaatccaaaaaaggtaccagtaattctcatcc

SEQ ID NO: 23340 - DNA, 3038 bp, Oryza sativa
  ref <308>: DATABASE ACCESSION NUMBER: AK073454
  ref <309>: DATABASE ENTRY DATE: 2001-12-06
gacacgcattcctcttcttccctcctcttctctccccgcctcctcgcggtgtctgcctctctctctcgcgcgcgcagcctaccgccacaagcaaagtccaggagggctcgggcacggaagcttctggaagcttccgcgttggcgtgaggaaggaggcggaggggaggggagggggactgacctactccctcaccgcggtcgttccaagtcccgcgccgccggggattcccatcccctctcgcggcgcgccgcttcgacgggaggcatcgtcgtatcgcatcgatctggtttggggggttttgggagtctgaagtggtgggtttgagatggaggacttgctggacacggagatcgggaagcatgactacgactggcttctgactcccccaggatcacctcatgctcctatactggaggttgtggagaaagctccatcctcagatgtccctaaacgcattactactagatcatcctcaaccactagagcatcaaggctttccattcctgaaacagagaatgggcattccacagtaccaactaggccagcacggagtaactctgtctctcgcccttcaatccaatctactcttatttccagcaacaacaggtcatcagttgtcaatgcaagcatttcctctgtctgttcgccacctacaactccaagcaagaggactagcactctttcttcatcaaagccatcagttccagcttcacgtcaagtaccaacacggccctctactccaactaaaacccgtccatgtactccagtgaaacctcggccatctactccagtcaaacctcggccatctactccaaataaaactcggccttctactccagtcaaaactagatcttctgtacccaacactatgtccacctcaactattgccaaaacaacatctgcacaaaactcgagaccatcaactccaacctctcggcctcgtatcatgtccaattcatcttcaagtacaagttctgcagcaagtcgtcctagttcatcctctggaagaactagtacaattagtcgcacctcctcttccacaagtacagttccttcagtcagccgctctagctctcgttcatctacacctacgcgtcagcctatcacacgttcatcagccccactggctggccactcaccttctgttgggaggatatttggcagcaataacataacatccatcgggcggcctgtaaccagtaatggtcgaagttcagcaccttcttctgcaccatcatctcgtccaagttccccaaattcacgtgcacgagctccagtcaggccgttagatattcctgattttccaagtgaaactccaccaaacctaaggactaagctaccacaacgaccactatctgctggtagagcacgcccaggagtgggtttgggacccaagtcagccccaaatgctgaacaagttcgctcagctcctgtaaaaaagatgactgtgcctgctattacgcgaagtaaatttcctgatgcaccatctagggtatcttctcttacaaatggacaccgaagcagacagtccgaggggtctgctgtggaaggccaacatactaaaccattacggtctatcacgggcacagataatggctttggtaggacaatatcaaggaagtcacttgacatggcaatcaagcatatggacattcgacaaaacctgggtggtattcgtggtgcatctctattcccgcctagcattcgctctgccggtgcgaaggtccggtcagctcgaatgtctgatcccgctcatctcagtttaaatggcgattgtcattttactgacaatggcagcatcaatggacacttctctggagattcgaacggaactctttcaaacaacggtggccgcgctccacgagctccagaccgtcgcccccgccgccgccgtcaccgtcgcggacaccatccccgtcaacgacgaggacaacattctcaaggggcatgggacgtcggatcaggacggggaggtggtggcgacgctgtgcggcgtggtggagcgggtcaacaagctggtgtacgtgcggacgcttagggcgaggtataagccggaggttggtgatatcatagttggccgtgttattgagattgcacctaaacgctggaggttggagataaattttagccaagatgctgttttgatgctttcttctatgaatttacccgatggaattcagagaaggagaactgctgtcgatgaacttaatatgcggacaatttttgaagaaaatgatgttatctgtgctgaagttcgtggtttccaacatgatggatctctgcacctacaagcacggagtcaaaagtatggaaagcttgagaggggtcaactgcttgtagtacctgcatacttggtaaaacgacggaagcagcatttccaccacctcgagcaatatgatgttgacttgattcttggttgcaatggattcatctgggtaggtgagcatgttgtggtaggtgaaaacgctaatatgatggaaaataagctgaatttgagtgctgaagtggagaatttcactccactagaaacaaggaaacatatttgccggcttgccaatgctgtacgtgtgctttcagctctgggtttcactttgacagttgaactgataattgagactgctgaagcaagtgtatcatcaaatatcgagataaacaacatgcttggggctgaattttatgtccagacagcagagagagaggtaaaacgtcgagctgatctgttgcgaaagaaaagtggagcaagataaaatctgctgatcctatgtaaagatgcctaaacgtgtacaagaagaaagcctgataagtgccatcgtactctgccatagagatccaactgttttcagatctacggtgcttgcatttgatgatagtgctagaaatggcaaaatgctgggcttgcagtgctggaggggcctcatctatgttaaatcacataactattgatgtacgtttgacgcttttttttttgaattgtattactgcatactccctttcttgaaaattctagtaatctatatcctgagattttgatggtgtc

SEQ ID NO: 23341 - DNA, 1432 bp, Oryza sativa
  ref <308>: DATABASE ACCESSION NUMBER: AK073455
  ref <309>: DATABASE ENTRY DATE: 2001-12-06
gctaggaggagagcacggtagatcccccatttccctcctcatctccgacgcgcatttcccccaaaagaggggagcaaatggcgtcggcggcgtgctcctcgtcggcttccgccctcgtccgcctcaccggcccgatccatctgtgcagcgccccgccccgtgggtccgcgcggcggcgccacgcttccgtgcggtgctcgttcgcgccggtggagacggcgaggataaaggtcgtgggcgtcggcggcggcgggaacaacgctgtcaaccgcatgatcggcagcggcctccagggcatcgaattttatgccataaacacagattcccaggcgcttttgaattcgcaagcgcaatacccgctacaaattggagagcagttaactcgtggactaggtactggtggaaatcctaatttgggagagcaagctgctgaggaatcaaaagaagccatagccaatgccctgaaggattctgaccttgtcttcataacggctggaatgggagggggtactggatctggtgctgctccagttgttgctcagatatcaaaggaagccggttatctcaccgttggagttgttacctatccattcagttttgaaggacgcaagcgctctcttcaggcgttggaagcattagagaagctggaaaggagtgtagacacacttattgttattccaaatgatcgattattagatgttgttgatgaaaacacgcccttgcaagatgcgtttcttcttgcagatgatgttcttcgtcaaggtgtccaaggaatatcagatattattacaatacctggacttgtcaatgttgattttgctgatgtgaaagctgttatgaaaaactctggaactgcaatgcttggtgttggtgtttcttccagcaaaaatcgggcccaagaagctgcagagcaggcaacacttgctcctttaatcgggtcgtctattgaggcggctactggtgttgtgtacaatatcactggtggaaaggacataaccttgcaagaagtaaacaaagtctctcagattgtgacaagcttggccgatccttctgcaaatataattttcggggctgttgttgatgaccggtacactggtgagattcatgtgacgatcattgccacagggtttccacaatcctttcagaagtcccttttggccgatcacaagggtgcaagaataatggaggccaaagaaaaggcagcgaacctcacctataaagcagtggcagcggcgacggtacaaccagcgcccgccgccacttggtctcggaggctcttttcctgaacacggttcaataggaaaactagtagtttgtgtaccttagattctcatggaattactgagttggcgctccaatcaggcttctatgtgttattctttttggatatgtaaacacttaacagttacacatagtgattagcttcactttt

SEQ ID NO: 23342 - DNA, 1268 bp, Oryza sativa
  ref <308>: DATABASE ACCESSION NUMBER: AK073456
  ref <309>: DATABASE ENTRY DATE: 2001-12-06
gtctccttcccgcatcctctccacctctcgtcctccccctcccctccgctcatcgtgccctgctccgctgagcacgccgcagctccggatctgtggagccggggatcaggcaggcggaagcgaggtcgtgtcttggcacttctgtggctggttctttcgtagctctagagaattttggtggatagagcgcctcgatcggagaattcgggggggacgagatggatggtctgcctgcggagctgtgcatcaagatcttccacctcctggatcaccaatctctcgcctctgctccccaagtgtgcaggaagtggaacacgttgacctccgacgacgagctgtggcgcaggctgttcaaggacaggtggggagcggatgctgcagcgttctacgcgccagagggctccaggtcatggaaggacgtcttcattgtgcaggatcgatgcgaccgatatgggctgtaagttgccatcgaattcactcgcctatcatcccgctcgagctgtacttcttatcttggcatgcctactgtcacggtgtcccctgatattcagacgtggcacacattctgtagtacactgcaacaatgtcactctgaagtactcctatatgaactctgaatactgtaagttacgcctcattgatctttccaggggtgtcaggattatcagagaaggaagcgattactacctgatttaccagggtgagatccagaggtacttggggtcgagacagcatgtgagctgcgatagcaaggacgctcctgcgcagagtagcgaggacgagcagcggcagatatccgatcggatcttgttcttccttggagacctggaggctgcatgcgcagatgccaaacgtgtgaaggtgcgacgaccgtgatatccaggaacagcgctgtatgacattgtagttgttatttttgcacatatttcgtgcacatatgttgtatgtaaaatcttcaatccattatccgtagcgtttcacattcatcttatgtatttcctcattttaaaagtaaaaagtttgtaaatctgcgctaatcgccttttacttttaggcttttagcaaagcacgtgtagcatcatctggtaatttttccgccgtaagtaaatgtaatagtcatttagctgcaaatgcatatatgcttaccacgacaaatggatatgtcccatcatcttttctaatctttataaaatgtaatcataaactcgtcgttcgagattaaaaaggcaactggcctctcctgtcagctaaggatgttttacgcaagg

SEQ ID NO: 23343 - DNA, 2175 bp, Oryza sativa
  ref <308>: DATABASE ACCESSION NUMBER: AK073457
  ref <309>: DATABASE ENTRY DATE: 2001-12-06
gactctcctacgcttccaccccccattcccatcccctccacccagatcgccgccgccgccttcgcctcggacggccgtacggcgccgtccaccgcgcacgtctccggcgatctacaggtgtagatcgcttccggagacatccaaccgcggccatggcgaccttcgcgaaacctgagaacgcgctcaagagagcggaggagttgatacatgttgggcagaagcaggcagcgctacaggcgttacatgatctcatcacttcaaaaagatacaggtcatggcaaaagccactcgaaaggattatgatgaagtatgtggagctctgtgtagacctgaggaagggcaggtttgcgaaagatggccttattcagtacaggattgtctgccagcaagtgaatgtgtcatccttggaggaggtgataaaacacttcatgcagctttccaatgagaaagcagagcaagcaaggaaccaggcgcaagcactggaagatgccctggatgtagaagatctggaagcagacaagcggcctgaggatttgatgctcagctatgtcagcggggagaaagggaaggaccgatcagacagagagcatgtcacaccatggttcaagtttctctgggaaacatacagaacagttcttgagatattgagaaacaattcaaagcttgaagcattatatgctatgactgctcacaaggcttttcaattttgtaagcagtataagagaacgactgaattccgtaggttgtgcgagataataagaaatcatcttgctaacttgaacaaataccgtgaccagcgagatcgtcctgatctgactgccccagaaagcttacagctatacctggacactagagttgaacaactaaaaattgctacagagctctctctctggcaggaggcctttaggtctgtggaagacatccatggcttgatgagcatggtgaagaaaacaccaaaaccatctgtcctggttgtgtattatgccaagttgactgaaatattctggatatctgattgccacttgtatcatgcatatgcatggcttaagctattctacttgcagaaaagctacaataagaacttgtctcagaaggaccttcaattaatagcttcttctgttttgcttgctgcacttgccgtgtcaccatatgaccataaatatggcgcatctcatcttgagcttgaaaatgagaaagatcgtaatctgcggatagctaatctcgtcaacttctcccttgactccaagcgtgagaatagagaagtgccatcaagagcatctcttttttctgagctggctgccaaaggtgtcattgcctgtgcttcacaagatgtcaaagatttatacaaccttttggaacacgattttcttcctctggatctcgtatccaaagcacagccactgctatctaagatttcaaagattggagggaagctttcatcagctcccttggttccagaagtttttctgtcacagtaccttcctgctttggagaagttaacaactttaagggtgttgcaacaggcttcccagatatttcagtctgtgaaaattgatatgctctcaagaatgatcccattctttgacttttctgttgttgagaagatctctgttgatgccgtgaaacacaattttgttgctatgaaagtcaaccatttatcaggagctgtccattttgggaaaatggacattgaatctgattgtctcagtaatcacctaagtgttttggctgattctctaaataaagcaaggagccttatccatccacctgtgaagaagccatccaagcttggtgaaaacttaacgagtcttgctgcagtagtggagaatgagcacaagcgtcttcttgcgaggaaatcaattattgaaaaacgcaaagaagatcttgagcgccaaatattggaaaaggaaaaggaagaagaaaaaaagagattgagtgttctcaagaaatctgcagaagatgaaaggataaggcttctcaatgatgtaaaattgagggaacaggagaggatccgtcgacaattggttgaaaaagaaaagatagaggcagaagaactgcttcagaaacagataaaggagatagcaaagagaggaggaaaaaaacctgtccttcagggggaagttactaaggaggctgtgatggaattggctatgaatgagcagtttaaggagcgcc

SEQ ID NO: 23344 - DNA, 1439 bp, Oryza sativa
  ref <308>: DATABASE ACCESSION NUMBER: AK073458
  ref <309>: DATABASE ENTRY DATE: 2001-12-06
gcttcagaaatgtcccggagattagttttaatcagagaaagaagagaaaaaggaattcaaacaacaaaacaacagagaattcatcaaatcaacttatgtatctacaacagcctgtcaattttttgtttgttgctcctggtacatcaagtggtccacaagggccttctcaaatagttgctgcagttcctgtttcttcgagtgcgccacacggtcagacgtctagtgcaaaccacccaagtgatggaaataccacatcctgttctgtagctgctcaaaaaaattccgacttgtccaactacagtggatcagcaccttctttgggaaatgttgtgccagaaggagaaattaaatcttcagggtttgcttcacaaataaaagagagtcatgaattgtcccaaggtaatggcaacaagggaaacaacgtgaacatggcaagttctacatcctcgccacagcttgtgacagtcccggttggactgtgcttgccttcaatggacagctcgaagatatctgcagatgcgattaattctacgaactctggcagcatgattagcaatggcaatgtgtcattcggtctttgtcaatctcaatctaccaatgctgatcctcggtcaactcccgagggttcttctattagggcagcagccatcgcagcaggtgcacgcattgcatctccatctgatgccgcttcaatcataaaagcggcacagtcaaaaggtgctatccacattaggcctggagaaggcgtcccaaattatctgaaaccattagccccacaaccgctctcctcgctaccaccaggcagcatacccaattcagtgcatccttcctcaagccatgcacaaccaggacagtgcagctttggtgattctgcagcagcaaaggatgcaatttttggttccacagacagcagtgatgacgatgagtatgatgaagatgatgacactgacgataacgatgaagatgaggggataaccggtgacgaggtggagcaagaataatcttcacattggcacctcgtcggctcttcagctgtatttgtactaacctctcctagtggcttctgaggccctgatctttaacaaaccttttcacccatggattctcttagagcatagctgtatacatgtttatagcctgtatttaagctcccaattactgccttcatgagcctagaagttatcccccccccccttcctaccctctcgattaagcatgcctggaagtccctttttgtcaacctaatcagaaacattgagcattgttaatcttggtttgttttggctctttcaggggtttggtcaaatggtcagctcaaatgtgaggttatgtacagaatgagttgttctcttgttaaacgctccaacagctcaaaattttgtactctcatttttctcttcttggagagatatctaaacctggctcactgccccttgacg

SEQ ID NO: 23345 - DNA, 3927 bp, Oryza sativa
  ref <308>: DATABASE ACCESSION NUMBER: AK073459
  ref <309>: DATABASE ENTRY DATE: 2001-12-06
gatctccaaatagtcccatacggtactttcatctctgctggtgtctctctttgggttatcttcttcttcttcttcttcccgtctctctttaggatctcgagtttgctgcttgtgctgtccctgaagaaggaaactagctaataagtgcatgcagtaggtgttggcgaaaggggatcaaggtaacaaacacctctctgcacttctgcacctgtgcacggttaccctctgtaaattgtggttatacttgtcataagaaatgcgcatccattttgtagttttgtgtagtaacgagtacataatgtttgcgtccactgctactctaatggacatacaaggcaacgtgattatcgaaacggtactttagagaaaaaaaaagttactaaatttctgcagaaacgacatggcaaagcagcccgcgatgaacgatggctatccatgggagtaacattcactagccaaccgtctcatcttttcgcttatacttatacttatcaataaaaatttaatttttcaaccttaaatttggagctgatattaagatttttttcatcaaagttttttttagcttttgcttttagatcgctaataacacgtatataaaagttttatttacaaattgctttacgtttgcaaatatgccatttcacttattccgtgaataagcaaaacgatggctccgtaggagatgtttggttggttatcacattttagtcatgccatagttttttttagacatgtatttgcttcgttgtcgtaactgtgttatgccatactttcttattctcgagatacacatgtcacactcttaaattttaagctcactatactacacttactattaactactacctccgtttcaaaatgtttgacgccattgactttttatcacatgtttgaccaatcgtcttattcaaaaaatttaagtaattattaattcttttcctatcatttgattcattgttaaatatatttttatgtaggcatataattttacatatctcacaaaagtttttgaataagacgaacggtcaaacatgtgctaaaaagtcaacggtgtcaaacatttcgaaacggagggagtatttctgagctacacttgtaccaccctactacaactggtgtaagcttagttacggtcaagttagatctcaacacgaaaaaaacttataactcactccctccgtttaaaaaaaagagataacctagaagttatacagtgaatctgaacaatctcattgtattaggagagacaacatgtatttgcttatatgttgttttttttttttttaaaggatggagtagagcgtagcagggcaaagttcgaggcgctgtgccgtgctccaaatcatccatatcatgtttgttcgtttgtccgtacatatctgatgctaagttttttctagtcctccttatccacaacccctcctcctcctcctcctcgtgcttcttccagctccagggcgtgatttgcgggtcgcaacccgacacaggtaccgtgccaggctgccataggccagctccagcatcggcgccaacagagtcgcccacaaaaccgctcccttttttttccctttctttgtttgtcagtgtccactgccatagcactacactggtggcgatactgatacgtgcagagaagcaaaccaacgagttctctcactcgctataagtgggagcctctatcttatctccacttcttcttcagacttctcaaagaagaagagtcaggctcctcttcctcggcatcctcctcctgaattctccttctcggatcacctcttctcttcacctcctctctctcccatccgctgcaaccccccgcttacaaacgagagtgttaattggtattttagtcttctgcacatccatcggtacgttctttctttctttctttctgcatgattcagttttcccgttgttgattgcgatgatccagccatctatccgggactggtttcctctccctttttgttggtctctgttcttgggttgggttttcagtccggggaatgaactcgctcgctaggctggaactctggatctggtgatcaaacggcgtctctgaaaaatcagggttgatgtggtgggggtggggtggggggatcgagttcatgtctcttttgttcatctttgatgggagaaaaatgagtataagaataaattgcgatttgatttgtttaaacttaattaattattttttgttgtcctagaaatgatgaagtgttgctgttgggagggaggtagtaataatgcttgcagaatagtcgccctgtcacaatcaatcgtccattgaggataaagcgcttatccaaccacagcaccacactatggcacctaactagaagaatcttgcatcccactcactttgccacttgcgagctgctcactctgagctcttcagatatttagatccaactttgcttttgagtttggataattaattaatcatgtttctgttcttataatgaaaaaaaaatcagattgttaaacacaaaggtgttaataaaaaggttcaaaacaccaaaacctcatctttgattgctctattttaaccaccacagaataataatccttttctctgaaacctgtaattcagtagtacttgtgtccattgatttatgattgcccatttttatcagataattatacttgttggatgcttacaaggtttactaatgttttgcctcttgttttccgtttgtatctcattatctgtatctctctgaaacagagctcatcatcagattgaaacaaataaagtgaagtatttgatcacttatatggccctcaagacgctgcaagttccatctagctttgcaaggccgatcaaccgcagcttcatcggttcttcttcttcttcgtcgtcgtcgtctcagttttctctgcggccaaagcctgcatcggcacggctcgccgcaagtgtcgccggagggaggcgcctcgaatgcaggggcggcagcagcctgcacggctgcgtggacgagggcgccgcggcggcgtcgaggaggcggcaggagcaggcggtggagatccccatcgttctgttcccgtcggtggtcttccccggcgcgacggtgcagctccaggcgttcgagttccggtaccggatcatggtgcacacgctgctccaggagggggtcaccaggttcggcgtcgtgtactccggcggcggggtggggggcggggtggcggccggcgaggtggggtgcgtggcgcacgtggtggagtgcgagcggctcgtcgacggccggttcttcctcacctgcgtcggcggcgaccggttccgcgtcgtcggcgccgtcaggacgaagccgtacgtggtcgcgagggtccagcccctggccgacgcgccgcccagccaagaacgcggcggcgacggcggcggcgacatggtgcgccacctcgtggagcgagtggaggagcagctcaagaacgtggcggcgctgtcggacaagctcgggtggagccggccgccgctgccgttccgcgcgacttgctccccgtcgtcgctgtcgttcgccgtggcgagggaggtcgtggaggaccgggaggagcagcaggcgctgctccggctggacgacgcggcggcgcggctggcgcgagaggggaggtacctggagcggaggagcaggtacctggccgccattgcggcgatcaaggacgccctcgatggccacctctactgcaacgacaagtagagacgacgacgatcgagtgagtactccgttaataaccggccactggtgaggactcccatggccataggtttctttggttttgtttggcttctctgcttcagaattcagagttcagagttctaatgtaaatatttttgtaagttcctcgagctgttttttgtggtgaaaactttgcattgagtagatgtatttaggagtacttcataatgtacagaaggattgatgtgcc

SEQ ID NO: 23346 - DNA, 1454 bp, Oryza sativa
  ref <308>: DATABASE ACCESSION NUMBER: AK073460
  ref <309>: DATABASE ENTRY DATE: 2001-12-06
ggtccgatccgtcgttcgtcatcaggtttttcctcccgagctcgagaggcgcaacaaaagccatctctccttttcccccgccgccgccgccgcctctctccgtctgaaaacacccaaaaacccaaccaaaccctagatccgccgcctccccgctcctccgtctccgactccggcgacgcccgcgcggccacgatgccgaacctcgagtgccggatgtacgagccgcggttcccggaggtggacgcggcggtgatgatccaggtgaagcacatcgccgacatgggcgcctacgtctccctcctcgagtacaacaacatcgagggcatgatcctcttctccgagctctcccgccgccgcatccgctccatctcctccctcatcaaggtcggccgccaggagcccgccatcgtgctccgcgtcgaccgcgacaagggctacatcgacctctccaagcgcagggtctccgaggaggaggcgcacgcctgcgaggacaggtacaacaagtccaagctcgtccactcgatcatgcgccacgtcgccgagaccctcgggatcgacctcgagccgctctaccagcgcatcggatggccgctgtaccgcaagtacggccatgccttcgaggccttcaagctcatcgtcgccgaccccgatgccatcctcgactcactcacctacgaggagaaggagaccggcgctgacggacaggaggtgactaaggtggtgcctgctgtcacccctgaggttaaggatgccctagttaagaatataaggaggaggatgacaccacagccacttaagatccgtgctgatgttgagatgaaatgtttccaatttgatggggtgcttcacattaagcaagccatgaggaaggctgaagctgctggtaatgataattgtccagtgaagattaagctagttgcacctccactttatgtgctgaccacacaaactcttgacaaggaccaaggcatttcagttctcactgatgcaattaaagcttgcacagctgagatcgagaagcacaagggaaagttgatagttaaggaagcaccgagagctgtgagtgagagagaagataaactgttcaatgagcacatagaaacccttaacgagcaaaatgcggaggttgatggtgatgctgacagtgaagaggaggaagatacaggaatgggtgacatcgaccttacaaattccggtgtcaacgcggattaaagttccgctatttgatttggatgagttttgttgtatagcaccagccaatcttaagtcgtcctatttgaaaagagttcgttaggttctggtggctgtgacccctttgaattcactgatgcgcgttgtctggggtgtttgcgttttggggttgaggtcgtgttggagaattgctcgagtagcatctaattttttcttgggatcgaaacataattctgttgctatacatcgtctttgattggccg

SEQ ID NO: 23347 - DNA, 1692 bp, Oryza sativa
  ref <308>: DATABASE ACCESSION NUMBER: AK099357
  ref <309>: DATABASE ENTRY DATE: 2002-08-28
ggcgctactcttcttgcgacagaagcaaaaggcggcgaagagagagagagagagagagagagcgagatcgccggagatggccgacggggaggacgccgccgccgcccgccgccgcgcctccgtgacggagtaccggaagaagctgctcaactgcagggagctcgagtcgcgcgtcagcaccgtgagggaaaacctaaaaaatgctaagaaggactttacaaagaccgaagatgacttaaaatccctgcaaagtgttgggcagatcatcggagaggttctccgccctcttgataatgaacgttttattgttaaggctagcagtggtcccagatatgtggttggttgccggagcaaagtggacaaggagaaattgacttcgggaactcgtgttgttcttgacatgacaacactgacaatcatgcgcacacttccacgtgaggtggaccctgtggtttacaacatgcttcatgaagaccctggtaatgtcagttactctgctgttggtggtctgtctgatcagattagagagctcagggagtccatcgaattgcccttaatgaaccctgagctctttcttcgtgttgggatcaagccccccaagggtgttctactctatggtccaccaggaactggtaagacactattggcgagggctattgccagtaacatcgatgccaactttttgaagattgtttcaagtgctataattgacaagtacattggagagagtgcccgcttgattagggaaatgtttggctatgcacgtgatcatcaaccatgcataatcttcatggacgaaatcgatgccattggtgggcggcggttcagtgaaggaactagtgctgatcgcgagatccagcgcacactgatggatctgctaaatcagttagatggatttgatgaacttggaaaggtgaaaatgatcatggctaccaatagacctgatgttctggaccctgcgctactgcgtcctggacgtctagacaggaagattgagattccgctaccaaatgagcaagcaagaatggaagttcttaaaatccatgctgctggtattgccaagcatggagaaattgattatgaggcagttgttaaactggctgagggcttcaatggggctgatcttcgcaacgtctgcactgaagcgggtatggctgcaattcgtgctgaacgggactacgttgtccatgaggacttcatgaaggctgtcaggaagctgaacgacgccaagaagctggaatccagcgcccactacagtgcagacttcggcaaagagtaaggtgcaagattctgatcctgtattcgatcttctaccatgccgggagttctccgccatggtgcaaaagcaacagagaaatcggtttttcaccgtcaggcttctattctgcactgcaagctgaagccatttgtcatgtgtgcaatcaaagagccatgaatggttgtcaagcttatctctgggactggagaaacataccgagaacttgcaaattttataactgatgcttttgcctctgtttcactccgttttttgagtctcaccttgtgtcagtactactgtgtagtcttagttttgagcagttgcatgtacttttgacaccatgcttggtaaagaatagcaaaatggtatcttgattcagcttccagacccccatctggtgtgggaatgcatctcaattcctgtgaaattcgtgc

SEQ ID NO: 23348 - DNA, 1025 bp, Oryza sativa
  ref <308>: DATABASE ACCESSION NUMBER: AK073461
  ref <309>: DATABASE ENTRY DATE: 2001-12-06
gtctccaagtgttcaagctcacctcagttgattctagcttagcaacacacaagcacacagctagctagctcagctctctgtgcttctctagctaagctaatcgttttcaggcgaaggaagcacacacatctccatttgtgcatcagatcaccggccaggtcgtcggcgagaatgcagtacggagcggcggccgagcaggcgtggtacatgccggcggcggcgccggcaccgatggtggagagcgcggtggcgcgggtggagcggctggcgtcggagagcgcggtggtggtgttcagcgtgagcagctgctgcatgtgccacgccgtgaagcgcctcttctgcggcatgggggtgcacccgacggtgcacgagctggacctcgacccgcgcggccgcgagctggagcgcgccctggcgcgcctcgtcgggtacggcggccccgccgccgcgtcgccgcccgtcgtccccgtcgtcttcatcggcggcaagctcgtcggcgccatggaccgcgtcatggccgcgcacatcaacggctccctcgtccccctcctcaaggaggccggcgcgctctggctctaggcctcgcccgcccgccattggcgtgctctggcttagcccccctagtatacctagcacgcaaaaagctttacctgctgctgctgctgctgctgctaatgaagaagatgaagatgatgatgatgactagcaagtagttgattgatttagctgctgctaataggatatccatcgatcgagatacagcccatttacacggtgctagctaattaatcagtgtgtgagtgagtgtgtgtttgagagtgagtgagctagagctagaagaagagagatcgaggttggtgtgtgtgtgcttttttcttcacgacgactgcctctgtccgtctcgtgcatgcttcgcgcgcgcgcgcgcgcatgtggttgtttgttggcgcgtgcgctggatttgcttgctttgatgctgcatgctattgctagctactgaaattactactaccagtgttttattt

SEQ ID NO: 23349 - DNA, 1257 bp, Oryza sativa
  ref <308>: DATABASE ACCESSION NUMBER: AK073462
  ref <309>: DATABASE ENTRY DATE: 2001-12-06
ggcggcgcaaagcaaggtatccccaaacagtagcagctaccgcgaggtttgcatccaaagcacggcgatctcatcccagcaacgtacaccgcgcgccgtgacacgcacaagccttctccgcgtacgtctgcccgcgcgcgcgcgcaagctggcaatggccgacgacgtcgtcgaagccgcggcgtcgtcctctcccagtacgcaaggcggcggcggcggcggcatccatgtcgtcgcgaagaacgcgatgaacagcagcaagcagttctcctcggccctcgcgcccgtggccgtgctgctcgccgtcgccgtcggggccgtctccctgctgccatcgctggcgcaggcggtgtgggaggtgccccacctcttcctcctcggcctcgtcgtctcctatggcgtcttcgcccagaagatttccaccggtggcagcggcggaggcggcggcggcggcggtggagatgatggcgccagggcgtggaactctcggtacctcagcgacgaccccctcgtcgtggtcgccgacaatgcggcgagtgacgacggcggcggcggcggcgcgagcgggaggccgctttccttgccggtgcggaggctgaagccgccgccaccggcgccgacgatgccgaggatagagtccgaagccggcgatgccagcgacgacggcattggcgcagagacggacagctccgcatcgacggcgggattctggggcgccgccccttcgccgccctctgttcttgacgccgtctgcaggtcccggaaacccgctgctactgcgacggcggcggcgccgtccgccatgtcgaagggcttcccgagctacatttctccggcgcctcgttgcgaccagtcgttcagcgacgacggcgaggtcaccgactgggacgacgacgacgacgagaaggctgacgtgcaggacgagatggccgcgtcgccgcaaaggtcgtacgtcgaccatgacgactacaacggtgacggtgatgagctctccgagctggcggcggaggtggaggacgaggtggacaggaaggccgacgagttcatcgccaagttcagggagcaaatcaggttgcagaggttgtaggcgttcatggcaacttggcaagtatgcatacgtgatgcatgcagtcatgcaccgtaccgtggagtgagtaaaaccattatgagccattttacgtacgaagggggatcgtgacatgggtgtacttgtgaacagctgatctgttcatcggtaacgtcatgtttcttgtatcg

SEQ ID NO: 23350 - DNA, 1942 bp, Oryza sativa
  ref <308>: DATABASE ACCESSION NUMBER: AK073463
  ref <309>: DATABASE ENTRY DATE: 2001-12-06
gatttgttttgtgcacgtgatgcgccttggtcgttctaaaccctagaaatcaaccaccccttccccttctccttcaccttcccgccgtcttcgccgccctcgttcctctcttctaccaccaccacctcctccgccgtcaccgccgctgagatgggtcgcagtatgcttcccgagcagcaggaggacgtatcgaggaagagcaagaaggagaagaagagcaagaaagacaagaagcggaagctggaggcggaggccgaggtggtggtggtggaggcggctgcggccacgtccacggatgaagcgacgaagagcagcaagaagaagagggccaagggcgatctgggccaaggagaggaggcggagaacggcggtgggaaggtcgtggccgtgaccgggaagggctccgcggacgccaagtacgccccgctgtcatccttcgccgccaccgcgcttcctccccaggtgctcgactgctgcaaggggttcgagcgtccgtcgcccatccaagcgtacgcctggccttacctcctcgacggtcgtgacttcatcggcatcgccgccaccggatctgggaagacgattgcgtttggtgtgccggctctgatgcacgttaggaggaaaatgggggagaaatctgctaagaagggggtgccacgggtcctcgtgctatcgccaacgagagagcttgctcagcagatcgcagatgtactttgtgaagctggtgcaccatgtgggataagttcagtgtgcctttatggtggaacttccaaaggaccacaaatttctgcccttaaatctggagtggatattgtcatagggacacctggtcgtatgaaagaccttattgaaatgggtatttgtcgtcttaatgatgtttcttttgtggttctagatgaagctgatcgaatgctggatatgggttttgaacctgaagtcagagcaattttaagccaaactgcatctgtacgtcagacggttatgttcagtgctacatggcctcctgctgtccaccagctagcccaagagtttatggatccaaatccaataaaggttgttattggatcagaagatcttgctgctaaccatgatgtgatgcaaattgttgaagtattggatgacaggtcaagggattcaagattagttgctttgctcgataaataccataaagcacagagaaacagggtgttggtttttgtgttgtacaagagagaagctacgcgagtagaaacaatgttacaaagaaggggttggagtgctgtttctgttcatggagataaggcacagcatgacaggacgaaagctttatctttatttaaagaagggtcatgtcctttgatgattgccactgatgtcgcatcccgtggacttgatattccagatgtcgaagttgtcattaactatagctatcctttgactacagaggattatgtccacaggattgggaggaccggtcgtgctggcaagaaaggtgttgcacataccttcttcactcaagagaacaagggacttgcggtgaacttgtcaatgttttgcgggaggctggtcaggtcgttcctcctgcacttacaaaatttggcacacacgtcaagaaaaaggaatcgcaaatatatggatctcgtttcaaagaaatcaaagcagatgctcctaaatcaacaaagattacgtttggtgattctgatgaggactagcaacatttgctggtcttttcttcgttgcgttctgaagttttgatgcttggagtaggccaaatattcgacagcaaaatattgcctttcttgaagggagaacccctctaacagtatcattgtatacctaggttagtttagtatcagtgatttcctaccttgtccagaccatcttattttatacttggttgtatgtactgcaatttgcttctcttgtgttggaaaaaacagtaaaatcagatatgtgctaaggcacc

SEQ ID NO: 23351 - DNA, 1116 bp, Oryza sativa
  ref <308>: DATABASE ACCESSION NUMBER: AK073464
  ref <309>: DATABASE ENTRY DATE: 2001-12-06
gggtagagtgttgtgaatagccagttcagttcatcagttgataggagccatgcttcaccattactacagcggcggcgccggccatcatcaggacgtcgctgcagctggtagccccggcgacatggcttcctccaccttctcgctcttcttcccgatgtccaatgggcagtgttggccgccgtcgacggtggaggagtccgcggcctacgacgaccacagcaccgtcaccacctctccttcctcgccttcgtcgtcctccaccggctccgtcgactgcacgctctcgctcggcacgccgtcgtctcgccgcgccgagcccgtcgcggcggcggcgccagcggcaaaccatggggcgcccgtgccggcgcattatccgtcgctgtcagcggcgaccgtgtcctgggacgcgactgccgagtcgtactattgtggccagcaggggaggccggccaccggcgccgccaagtgcgccgccggcgccgggcacgacgcgctcctcgaccgacgctgcgccaactgcggcaccgcgtccacgccgctctggaggaacggccctcgcggacccaagtcgctgtgcaacgcgtgcgggatcaggtacaagaaggaggagcggcgcgcggcggcgacgacgacgacggccgacggcgccgccggatgcggcttcatcaccgcgcagcgtggacgcgggtcgaccgcggccaaggcggcgcccgccgtgacgacgtgcggcgaggagacgtcaccgtacgtcgtcggcggcggcggcggcggcggcgaggtcgcggacgcggcgtatctcgcctggcggctcaacgtcgtcccaccggcggcgacggcgacggcgttctcggtgtggccggagcgagctagcctctaccactacaactagctataggcgattaactagtgtagcattagcgttggggagaagggaagctgcaccgtttttttggggaacattttgtacggtcgcacgctcccggattgatcgaactgtatgcatctgctgtgctgtgttgcacgctagctagctagatgactctgatcttgaaacgaaccgtgatcatttcattcatttggaatgaacatgtagctgtgcaaggtcatcttgctcgg

SEQ ID NO: 23352 - DNA, 1475 bp, Oryza sativa
  ref <308>: DATABASE ACCESSION NUMBER: AK073465
  ref <309>: DATABASE ENTRY DATE: 2001-12-06
ggtgagagagaaacgtacgcgatgcgacgagctcctactccgatctccccgatgcgatctcgccaaaccctaatcccacccaccaccgcgccggagtcctagcgccgcccgcagccgccgccgccgtccggatgctgcggccgtgacctcctcctcctccgcctctgacatcccagccatgggagccgccgacaagtggctcctcccgctcgtgtcggtctccttcgtctcgctgctgctcttcctctccgcgctctcgggcttctccgcctcctcctcgctcttcgcgcgcctcccgccgccctcctacgtccgccgcggggcagccgcgccgccgtccttcgcgtacgtgctgtcgggggggagaggggaggggaggaagctgctgcggctgctgctcgcggtctaccatcccaggaaccgctacctgctccacctctcggccgatgcgcccgagtccgagcgcgtcgagctggccgccgccgtgtcgcgcgccgcgcccgccgtgcgcgccttcgggaatgtcgatgtcgttggccgccccaccgctggcacaccgatgggatcctcgggactcgcggctacgctccgcgccgcggccgcgctgctgcgcctggattccgagtgggactggttcgtcacgctcaacgccgccgactacccccttgtcacccaggacgacttgattcatgtcttctcctcagtgccaaggcatctcaacttcatcgatcacactagtgatattggatggaaagagactcagagagtgcaaccaatcatagtagatgctggaatatacttggcaggaagaaatcagttcttccaagccacagagaaacgtgatactcctgatggtttcaaattcttcacaggttctccgtgggtcattctaaatcgacggtttatagagtattgcatatttggttgggagaatctccctcgaactcttctcatgtacttcacaaacgtaatgctacctcaggaagggtatttccactcagttgtatgcaactcagacttccgtaactccacagttaacagcgacatgcggtatatggaatgggatgatccaccccagatggaaccccattttctgaacacgacacattatgatgagatagtggagagcggagtgccttttgctagaaagtttcgggagaatgaaccgctgctggacaagattgatgaaagagtactccaccgttggcgtcacagacctgttcctggtgcctggtgcacaggcagaaaaaggtggttcaatgatccatgctcccaatggagcaatgtcaacattgtaagacctggtccccaggctgagaagttccgcaaacatatgaatcagatcatagaggaatctgcatcaggcaacaactcatgcaagcaatagcagcaatgaagcgcgagattttacttcccatgtttgaagcgatgagcttttctcattttgcatagaggggctcttcacgaacttcagc

SEQ ID NO: 23353 - DNA, 792 bp, Oryza sativa
  ref <308>: DATABASE ACCESSION NUMBER: AK073466
  ref <309>: DATABASE ENTRY DATE: 2001-12-06
gcacccacaccacactccactccagcatagtactgcgcttagctaattaagcagcaacttaacttgatcttcgtgtgaccgatcgatggctcgcgcggcgaataataagtatgtggcggcggtgatggtggtggcgctgctgttggcggcgccggcggcgagcgcggtgacatgcgggcaggtggtgagcatgctggcgccgtgcatcatgtacgcgacggggagggtgtccgcccccaccggcggctgctgcgacggggtcaggaccctcaactccgccgccgccaccaccgccgaccgccagaccacctgcgcctgcctcaagcagcagaccagcgccatgggcggcctgaggcccgacctcgtcgccggcatcccctccaagtgcggcgtcaacatcccctacgctatcagcccttccaccgactgctccagggtgcactgagtggatcaacgtcaagtgatgccacaataataatggagagatggatccatcgatctgcggctctcattttgcggttgctatctgcaatattcgtcgtcgtcagagagatcgagctagaaatgcatgttactcctccgttctgttactatctgcttacctgttgcttcgtcgcggtttgatagtcgtcgttatagctagtgtaagagtgtgagggttgattttgatctgtctcctttacgggacgaggggcagacgaatcatgcatgaatcttagaggacctgcttgcattgtaccttactgcatgcatgcatgcttcaatatatatccatcaaatgaagagtctttt

SEQ ID NO: 23354 - DNA, 2921 bp, Oryza sativa
  ref <308>: DATABASE ACCESSION NUMBER: AK073467
  ref <309>: DATABASE ENTRY DATE: 2001-12-06
gtcctgctaacctctccctcttggtctcctcctctcggcctcttcctctttactccgcttcccccttcgcgccatcgcctcgcttgcgccgcgccaaatcccataaaaattccacccaacacaagcgttaggcctcccgcgcgcgcccgtccgctcgccatgctcgcggccgcttccccttggcgtttgtagatgggctcctcctccctcctcctcttcccctcctcttcctcctccgccacccactcctcttattctccctcctcctcctctcatgccatcacctccttgctgcctcctctcccctccgaccaccatctcctcctctacctagaccaccaagaacaacaccacctcgccgccgccatggtccgcaagcgccccgcctccgacatggacctgccaccgccgcgccgccatgtcaccagcgacctgtccgatgtcacggccgccgcggcgccgtcgtctgccagcgcgcagctccccgcgctgcccacgcagctcccggcgttccaccacacggacatggacctcgccgcgcccgcgccgccgccgccgcagcagcaggtggcggcgggtgagggtgggccgcctagtacggcttgggtggatggtatcatccgtgacatcatcgccagcagcggcgccgcggtctccgtcgcgcagctcatccacaacgtgcgtgagatcatccgaccttgtaaccccgacctcgcgtccatcctcgagctccgcctccgctctctcctcacctccgaccctgcgccgccgccgccgccgccgccgtcgcatcctgctctcctccctcccgacgccacggcgccaccgccaccccccacgtcggtcgccgcgcttcctccccctccgccgccgcagcccgacaagcggcgccgcgagcctcagtgtcaggagcaggagcccaaccagccgcagtcgccgaagccccccaccgcggaggaaaccgccgccgctgccgcggccgccaaggagcggaaggaggagcagcggcggaagcagcgcgacgaggagggcctccacctgctgacgctgctgctccagtgcgcggagtcggtgaacgcggacaacctcgacgaggcgcaccgcgcgctgctggagatcgcggagcttgccacgccgttcggcacatccacgcagcgcgtcgccgcctacttcgcggaggccatgtcggcgcggctggtgagctcgtgcctggggctgtacgcgccgctccccaacccgtccccggcggcggcgcgtctccacgggcgcgtcgccgcggcgttccaggtgttcaacggcatcagcccgttcgtgaagttctcgcacttcacggcgaaccaggcgatccaggaggcgttcgagagggaggagagggtgcacatcatcgacctggacatcatgcaggggctccaatggccggggctgttccacatcctggcgtcgaggccgggggggccgccgagggtgaggctgaccgggctgggggcgtccatggaggcgctggaggcgacggggaagaggctatcggacttcgcggacacgctgggattgccattcgagttctgcccggtggctgacaaggccgggaatcttgacccggagaagctaggcgtcacgcgccgcgaggccgtcgccgtccactggctgcgccactccctctacgatgtcaccggctccgactccaacacgctctggctcatccagaggttggcgccaaaggttgtaacaatggtggagcaggatctgagccactcaggctccttcctggcacgttttgtggaggccatccactactattcggcactgttcgactcgcttgatgcgagttacagcgaggatagcccggagcggcatgtcgtggagcaacaactcttgtcacgggagatccgcaatgtgctagccgtgggcggtccagcacgcaccggcgatgttaagtttgggagctggcgcgagaagcttgcgcagtcgggcttccgtgtgtcgtcgcttgctggaagtgccgctgctcaggccgtgctgctgcttgggatgttcccttccgatgggtacacgctcattgaggagaatggcgccctgaagcttggatggaaggatctgtgccttctcactgcctctgcttggcgcccaattcaggcttcgggacgttagtactgagggggaatttatagagctgaagtatcacttgatcttacttaggtgcaattacctagtccttttgcttcttttagctgctcaatttggtcaattctgagaaaagaaaaataaaaaaaattctgatcactaattgccagatctccacacggtggtagttactgatgtgcagcttagctttagcttttattctgttcatgctccagttaaccattctgtccagtttagtttattttgcaattttgtagtgcttaatccttgctgacattgttttgggggaacacgcaaaaggatccttactgacattagagatgcagttcttatcgtatgatcattgatcacaaaatgaaatatctggtggttagtgagctcaattagattgttgatagtgtagcattgtcaatgatcaccaaataatattgttagtgtccatctactatgagaatttacatgtacatttaagttaatgttcctaattttctccagaaaatgacttagggttgatctgaatgccaaattatcagcaatgaactaatgatgggtagcacatgagttgtgtactagaaagtcaggatgttagtggttttaattcatgccatctaaatcctgctaattcttttcttctgaaatatttgaaaccactgacctacactgctcatttagacattggtgtatcacttttctaacatttttgcattacaataatcttattatgtaattcacttattcctgtatccggcatctactggatatacatggttttacttttt

SEQ ID NO: 23355 - DNA, 2002 bp, Oryza sativa
  ref <308>: DATABASE ACCESSION NUMBER: AK073468
  ref <309>: DATABASE ENTRY DATE: 2001-12-06
gaaaccctaaattccccactcttcctcccctctccctccccacccaaaccctcgcgccgccacccccagcctccgcccggatccagaccgcctccgccgccgagcaccatgggcttcgacgtcggcgtcgtcgccttcaacccggagggctggggccctcccgacaccgcgccggcgccggcatcccttggcggtggcgccgccgcggcctccatccccttcgcgcccttctcccgctcggacaagctgggacggatcgccgactggacgcgcaacccggcgggccccgccgccctcgccgccgcctcccgcgactccgtcttcgacttcacctccgtcgacgactccctcgccgccgccgcggaggactcctcgttccgcctcgtcgacgccaagccgccgccgcgccacccgcggttcggccccaagtggcgcttcaaccagcgtccgcagctcccgcagcgccgcgacgaggaggtggaggcgcgccgccgcgaggccgagaaggagcgcgcccgccgcgagcgccacttccagaacaaccgctcccaccaccaccccggcttccgcggcaaccagtcctcgtcggccaagtcctccgtcgacatccagcccgactggaccatgcgtgagcagatccccttcgccaactttaccaagctctccttctccgtcgccgaccagcccgaggacctcctcttgtgcggcgccgtcgagtactacgaccgcgccctcgatcgcgtcaaccccaaggccgcacgccgcctcgagcgcttcaagtctcgcaacttcttcaaggtcaccaccaccgacgaccctgtcatccgccgcctggctgaggaggacaaggccacggtgttcgccaccgacgccatcctcgccgcgcttatgtgcacaccccgcagcatccactcgtgggacatcgtcgtgcagcgcgtcggcaacaagctcttctttgacaagcgtgatggttcccagctcgatctgctatctgtcaacgagaccgcgcaggagcagctcccagaaaacaaggatgatatcaactccgcgcactccctggctgtcgaggctacctacatcaaccagaacttctcgcagcaggtgcttcttcgcgatggtgagaaggttacctttgatgagcctaacccgtttgcttctgagggcgaggaggcagcatctgttggctaccgctaccgccgctggaagctggatgatgagatcagcattgttgctcgctgtgaagtgcatgctgtgaatgctgatccaggtggtggtcgtcagttccttactctcaatgcgctcaatgagtttgatcctaagattactggtgttgactggaggcagaagcttgagacacagcgtggggctgtgctcgctacagagctcaagaacaatgccaacaaacttgctcgctggacttgccaggctttgcttgctggtgctgacatgatgaagttgggatatgtgtcacgtgtgcacccccgtgatcactacaaccatgccatactcactgttatgggatacaagccaagggattttgctacacagatcaacctcaacacatcaaacatgtggggaattgtcaagtcgatcgtggacatctgcatgaagtttgaggagggaaagtatgtgcttgtaaaagatccagcgaagccacaagtgaggatctatgaggtgccttctgatgcatttgagaatgactatgtggaagagccacttccggaggaggaacaggttcggccgccatcagatgatgttgatgctaccgcggaggaaatggatgcagcggcagaggctgaggcgaacaatgcagcagcttctgcaggtggtgagggcgagaagagcgcagaagctgctgccgcttgaagggctcctcttcaggttgccagctagatcctttttggtttaattatctgtttttatggtttacatttaagagttgaactgcctgttatcgatacagtggtcttgtttggtcgatgataaaactgttctgtttttc

SEQ ID NO: 23356 - DNA, 1472 bp, Oryza sativa
  ref <308>: DATABASE ACCESSION NUMBER: AK073469
  ref <309>: DATABASE ENTRY DATE: 2001-12-06
gtggatcggaaaagctctccattctccgcaccgcaccccgtcgccgggaagcctcgaacaatgagcgccgccgccgccgccgcagccgcctcggctgccaatgtcgccgtcatcgggggcggaatatcgggcgctgtatgcgcgtcgctgctggccgcgcgcggcgtggcggtgacgctcttcgactccggccgcggggccggtggccgcatggcgcagcggaggtgctcgaccaatttactgcccgggccgcgtgtgttggttccgcgctgatcggtgctgttattttttccaccccattttgctggtttgtgtgggcgcagggaggtgatggaggacggcacggagctgcgattcgaccacggcgcgccatacttcaccgtgagcaacgacgaggttgctcgggtcgtgagcgggtgggaggcgcgggggctcgtcgccgagtggaaggccatgttcgcgtgcttcgatcgggaggccggcaaattcactgatttcgagaaggagggaacaattaagaagtatgtgggagtgccaggcatgaactcaatatgcaaatcactttgtctagaggatggtgtggtggccaaatttggtgtcaccattggcaggatggactggattcaagataggagttcatggttactggctagtttggatgggagagatcttggccattttgattatgttgtagcaaccgataagaatatagcatcaccaagattttctgggctaactggaagaccaccgcctcttgatttgtcattgcttccacaattgtcaatgatgattcaggatatccctgttcgcccctgttttgctcttatgttagcattctcagagcctttgactaaggtacctgttcaaggtttctcattcaataattctgactacctaagctgggccttttgtgatagtagcaagccaggacgtgctcatgtaccgcttaacagctgagtatgcttcaaaggtaatcaataatattggtccacggaaaccttcagctgatgcccttgctaaagtggcagaggaattgctcaaagaatttcaggctacaggattgaacataccacagccaatctttatgaaagcccacagatggtcagtattctaggggcagtgctttcccagccatcgctataagtggagacgacaagtgtgtttgggataagagcatgaaattggctatttgcggagatttttgcacaagtccaagtgtggaaggagcagtccttagtggcatgagaggagcctccaaaatactacggtgtttaaactttccgtcagggttgtgacttgtgagttgtggctaacctcctacaattcttccatttcctccttggtttgtatttatgtgcatccactttacagaaacagttaatcaaaccccaactgagagttgagggccatattgtttaccgaccaattaggtatgaaataagaaatcagtaccgatggcaatgttatttttt

SEQ ID NO: 23357 - DNA, 2234 bp, Oryza sativa
  ref <308>: DATABASE ACCESSION NUMBER: AK073470
  ref <309>: DATABASE ENTRY DATE: 2001-12-06
gtgctcacctcctcctcactaccaccaccaccaccaccacctgcttcctccgcggctgcgtgcgccgcctccccaacccttcgtcctccccgccggccgccgctgagatccgacgcgccggagcggagctcgctgagattttgttcctgctggatttctgaaattttactggaggactagagatatcaagacaccaacaacaaactagtacaaagttttccttccagttaatctgttcctggatctccttgccatacgcgaagcagtggatactatgcagtaattggttaggaggtctttactgaaccataatggctgatactccaacttcccgaatgattcatcccttcagcaatataccgagccaaaacctgaagcagttccagtattctgataatccacagcacccttgccacccttatagggcaccttcagacacccacgttgtgccacatcattatggcctaaagtcacattcaccggatgctggttatgaaagccaggctactcctaacaagtacacattggactcctctgaaggtgctggttgtatgagacatgattctccttccagtcaaagtttcacaaccagaagtggtagccctctatctcaggaagacagccactctgactcgactgatggatctcctgtaggcgcctcctgtgtcactgaggatcctaatgatctgaagcaaaaactgaaggatctcgaggccgttatgcttgggccagactcggaaatagtcaacagccttgagaattcggtggcaaaccaactttccttggagccggagaagtgggtgcgcatgatgggcattcctagaggcaacttgaaagagctactgattgcctgtgctagagctgtggaagagaagaatagctttgctattgatatgatgattccagagctgagaaaaatagtttcggtatctggtgagccacttgagaggttgggagcctacatggtagaagggcttgttgccaggcttgcctcctctggcatttcaatctacaaagctttgaaatgcaaggaaccaaagagctctgaccttctgtcttacatgcacttcctgtatgaggcctgtccctacttcaagtttgggtatatgtcggcaaatggtgctattgcagaggctgtcaagggagaagacaggattcatatcatcgacttccatatctctcaaggggctcagtggatctctctccttcaggcccttgcagccaggcctggtggaccaccaactgtaaggatcactggtattgatgactcagtgtcagcttacgcacgaggcggcgggctagagctggtcggaaggaggctgtcgcacatcgccagcctgtgcaaggtgccctttgaattccacccacttgctatctccggcagcaaggtggaggcagcacatctcggagtcatccccggggaagccctcgccgtgaacttcaccctggagctgcaccacattccagacgagtcggtgagcacggcgaaccaccgtgaccgcctcctaaggatggtgaagagcctgtcgccgaaggtactcaccctggtggagatggagtccaacacgaacacggcgccattcccgcagaggttcgcggagacgctggactactacaccgccatcttcgagtccatcgacctgacgctgccgagggacgacagggagaggatcaacatggagcagcactgcctcgcgagggagatcgtcaacctcatcgcgtgcgagggggaggagagggcggagcggtacgagcccttcggcaagtggaaggcgcgcctcaccatggccgggttcaggccgtcgccgctcagctcgctggtgaacgccaccatcaggacgctgctgcagagctactcggacaactacaagctcgccgagagggatggggcgctctacctcgggtggaagagcaggcccctggtggtctcgtcggcgtggcactagcgttgtgactttgtgaggtgatctgacgacgaacttcccttgtaaccatcttggctgggggctttagaaagctatagtgatcatggactggtaagggtagctgtaacaatggtgttgtaatggtaaggtagcggctagggtcaaactcgaaaatgggcaaaatgctgatgaggtgtagaagtgtagtacatgtttgagagtatatgtttcagtttttcttttaaatgtcttgtagtaatgttgtggcacactaatgtctatgatcagaattatcatccactataagct

SEQ ID NO: 23358 - DNA, 1292 bp, Oryza sativa
  ref <308>: DATABASE ACCESSION NUMBER: AK073471
  ref <309>: DATABASE ENTRY DATE: 2001-12-06
gatcgcttttccgctcgtgtcgtgtgaagcggtgaactttagccgactcctgactagcgactaccctcccactctctcagctcgcttcccttcctcgcctcgccggccaagaaccaccgcaagattcgccatggccagatcgccggagccgccgcgctactacgccgccgcgggctaccaccgcccctcgcccttctcctccgtggcggcgtcctgcgtcgtggcggcgctgttcatcctgctcgccgcgggcggcgccgcggctgcgctgttcctgctctaccggccgcaggcgccggccatcgccgtgacggccgtgcagctcccctccttcgcctcccgcaacggcaccgtcgccttcacgttccagcagctcgcctccgtccgcaaccccaaccgctccccgctcgcgcactacgacagctcgctccgcgtcgcctacgccggcggcgaggtcggctcgatgtacatccccgccggccagatcgacggggggcgcacgcagtacatggccaccagcttcaccgtcccggccttcgccgtcacctcctccgccaccgccgccgcttcctcctccccggcgcagacaatcaccgtccccgcctccggcccctcaccggcggcggtgggcgcggtggcgctgcagcaagaacagccgccgccgcagcagcagcaggtggcggcgctgccggtgatggaggtggactcgctgctggtggtgaaagggaaggtgaccatcctccgggtgttcacccaccacgtcgtcgccgccaaggtgtgccgcatcggcgtctcgccggcggacggccgcgtgctcggattccggtgctgaccaagaccaggccaagatctgactctcctccatttgcccattttggggttaatcggtggtgtcccctgtcaatctcttcagtgaattcgtgtcaaatttgtaagataagttagtttgatttgtaacttagaattcttcttctttctgtgatgattttctgagtgtgtatttttctcttgaatcttctcatctttggtagatttctgcagccttcttgttgtaattttaatagattttctaggtgttttcagagtccaggccaaagaaagatttggttcttgagatgttcagttggacaatttgttttgctaagcaaccatagtgaggaaattaaagcttataattacaatgtattatcaaaattatgttttggacttgtaatcttatccattcttgcagaataattgtgacatttttgcatcggaatcagttccagttagatgcttatgactttggatgc

SEQ ID NO: 23359 - DNA, 1040 bp, Oryza sativa
  ref <308>: DATABASE ACCESSION NUMBER: AK073472
  ref <309>: DATABASE ENTRY DATE: 2001-12-06
gagccaccaccaaaccccccctacttaagcccgcctcccactcgcttagccgccgccgccgcctctccccgcctccccactccccgtctcctcctccctcacgcagctcgtcgagatggcgtccgaggcggccaaggtggtggtgccggagtccgtgctccgcaagaggaagcgggaggaggtgtgggcggccgcgagcaaggagaaggccgtcgccgagaagaagaagtccatcgagagccgcaagctcatcttctcccgcgccaagcagtacgccgaggagtacgaggcccaggagaaggagctggtgcaacttaagcgtgaggctcggatgaagggtggtttctatgtcagccctgaggaaaagttgctgtttgtggtccgtatccgtggtatcaatgccatgcacccgaagaccaggaagattttgcagctcttgcgtttgaggcagatctttaatggagtgttcttgaaggtcaacaaagccaccattaacatgctgcgcagggttgagccatatgttgcatatgggtacccaaatttgaagagtgtccgtgaattgatctacaagaggggctatggaaagctcaacaagcaaagaatccctcttacaaacaacaaagtcatcgaggagggtttgggtaagcatgacatcatctgcattgaggatcttgttcatgagatcatgactgttggcccacatttcaaggaggccaacaacttcctctggccattcaagctgaaggcaccactgggtgggctgaagaagaagaggaaccactacgttgagggtggtgatgctggtaaccgtgagaactacatcaacgaactcatcagaaggatgaactagttccatgagctcattgttagcgcactgtgtttggatgatattttaaagtaagcttattttgcactaggaagtgtatcaagaaaatcttgcaattttgatattcagaatctgacccttttatccggtggtttgatgttattcctaaatttgaagtgcttttaatcatgatatgcgaacatgtgttagtact

SEQ ID NO: 23360 - DNA, 2698 bp, Oryza sativa
  ref <308>: DATABASE ACCESSION NUMBER: AK073473
  ref <309>: DATABASE ENTRY DATE: 2001-12-06
gatcgaaccttccaatcctaccccgaccacgagcgaatcctcctcatcgaagtggaggagaaggagatcctcgccggagcatccggtggcttggttcgtgggggatcggcctgcggccggcgaaccctaggccgatgaggccgatccggctgccggagccccccggcgtcggcggcatggagacgcccgagatcttcaccggcgccgccgccgccaccgtcgtcgtccgccgcgccgtcgtcatcggcaacggctcccccggcgccgagaaccagtgcctcggcctcgtccgcgccctcggcctcgccgaccacctgaccctctaccgtgtgacgaggccgcagggagggatcaacgagtggctgcacttcctccccgtctcgctccacaagctaatcgaccaagtgctgaggcagttcttccgcaacacgaggcttgcgccggtggtcgaggggcggaagcactaccgcgtcccgaacggcggatcggttggggttgggctgtcctctgtcctggaagcggacgccaagaagatcgtggctgtggctcgcgatacattcgagaaggaagggccaactttaattgtcgcgtgtggctgggataccatatcatattcaagctcaataaggcatctagcttcaggcaatgtgttcgtcattcagatacagcacccgaggtctcgcctagataggtttgatctggtggtgactcctcgccatgattactatgctttaattgctggcggacaagaagaaattccacgcctgttccgtagatggataactccgcaagaaccacctgggaggaatgtggtgcttactgttggtgcactacaccaagctgattctgctgcactgcgccttgctgctatagcctggcatgatgaactcgcccctttgcctaagccattgctaatcgtcaacattggaggacccacaagtagatctccctatctttctcacgttgcacattccattgtttctgtatttggatacgtagtcctgctttgagtttgcaagaataaatctagccacaattcaaatggttgcactctgatgatttctcatggagaaacctatgcgcacctgagtgcacacacaaaaaataagaaatgatatgtcgatgtgttactgttagatgtggctagtcagttgcatagaagatacacctgttatttctttcagtaacaggagattcatcatttttaggatatctcaattgatttctttactcaatatgatgatctctaaggggatatcatctcttatttatcgtagcaaggaaaagttccttgcaacgccattgtccctggaacattatgaaattgttttaactaatgtgatgcatcataaagataccatagaagctagaatcatcaagagtaaaaggccgaccttttttatgtcctgaagttgcattctttgcccctccccctagatctttgggggtgcagaactagtgatgtgccattactccatgctacctgtggactgtggattgagaaccccacatttgatgttgttgtttagatatctgtattagccttcagctttcctcctaaaacccatgagagcctatgatacaaatcaactcagggtcagaatttcgtatatagtatgtgaggactataaacatatagcgaatcttataatgagcaaagcatttcgatgctatgatcttttatatccttctctgtacacctttcagaagtattatcgactagtcaactgccttgggactcttggatatgcttttgcatgtctaacttacagagagctaacagaatttctgttggcttttaatcctttttatcttaagcttattttgttacagttttgtatgtgtcccattattgattttcatgcccagatccaatattgacttttgttatttgtcaatgattagggaattgtaagtatggtgtcgaccttgccaggcagctcatagcttctacgtataatgttctagacagctgtgggagtgtgagagtttcattttccaggagaacaccgcgaaaggtctctgatattatatcgaaagagttcgctggtcatcctaagatctatatttgggatggggaagaacctaacccgcacatggggcatcttgcatgggctgatgcttttgttgtaacagctgattctataagtatgttaagtgaggcttgtagcacagggaagcctgtttacgtcattgggactgagtattgtaaatggaagttttctgcttttcacaagactctacgggagcgaggagttgtccgtcctttcactggattggaagatatttcaaatagctggagctaccctcccctaaacgatgctattgaagtagctacacgtgtccgtgaagcaattgcagaacgagggtggtctgtgggatgatagcgacagttaggatgtgttgttctgtccgacagtaaattatgtagtttgattaacacagtcacttaaattcaagttacattgttcagaggaagaataatatagccatggaatggcctgtacaaaagttgagccttttcttttggtggtataccccaattttggagccattgcacagcacccaggagatcatttttggtttgagattctcttccctcttgtacttctaacgctactggagagaagccaacatatgaagtattggaattgaaactttattctgtgtgatacatgagaagcaatctgacattgtg

SEQ ID NO: 23361 - DNA, 1196 bp, Oryza sativa
  ref <308>: DATABASE ACCESSION NUMBER: AK073474
  ref <309>: DATABASE ENTRY DATE: 2001-12-06
ggcgccgatctccatctcgcgactcgcgagcagagcagggttggtaggggcgcccatctccatccggcgagcagagcagagcggaggaggtgcgccatcgtcccgctgcatcctgttttgagcctggatcttgccaaacaagtggttgatcttactgctttcggtggccgtgtctcctccacaggaaggaaggcaccggggatctagaggaggccatgggagaattctccaaggaatcttgcccttctgtgaagaacattttgcttctggattctgaagggaaacgtgttgccgtgaaatacttctcggatgattggtctagtaatgcgtcaaagttggcctttgaaaagtctgtctttactaaaactctgaagacaaatgcacgctcagaaggtatttcattcttagctttgttgcatgtgttatccctccataccatggcacatgcttttgccactttgacaatttggcacatcacacattctgcttcatgaatatagcctaatatgtcgtactgtcattatatagagtggattcatatttgacacctttaactgaaatttcacacacatctagatccagtcttaagttgagcccatcaatcattatactgcttatattactctgtaagacgcttgcatctccttggatgttcattagaactggatgtgctttaagtctcactccaaaacattttagtaggaaactcaaattgttttatccgttgaatgtaatggatcggtcaggttaaccaaatgtagtacaagatacatgtcagttttctgtctttcgacataaacaggagggaagatcccttccctactgaaaatatattaataaaaggatgtatgtacaagggagaagaaagaatatacaaagagcaaaatatagactactcagccatgcttgttaaaaaaaaaacacacctagcatttactcccaaggataactaaagcaaaataccttggattccctttccaagctttcaaggaaagatatccttcatataaaatgatactgtttcaatggtttgaaatcatccagcagtctgttatgattatgttagtttgctgttgctagcaactcatttttatggacaaaaatcttcatatttatgctcaatgttataattatgtctcgatatatccacttttctgatctttattctttagttgaatttggaattttcctttgat

SEQ ID NO: 23362 - DNA, 3296 bp, Oryza sativa
  ref <308>: DATABASE ACCESSION NUMBER: AK073475
  ref <309>: DATABASE ENTRY DATE: 2001-12-06
gctctttcctcctccgccgcccgcccgcccattgccgagctccccgccgcacgccccagctaactaccactccggcacggcagggcagggcagggctcgccgccggaggggaatgtggcatccttaccttccccccttgccgtaaaacaaagaaagaaagtctcccgtctcggctccttgcgccatcgtcgacaggggaggggaggtggcgagcagtagcaggggaggggatcctccaggtggagggcagaaacacctatgcaacaggtggagggcaggaactgtcttcctgcggaggtcaggattggcctcgagactctcaagaggcgccggcttgagaggatgcgtttgactgctcagaacaatgccggcgacggtcctccggtgcccgcaaggagcggtggggatgcgctaaggactcccgcaaactgcggggtcaggttgcatgctaacaatggcacagctctacctagcagaaccacccagaacaaggacccttttgcaaagcgcagggtggacaagtttgatatgtctagcctagaatggattgacaagatcgaagaatgccctgtgtactatcctaccaaggaggagttcgaggatcccattggttatatacagaagattgcacctgtggcttcgaaatacggaatttgcaaaatcgtatctccagtaagcgcttctgttcctgctggtgtcgtgttgatgaaggaacagcctggtttcaagttcatgaccagggttcagccgcttcgcctcgccaaatgggctgaagatgacacggtcactttcttcatgagcgaaagaaagtacactttccgggattatgagaaaatggccaacaaggtgttcgccaagaaatactcaagtgctagttgtctcccagctaagtacgtggaggaggaattctggcgcgaaattgcttttggtaaaatggattttgttgaatatgcctgtgatgttgatggtagtgctttctcctcttctcctcatgatcaacttgggaaaagcaactggaacttgaagaatttttcacggctttccaattctgtgcttagacttctgcagacaccaattccaggagtaacagatccaatgctttatatcgggatgctcttcagcatgtttgcttggcatgtggaagatcattatttgtacagcatcaattaccatcattgtggggcatttaagacatggtatggcataccgggtgatgctgctcctgggtttgaaaaggtggctagccagtttgtatacaacaaggatattttggttggtgaaggagaggatgcagcatttgatgttctcttggggaagacaacaatgttccccccaaatgtcttgttagaccacaacgttcctgtttataaagctgtgcaaaaacctggggagtttgtcattactttccctcgttcctaccacgcgggtttcagccacggcttcaattgtggcgaggctgtcaactttgctatcagtgactggtttcctctgggttctgtggccagcagacgctacgcgcttctgaacagaacacccttgcttgcacacgaggagttactttgccgttctgcagtgcttctgtcccacaaactgttaaacagcgacccaaaatccctcaataaatctgagcatccacattcacagcgttgtttgaagtcttgctttgtgcagttgatgcgattccagagaaacacacgtggcctacttgctaaaatgggctctcagatacattataagccaaaaacatacccgaatctctcatgtagcatgtgtcggcgtgattgctacattacacatgtgttgtgtggatgcaactttgacccagtctgtcttcatcacgaacaagaactccggagctgcccttgtaaatctaaccaggttgtctacgttagggaggacatacaggagctagaagctctatcaagaaaatttgagaaggatatttgcttggataaggaaataagtggttttgactcatacaagcaggccgaaaagaatgagccattttttgagataactcggaacctcaggaacactgaagtaaatttgatagaggatgccttctcaggagcaactgctgctgatgctgcaaagagttctcctgcaacgtcaacactgacatcttttgcacaacatgatgtgcctgttcttgctgaagcaattgtctgtgctaatcaagccgaccaattatactccaccaccgagcaaaccatcagctcacctttagtcaaaggaactgatgctgtgggtgcaaattcatccagcatggctgatgctaataacggaactggttcttgtaatgcttcagctgtggaatacagtggaaattcagattctgaatctgaaatatttcgagtcaagcgcaggtctggcgtatcagtaaagcctgcatctgatgccaagacatcaaacttgtctgatcaacaggttctcaggcggttgaagaaggtgcgccctgaaatacaacagcacaataagcgaccagaagactatggtcactgttcagttccctcaggtcgtatgagtatgaagaatttgaattcatcctcctcatgtggtgaagaacactggaggatgaagcggcggcagttggagactcagcaggatgagagcagttattctgcaaagcagaagtcgtactcgtatccatccaccagctattctttccgaggagagtttgtggaaatgagtagagatgctgctgcagaagtccgaccaaagcgactgaaaatccggctaccttcttctagcacgaacagagtggttgagcagggcagttcagggcaaagatttacaagggatgacaagtcgcttggttgttggcctgcaatttagaatttagaaaaaaatgctgacgcaggtgctaacctctgatggagataaagatttccttgtttaggtggggctgttgactacacgaaatgatagggctgggatggatcgatgaggttgaatataaatgattagcacagaagctgactgactttagaaggctggttaatcgattctttgtgcagcagtgcctccaatttgaggcacatctaggcacggttagaagagacagacacatgacgattcttgttgctggaggttctgggtcactgctttgctgctgtttgatgcctgcactgcaagtgacgtacacacactataggacctcgctctaccctttgattatatctctctatttttcttcttctttgtcagcaaccttagctgctgctactctatagctaactgtattctttcatacgcttgttccatcaagttaatctgctgcttaatgccattgattc

SEQ ID NO: 23363 - DNA, 2258 bp, Oryza sativa
  ref <308>: DATABASE ACCESSION NUMBER: AK073476
  ref <309>: DATABASE ENTRY DATE: 2001-12-06
gtcttcatcccccgcttcttccctccatctccccgtttcaaaccctagggcacgtcctccacccccgaaaccctaaccctagctccccaatccgcccgttccggccaccccaccgccccggaatcccctctccgccatctccgccgcctcctccgctcccgcccgctccccgcgccgcccgcggccgtgccctcgaccacccctcaccccctcgcccacggggttcggcgtagtgcggggggctcgtcccgcgcgggcgctctcccgtgccccccgcgggaagggaaggctctccattgaggcctcgctgatgaagttgcggccatgagtaggctctccttcaggccgcgcccgctcgacattcacaagaagctccccatcgtcaagtccgcgcgtgagcttgaggacgatgagaccacgctagcgcttcgggctgcgccgccggtgctgcggcactcccagccggagcccgcggctgatggcgaggcacatccaacatccagcaagaagaatgtgcaagaaatacctacaccacagtatgatgatgttgatacatacgaaagggactatactcgtacctttgcacagccaacatcctacatacgtgccagaggagccagggctgagattggtgagtttgttgaatatgatttggacaatgaagatgaagattggcttgaagactataacaatgagcggaaaaatctgaaccctgaaaagttggaggtcctcctattcaaactggaaacattggaccacaaagctcgagaaagagcaggcatcataacccccacctttttaggaccaataccagttattctgcagcttgattctgccatggaggctttgcagtacttgtctgttcgttatgctgtgttccaggctgtatataactactggaaatcaaagagagagcggtggcaaaagcctattttgcgacgtttgcagccgcctccgccagttaatgacacaaatccatacaatgtgttcagaccaagggagaaggcttatcgtcttcacacaaggaggatgcaaagacgagaaaatagtgtccaatcattcgacaaactccgtgtggtccggcgcaatctagagcaggctaaggcactaatgggcgcattgattaagagggaagagagaaaacgtgagactatggagtgtgaggttcaccttcgacgtatccagatgagatacaagcatgaggcacagcttattgatgatgggattgctctatcaggcctccagcaagctggatcaagtgaagatgattatgcagattcagatgatacggccaacgagcaaccatatgtacgatcggttgcttttcatcctagattccctgataataagctatcagctgttccgccattgcgtttgaagcgcgagcgtgagctaaaaagaagaccccaccagaatggctggttgttcaaaagggttcctgaaatgcgggatcctgaggagccagtaatgctatttacaagaccaattgaccctgataagctgaagatggctggtatcaggccaccactagatccacctattgatagtggtactactgctccaccattccggtggcaagctagaattggacggggaggtcgcatcatctttgaccgctggaatccttttcttcaagtcccggtcggccaggaaaccaatcatagaccctcaatgccagaaggatgaagcaaaggcttttgctgtcacatatatctctgttcagctggtgagagattaacaagtggaagagctgtttctccatgatccagttggccctcggagctccgagctctccttttgatgtggcaggaaattctaaggtttatttatctgatgaaagaaagacagccatgcttctctcctggatttgctgctgatgctgcttgagggaacacgattgaaagatgagaatggagtcatggattggctttcctggtgctaacatattttcatcagttcctcatctctttgcagctgttgtacaattggtggcgctgtacatgggaaaaaagggtaagaaatctgtttacccggtcttttgtctgacctcttacttgtagaggcagtatcagatgttgcaatgattttgacaactatttattgggaagggaaaaatccttctcattgatacatctgcatgttgctcgcccacatggtgattcatcaccctagtgcagttctgcatataatcaaacttgtaactgcatgctttgttgttgcacagtggtagttaatgagaaaatgttgtctgtttctct

SEQ ID NO: 23364 - DNA, 2634 bp, Oryza sativa
  ref <308>: DATABASE ACCESSION NUMBER: AK073477
  ref <309>: DATABASE ENTRY DATE: 2001-12-06
gaatcgaatcgaagaaaccccaaaccccaccaaaaccctcgccccacgcctccttcgtccacaagcctcgcgcgcggcggcggtggcggcggcggcggcgtaggcgtgatgaatatgtcgccgcgcattccggtggtggacctcgaggacgggtggcgcgacgtgctcgccggcgtcgccaagctcaagtgcatcctcgatggctccaacgtcgtgcacttcgtccccgacgagtacatgcacctctacacgacggtttacaacatgtgcacgcagaagccgccgaacgactactcgcaggtgctctacgatcgctacaagcaggccctggacgatcacatcgaatccgtcgtgttgccctccttgaatgagaagcatggcgtgttccttctgagggaaatagtgcagaggtgggagaaacacaagctaatggtaaggtggctgaggaggttctttgactacctcgatcgttactatgttacacggaggtcccttgattcactcaaagatctgggctggagtagcttccgggatttggttttcgataagctcaaaagtactgtggcaacaattatgattggcatgattgatgatgagagggaaggcaatctaatagaccgtccactcctgaagaatgcccttgatatctatgttgaaattggggatagtcaactgaattattacagtgatgattttgaacaatcatttctcaacggaacaacagattactattctaagaaggcacaaacatggattcttgagaattcttgcactgaatacatgctcaaggctgaggaatgcttacaaaaagagaaagaccgggttgcaaattacttgcattctactacagaaccaaagctatttgcggctgcactcttcgagttgatagataggcgtgcagaagaaattctgaacaaggagaactccggatgcaaagtgttgctttgtgatgaaaagaccgaggatctagcaaggatgtttaggctcttctctaggataactgacgggctgcttccagtatcgaaaatatttaaggagcatgtcattgctgagggtatgtctctgctgaaacatgcaacagatgctgccaacagcagaaaggatgagaagaagggggtggtggtgggattgccggagcaggattttgtgaggagtgtcatagagctccatgacaaatatatggcatatgtcaccaactgtttccagagcaactcagtatttcacaaggcacttaaggaggcctttgaagttatttgcaacaaagatgttgttggttgcagtagtgctgaactgtttgcggcatactgtgatagtatcttaaaaagaggtggaagtgaaaagctaagtgatgaagctatagatgaaagtcttgagaaggttgtcaagcttctaacatatctcagcgacaaggacctctttgtagagtttcataggaagaaacttggaaggagattgctgtttgataagaatacaaatgacgaacatgagagaatcctactctccaagctgaagcaattcttcgggggacagtttacatcaaaaatggaggggatgctcaaagatattacattggcaaaagaacatcagtcaagttttgaggagtacgtaagcaacaatccagagtcaaatcctctgatagacttgaatgtgactgtcttgacaacaggatactggccaacatacaagaactcagatataaatcttccattggagatggttaaatgcgtggaggttttcaaggaatattatcggtccgacaagcaacacagaaagcttacctggatcttttccttgggaaactgcgtcgtcattggaaattttgatgctaaacctgttgagttcgttctcaacacttatcaggctgcattgttgctgctattcaatgaagctgataaactgagttactctgatattgtgtcacaattaaaactgtctgatgatgatgccgtgcgtttgcttcattcgctttcttgtgcaaagtataagattctcaacaaagagcctagcaacagagtgatttctccagaggacgagtttgagttcaattccaaatttaccgataggatgcgaaggattaaggtaccacttcctcaaatcgatgagaagaaaaaggttgtcgatgatgtcaacaaggacaggaggttcgcaattgatgcatctcttgtgcgcatcatgaaaagccgcaaagttctgggccatcagcaacttgtagcggaatgcgtggagcagctcagccgcatgtttaagcctgacatcaagatcatcaagaggaggatcgaggatcttatcagcagggagtacttggagcgtgattcggagaatgcccagacctacaaatacttggcttgatgattggtcctgaggcgacttgctgactgtttgtctgtttactcaccctctggattcctagggcagtgccctgatgttgccaccagtagtctctgtttacttacatccacgcatcagggttgtacactcttttcctgctcaagtgaatgattagaggaaaaacagattaggagaagcggctatggctcggctgtgactgtgaaccacatttacatgtttagctttgacgccctttgctctaccttttgagtttctataatttttgttgattactttcttcttgcc

SEQ ID NO: 23365 - DNA, 2181 bp, Oryza sativa
  ref <308>: DATABASE ACCESSION NUMBER: AK073478
  ref <309>: DATABASE ENTRY DATE: 2001-12-06
gcggggcaaatcaaatcaaaatcgaaaccaaacctccccaaatttccccagaaaccctaaccctaaccccacccggcgccatggatctcctccagtcgtcctacacgccggacgacgaggacgacgacgagcagcagcccctctcctcgccggacgcctcgccgctccgcctccccgccaagtcggccgcccccgccgtcgacgacacggcgctcgcgctctccgccgccgccgcgtccacctcccgcccgctcgacccctccctccacctcgtcccctttaaccccaccgccgaccagctctgggcgcccgtcctcgggccccagcacccccacgcccccatctcctccgcctccggcaaccgcaaccacaagctcggccacgtcgaggacgccgccgtcctccccttcctcttcgacgagcagtacaacaccttccaccgcttcggctacgccgccgacccctccggcctccacatcgtcggcgacgcccagccctcggccgagcccgacaccgtctacaacctcgccccctccgagcacaagcgccgccgcctgcagtccaaggacgaggagggcgccaaccaggagcccctaccgccggaggccaagaacccggcgtccgacgagtggatcctccgcaacaagcagagcccctgggccggcaagaaggaggcaccacccgcggagctcactgaagagcagcgtcagtatgcggaggcgcacgctgccaagaaggccgagaaggaggcgcgcggcgaagggaagggcgagaagtctgatatggttgccaagagtactttccatgggaaggaggagagggattaccaaggacggtcatggatcacaccgcccaaggatgccaaggcgagcaacgagcgctgctatattcccaagaggtgtgtgcacgagtgggttgggcacaccaagggggtctcggcgattaggtttttccccaagtatggacaccttttgctgtctgcgagtatggattgtaagattaagatctgggatgtgctcgagtcgaggacatgtatgcggacgtacatggggcactctaaggcggtcagagatatatcgttttctaatgatgggactaagttcttgagtgctgggtatgacaggaatatacagtattgggatactgagaccgggcaggtgatctcgaccttctctactggcaaggtcccttatgtagtgaagctcaacccggatgaggataagcagcatgttctcctcgctgggatgagtgacaagaagattgtgcagtgggatatgaagtcagggcagataacccaagagtacgaccagcacttgggagcagtcaataccatcacttttgtagataataataggaggtttgtgacatcaagcgatgacaagtcgcttcgtgtgtgggagttcggcatcccagtggtgattaagtatatcagtgaaccacacatgcattcaatgccatcaatatcactgcacccgaattccaactggctggcagcacagagcttggacaatcagatattgatatacagtaccaaggagaggtttcaacttaacaagaagaagcggtttgcgggtcacattgtggcaggttacgcttgtcaagtgaacttctcaccagatgggaggttcgtgatgtcaggagatggtgaaggtagttgctggttctgggactggaaaagctgcaggagatttaagacgttgaagtgccacaatggagtttgcattggatgtgagtggcatcccttggagactagcaaggttgcaacatgtggatgggatggcgtaattaagtactgggattgaagttttggaaatgtaatgagagaggtttctcgagaatgtcctggttttgtggacaagttcatggcaatgcaatttacaaggtttgaacttcaggagatgttgaaagcacgcatgtctatccagaaaacttcaatgtcatcaggtgaaaactataccatgtttttaagctaccatgtaagctcgttctgctatcgaaagattgtaatgtactatgctatgtatacatactggaccaatcaattttgaactgtacgttactgcttacctgtttttggtttcagttcgtttattaatgccaacatttgtagcagctcagaacaaggcttgaataccaggttttattaggtagtttatcaatctttaatctgttcttgttctt

SEQ ID NO: 23366 - DNA, 2434 bp, Oryza sativa
  ref <308>: DATABASE ACCESSION NUMBER: AK073479
  ref <309>: DATABASE ENTRY DATE: 2001-12-06
gtcgttattccgcggcgccatcttcctctctcctccgccctacgcgtcgccccgcctcgcctggccttccccgcgcatcctgcacggggccctaggaggctaggagaggaagaagaacacgcgcgcggggggatagtggatagccgaagcaactcgatcgatctgtggccgcgatcgtagctctcttcttggtccgatctcgtctctcccggcatggatttcaggaaggtgctcgaccagaccgtccgggagataaggagggaggtaaatcttaaggtgctcaaggtgccggaaatcgagcagaaggttcttgatgccaccagcgacgagccgtgggggccgcatggttccgatttggcagatatcgccagggccaccaagagctacggtgatagcgaaattataatgaatgtgttatggcaacgcctggggaacacacttgcgaattggcgtcacgtgtataaggcgttggctgtgatcgagtaccttctagctaatggcaccgaacgtgcagctgatggcattgttgacaatagctcacgaattgcaaaactcacaagatttgagtatttggagcctaatggaaaagatgttgggctcaatgtgcgtaagaaggctgaagctgttctagcaattttggatgacagggagaagcttcaagaggtcagagagaaggctgccgttactagagacaagtattttggcttatcatcaactggaataacgcacaaatcgagcgcagcatcatttggcagtggcagctactcatctggtagccactatgggagcacaggaggttcaagggaggtgggatcattcaaggatatacacacaggcacagaatggaaaaagaacaagaaggaaacagtgtcaaactacagcagcaatagagaagggtctaaagaaattactaacagtgcaaccagttataagtcaaaaaagagtgaaaggcatggtagaagaaatcaaaattccttaacattacactcgaagttatctgcaaatattagcaccacatctgaagccccaagctcaaagaaaggggaaaatgaggatgatgatgatttcaacccacgaggattttctacatctactggaacaggtaccacaagatctaatcacctggatctctttggtccaagcttgatggatgatcttgttgattctactacatccacttcaacagcgacgccaaattttagcacacctgctgtgccagaggttgatttatttgcagatgcagctttccaatcagccaatgctccattggaggcagcaacggtttctcacactcaggacaaaattgatttgtttgctggcagactgtcttctgctgattcatttacttcagacacagagttctcagtacgcggtagtcctaacaagtcatcggagaaaaaaatgtcttccgttgtgcatccttctacttctgcttttgatcccttcaaacaatcttttgccacctcatttccttcagattcagagttctcagttcatgatccgacaagcaaatcttctcaaggaaaaactcccacaccagaacattcaagtacagcagcttttgatccttttgctgcaattccactgaagagttttgatggatccgaatcttttggaacattttcttcgaacacagcctcaaacattactgaactgccacgggattcttctgggggtcccaaaagttctgaccatggtcctttggaggatgccaattttgatgccttcacttcacacttgggatcttccacaacaagtgcaactgagtccatgaataagcccatcaaaaagcttgggcaggactcgatgtcagcatcaaaatcagttgcaaagaaagaaacttttcaggtcaaatctggcatatgggctgactctttgagccgaggattgattgatttgaatataacttcgtcacaaaagaaggtcgatctctccgatgttgggattgtcggaccgctgagcggcggatctgaggataaaggcccgggggcgacgatgggcacagcaccaggccttgtcagttctagttttccatctaaaacggaaacatccagtggaagcggtcattttcagcaccaacagtttggaagctttaagtgatttttatccaggatatgtcttttgttctatggttcttgcagagtacttcttggagcattcgtacagctccatgcctataagagtaaacgtgtatatagctaccaaactctgtgcgatgatcaggagacgtgttgccaactaaccagcatcttctctgcccttgaggcattaatatttttttacttatggcgaaatggatatgttttgtgtacatgagtaaagaaccaatgccatggtagcaattgtaaaaagggttcatcaattatgtgtgatacacgctcatatgaattttgaaaaatgaataacgcaaagcattctggatgctggcagtgcc

SEQ ID NO: 23367 - DNA, 2966 bp, Oryza sativa
  ref <308>: DATABASE ACCESSION NUMBER: AK073480
  ref <309>: DATABASE ENTRY DATE: 2001-12-06
gttggagctgacggcgggggcgatgagcctgctcctcaagaaggtctgcgagctgctcatggctgagctcaacctggacaagaagttgacgaagagcatcggagatctccggacggagctgaccatgatgcacggcgtcgtgcgctggatcggcgaagtgccaccggagcaactcgacgggcaggtgaggctgtgggcgcggcaggtccgcgagatctcctacgacatggaggacgccgtcgacgcctacctggtgcgcgtcgccgacggcgagccggaggcagccaagcagaaccggcggctcagcgagtccctgaagagagccgcccggttgttcaccaagggcagggctctccatcagatcgccggcgccgtggaagaagcccagggccgcggcaagtcgctgtccgacctgcgtcagaagtacggcggcctcaagctgcacggcgccggcgaggggtgcgccgccattgaccctcggctcacagctctgtacgtcgaggtggccaagctcgtcagcgtcgacaaggccagggacgagctgagcgagctgctgctgtcttcttcaggtggctcgatgcagcagcagcagcagctgaggacggtctcggtctttggatttggcgggctggggaagacgactcttgccagagcggtttatgagagcatcagggagcaatttgattgcgctgcttttgtttccgtgtccaggaatcccaacatcaccaagattttcaggaaattgctgtttgaacttgaccgggaacagtactcagacatcaatgatttagacagagatgatgtacagctaattgatgagctgagaagttttctccagagtagaaggtacctcattgtaattgatgacctctgggatgaaaatgtgtggaaattcatcaagtgtgttttatatgagaacaatctcagcagtcgaataatcacaacaacacgcaaaatcaatgtctctaaagcttgttgctcttcgggtgatgacaagatttatgaaatgaaacgtctttcggatgatgattccaagaagctcttatacacaaggatatttacccatgagaacaactgtcctcatgaattgaaacaagtatctacagacattttgaagaaatgtgacggggtaccattagcaatcatcactatagctagtctgttggccggtaataataataggcccataaaaactaaggatcaatggcacaatttgctcaattctattggccggggactcacagtaggtgaaggtgtggatgatatgcagaagatattatcatttagctactatgatttacctcctcatctgaagacatgtttactgtatttaagtatatttccagaagattatgaaattgagagagatcggttaatatggaggtggatagctgaagattttgtccaatgtgaaaataattgggacaacttatttgaggtcggagagagttacttcaatgagcttataaacagaagcatggttgagccagtcggcatcgactttgaaggcagagctcaagcttgtcgcgtgcatgatatgatgcttgattttatcctttccctatcaaaagaagaaaattttattactataatagatgacagtgagcacagaacatcttggcaacataagaatgataataagattcgcaggttagccatccaaaacacttgaagaatggcagaagaggctacagcaagcagcatgtcacaagtgagatccttcactttgttcagacctggtgttaattcgatgccatccctgtcactgtttcaggttcttcgtgtactggatttagaaggctgtgatctcagtaaatttagcaatcttaatctgaggcatgtcggtaagctctctcacctgaggtaccttgggctaagacgaacatacatcgctgagctccctacagagatcggaaatctgaaggttttgcagacgctggacatcagaggagctcatggcatacgggagttgccgcccgcgatcaccgggctgaggcaattgatgtgccttcgcctcgattgggacaccaggctaccaagaaatggtgggctcgcaaccctgacgtcgctggaggagatgaccgggctcagagttcgccgtgattctgcagacggcgtcgtcagagagcttcgctgtctgaagaagctcagggtgctccggctccagtggggagagatggagcacggcgcgggcagagctgtggtgggggctctcggcgagctgcaggggatccagagcatcgagatttacgcttacggcggtggcggcggcggcgtcggtaacgtcggcgacggctgggtgcctccggcgtgcctccgccggttcgtgtcgaacgggcccacgagcgcgttctcggcgctgccggcgtgggtgcgctgctcgcctctgccgcgcctcgccttcctcgacgtgtgggtggatcgggtgaggcggggcgacatcggcgtcgtcggggagctgccggccctccagtctctccggctgcgggccaccggccggatagacgcgcgcccggcggtggagcggttcgcggtgcgcgccggcgcgttcccctgcgcggcggcgtgcgcgctcctgcacttcgtgacggcgccgtccatgttcccgcgaggcgccatgccgagggttcggcggctctcgttcagcctcagggcatgggacttcgccgccgccggcgatggcggcggtggtggtgggcttaggcttgggctgcgcgatctgggcatgcagaacctcccttcgctcgaggacgttcgcgtcgaggtttggtacaagaacacgggagatggcggtggttcggcggtgacgaggaaggtggaggaggcactgcgacgcgtggcggccgtccatcccaaccgtccggccatcaacatccgcaggaggaagatgacgactggatcggcccaatccgattcttccactttgtctatctaaatccagtcaataataatcggcatgttttggc

SEQ ID NO: 23368 - DNA, 1123 bp, Oryza sativa
  ref <308>: DATABASE ACCESSION NUMBER: AK073481
  ref <309>: DATABASE ENTRY DATE: 2001-12-06
gtttcatccatccagcggcacacacaccaagctagcttctagtagttgagcaatggcggcgtcgtgccacgaggtggaggtgccggggaagccgacggagacggggacggcgctgctggaggcggcgacggggagcatccaggggttcggccccgtgaaccagatccaccagcacctgtgcgcgttccacttctacgccgacgacatgacgcggcaggtggaggcgcaccacttctgcgcccacctcaacgaggacatgcgccagtgcctcatcttcgacgggcccgacgccggcgcgcgcctcatcggcgtcgagtacatcgtcgccgagccgctgttcctcacgctccccgacgacgagaagccgctgtggcacacccacgagttcgaggtcaagggcggcgtcctcttcatgcccggcgtccccggcgtcgtcgagcgccgcgacctcgagagggtgtgcaagacctacggcaagaccatccacttctggcaggtcgaccgcggcgacgcgctcccgctcggcctgccccagatcatgatggctctcacccgcgacggccagctccgccaagaactcgccaaatgtacgtgcaaaatcattcatgttcaattgtgtttttttctccaatctatcgtcagtcgtcacagcttaactacttgtgttggtgattggtgcgtgcattgcaggtgtggaggagaagttcagcgtgtcgttcgacaaggagagggagaaccgagcgtacatgagcggcccggatcacggcatccacccgctggcgaatgccgccggcaagggcttgaagaccgatctccgggaggttgatctgccggcgatgactacggcgcacgccgggagggttttcacctgatgacgacacactgatgagcgattgagcgacgactcgacggccttgctgcttctgcctgacgacggttaagtagtatgctagcatatcacgggatgctccgattagcttgtgtaccttcactcgtgttatgtatcgatctgttgtccctgagcgtttgttctgaaagaagcacactagagtatccgactgtagtacctgtagcctctttcctagcagcttgatgaacacaagaacaacagaacaggttgtgt

SEQ ID NO: 23369 - DNA, 1354 bp, Oryza sativa
  ref <308>: DATABASE ACCESSION NUMBER: AK073482
  ref <309>: DATABASE ENTRY DATE: 2001-12-06
gagttctttgatttccgccgtggattcgccgctgattcttgggaggattggatttggcggccatgtgatttggtcttgtttgagcgagcacagtttggtgcaggtgcagggagggagttcgtcgtgtttttttttttttttgggggcgaattcttgattgttttggggggcttcttcttcttgcttggaggagcatgcaagaggaatagcatccttggagggattttttttttttgttggagaggtgagattgttaggaggtggtggtggttcggccatggcgtcgagggacttcttgggcgtgttcggcggcggcggcggcgagaggagggcggcgaatgggtccgggagcgcggtgggcggcgagtcggacgagatcgagctgagcctggggctgtcgctgggcggccgcttcggcaccgacatgtccccggacgccaagcgcgcgcggctggcgcggtcatcgtccatcgcgtccgtctgctccgtgtccgccgccgacggcgacccctcccccgcggcgccgctgccgctgctgcgcaccagctcgctgcccacggagaccgaggaggagcggtggcgccgcagggagatgcagaaccgccgccgcctggaggcccggcggaagcggctcgagcggaggatctccgtcgggtcgtcgtcggtcccgaacaagcccggcagggaggacggcggcgacggcgccgttaacaggttgcagctgaggaggtcaatcgggtcgcaggggagcagctcggccaacccgcaggatcaaggtcctgatggaagtgcaatctgccaatccacggaggcgagaagcccatcaacctctgatgataccaaccaaaacagtgcacttcctccaacagcatcaactggcaagccgctaaacggcaccgtgacacagcagtccccgttgcgaacgcttgggtcactgacaatgcggacgagcagcactggcgacatcgggaagatcatgatggacatgccaatggtgtcttccaaggtggaagggcccaatggtaggaagatagatggcttcctgtacaagtacaggaaaggtgaggatgtgagtataatgtgtgtctgccatggtaaattccatagtcctgcagagtttgtgaagcacgctggagggggagacgtctcaaatccgcttaggcatatcgtcgtcaatccctcgccatcggtgttcttgtaatcacaacctagggaggtttttcttcacattctttacctgttgaaaacctgtaacttgtgtttgtaacttctgataaacaccctgtttccgtgcgtgcaacggaacgagggtccaagcaaatttaccaaattgtgagaatagcagagcatgttc

SEQ ID NO: 23370 - DNA, 2019 bp, Oryza sativa
  ref <308>: DATABASE ACCESSION NUMBER: AK073483
  ref <309>: DATABASE ENTRY DATE: 2001-12-06
ggccctccgttgctccccctctcccagatccgcccgcctccgccgccactcgcgccgaatatccggcttctcaatccgcggaaactactccctgttgttcgtcgacctcttcgtcgccggagacatctaggttttctccctctctatgttgctgtatgtttgtatggtcgcctcaaaactcttttgtaagtttctttattatgtgctcggtggctaattagccaatcacacactgcggccgccatggcagcaacctttaaccctgtgtgaatggtcagtaagcccacctacattgatccgctttgttgcgtcgattggaggaacgactcttcttgtgcgtgcttccttcattgatgcatcaacgcacactgctatataatatgacctagctctaagttaaatccatcccgtgttgaattcgttttctaggttgcaaataagctgttttagaaatactagtggggatctccatgactcacgtatgcattattcatttagagtggagggttaggggtactgacatgaacaagtgcggtgactcgttagccagtcgcaatatcaaagctctgccgctggtagtaggtggtcacctatatttagttttcgcggtctgcatcttgtgcaatgggcggatggagcaatcggcaaaatcggtccttcaggctgttgttgcgaacactgcttgctgctgctttgctaacagtcaataccaaaacaactctttcaataccaaatcaactctttttttttgtccctttctctaagcaagtcatctcaccacacctgatgttgtgtgttagttgtggtggtagcattttttcctggtagcgcgcagctatacgctattctaagtcaggaaggcgatgggcatttagttctagttatctatatgtagtatgcagcagttgacctgttgttgctgagtggatcatagcagttggcttcaccgcattcatactttgtagtttgccttgcatagacaatctggtacagcgttgtatgaaccttaatgttctggttttgccttttgttatatgttattggacccatctctttgtgattttacttacaatgttgattacgcctagaggagacatctaaaagtttaaacctattctagaaagctgaaagtatcaaaatgccctgcctatcttgatgttcattgaccatgttcctccaaacccctaatggaaatgttctcatctctataaagtatacttcctccttcccaaaaagattcaaatcctaggatgaatctaaacacacatgtgtctaggttcatccctaggatttgagttttttttgggacagaggggagtactactgaattttgatacgtcgagaacaagtaatctttgttcaaataggaaatcaggcataatcgatcgacgggttactttttccgactgaagtatcagtagtaatcattatcaggcttgtctgacagtgtctggcatgatgaataaattgtataattttatttcataggattcacttgtgaagttttttttttatcatctgcagtttccctatacggctataccatgtcgatgcctggtgatgcccaacctgaaggttctcaccaatccgcttcctccgcaaaacctgccttgtcatcgtgccggaggaataaatctgagaacacgtcatttgtctcagatttgagagatcacatccaggagtttatccatgcttccccgaatgagcacaggacctgttttaccaagactatcaagagaatgtttggcatgtcaaaggtcgttgcagagagatccaccgaagcaaaggaacctggagctgaaagtgttttgccacttcagaccacggtgtcgcggtagactgtgatcagtaatataattttctctgtagaaagtaatctgtcgctgaggatgatcttaggatagagaagtcatagttacacttgataccagtagatcatgtacagtaactggaggatattctgtattaatttgactgctaaaaggcctatatatattgtaagaagagaaactgagaagc

SEQ ID NO: 23371 - DNA, 4187 bp, Oryza sativa
  ref <308>: DATABASE ACCESSION NUMBER: AK073484
  ref <309>: DATABASE ENTRY DATE: 2001-12-06
ggattgctgagtagcattagcaaaggagcaaaggaaaggaacctcgatctccatctccatctccgcccccaaaccctaacacacacacgccgactctccaaaccctacacccccccaacccccaaccccgccgatccccccgctcgccgccgatgggtcgcaagaagaacgtcgccatcgatgacgatgagtactccttcgacgccctcgcggccgacgaggaccagggagaagacgacgacgaggcccccgcccctgcccccgcccccgtcgagcccgatgccgccgccaaatcagacgccgaggacgacgacctcgatttcgacttcagcaaagccaagaagaagaaaaagaagaaggacaagggagctcgcccagtccctctggaacacgacgacctcgacctagataagcctgccccgccgcccccagccgccgctgctgatgaggcagacgacgacgaggctgctgcagctgcagcttccaaaaagcctcagaagaagaagaaaaagaagggcggctttactgtggacaatgaggacattgacaagctcctcgccgagatcgacgatacttctcctcccaccgaagaggctgagccggtggaagaggtgcctgcccctgatgcagatgatgccttaggaaagaaatcaaagaagaagaaaaagaagggaggctttaccgtcgatgatgaggacgtagacaagatcctcgcagagtttgaggaccagccacctcctgtcgacgatcctgagcctgagcctgaggcggtgaaagatgtgggtaatgtggccgcctcaaccagtgtggatgatgcggaaggcaagaaatcgaagaagaaaaaaaagaagagtggaaggacagctcaggaagaggaggatttggataagcttctcgctgagcttggtgagggcccaacgccagcagaaaaggagaaggaggttctgccccaggcgccacctgctgcggcaatggtgaaagaagatactgaaaccgcagaggatggtaaggctggggaaggagaggtggaatctgctgcagccaagaagaagaagaagaagaaggaaaaggagaaggagaagaaggcagcagctaaggaggcagatgctaagaaagaagaggaaaaggctgtagaagctcctaaagggaaggttgacatgaagaagctcccgaagcacgtgcgggagatgcaggaggcacttgccaggaggcaggaagctgaggaacggaagaagcgtgaggaggaagaacgattgaggaaagaggaggaggagcgattgaagaaagaggaggaggagaggaaagctgaggaagcaaagaggaggaagaaggagagagaaaaggagaagttgctgaagaagaagcaggagggtaagctcttgactgggaagcagaaggaggaagcaaagaggttagaagcaatgaggagacaattccttgagcagagtgaacttcaagtagccgatggtgctgtccctgagacaaagaagaggcctatatatgattccaagaagaaaaaaggtcaacagaagactctggagactgcaaaggtagttgaagaacaaccacaagaagttaacgaaactatcaatgacgaggaagaatatgtgttagtggatcaggaatctcagttgcaagtggaggaatctgagaaaaccgaacctgatcaggatgtcgaagaattgaaaccagaagaggaggaagatgaagatgaatgggatgcaaagagctgggatgatatagatgtcaatttgcctaagacaagtgcctttgaggaggaagaggcaaaccctgtcgccaagaaggttgctgaacctgttcagaagcaggaaaattctaaagcacaatctacagtggctactgtaaaaaaggttgcaaactccaataaaggtgaaacggaagatggcgaatccagtagtgcaaatgctaggaggaatagaggcgcttcaaagaaaggacctattaaagaggatgagactaagaatggcagtgaccttcgttcaccaatttgttgcatccttggtcatgtcgatactggtaagacaaaactgctagactgtattagacggaccaatgtacaagaaggagaagctggaggtattacccaacagattggggctacgtacttcccaactgaaaatattagagagagaacaaaagagcttaaagctgatgccacacttaaggttccaggattgcttgttattgacactcctggtcacgagtcgttcagtaatctgcgttctagaggttcaagtttgtgtgacattgctattttggttgttgacattatgcacggtcttgaacctcaaacaattgaatccctgaatctcttgaagagccgtgatgcagtttttatcgttgccttaaataaggttgatcgtctttatggctggaaaaagtgtacaaatgcccctattgggaaggctttgaggcagcaaaatgaagatgttaagagggagttcaatatgaggcttactgatattgtgacacaattcaagatgcaaggtgtgaatactgctttgtactacaagaacaaggagatggaagatacatataacatagtgcctaccagtgcaataagtggtgaaggcattcctgatctgcttcttctgttggtgcaatgggcacaaaagacgatggaagaaagacttactttcgttgatgaagtccagtgtaccgtgctggaagtcaaggttgttgaaggtcatggtactacagttgatgttgtgttggtcaacggtatactccatgaaggagatcaaatagttgtgtgtgggatgcagggacccattgtgacaacagttagagctttgttgacaccacacccaatgagggagcttcgagttaagggcacataccaacatcataagaagattagagctgcacaaggagctaaaatatcagcacagggtcttgaacatgcaattgcagggactgctctttatgtgttaaagcctgatgatgatctggacagactaaaagatgctgtgatggaagagatgactagggttagaaatcggattgataagagtggcgaaggtgtctatgtacaggcatctacccttgggtcattggaagctctcactgagttcttgaagagccctgctgtgaatattcccttctgtgatttcagtatagggccagtccacaagaaagatgttatgaaggccagtgttatgcttgagaggaagaaagaatatgctactatcttggcgtttgatgtcaaagtgatgcctgatgcccgtgatcttgcagaagagtctggtgtgaggatctttgtagcagatataatataccacctttttgatcaatttactgcatacattaagaatctgagggaagaaaagaagaaagaaagcgctgaagaagctgttttcccctgtgttctcaagattatgccaaattgtgtttttaacaagaaggatccaattgttttaggtgttgatgtccttgaaggaatagccaaggtgggcacacctctatgcatacccactaaagaatatattgatattgggaagattgcatctattgaaattaatcataagcaagttgacatggccacaaaagggcagaaggtggctataaagattattgggagcaatcctgatgagcagcagaagagttttggtaggcattttgacatggaagatgaacttgttagtcgcatcacaaggcgatctattgatcttctcaaagaaaactatagagacgatttgtcaatggatgactggaaacttgttgttaagttgaagagcatcttgaagataccataaaatcgttaagcttgcggaagcccctcaagcctgtccaccaatcggcaaaaatgaaaagttaatggtggcatctgggctactggggtagcatccataaaattttcacgttactcagacttggatttgccgggttgagaagttctattctgacacaccgatgttcaagctgcccagggagtttttcaattttgatacggttttgttttattgtaatttgttcgaaatgcggttgatcaaacattttacaaatataagtgaaactacccgattttgaggggttcttgaaagaggctatgtttgtcttttttttttcctgaacacaaactgttttcacatcccgttgcctggtatgagtggttatgtaaagggcagccggtaagtcaaatggagtatataccaggctgaatattt

SEQ ID NO: 23372 - DNA, 3481 bp, Oryza sativa
  ref <308>: DATABASE ACCESSION NUMBER: AK073485
  ref <309>: DATABASE ENTRY DATE: 2001-12-06
gtaccacgacctacgccctcatctctcctctcacgcggcaccaccgtcgtcgccgccgccttcgactgccgccgctccgccgtcgtcgcatccgtcgtctcgccgccaccgatccccgcgccaccgccgtcgccgccgccctcgactaccgccactctgccgtcgtcgcatccgtcgtctcgccgccaccgattcacgtcgccgccgatgccttcctcgcgtggtcgctgccgagaccttccgtgcagatctgctcctcgtcgccaccgatccccgccgccggcttgcctcaaccgatccccatcgccgccgtcgctccaccggctcgccctcgccagcgtctccccgtaggtcagtctcgcgccgccgccactcgcatctcctcacccccgcgattcccaaccctaaccgtcgtcactgccaccgccagcccccgtcgaccgtcgcaccgcgctgcgccgcactgtctcgcccttccaccacgcccccggactccaacgtcgccgctccagccccgatccacgccgccgcagccgcatcaccgtctatttccgccatgggggcgtgattccgcgcgacggctggaggaggcgaggtcgagcctgccctccatcgatggcggactccgcgtgacggctggaggaggtgaggtcgggcctgccctccagccccgatccacgccgccgcagccgcatcaccgtctgtttccgccataggggcgtgattccgcgcgacggctggaggaggcgatgttgggcctgccctccatcgatggcagattccgcgtgacggctggaggaggcgaggtcgggcctgccctccaacgacgctccacgtcgccgcagcccgcagccccgtcggcgccgtcgctgtgtcgctccatcaccgtcccgacctcgaaggcgaaccggcttcggtccctcgcgccgccactgatccagggctcctcaaccctgcaagccgtcatcctgcctgcgaacaaggacaaaaattcaggttgtcgaagaaaaattcaggctgacaggacaccatgtcaactgctattgtttgctgcacaatcaaggaaatttttggctgattctactaaatttctgtttggtataggtaatttctttcataatgattaccccttacaaatagtgcaaatatatactccgtgggtcaatcttcgcactgttgtagaatctgatgtttaaaattgcctgcatccggtttgcaaatcaagaaaaaaaaatgccctgattactgtgccaaccatattttcttcgagggattgaccaaatctttttcttgtaaaagcttaaccctgttccaaatgtaatactgcaattttgctcaatttcacatgcacaccacagtgtagtcatgcattaatgattttgatttcacagtgtgacatgcacatcacattgtgaacaagtatattgacagatcaacattttgatttcacatatatgcttccctgttaaagcccggttatcctaatcgatctgggatctaagaagttgatggtatatgcagtaccatttgtttttcttgcaattgactctaaattcttatgtcgttcagttcatataaatggctatattctacagaagatagatgaacctatttttctttctctagggcaaataactgaagagtgttggtatttgagttaaccactttttacgagcctaacctgctgcacttccacaaccatggatttaaatagattgttcatgtagttcctattttttctgaacaaagtgaaaaatacgtcgcctatgataaaatggcaacttactgtgtgcaatgcagtacactaatttattttttatagatcttttttttgttggtgattgatagcgtggctgctctccatagacggcttcttattttcttttcatgccatatcaataaaagtaatatatttttccatccgggtgaaatttgatctcttaaccattcggcacttatcttctttcacagatcatttattaaattttccctgtatcctacgtttacagtgttgcatgaatcagaaaaaatctgattgaaggatctaatatttgaggactcctgctctgctggtgactacttcactccagttattcaaggtatcaaagttactctaaaacgatgttgttaaaagggactgctttactaaattgtgatcatgtattatctctttagtttgtggatcttgggtctgtgatcatgtattatctttacgatcaaataacgcgcgcgcgcgcacacacacacacacacactcctactatctctacgtagaccccacatggaaggccactataagattgtgtatccgctatgtcatgtactggtgaaaaaatgataaatagtctgaaccatatttattttttcatatagagcagaaaaattactgaagcatcaatacaaaactttggttgttttccggccttgttgcagataatcatgatttcaacttggtgttactggtaccgacttacaggagtagagattaaaatttcagaaacctggcaatcgaaaaaatgaactctatagattttggtttttaggagtttggaatttcaagttgatggttgtgagcggcagtcgtagcagcaagcttgggatattattggcaaatcatatccaaatctctgtcaattacgctatcctgcagcagatgagagtaaaggttagcaaatcatatccaaatctctgtcagctgctattatggcaatatttccatgtattacatgcccatacatgtcaactcacaagacatacaaggcaatattgttatgtctttccataaaccataaatatcatgataacaacaatggtaacattatcctccttagcctatatatatatatgtgggtgaaggagtgtgatccaaaaaaaattactgatcctccttagccggctgcatacgactgctcaacttcaactcatcatcttgtaaggcatggcatccatgtatgatgtggatttttcaccacatcaagccacacctgaggagtcaatgaacttcaaggatgatgcgaaggtgcagccttcgtcagggcaaacaccaaacaaggggaattattacatgggccacgcgaatgccatcatgatgatgtttcagtacatacgtgatggctgccggcatgttgagagttccatggaagacttcaagtccaagaaggtagaagaaggacgcgatgagaaaaggaaggtgggagaagggtatgatcctcgctggtcttctcccatcgagataacaatgaagatctgcaatgacgacgtctccgatgaagcaaccgagaaggaaccatgatttagtattgtcgctactgtgttttggccttacaataaaataacatttcttgtgaattacacaagaaaattcagtacacaatgtcgttcaggtccattaagtactgcttgtgaaatgcaaccaaatttgatgaaactttgttatgatgcctattcaatattgcttgtgattcagttgatttctgggacc

SEQ ID NO: 23373 - DNA, 2038 bp, Oryza sativa
  ref <308>: DATABASE ACCESSION NUMBER: AK073486
  ref <309>: DATABASE ENTRY DATE: 2001-12-06
gcccgcacgcacgcacgcacctaccctcctccgccatcgatcgtgctccgatctgcgccgccgagccggacctccgcgcggcgacggcggcggctttccggccggcgagagggccctcgtgggcggcacgtcgtggaccacggcccccgcccagcgttagccccttcccccctgcgctcgctgggtcctttgctcgatcgcttctcgattccccgggtcgcctgcgtcgatctccatcccgcggggacgagcagctgcgccggcatccgctgcttccgacgcatcctcgcttcgctggaaaatttgggagatatgtgtttgtcatgctcaaaatgaggtggtaaggggataatctacatgcaatgctgggtggtaaaaaggttcactctaggagagattggtttaaaccattgcttcaatgaacatcatactagaactcaaccatctcaagcaggtcagcttgccgacgcggcctgtcgtttgcaaaggcctttttatagtgattgcgcttattgtgctgagggcaatcgtatccccgtttctcgccgttaacccgtccgagaaggagggtttttacgatccgacagccgatttgctgcctgggattaggcgaggcaagttcattgaggttccacagattatatggggattgaacaatcagaagattgcgtttgccagggcgtgcttgactgcgagattcctgaaccggtctctgctcatgcctagtttgagtgcttcgcttttctacaaagaggttgacttgctgcgaccaatcactttcgacaaggtgtttgactttaccaagttcaacgcccgttgccaggggttcgtaaggttagctcgctattcagaagtttctaatcaaaccaagcctttcaaactccaaaagggaagtggtaggaggtggaccgtggagaaagacttggatcagctactacagtacagaaggggtgaggcagatgactctgaagtcattgaaatcatcgggaaacatccatttttgtggcctgatcactggccagtgaaagactatgccagaattttcgattgccttgcgttagttccggagatagaaactgaagtggttaaggccatatccaagattagagaggcaggcataaaagcaagacatgaggctggtatttctcataataagcacgtgaaagatggtacaatgaatccaccagtgccatacattgccgtccacatgagaatagaaaaggattggatgatccattgcaagaaatgggagcagcgttccaattcaaaggaaatttgcagcagtaaagaagagatcattcataaggtctcacagatcactgatctacgtaggccagttgtggtttatcttgcagtagctgacagccttctagaagatgattcaataactagcggttggagggtgggtatggttgcttttgagaagaagagacttggagttactgacatctacaataggcaaccttatcttataaagtccgctattgactttgaggtatgtgcgagagcggatgtgtttgtaggcaatagcttctcaacattttccaaccttgtggtgctgtcaagaacacaaaggctatataacatgggagaggcaagctcatgtggagagaatgtcgggctttcatcctatgcctacaatgttattggagacgatggcgggccacagagatggatgacagatatgtcagacacaagcctccaaaacttgagttacggaacgaacaatatctcatgccactgacttatgacataaaacacttgactgaacacgatcacacacacaaggataattcttgggagaattttagctacaaacagaggaacatgttagaaggttgatattggctgccacacttgagagagactttggccaagaattgtctgcagacctttgtgagtgtatacaaaaactgttctctgaagaacattgacttgtattgaacagtctttagtttgtaaagttaaatgttgtgtgttactttgtcttcctccgtaacttttaatgttatggtttcaaaagagcagcttcatactg

SEQ ID NO: 23374 - DNA, 1774 bp, Oryza sativa
  ref <308>: DATABASE ACCESSION NUMBER: AK073487
  ref <309>: DATABASE ENTRY DATE: 2001-12-06
gattcccctgccacggtgaccgtgcccccggtgttctatatatgccccccgacgtcgaggtcattcgccacgaacacatcgatcatccatcatctacaagagatcgatcagtagtggttagcagcaactcactatcgaacacggtttcagcttacacagatatgaagaacaccagcagcttgtgtttgctgctcctcgtggtgctctgcagcttgacctgtaactcgggtcaagcacaggtcctcttccagggtttcaactgggagtcgtggaagcagcagggtggctggtacaacatgttgaaaggccaagtcgacgacatcgccaaggccggggtcacccacgtctggctgccgccgccgtcgcactccgtggcgccgcaggggtacatgccggggcgtctctacgacctggacgcgtccaagtacggcacggcggcggagctcaagtcgctgatcgcggcgttccacgggaagggcgtccagtgcgtcgccgacgtcgtgatcaaccaccggtgcgccgagaagaaggacgcccgcggcgtgtactgcgtgttcgagggcgggacgcccgacgaccgcctcgactggggccccggcatgatctgcagcgacgacacgcagtactccgacggcacgggccaccgcgacaccggcgaggggttcggcgcggcgcccgacatcgaccacctcaacccgcgcgtccagcgggagctcaccgactggctcaactggctcaagtccgacgtcggcttcgacggctggcgcctcgacttcgccaagggatactccacggacatcgctaagatgtacgtcgagagctgcaagccgggcttcgtcgtcgccgagatatggaactcgctgagctacaacggcgacggcaagccggcggccaaccaggaccagggccggcaggagctggtgaactgggtgaacgccgtcggcgggccggcgatgacgttcgacttcaccaccaagggcctcctgcaggcgggcgtccagggcgagctgtggcggctgcgcgacggcaacggcaaggccgccggcatgatcgggtggctgccagagaaggccgtcacgttcgtcgacaaccacgacaccggctcgacgcagaagctttggccgttcccctccgacaaggtcatgcagggctacgcctacatcctcacccaccccggagtcccctgcatcttctacgaccacatgttcgactggaacctgaagcaggagataaccgcgctggcggcgatcagggagaggaacggcatcaacgccgggagcaagctccggatcgtcgtcgccgacgccgacgcatacgtcgccgtcgtcgacgagaaggtcatggtgaagatcgggacgaggtacgacgtgggcaacgcggtgccgtcggatttccatcagacggtgcacggcaaggactacagcgtctgggagaaggggtccctccgcgtcccggcggggcggcacctatagcgggctcaagccctaaactgaacgggatagtcatgctcaaaccagtttctacacggcaagaatttactgattcttatacttttgcagtcaattaaattatggtttttatatatgtaattttgtatccgattgtagcgttcgaataagtaggcaggctctctagcctctaggttaattgcggggcatatgtagcttgccagttaattgtgtttgtatcacgcagtttgtaaccgttggtgcaatatataatgtcaggttcaggatgcagtaaaaaatcatactgcaccgatcagtgagttttt

SEQ ID NO: 23375 - DNA, 1083 bp, Oryza sativa
  ref <308>: DATABASE ACCESSION NUMBER: AK073488
  ref <309>: DATABASE ENTRY DATE: 2001-12-06
gacacttccctcatctctctctctccctctccctctcctcctcggcgcggctcggcggcgctcccctcgcctgcgcggccgcgcagcggtagggcggaggcgccggcggtggctcagccgacggacaccgtgggttggccctctacgacgccatcagcccggctcaccagcctccgctgacctctaccgctccacagaccacagcaaggcagcaagagtgattggcacttttcaatggcatgtgcttcaaagacaatctctattggttttgccaacagtggtctatatggagaggcaaggctactgtcgccaagctacaaaaactacccaaggagatcctcttacaaatttatcaaagttcgtgcagtacagggaaatgatggtcgtcgaaggctagttgatataatccgaaccatccctgaactctctagaaactatttcagaagccggtcaaggagagctctttttggtggtatctcacttctgggaggcttttatgtggcgcagacaatatctctgtctttcggagcgttgggtgtgaacgatgtcatagcagcagttgtgtgtgtcctgcttactgaatacgtaactaagttctactacagccggcctaaggttaccttcccatttgctctcctcaacaacttcaagatgggtttcacatatggcctgtttattgatgccttcaagcttgctagctgacctgcaattcttcctattggtgctttgacatgttatgttcttgaatcttgaaaaacagcaaagatggtgaaaaaatagcatgcccccacgatgttattactgagacgagggatctatagttctgtggctttcctcagctttgttctcctatgtgaaggcaggcttgttgctggtatagtttttgagttggtggatagattttcaaagattggtccacatgtgggtatactgtagtgtgatgataacaactatttattttgagattcagattacatatgattgaagcccggtgtgtacatatgcaaatttcaagctatctgatcttgatcatctcaaaaaggctgtctaatttttaatggaacttggttcagatttaagtcc

SEQ ID NO: 23376 - DNA, 1854 bp, Oryza sativa
  ref <308>: DATABASE ACCESSION NUMBER: AK073489
  ref <309>: DATABASE ENTRY DATE: 2001-12-06
gattctatttttctcacggttattccccgttttttccggatcgcaggtcggcgacgggcggtcgagcggcgggcggcctccggcttttgcttcctcggcgtgccgggtggtaggcggtggcgatggtgcgccagatccgatctcaacgcctccgaatggcagtggctggataacccctgattttttactccaatcggaggggtgtgttgcggccctagcaatttgccggcgttgtcaaggctcccctccatgaacggcagctccatctccgcgtaggcccatgtcaagaggcgctggaggcagatcgacggcctgatgatagcgcatgtctccaatgccagagatccctcactcattcgctgcctggagtactggaggcctggtcaatgcagctgagggctcctccgccggcagtggggatgccaccagatgtcagccttgtggctgtctgcttggaggtgagcagcatctgcgttcgatcatgcgctgctttttttcaagctactaatgtcgctgcttggactaattcttttccccattttttttctggcaagattcagatgtatatgttccatttttttcccgatttgaactagcctttttccaattatttttccctgcaagattcagatgtatatgtggtcgctcagaaattcacatgcatgttcaatttacagtgtcaatgtcgaagaggaggagcttcattcttttttgtttgattttcaatttcgtgctccaatgatctgcagctcatccctatctcgatgattacatcttctccccgcagtgagtatttccggcagcgatttcttctgtgttcctacgcctaatagagatttttggaatcggggaattagtactaatatttccgtttgattccacaccagcccattcagagtcaatttgtgatgaccaagtggagcccctttcgtctactgtagtttgcgcagtacctctcagctgaatcaggatgtttttttcattagattttttttctccattctgcaagcgattcgaccctaactccaacaattcaactaatataaatgggtacacgagcaatggtgaatgagctcctctaaaaccagattaggtctacaaaattcctgcatgtgttttttttttttcattctgaacatagcactatgcaatcaatatcatggatttaagttaattcacatatatattggtttagatttagtcaggtttcgtgcaggagatcaaaagagggattatgagtggattcaaaggtttagtgttgaggaatccagaacacactgtaggctactgtccctaattgttgctgcggcttcaaatagcaagtttatctttgagaataatcatgacaccagcaccagaagaacccagaaaaaccatgagattcttgttagtgagcaatatcattctggtagtactgtttactttctgtttttttcaaatatcatatctcctgtaactgatttgtactaatgcttgtttagctttcttgattcgagccctgctttgccttgtgtattgaagttcactcactacataaaaagcacaataactgaagataatttgcttctaatcatgtcatgcatacatcttcactgaaattctacagggcgctatggatagatgatggacgggcatgacccaattatgggtgcactggaatgttgctttctcttgtggaatactctgtaaaattgagcttgactacctattaattgtttttggtggtgctgcccaataatattgtgtcatttgtccaattcattctattttatgaactactatcattgacaggctactatatttattgcctgaaatgtttattatggagatgcacatgcctaaaatgttttcatg

SEQ ID NO: 23377 - DNA, 1414 bp, Oryza sativa
  ref <308>: DATABASE ACCESSION NUMBER: AK073490
  ref <309>: DATABASE ENTRY DATE: 2001-12-06
gtctttggttggtttgctcgttttttttttcttttcttgatctcttctcctccttccggggttcgcgttcgcgtcgctctcgtctcgtctcgtcatggcaccactgaggggagccaagcggcggaagcggcagccggagaaggcgttgccggcggcggggcaggcgatgccggcgccggcgcccggcggggattggtgggacggcttcgcccgcaggcttgcagcaggacaattttccaaagactgccaaaactttgagtccgtcttcaagatgtcgaggaagacctttgactacctttgctctctgattagtggggacttcacaagaaagacacaaagtttcagaaatttcaggtttggagacaaggcaattctaggcgtggaagatcaagtaggtgttgctctgttaagattgaccaccggtgagtcgcttttgagcatagggaaccgcttcgggatgaaccactcagctatctcaaacatcacttggaagtttattgaggccttggaggagcgcgctgccaatcatcttaagtggcctactcctgaggagatggcaaccgtcaaatctaagtttgaaaagattcagggcctccccaactgctgcggcgccatagacacaacgcacatcctcatgtgctcttcagctcagcctaacagcaatgtctggctcgacggcgagaacaggaacagcatggtcctgcaggccatcgtcgatgccgacatgcggttcagagacgttgtcagtggctggcctggcagcttgaatgactcgtgcatcctgcgcacctcaggattctacaggctatgcgagaaaggcgcgaggctggacggacaaacggagcttccaggagagccagctgggtcagtggtcagagactacattcttggggatgcaagctaccctctccttccctggctgatgactccataccgtgagaaggatctatctccggcgaaagccgacttcaacaagcggcacgccgcgacgatcatggtggtgcagggtgctctggccaagctgaaggagaggtggcaggttctcaagggagagctgtggaggccggacaagcaccggctgccgaggatcatctacgtctgctgcctgctcaccaacatcatgatcgacctcgaggacgcggcgaggggcggcatgccgccgtcgcacaaccacgacgacggctaccggcagcagttcagcgatgtcgccgacgtcggcgcggccgcgctgagggaccagctgtgccagtatgtgagcaggattggcagcagtttgccggcgtgattctggtcgctttgcttgattacttttgtctctttttgtttaccttgacatgagatgaaacataccaacaggtgatagaattgtaatgcgaattttggttactttcgatgattggtcggttttgatagc

SEQ ID NO: 23378 - DNA, 1229 bp, Oryza sativa
  ref <308>: DATABASE ACCESSION NUMBER: AK073491
  ref <309>: DATABASE ENTRY DATE: 2001-12-06
ggcagtcaaaaggctccccgctcccccgtccccttccccctctcgccctctcctacccaacttctcgaactctccaaaccctagctttttcctcctccccctcctccgcgaatcttccatgcccgacggctatccggcggcgccgcccgggatggagcgccctgccccggaggcggcggctgcggcggcggagccccctggggcgaaggcggaggaggaggaggaggggccgaaggatgtgggggtgaagggtacggggaaggagaaggagacagagaaggttgaggccgagaaggagatggaggggaaggggaaggggaaggagtcgatggaggtggaggaggggaaggagaaggagggtaaggggaaggcgaaggagaaggagaaggagacgaaggtgaaggtgaaggaggagggtggggaagagaaggagaaggggaaggttgaggtggtggaggcaaagcggcggccggctggtgttggcgcggagacacccatcctagcggtgccgatggtggccgtgccatgcttcttggcgtctcctgcatttgcgggtcacttttcaatgagccatcaagcagctttggcgagagtgacggctcaggcacaaatacaattgcagtcaccaaccacaccatattcagaagggctgcccagtccatttcctataacacctaaagctgtaatgcccctgcagcgatcaccttcaggaactgaagggagtgttcgcagatcagtgttagagaagtcagcctcatttcagtcaagaccacacaatcatgtgtctgtaaacatggttggtgatggcttcaactggaggaagtatggtcagaagcaagtgaaaagtagtgaaaattccaggagttactatagatgtaccaactctaattgcttggctaaaaagaaggtcgagcattgtcctgatggccgcgtggtggaaatcatttacagaggaacacataatcatgaaccgccacaaaagaccagatttgtgaaagagagagtggctcatattactgcttcctctggagatgatgaaaccttgggacttgtgaacaatgaaattatagaatccccgtcaccgggatgtaaattagagccgggtgctgtctctgaagcttctgaacagcagcttttttgctcaagtgattgtgaaggtgatgctggtaacaaatcagaagatgatcatcctagcacagagcctcagccaaaacgaagcagaataattg

SEQ ID NO: 23379 - DNA, 1732 bp, Oryza sativa
  ref <308>: DATABASE ACCESSION NUMBER: AK073492
  ref <309>: DATABASE ENTRY DATE: 2001-12-06
agggggcccaggtgtcagtcggttgcgcaacaccacccactgctcgtctccgatcctcacccaagcctctctctctccctctcaccggaggcaaggtggggatggcctcgccggcggtggcgacgcggcacccttccccctccttcttcggcccggaccctcgccgccgccgcgggcattcgccttcgaatctaggcttccgaagatcgggattgcagttaaaggttactgcaatttttgggtggattaagggagacacaagaacacgtgaattgaacccatctgctgaatcatatacgcttacagggtcagcctcagaggcagacaccaagccacgtgaggtttctgttgctgttgtttcttctattatggacattccttcagcagattgggatgcctgtgcggttgattcagttgatcctgacaattttaatccttttctgacccacgcattcctctcaagcttagaggaatcgggttctgcagtgaaggaaacagggtggttacctctgcatgttgttgcacgggatgagaatgaaactgtcgttggtgttgtcccactttacctgaaaagccattcaaggggagagtttgtatttgatcaatcatgggcagaagcttactatagctatggactcgaatactaccccaagttgcagtcttgtgtgccttttactccagtaactggtcaaagaatattagttcgagatacaccatacagggatcaagtttttgaagctttagtgaaagaattgaagagtttgactaccaagctgaaggtgtcatcgttacatataacatttccatctgaaggtgaattcagcaagttgaaggatagtgagttcttgcagagaatcgggatgcagtatcactggagaaatcgagattacagaagttttgacgagtttttaatggatttgaagcaacccaaacggaagaatatcagacaagaacgtaaaaagattcctgctcaaaatttgaaaatgaagcgacttcgtggagatgagataaagagcgagcattgggacaccttttataagttctaccgcaacacaactgataatcactggggcagaccatacttgacaagggaattctttcaccgcttgggagaaaagatgggtgacaaggtgatgcttattgttgctgaacatgacgataaacatgttgccggggctcttaaccttattggaggtgacacattgtttggccgcttatggggctgtctgccagatgcttatttccccaatttgcattttgaagcttgctattatcaggcaattgaagcagctatagaactgaacctgagtaaggtggaggcaggtgctcaaggagagcacaagatccagcgtggttacctcccagtgacaacatacagctgccactacttcttagatcctggttttggggcagctataggaaattatcttgtacatgagacggctcaggttaaacatgttattaaggtcctgcatgattccggcccatacaaggaagatatactgaacgaatttttgcttacacaaggggatggagtgtagaacatcaaaggaacttacagctatgaatatgttcatgactcaagatgtggaagtagcaaaaatatgggtgatcccatgcctccacaaggagatgatactgtgaatatgtaaacccacagttgtacattactaggcttgtaaatagctgtcatttaaaaatctcaagtcattagcttgaaatgtgacaactg

SEQ ID NO: 23380 - DNA, 1007 bp, Oryza sativa
  ref <308>: DATABASE ACCESSION NUMBER: AK073493
  ref <309>: DATABASE ENTRY DATE: 2001-12-06
ggtggattcctccgccgtcgccgagcctatctgagcgcgcgatggccacggatccgagaggtcggcggccgcggcaccacgcggcggtgaacgaagtgctctcgacgctcgccgccgccaacagcaccctcgccgacgtgcagcgccgcctcgacgccgacttccgcgccgcctacccggatcacgcgaatccggtgaagctggtggcgcggctgaagcggatccaggaagaggtagcggcggtcaagggactctgccgcgatctgctcacccagaagcaggagttgatcgacgcaatgcggacaagcctcgcggtgcagcgcagcgccgtgcagcggctgctcgcctcctccgggctgccccccatgtccgaagaggacgccgccaccgacgccaatctcaaccagatcatcgatgagtggacggcgcatgttgggccagacacaggagatgacaaggatgaggataccaaccaaatcttcttcgccgctgtcgtttagagcgagtgagagcggccacaacctagagcagaattctatgcaaagtcaggaggtctcatgctctgctgctcatgtcattgttttgtgtgttttggcgagaagagctgcccgtgctgcagcatgcggtctcaatttgcagatccatttctacaatgaaggccagcgtactggagctggccgcgatggagattctacttcacacatctgttgctgttgtggagagaattgattagaaaatcgtagactttgattggattgcggtgtggttagcaggagagtataaaactgagagcctgttagctcctctctcgcttttctttttgtgtgtgttattttacttttctcatactcaacctttgtagaatatgctgttgaatagtacaaagtgagggaaaaattttgcttcgtataagcaggttgatgcagattgtgatatgcttttttccctctttttttgaggaacagttgatgatgagtttgtcaacaaggaattgtgttgttgagtgc

SEQ ID NO: 23381 - DNA, 1742 bp, Oryza sativa
  ref <308>: DATABASE ACCESSION NUMBER: AK099358
  ref <309>: DATABASE ENTRY DATE: 2002-08-28
tgaggaaaaaaaaaggaggaaaagaaaagaggaggaaagcgaagaggttggagagagacgctcgtctccacgtcgccgccatggccgcccgcgccgccgccgccgcgttcctgctgctgctcatcgtcggcgcggccaccgcggcgccggacatgtcgatcatctcctacaacgcggagcacggggcgcggtggctggaggaggggcccacggaggccgaggcgcgcgccgcgtacgacctctggctcgccgagaacggcggcggctcgcccaacgcgctcggcggcgagcacgagcgccggttcctcgtgttctgggacaacctcaagttcgtcgacgcccacaacgcccgcgccgacgagcgcggcgggttccgcctcgggatgaaccgcttcgccgatctcaccaacgaggagttccgcgcgaccttcctcggcgccaaggtcgccgagaggagccgcgccgccggggagaggtaccgccacgacggggtggaggagctgccggagtccgtcgactggagggagaagggcgccgtcgcccccgtcaagaaccagggccaatgcggaagctgctgggccttctccgcagtaagcacagtagaaagcatcaaccaacttgttactggtgagatgatcacattgtcggaacaagaacttgtagaatgctcaaccaatggacagaacagtggctgcaacggtgggctcatggatgatgcctttgacttcatcattaagaatggaggcattgatactgaagatgactatccttacaaagctgtagatggcaagtgtgacatcaacagggaaaatgctaaggttgtgagcatcgatggctttgaggatgtacctcaaaatgatgagaaatcacttcagaaggcggttgctcaccaaccagtcagtgttgctattgaggctggtggccgcgagttccagctctatcattcgggcgtcttcagcggtaggtgtggcacaagccttgaccatggtgtggttgccgtcggttatggcactgacaatggcaaagactactggattgtccgcaactcttggggcccgaagtggggtgagtctggatacgttcgcatggagcgcaatatcaatgtgaccacggggaagtgtggcattgccatgatggcatcataccctaccaagagcggagcaaacccacccaagccatctccgactcctccaactcctccaacaccacctcccccatccgcccctgaccatgtctgcgatgataacttctcttgcccagcgggcagcacctgctgctgcgcattcggcttcaggaatctctgcttggtttcgggctgttgcccagttgaaggtgcaacctgctgcaaggatcatgccagctgctgcccgcctgactaccctgtctgcaacacccgggctggaacctgctcagcgagcaagaacagcccattgagcgtgaaggctttgaagcgcacgctcgctaagctgaacaccgcatgagctcatcgataacatgtaatcggcgaggagaggggatgaggcagcgtggagcctttctgaaatttctgcttccgtgcctccatatatcgttgtcgcattttgaggggacagcttatttactctactgcctgccttttatcttacagtgatctgtgtacatagctcgatccaatttgtactcttatttatcttctccaatttgtactctatataatttatcatctcaagaatacattaacgaagatcctgttttaccgttcc

SEQ ID NO: 23382 - DNA, 1285 bp, Oryza sativa
  ref <308>: DATABASE ACCESSION NUMBER: AK073494
  ref <309>: DATABASE ENTRY DATE: 2001-12-06
tggtgtaacttagtccctcgaagtagtcgcttcttcttctcgtagcctcttcagatcgatcgcttcgtcgtcatggctagtttctcgacggttttcctgctcctcagccttgtctgcctagcttcgccgtgcgccgcgcagcgcgtgatctgcgaagccccaccgtgcaccaccgcgtcgcaggtgaagacaaccccgacaaatcgcgcctcccacgtccgcctccccgaaggcgtcaccggcgccgagagcctcgccttcgactccagcaaccgtggccccttcaccggcgtctccgatggccgcgtcctcaagtggggcggcgactccgccggctggactaccttcgcgtacaaccggaattaccggagcaaccctacgtgcgcgtcgtcatctgaggagacggagagcacatgcgggcgtccgctgggtcttgcgttccacctcaagacggggatcctctacttcgccgacgcctacaagggcctgatgcgggttgggccgcggggtggccaggccgacgtgctcgccacggaggccgacggcgtgccgttcaattacctcaacggcgtcgacgtcgaccaggacaccggtgacgtctacttcaccgacagcagcaccaccatcacacgccgataccaagagaacatcatgaggaaccgcgacgcgacggctcggctgatgaagtacgacgcgaagacgaagcaggtgacggtgctgaaggaccggttgccgtacgccaacggcgtggccgtcagccacgacgggaggtacctcgtggtggcgcacacggggccggcacaggtgttcaggtattggctcaagggggccaaggccggccagtacgagctcttcgccgacctgcccgggtaccccgacaacgtccggcgagacgccaaggggggctactgggtggggctcaaccgggagaagattacgttcaacgtgccggcggcggcttctccggccaagcacctggtcggcgtccggctcaacggcgacggcgtcgaggtggaggagctgacggctgctagtagggctgtgacgctgagcgaggttgtggagagggaccgcaagttgtggctcggctccgtcgatctcgactacgtcggcctactgcagtagaaagaagttatctgtttagtggtgttaggaataataaaggcaggctaattaggtatttagcagtagaatcaggattggtacaactcttttttgctggcagctatattaattagacgttttagtagtcttttttcagtgtgtgcttgatatacacaccttg

SEQ ID NO: 23383 - DNA, 1526 bp, Oryza sativa
  ref <308>: DATABASE ACCESSION NUMBER: AK073495
  ref <309>: DATABASE ENTRY DATE: 2001-12-06
gacctgtccggcggcgacacacacaatggcacagccacgcactcacgtcgtaggcggcctccgcgccctccgaaccgcgatcgtctcgccgtcgccggcgccgcccgcaggcgagcgcgctctacctctcaccttcctggacgcgcagtggctcagcgcccaccccgtcgagcgcgtcttcttctaccgcctcggccccggcggcgacgacgtcgacgccgtgctgtcccggctggtcgagtcgctggcccgggcgctccacgccttctacccgctcgccggccgcgtccgcctcacgcccggcgagaccaaccggtacgagctcttctaccagcccggcgacggcgtggcgttcactgtcgccgagcacgacggcgtcggcgtcggcgtcgatgagctggcggacacggacgagccgagggaggttgccaggattgccacgttcgtcccggagctcccgaagggcggcgcggtgctcgcgttgcaggccaccgtgctgccgcccgaccgccgtggcctcgctctcggcgtcaccgtccaccactccgcctgcgatggggtgagctcgacgcacttcctccacacctgggccgccgcctgcgccggcgaccgggtgctcccggagccacccgtcattgaccgcacgatcatccgcgaccgcaacgacatgtacgacgcgttcgcctcacccgcgagcgaagccaaacatgcgttcgattcgcccgacgtcgccggcaagctcctcgccaccttcactctgtcgcgacagcagctgcagaacgtcaaggacgccgtcgccggcgaggccgcacgtcgcggcgtggcgccgccgcgttgcacgtcgctcgtcgccacgctcggcctcacgtggctgtgcttccgccgcgctgggcccgacggcgaagaagggcctcgcggtgacggccgcgcccacctcgtcttccccgtcgaccaccggtcgcggctggagccccgcgtccccgaaaagtacctcggcaactgcatcggcccgggctttgccacggcacacgagacggagctcgccaccaccaccaccaccgccgatggcctcttcacggcttgcgccgcggtcgccgccggcatcgacgaggcggtgcgcggcgagccgacatactgggagcggtgggtggagcgcatcaccgaggcgtgcgcggacgacatgtcgctgtccgtggcaggatcgacgaggttcggcgtgtacgacatggacttcgggttcgggaggccggcgaaggtggatgtcgtgtccgtggcgaagaccgacgcgatgtcggtggccgaggaccgttccggctccggcggcatcgaggtgggcatcgctctgtcgccggcgcgcatggagcggttccggaggtggctcgccgacgccatcgccctgctctcctcgtcttcccactgcaactagctagggtggaatctgcaaaaataattaagtattttgcttgaattctagaactttgaatttattaccctaaaaaatctaatcctttgaatcttttggtatc

SEQ ID NO: 23384 - DNA, 2416 bp, Oryza sativa
  ref <308>: DATABASE ACCESSION NUMBER: AK073496
  ref <309>: DATABASE ENTRY DATE: 2001-12-06
gattcaacatctctctctctctctctctctctctgaacgatggttggtgtgcttgctgctgctgagcactgatgcagccttttcttatgggcatttaatacctgagttattactgcaagggagggagggatcaaatgcaggcagttcaatagaaaaagaaaaaaaaagaaacaacctgagcaccagagttcttggctgctccaagttcgcattgtgatccacggagccggagaagggggcaaaacaaaaccttatggtttcttgattcatttctgctttggtgattgattcttggttccgtttcttgggccccgatttgggaggggttcttggcgatgaggaggcatgggtggcagctaccttaccaccctcttcaggtggtggcgatagcggtttttctggcactgggttttgcgttctatgtgttctttgtgccatttgtggggaggagtgagctccagtatgtgctcatgggtctctacactccactgattacttgtgttgtcacattatacatatggtgtgcagcaactaatcctggtgatccaggcatttttaaagcaaagaaacatccaaaattaggcaaggatggaaagcaaatacaagaaatttcagagcacgaatcatgccagggaggaaagtcgttcagcgatggctgtagcattgttaataacagtgagagattaagcaatatgtttgaagggaatgattcatcttctcggcctgggttacatggagttctttgcttgatatgcaacccattcttctgcttatggaaaagattctttcactcagatgaccaatcttcggaacagcacatgagcgaagaaggcatgttcttttgcagcttatgtgaagtagaggtgttgcagcatagtaagcattgtagagtttgcgacaagtgtgttgatggttttgatcaccactgcaggtggctcaataattgcataggaaaaagaaactacaaaagattcttcattctaatggcttcagctgttctcttgcttataatgcagtggttagtgggcattcttgtgctgatactctgtttactgaagcgaggggagttctccggacagatgatctcaaagttaggaagtagcttctcaacagctgcttttgtaattgttgtgatgacatgtactttactagcaatgcttgcaacaataccccttgcccaacttttctgcttccatgttctgcttattaagaaaggcataagtacgtatgattatattgtagctttgagagaacaagaagagcagcaagaggttactgagcatcaaagcccgcagatgtctattattagctctgtgacagggtttagcacaactagctcatttgctcctcttcaacgtgggtcatggtgtactccgccacgtttattccttgaagatcagcatgtcattcccccagaaatgccacagaactcctcaagcaagaaggcaaagcatgctgatgtaaccaaacgaaaaccatcaggacctgtgaaaatcagtccctggacactagctcgccttaacgcggaggaagtttcgaaggcagctgcagaggcgaaaaagaagtccaaagttcttcagccaatcgcgagacatgaagatcctaaacatgacaagaggcgacccgacaagagagggcagtttctacctgaactttccgtcgatcacactacgaggacatctgatagctgcaccgacagcaactgcagcgacatggacatggaaacatgtggcagtttagccccattgcaacatgaagtgaggagcgttttccaaccaagcatcgcatcgtcgatcagaaacctcacctcatcacctcagagcagcctggactcacctgatcttcacccattccgtgtttcaatgtcaggagcagacgaactccgcagtttcatgtcactcgcagcatcagaatccactgctccaaaaagcattgcactttcaaggtcgacgagtggtgggtacgaggcctcgggaggcgaggaaagtgatcgcatcccgtcaaagatcgtgcaccggtcgtccaattgggccaatgccatcctcaattccggtaggcgagaaatggcagccgatctgaacttgccaacatctgaaagatttcttacaaacaccaggtttagctagctagtcatttgctgtgctgctagttgtgaatgggctgtaggatttactgacctgttactggttagaagtagtagtgttgttgcaattgtgaccaatatctgttccagccaagacaattgcctcatattgggtttagctgctgtactgctctaatttgctctcttgcactcagttttgtactctccgtgctcaacctgcatggttgaccatgggatacatttgacggatggcattctttcaacagtttgttttgctagagcccctttttcatatgcaaaatttagacaccc

SEQ ID NO: 23385 - DNA, 3074 bp, Oryza sativa
  ref <308>: DATABASE ACCESSION NUMBER: AK073497
  ref <309>: DATABASE ENTRY DATE: 2001-12-06
ggttgctgctgctgctgtcctaccaaacttttactactcctaccaccaccagcttcttgctcgcctttccctttctctccctctctctctctctctctcttctctcctctctctgcatcctctgctcagtgctcattccatttcttctcaactcgcctcagctgcatcctcatcttggtcagtgagcgagtgagtgaagtgcagagctatgcctgtgctgcggcggtgagctttgcagcgacctcctctctctctgctgctgccggcgacggcggccatgaagggcgtcgacgatgcattcctgggcgtcggcgacaagccgggactggacatttggtgcattatgggtagcaatctaattgcaattgaaaaatcattgcatggcaagttctacactgggaacacctacatcatactaagtaccgttgagcttaaaagcggagttcgccagcacaatgtgcactactgggtaggggaggaagccaaagaggaggattgtctgacggcctctgacaaggctattgagttggatgtagcactgggctcgaacacggtccaatatagggaaacacaaggcgaagaatccgacaagttcttgtcatacttcaaaccatgcatcatccccatacaaggtagcttgtcttcgcacatgagaatatatggagataaatcaaaggatacaacaatgtttaggtgcgaaggagagcatgtagcccgtgtaacagaagtaccgttttcacggtcctccctagatcacaaggcagtgtttgtcgtggacacggaatcaaagatcttccttttcagtggatgtaactctagcatgcaaacaagggctaaggctttagatgttgttaagcacctcaaagagaaccgacattgtggcagatgtgagattgcgactatagaggatgggaaacttgttggtgactctgatgctggtgatttctggaacttatttggaggctatgctcctattccccgtgatgtacaagacacggttatgacagaactgatgactacctcatccaagaaactattttggattaacaagagaaaccttgttcctgtggagacaaatctgttagaaagagaaatgctgaactcggacagaaattacattctggactgtggcaccgaagtattcctatggatgggtatgacaacactggtttctgagaggaggacatcagttactgccctagaagattatgtgcgttgtgaaggaaggcaatcgaatgcacgttcagttatattgacagaaggtcatgaaaccgttgaatttaagatgcattttcagcattggcccaagaatgctgtgccaaagttatacgaggcagggcgggagaaggtggcagcaattttcaagcatcagggctatgatgtcacagaaatcccagaggataaacctcgtcacttcatcagttgtaatggtagtctgaaggtttggttggtggacaatggttctgtaaccctgctttgcactgaggagcaggaacaactatacaatggggactgctatatcatacggtatagctacatcgaagacggaaaagactatcatttgttctttgcttggtctggactgaacagcataaatgaagatagagttgcagcagcgtcactaatgtcaggcatgattgattcagtaaaagggcatgcggttgtggcacaagtattcgagggcagagaaccagaaatgtttttcctagtattcaagtcattgatcatattcaaggggggcaggagtatggcatataagaacttcgtttctcagagaagcgatgcaaacggatggtaccagaaaaatggggttgctctattccgggttcaagggctgaaacatgattgcatacgagccattcaggttgatctggctgcaagttcacttaattcttcgcattgttacattttgcaagctggtggttctttctttacctggctaggaagcctttcttcaccaagtgaccacaatttacttgacaggatgatggataagttgtgtccactgaaacaatccttgttggtaagagaaggttctgaacctgatcgcttctgggaagcattaggcggaagatcagaatacttgagagaaaagcaagtcaaggattggcctgcagatccacatctgtatacttgtcatttcgaacaaggtccttcaaggcaaaggaggtattcagcttctctcaggatgacctggtaactgaagagatattgatactggactgcgtcgaagaactccatatttgggttggacatcaatctggtgttttatccaaggagcaagctcttgatatcggcaagatgttccttcaggcaggcattcatcaggacggacgacggccaatcgacacgacaatgtatatcgtcactgaaggggatgagcctagatttttcacgagcttcttcaactgggattattccaagcaaacaatgcttggcaactcatttgagaggaagctggcaatcctgaaaggaatttcacaaaagctggagacaccggagagaagcctacgcaaatcatcatcgtcttcgctgccgagaaggtcgccggggacatcgtcgtcggagccgaccacgccggagcagcgagcggcggcgaggacgttcgcctcggcctctaccgggaagctactcagggagagatcaccggccgcgctgtcaccgtcgctgtcgacgccttcgccgtctccgagaagccgctcctccgcctcctcgtcgccggcgtcgtggaactcgacgccgtccacggtggcgcggcggctcttcccgccctcgctgcacgcgtcggcggaggcggttgccaccgggacccctcgccggcggtgagcttcagctaacgctcacctgcaactgcatatgcctgtaccattaagaatttgagattcagatgaaattcaaagaacatcggccatctttttacaaggtccctagattttcaaatttaaattaggtttttagaggaaatttaaattaagtttcctctactgcaacgaagaaaacaaagcaccaaatatgaatatgaattaactaaggcatgtttgtttcagcttatgattattataatatagattatt

SEQ ID NO: 23386 - DNA, 872 bp, Oryza sativa
  ref <308>: DATABASE ACCESSION NUMBER: AK073498
  ref <309>: DATABASE ENTRY DATE: 2001-12-06
gtctaatcctacccaccaagttcccatcggcggcacgccggcggcggtcgccgccggcgagccattgtctcgtactaccgtcgtcttcgtcaagttgttggtagcatcgttgttcgtcgtcccgtcctcaagcctgtcaagcagcagtcaggagcatcgtccttcctcatccacacgcatcagtgcacgccgccggcggcaaccccgtccaagctgtcagccatgtcgtccccgctgcggctcgtcgtcaatcgcgaagccgtcctcaccagccgtcgtcctcgctgcccgtcgcagcgctcgtcaacggcatctgtcactgccgctcgtcgcggcgtgcatctcctcaccagctccacacctcgctgcctgtcgtaaccccttgcgtggcgccggtcctctccgccaatcaggccctgtcacccgtttgtagcagagcaagcagctgccgctgccggcagatccttcagtcttggctattgcctgtaaactgcacaagtccatatgctgcacacaaggtgctcgacaaaatgcttcaaagagttgctcccagcttgtggtcatgcttttgcctttccaatttggtgctttactgaaagtattcgtggtctctcattaccatctcctgtccatcttcatcagctacttctctctgctaccaaattggatagaattaatcagttaatatgcaattccttggcagccacaattatgtcttttgctagcatatcaatgtcctctacaaattgatttcctttgtttcctatgatcctatctagtttatccattaaagccttgctgcatatctattagtatcattgtgtcatttactagttgccattcaatccatccaagtccattgcatattcttc

SEQ ID NO: 23387 - DNA, 2450 bp, Oryza sativa
  ref <308>: DATABASE ACCESSION NUMBER: AK073499
  ref <309>: DATABASE ENTRY DATE: 2001-12-06
gacgtgacacgtcatacgccgcatccttcgttcacgccgccgccgcctcgcgctcttgccgacggccaccgcgccgcctcgccggtcgccgctcccacccttccacggcgaccggagccaaagacggtgaccggcgggcgcgacgacctaggggaatgtgtacctcacctaccccacatcgtccccgcacccgcattccctaaacccccaaaccctagcccgctcctccgttgtcggatacgccaacctgctatatgcgagagaagggcatccacaactgtttgatgatctccaccggagccgccgtttaccggagtaaccgtgcttacgcgtcagctggaggggtgacctcggattcggtggagggctgatggctccgacccagctggtcgatcgctgcggcggcggcgcccccgcgagtcgctgctgtgagcctgtgatcgcctgtgatgggggtgtccgtggtggcgcaggcgccatgggggaagtaactcatgagatgggatgtggccgcaggcgcgattgtcgctgtgatggcgcccttggctatgcttggggcgacgatggtggcactgatgcccctgcaagcggcttcggtgcccacgattggtggttcattcgtgatggtggacttgtgaccttgccaccgcctcctccgcaagacgaatttgtgatgatgatgcagcctatgatagtatgatagcacattcatcgatgactgcgatgtcgctgtgatgccgtacccacatgccagagctgcgatggagctgctgcctttgtgcgcaggccttccaccttattgacatggtattgcagccccaacaagctggacctatgatgccattgttggcacagccgcctttggccatggcactcctctactcaagcttcaacatctggactactttgatatgccttctggaacagggaaatggcctcttccatgaatgaatgagccccctctatagccatcacttgaatgatcagttgcagatgtcttatgttgctggtactaaccaaagtgcgattccacttggtgggatggccagatattcagtgggcatggacagtggaatccatggcgctacaagaactgaatcaagaactctctatgtggaaggactaccttcgaactgcacaaagagagaggttgcacatatttttcgccccttttctggttttcgtgaggtgagattggtcaacaaggagtctaggcatgctggaagctgtaacctcttgtgttttgttgatttttcatctcctcctgaagctcgtgctgctctggagactctgcaaggctataagtttgatgaacatgaccatgagtcttccaacctgcgcacacaattctctctcactcctcgcaggaggtcaattggtgggccttgtgttagaaactaagtttcttgggtggagttgaattaataatgcagagcaaaatttgtggagaatctctagggagacttgtatacaatgctagaccaaacttgactctagggaaacagcctcttccacgaagcaatgagcccccattatgtccatcgcttgaacaatcagatgtcctatgctgctggtgctaaccaaagtgctattccacttggtgggatggccacatattcagcgggcatggacagtggaaaccatggcgctacaaggaccgaataaaaaactctatgtggaaggactaccttcgaactgcacaaagagagaggttgcacatatcctttttatgcctgtaaactaaaatcacattttcctagctataattagtctaggtatcttttgcgatgtaattcatgttacacctcctaggtgcttttgcccttaaccctgtcttcttcagatattcttcgcccctttctggtttctttgaggtgagattggtcaacaaggagtctagatatgtggaaggtatataatctcttgtgttttgttgattttgcaactccttctgaagctcgtgctgctctggagactctgcaaggcttgctaagcgaggtttatcgcacccgaatgcttgtcccttctgcgaccaggatgatgaatctattcggcactttctcatctcatgtgtatttccccgccatgtctggacatgtattctacagaagctgaatatgttggcctccgtgcctcggtctaccgcgtgtctctctagttggtgtgatcaccagttactactaaggaaaggtgttcggtgatgccactaagatcatggttccagggacgatgcaaaggcaatggaacatgtttcactgaggttctcattcagggcaaaggggaattgctcttcggagctatgtgaatttgtttggcagaaacactgcttcgtatggttgcaagtgtattctagcgtgaattgtattttctcaaggtctaaactgtaactgaatttaaattgtaatgcttggagtgaatgtcttaagttaaaaacttttgctttttgttcg

SEQ ID NO: 23388 - DNA, 1255 bp, Oryza sativa
  ref <308>: DATABASE ACCESSION NUMBER: AK073500
  ref <309>: DATABASE ENTRY DATE: 2001-12-06
gtccctctatcgctcacgcggtcacgcccatcgcgccgcgcggctcccgagatggcacggcacgcgaagacggactccgacgtgacgagcctggcgccgtcctcgccgccgcggtcgccgcgccggtcggcctactacgtgctcagccccgccgcctcccacccggacgtcgtggtggcctcgggcggcgcaggcggcggcggcggaggcgtggccgcggccgagaagatgtcgttcgcgggttctaccccggccgagtcgccgctgcactaccactaccaccactccggcgccgccgtgcaccactcccgggagtcttccaccggccgcctcctcttctccgaccagctccgctccggcgccgctgccggcgtcccctggcgacgccttgcgcagggcagcggcgccggcagcgtcggggacgacgacgacgacgaaggaggactcgccggggccgcctcgcagtggaggtgctacgccctcggggcgttcgccttcgtggccgtgttcgccttcttcctgctcgtactctggggcgccagcaagtcatacaagccccacgtcgtcgtcaagagtgtggtgttcgagacgtaccacatccagggcggcacggaccggacgggcgtcccgaccaagatgatgtccgtcaacgcgacggtcaggctgcgcttccgcaaccggggcaccttcttcagcctgcacgtcacctccacgccgttccacctcttctacgacgacctcaccgtcgccaccggccacatggcggagttctatcagccgcggcggagcgggcgcgtggtgacggtgtccgtggtggggaagcaggtgccgctctacggcgccggcgcggagctgcacagcaagcccaacaacggccgcctcggccccgcggtggtgcccgtcaggatggccttcgtgctgcgggcgcgcgcccacatcctcggcctcctcgtccgctccaagttctaccgccgcgtcctctgccgcctcgacgtccgcgaggcaagcctcggcaagcccgtccacggcgtcgccgccgactgcgagtaccacgacgggaggtgaccacgggcccttgcattcagacgctgcgtcgataccgtgggcgtggattgttaattggaagctctgaaactagacttctgggggtggtagtagtattggtaacacgaggtaaaatccaatccgttgtaatggaacaagtgttgatgctaacagtaatcctgctaattctagaaaattttacttgctgttg

SEQ ID NO: 23389 - DNA, 1542 bp, Oryza sativa
  ref <308>: DATABASE ACCESSION NUMBER: AK073501
  ref <309>: DATABASE ENTRY DATE: 2001-12-06
atggtggcaaaggagcacaaggtcacaatcatggaccacgagaagggcaaggtgacggagcaggtcgtggatgatcctatgcagatccccaggagcatgatggaaggatggcacccgcagcagatcgatcagctccccgattccttcaccggtggatgggtcgggttcttttcctatgatacagtccgttatgttgaaaagaagaagctgcccttctccggtgctccccaggacgataggaaccttcctgatgttcaccttgggctttatgatgatgttctcgtcttcgacaatgtcgagaagaaagtatatgtcatccattgggtaaatcttgatcggcatgcaaccaccgaggatgcattccaagatggcaagtcccggctgaacctgttgctatctaaagtgcacaattcaaatgtacccaagctttctccaggatttgtaaagttacacactcggcagtttggtacacctttgaacaaatcaaccatgacaagtgatgagtacaagaatgctgttatgcaggctaaggagcatattatggctggtgatattttccagattgttttaagccagaggtttgagaggcgaacatacgccaatccatttgaagtctatcgagctttacgaattgtgaacccaagtccatacatggcatatgtacaggcaagaggctgtgtcctggtagcatctagtccagaaattcttactcgtgtgaggaagggtaaaattattaaccgtccacttgctgggactgttcgaaggggcaagacagagaaggaagatgaaatgcaagagcaacagctactaagtgatgaaaaacagtgtgctgaacatattatgcttgtagatttgggaaggaatgatgttggaaaggtctccaaacctggatctgtgaaggtggagaaattaatgaacattgaacgctactcccatgtcatgcacatcagttccacggtgagtggagagttggatgatcatctccaaagttgggatgccctgcgagccgcgttgcctgttggaacagttagtggagcaccaaaggtgaaagccatggagctgatagacgagctagaggtcacaagacgaggaccatacagtggcggccttggagggatatcatttgacggagacatgcttatcgctcttgcactccgcaccattgtgttctcaacagcgccaagccacaacacgatgtactcatacaaagacaccgagaggcgccgggagtgggtcgctcaccttcaggctggtgctggcattgtcgctgatagcagcccagacgacgagcaacgtgaatgcgagaacaaggcagccgctctggctcgagccatcgatcttgctgaatcagctttcgtagacaaggaatagagtctctctcaagagagttgattttgttagttcttgttcatggttcttctcgctgcatgtttagcaggaaaggtatcatcagtgagttgagagaagcaataagcctatgttgtcatgtgaatcgaataaactggaggttatggtcgtgagctattattagctgtgttcatt

SEQ ID NO: 23390 - DNA, 939 bp, Oryza sativa
  ref <308>: DATABASE ACCESSION NUMBER: AK073502
  ref <309>: DATABASE ENTRY DATE: 2001-12-06
taatgtgcttggcttgtacaaggatatgaggagctgggggttatggcccactagatcaacttttgcaagcatgctaagtgcagcggctaacatgaaagcttttgttgaaggccagcagatgcatgctgcagcagtaatgcatggcttggatgcaaatgtatttgtgggaagttctctgatcaacctgtatgctaaatgtggctgccccagtgacgcgaagaatgttttcgacttgtcctgtgaaaagaacattgtcatgtggaacgctatgctcacaggttttgttcagaatgaattgccagaggaagctattagaatgtttcagtatatgatgaggtatacccttcaaaccgatgaatttacgtttgtcagtattcttggtgcatgcacctacttgagttccttttatctgggaaaacaagtacattgtgtaacaatcaagaactgcatggatataagcttgtttgttgctaatgcaacactagatatgtactcaaaatatggagcaattggtgatgcaaaggcactattcagtctaatcccttacaaggatagtatatcctggaatgcccttacagtaggacttgcacagaacctagaggaggaagaagcagtgtgtatgctcaaaaggatgaggctgcatggtataacacccgatgatgtatctttttctactgcaattaatgcttgttccaatatccgagccactgaaactggaaagcagatccattgcctggccatcaaatatggtatctgctcaaatcatgctgttggtagctctctgattgacttgtattcaaagcatggagatgtagagtcttctaggaagatttttgcacaagtagatgcgagtagtatagtgccaataaatgctttaattgcaggttttgtgcagaacaataatgaagatgaagcaatacaactgtttcagcaagttct

SEQ ID NO: 23391 - DNA, 1671 bp, Oryza sativa
  ref <308>: DATABASE ACCESSION NUMBER: AK073503
  ref <309>: DATABASE ENTRY DATE: 2001-12-06
ggcagccgccagcgggtcaacgagcgaagacgaaggtgacagggcaagcatagcagtgaggtagctaaccctagcgggggcgcgcgggagcgcgccgcattgttcctgagagctagccagaaggccaacggcggtcgatcgttgtctcggtgagcctgttaggcgccgttggaggagattgaaatcaagagagcaaggatccaagccagcatctcagattgaaggaaaggagatggagtctctccctgtgccgagtgttcagtcaatggtggcggctgacggtggtgcccatgtgccacccaggtacatccgcccgagagacgaggcagttgctactgatggagagacagagatccctgtcattgacttccagaggctgcaactcggccatgacgaggagatggcacgtcttgacagggcctgccaggactggggctttttccagctaataaatcacagcgtcccagaagatgtggttgatgggatgaaggccaacgcccggggattctttgagctgccagcggaaaccaagaagcagtttgctcaggagcgagggcagcttgatggttatggccagctgtttgttgtctcggaagatcagaagctcgactgggctgacattctcttcctcaatacgctgccagtgcagaacaggaatttcagattctggcctaaccaacttgctaaattcagatcggcactggacaaatactctgctgctgtgaagagcatagtggatttcctcttggttacagtggcgaacaacttgggagtggatccagaggtgattgcgaacaaatgtggcactgatgggatccaggcggtgaggatgaactactaccctccgtgtgttcaggcggacaaagtcatcggcttctctcctcactctgactctgatctattgacccttgtcctccaagtgaatgaggtggatggcctgcagatcaagagaaacgagacctggtttcctgttaggcctttggaaggcgctttcattgtcaacgtgggagacattcttcagatattcacaaacgggaggtacaaaagtgctgagcaccgagctgttgtcgacatgaagaaagagcggctgtctatagcagccttccattctccaagtgtccatgctgtcattggtcctctgaaggagatggtggcgcatgaacatgaggctgtttacaggagcataggccatgatgagtttatgaagctcttcttctcctccaagctggaggggaagagcttcttggacaggatgaagaagctctaaatcaaagctgagagtaagatcagtgacagagaatcagatcgagtgatcgacaagcatcctgttgtgcttgctggcattcgatgaggtattggacttgagggcaaaggatgcaaggggtccaactccaaggtaagtacttagaacccattgtagtctctattcatatcattgtatcatccttgagagagtacgtagaacccattgtagccatccgtgtgcttgttgaaatggctgcaactctgtaacagtggaagattcaggcacacaaaaatttcagacaaatgttcgtaagatatctgtagggatcagatagaattgttgatggtcttcagattgttttttttatggccaatgatattcatacctcaaatatatttgatatgacctaaatcaaattaaaactc

SEQ ID NO: 23392 - DNA, 3116 bp, Oryza sativa
  ref <308>: DATABASE ACCESSION NUMBER: AK073504
  ref <309>: DATABASE ENTRY DATE: 2001-12-06
ggtcctcccattccccttccactccaccccagccgcctcgcctcgccttcttcttcccgaagccgctcaatcgaactcccctcgccgaagccgacgcgggggcgcgaccgcgcgcgcgagccccataccacgtacgatggaggcagctctgaagacgtatttcggcttctcggggttccgttcgtaccagcgggagatcatacagaaggtcctggaaggccgggattgcttggtcgtcatggccaccggcagcggcaagtcgatctgttatcaaatcccaccacttgttacaaagaagacagctgttgttgtcagccctcttctgtcattgatgcaagaccaggtcatgagcttaaagcagcatggcgtgaagtctgaataccttggcagcacccaaacagacatctctgttagcggtcaggctgaaaaaggcgcattcgatgttctgtacatgacaccagagaaagctgtctcacttccttcaaggttttggagtaacttgcaggctgccggaatctgcttgttggctgtcgatgaagcacactgcatatcagaatggggccacgatttcagaacggagtacaaacagttgcatatgttgcgtgaccttctagtgggtgttccctttgtcgctttaactgcaacagccacacaaagggtacgtggagacattgccacttccttgaccctgcgcattcctcacattgtggtaggatcatttgatcgtcctaaccttttctatggcgtgaaatcatgcaaccggtctatggcctttatcaatgaacttgtgaaggatgtctcaaagaactgtactgtgggtggctcaacaataatatactgtactaccatccgagagactgaacaggtgcatgaggcattggttgctgctggaatcaagtccagcatttaccatggtagaatgggaaataaagctagagaggaatcacatagatcgtttgttagagatgaagtacttgtgatggtggctaccattgcttttggaatgggaatcgacaagccagatgttagatgtgtaatacattatggatgtccaaagagcctggaatcctactaccaggaaagtgggcgttgtggaagagatggactgccttcagtctgctggctatattaccaaagaagtgattttatgaaatctgatttctattgtgctgaagctaaaagtcaaactcatcgaaaagccatcatggagtccttcatggcagcacaaaaatattgcctgcttgctacatgtcacagaaaattcttgctgcagtactttggcgaagaccgcaccactgactgtggtaattgtgaaaattgcacaaggacaaaaaacgagagggatttgtcaaaagaatccttcttgttgctgtcctgcattaagtcctgtggtggacggtggggccttaatttgcctattgatgttctccgtggatcacgtgtcaagaaaatagttgaaaacaattttgataaacttccattgcatgggcggggaaaagactatccaccaaactggtggaaagctcttggcggcctgcttttagcacatgattatttgaaggagactgtccatgatacatttagatccatcagtgttagtcctaatgggtacaagtttctatccactgctgataaaggggatggagcatcgctgtttttacagctgactgcagagatgattgagctagaggggcatggtggttcacagtgtaaagaagagggcttaaatcctttgggcccatcagaatctgaaaaaatttctgaggatgaattgaaaatctaccaagtactcttgaatgtcaggatgcaacttgcacaagatattggaacggcgccgtacgctatatgtggtgatcagacactaagaaactttgcgaagttcaggcctagcaccatagctaggttggctaatattgatggtgttaaccagcacttcatctcgcattacggcagtattttcatccaaaatatcacacaattggcaaaagaattgaatcttcctgtggatgatttatcggctgtagaaagtatacctgctgctccaaaacctacacaaaataatctcccaaggagtttgggtggcgcgaaattttgttcatgggaattgtggcagaaaatgaagttttcgttccagaaagttgcgcattaccgcagagcagtaccaataaaagagaaaacagtcatttcctacatacttgatgctgctcgagatggatgtgagatggactggagtaggttttgtgaggaggtaggacttacacatgagatagccctcacagatccgtcttgccattacaaagcttggatcacatgaaaagttgaagccaatcaaagatgaacttccagaaaatgtaacttatgagatgatccagacattcttggcaattgagggacttggattgtcggatcaagtttttggtactgttcctactgatgggatccagtccaagacatcagaggcaccaaagaccacctccaatggaggtgaagttggcgcagatgtttgtgatgcaagccctttgacaaggagaggccaaactgatgggtcattgatttgtggtgatgagccagcaagtaaactacaaaagatagacgggcaaggtgtaaattctactgccgcaatcggtgccacagaggatgcaatactagaactggttgaaggacgcaatggggtttcgttggaggatgttgtcaagcacttcaatgggtcgaaaagagaatgtgtcgtcgagatgttggacaatctggaaggcaattttctggtgtacaagaagaatggctgctacatgattatgtgaaattaaagatctgaaggaatgttaccagttggttgtcaatgctagtaaccccatatctaggaacatatacggtctcaaatgatgtatatataaaatttagtggtaatgagtgtaggcttctttccctctttatccgtatgaaaaattcacctgttcatcactaacaactgatctttagttcattcagttttttctgcttgttcagagtttagaaactagtgccgtttggccttgaaggatcatcatatccagtgaccctgattcgttgtagaagaatcagagtctgctcctagcctcaaatatgatcaagtttttttc

SEQ ID NO: 23393 - DNA, 1813 bp, Oryza sativa
  ref <308>: DATABASE ACCESSION NUMBER: AK073505
  ref <309>: DATABASE ENTRY DATE: 2001-12-06
ggtacgtgttcgtgtcatcactgaacgttagagtggacacaacatctcacaatggccgcgtcgacaagtctggcgctcgtgctcgccgtctgctgctgctgctgctacgcggcgtccgtcgccccgctgtcctccgccgactcctccggcgaattcctgcagtgcctcgccgcgggcgtgcctagccagctcgtcgtcacgcggggctcgtcgtcgttcgcgtcggtgctggcgtcgtccgtcaggaacccgaggttcctggcgcccggcaccgtgcggccgctctgcgtcgtgaagcccaccaacgcgtcgcacgtccaggccgccgtgctgtgcggccgccgccacggggtgcgcctccgcgtgcgcagcggcgggcacgactacgagggcctctcgtaccggtccgtgcgccaggaggtgttcgccgtggtcgacctcgccggcctccgctccgtgcgcgtcaaccgccgcgcggccaccgcgtgggtggactccggcgcgacggtcggggagatgtactacgccgtcgccaaggcggacgccgggctcgcgttccccgccggcctgtgcccgaccatcggcgtgggcgggcatttcagcggcggagggatcggcatgatgatgcgcaagtatggtctctccgtggacaacgtcctcgacgccatggtcgtagacgccaacgggaggctcctggacaagaaggccatggggagggactacttctgggccctccgtggcggcggcggcgagagcttcggcatcgtgctgtcgtggaaggtgaggctcgtggctgtcccacggacggtgacggtgttcaacatccagaagacgctggcccagggcgccgtggacgccgtcaccaaatggcaaacgctcgcgccggcggcgctccccgacgagctcaccattcgggtggtcgtgcagaacaagcaagccctgttccagtcgctgtacctcggcacgtgcgaccagctcctgccggtgatgggctcgcgcttcccggagctcggcatgacgcgtgccgactgccgggagatgagctggctgcagtccatggtgtacatcaacggcggcaccagcagcacgccggtggaggtgctcctgaacaggacgaccagcctgagcgtctacaccaagaacaagtccgactacgtcaagcaggccatccccagcgcctcctgggagaagatcttcccgtggttcgacggcgccgccggtgcggggctcatcatcctggagcctcacggcgggagagtcggcagcatcgccgacggcaacacgccgtacccgcaccggtccggcgtcctctacaacatccagtacgtcgcgttctggccgacgacgacggcgacgcccgcggtgccggactggatcaagaacgtgcacgcgttcatggagccgttcgtcaccagcaacccgagggatgcgtacgtgaactaccgcgacctcgacatcggcgagaacgcggtggccggcggcgtgacgagctacgagaacggcagggtgtggggggagaagtacttcggcgcggccaacttcaggaggctggcgctgaccaaggggaaggtggacgccagcgactacttccggaacgagcagagcatcccgccgcttgtctccaccaagtagtgatcgattagatagcaatgcagctgatgtttcttgtgatagttggtgcatatgcgtgcgtgcgtgcgtgtcttgtgtgtgacagattgatagctactggtatacagtatttgtttcgtgttggatcatgatttgtgaacgattgtgtaaatttttaataataatataagatttgaattgt

SEQ ID NO: 23394 - DNA, 3154 bp, Oryza sativa
  ref <308>: DATABASE ACCESSION NUMBER: AK073506
  ref <309>: DATABASE ENTRY DATE: 2001-12-06
ggttgttgttgctcctcctcctcacgccgctcctcctctgctctccatgtctccttggaacctagtactactagctaggtactactcctagtagaaaggacgaggaagaggcagaagaggggttgccgaacgccgccgccgtccagctgggtctcccgccgtgcgattgctgggtggcgcggctggcgttggagccgagagcgcgccgccgccggctggaacgaccaaagaggccccttcggtcgttcctccgtctccggtacccgattcgaggtttaccagtgaggggccatatggagttcagtggaggctagaagttcgcactgacattatcaaaagttctagcttgatttattaaccaactaaccattcatgttgagggcaaagcaactcggcacgctaacccagtgtgcacggtccttctacgttaatgggtcaaggtgtggtagcactgatggagcttcatgcacatgccctgaagatgaaacttctgctccaaaaaggcagacggctaatggtatcgagcagaagtttcattcaactcgcagaccctctgtaaaggctcaaactccatctgtacaacatgttgttggatccattggtcgggccactggttaccctgctccagctgttcatattgttccttccaactcatctcaagagacagagccagcatctggcaacactagcaaccaccctcgaactcctcaggtgctaggaaatgattatgtacagccttctaagcggaccgccagaagcatttctcattctgcaattgcaggagctggtgtgtacactgagttagtaaacctcaagtccacatcaaataatggaggcaccaatcaagcttcacagatggcctctagctattcttaccagcccttgtcggatgcccagccttctaatatcaagtcacacaaccagcatagtcttcctgaggcaaagatgccttataatccttccgtgcaaaataatcttgggaagggtgtatcaagatctggctatgcaaaatcaaaccagagtttttcaggacctcctgctatggttgctaattcaccatcgcaaataaagaatcaaagacatcctggtcagcgccacacaaattatcattctaacaatttcagtacagatgctaggtgggatgaagttcaaacccaaaacttgtcagctccagctatgtatactggttctggtcacaaatctcaggcccttgcgggaacaataaagagtcatggtggaggacctcagtctaacttaagatcattgaagtcattgcgctcagttgaacagtactaccatacactgcagcaaatgaaatggggtcctatgacggaacacgttctggataatctccattgcaagatagatgcattccaggcaaaccaagtactcaagctgcttcatgaccacaccattgcacttggtttcttccagtggttaaagcggcaaccaggtttcaagcatgatggtcatagctacacaaccatgataggcatccttggacaagccaggcaatttggtacgatgaggaaacttcttgatgagatgaacagtgttcactgcaaaccaactgttgtaacatacaacagaataatacatgcatatggtcgtgcaaattatctaagagaggctgttaaagtattcgaggagatgcagaaagccggttatgagccagatcgggttacatattgtacattgattgatatccatgctaaaggtggatacctggaatttgcaatggatttatataccaggatgcaagaagtagggctgtcaccagatactttcacgtacagtgccatggttaattgccttggaaaaggtggtcacctggcagctgcttataagcttttctgtgagatggttgaaaatggctgcacacctaacctagttacatacaacataatgattgctcttcaggccaaagcaagaaattatgaaaatgttgtgaagctgtacaaggacatgcaggttgccgggtttcgtcctgacaaaataacatacagtattgtcatggaagttcttggtcattgtggtcatctggatgaggctgaggctgtgttcattgagatgaggcatgactgggctcctgatgagcctgtatatggtcttttggtggacctctggggcaaagctggcaatgttgacaaggcactaggatggtatcatgcaatgcttcaggatggtttgcagcccaatgtgccgacctgcaattccctactgagtgcttttcttaagataaacaggttccaagatgcctacagcgtgctccaaaacatgcttgctcaggggctcgttccatctttgcagacctacaccttgctgctcagttgttgtactgaggctcaagcacagatgggtttatgctgccagctcatggcgatcactggacaccctgcccacatgttcttgttatatttgcccgatgcagaacctggcggccagaatgtgagggatcacaccagatatttcttggacatgatgcacagtgaggacagagagagtaaaaggggtttaatggatgctgtcatagatttcctacacaagtccggcctcaaggaggaggctggcttcatatgggaggttgctgcccagaggaatgtgtacccggattctgtgagggagaaggacccatcatattggctcatcaacttacacctgatgtcggagggcactgcagtgactgcgctgtcaaggacactggcttggttccacaggcagattctgacaatgggcaaatgccctgaaagaattgacattgtcactggctggggcaggaggagcagggtaaccgggtcttccttggttagacagtcagttcagaagctgctacatctcttcgaattcccgttcgtcaccacgcgaggcaatactggatgcttcgttggatgtggggagccactgaataggtggctgcacaatccttatgttgagcgcatgcatctgctctagagactctagtgactagtgaggttattccagtcagaaataagggactcatctaaacagggtgcagttttgggggaagaatgatgatctggtgcatctgtctagattggtctgtagtctaagttgtagttctctttgattccttatgctttgaaacctcttatttgtgataacatttagagatggcattggtgcattttaagtg

SEQ ID NO: 23395 - DNA, 2033 bp, Oryza sativa
  ref <308>: DATABASE ACCESSION NUMBER: AK073507
  ref <309>: DATABASE ENTRY DATE: 2001-12-06
gtgccgagccagagtcaaccacgcccgcacaacgcgaaaacaccgcgtttcccccaccatttccgcccgaaatcaaccgggccaagaaaaaaaaaaaaaaacagcacaccgccgacgagatgcgcctccacctcgccctcctcgccgcgctcctcaccctcgccgccgccgcccagccgccattccgcggctactactacctgctcgactgcggcgccgcggcgtccaccaccgacagccgcggcctcgagtggctccccgatggcggctacgtcaccggcggcgagccccaccagctccccgaccagggcctcctcgacccggcgctcgccacccgccgtgacttcccgcacgagcccgggaagaagttctgctacgagctccccgtcgaccgcaaccgccgctacctgctccgccccaccttcttctacggggcctcctcgccgccgccgcccgtcttcgacctcatcgtggacggcaccttctggaccgccgtcaacaccaccgacgacgtcctcgccggcagcgcctcctactacgaggccgtcttcggcgcgagcggcaggaacatgagtttctgcctcggcgtgaacccggactacaccagcgctggccctttcatcaacgcgctgcaggtgatccagcttcacgattcggtgtacaacgccacgaacttcactaccagcgccatggggctcattgcgcgtaccaagtttggctccaccgacggtgttgagaggtaccctaatgacaccttcaatcggtattggcagccattcccagacagtaaacatgcagtcagtagtacccacaatgtcacatcggctgatttttggaatcttccacctcctggggtgtttaatacagctttggtggcagaacaagatgcacccttggtgctgcaatggcctccaatacctctccagaatgatagctattatgttgctctttattttgctgatacagtctctgagagttcaaggacctttaatgtatatataaatgattacagcttctatgaaggcctaacagtaacatcagctggtctttctgtctttgcaacacaatggattctctcaggcttgaccagagttattttggctcctatttctggccttcctccacttatcaatgctggtgaagtctttggacttttcccactaggaggatacacatttcctcgggatgcacatgccctggaagctattaagagaagccttcaaaatatacctgatgattggaatggagatccatgtatgcctcatggatatgcttggactggagttacatgtgataaaggccaaataccacgtgtcatctcactgaacttttcaagtatgggcctctctggatatctttcatctgatattgcaaggctcaccgctctgactgatatatcttttgcaaacaatagcttgtctggacctattccaaatctcagcaacctgaggaatctcacaagactgcacctgcaggacaacaaattaaatggaacagtaccgcagacactggggataatcacatctttgcgtgaactattcttgcagaacaatgaactggatggagcagttccactgaacttgctgttgaatcaaggtttgacttaccagtttcttccggggaacaacttttttccaagaccacctcgctgacaatcaggcattttatttgcaaccaattgctcccaactgtactcaacagaattcaaaactaggaggacaatttgtcgattctttgggtggctacaccaagattttgttgccgttctgtacatgaaagcaagtttacagtgtcagatgatttggacctagtcaaagccgttagcaacggtagtgaatagtagaactgattgtacagtttgttgtaggttacattgtcaatatattcaggaggaagggttgtgatacccaagaagtgtttgatgatctttcgggacattgcccttgaaactagaaccggatactgtactgtgaggctgtgaaaggggacacaatatatatggtctacgtctttttttttctttttggtgcttc

SEQ ID NO: 23396 - DNA, 1736 bp, Oryza sativa
  ref <308>: DATABASE ACCESSION NUMBER: AK073508
  ref <309>: DATABASE ENTRY DATE: 2001-12-06
gaaactcctccaatggcgaccgcgcgcgtctccctcatcctcctcgtcgtcgtcctcgccgcctccgcctgcgcggaggggctccggctgccccgcgacgccaagttccccgcggcgcaggccgagcggctcatccgctcgctcaacctgctgcccaaggaggccgggccaaccggcgccggggatgtccccagcgtggcgcccggcgagctgcttgagcggcgggtcacgctgcccgagctcccccagggggtcggcgacctcggccaccacgccggctactaccgcctccccaacacgcacgacgcgaggatgttctacttcttgttcgaatcgagggggaagaaggaggatcccgtcgtgatctggctcaccggaggccccggatgcagcagcgagctggccgtcttctacgagaatggcccgttcaccatctcgaacaacatgtcgcttgcttggaacaaattcggctgggacacgatttcaaatataatttttgttgatcaacccactggaactggatttagctatagctctgatgatcgtgatactcgtcatgatgagacaggcgtcagcaatgacctatatagctttcttcaggtgttctttaagaagcatccagagtttgcaaagaatgacttctttataaccggagaatcttatgctgggcactacattccagcattcgcaagccgggttcaccaaggaaacaaagcaaacgagggcattcacataaacttgaagggttttgcgatcggtaatggcctcacggatccagcaatccagtacaaagcttacaccgattatgcattggacatgaaccttattaaaaaatcagattacgacaggatcaacaagttcatcccaccatgtgaatttgcaataaagctttgtggtaccaatgggaaagcatcttgcatggcagcatacatggtctgcaattctattttcagctccatcatgaagcttgttgggacaaagaattactatgacgttaggaaggaatgcgaagggaaactttgctatgatttctcaaacttggagaagttttttggagataaagcagtcaaagaagcaattggagttggcgaccttgaatttgtctcatgcagcactactgtttatcaagcaatgctgacagactggatgagaaacttggaagttggcatcccagctctacttgaggatgggatcaatgtgcttatatatgctggagagtatgatcttatatgcaattggcttggaaactcgaggtgggtccactcgatggaatggtctggccagaaagactttgtatcatctcatgaatcgccatttgtagtagatggtgccgaagctggtgttttgaagagccacgggccactcagcttcctcaaggtccacaatgctggtcacatggttccaatggaccaacccaaagcttccctggaaatgctgaggagatttactcaagggaaactcaaggaggaatggcttgccgagcttcctgagcaaccgatgtatgctgcgatgtgataaaaatacaactgaaatagtctaataggtagtttgagttgccgtttcacggagtgcctgaagcttcatgtttccttttttaccctctttctttttcccaatgtatcaactgaatgcataattctgaaaataacgttggaaccgcgatgtaactaaagttccactcatgtacactgcaaatgaaaaatcaaatacatggaggggaaatgtttcaaaggccg

SEQ ID NO: 23397 - DNA, 639 bp, Oryza sativa
  ref <308>: DATABASE ACCESSION NUMBER: AK073509
  ref <309>: DATABASE ENTRY DATE: 2001-12-06
gggcgataagaaaatgtcgttaggttctctcctagtttctgaagattggttgagacagcataaacaagttatattctgaacagccaaggcagcattctcgcatagctagcctcttcagactttcagagagcggtagagaggagagctgccgccatggggaggccgtcgtcgacggagaggctggtgtgcgtcgtcctggcggtgctcgccgtgctctcgccgctgtacatcgaccggcggcggccggcggcgtgggacagcgacgacgacgaggagggcggcggcgtgtcggcgctgctgctgccggcgctgctgatcgtgctgatcctggccatcaacgttacgtgcttcgtggaccggagggtggtcaggttcgacccctactggatacaccgcgtcgggggctcatcctgcggcctcatggccacgctgctgctgctcggcttcgtgctcaagtgtaaggcgtctctctagagctagagctagccacacctctgggtgtgtttggataatgggaaagagggtgggattgggattggaaaatgaacgaagggattggattaaatggaagagagagaataaatggctaggatttaaagataccttttgatgggtgggaaatcatttccctatcacatt

SEQ ID NO: 23398 - DNA, 2561 bp, Oryza sativa
  ref <308>: DATABASE ACCESSION NUMBER: AK073510
  ref <309>: DATABASE ENTRY DATE: 2001-12-06
gaatcggcccaaggcccatctctcctctacgtccggcggcggcgcatcccggcctcgcgctccggcggcggcggccagtctgaggcggagcggcaccgcggcacgggagggcagggcgcagcggcgacggcgaggaagccaaccgggcgcggcagcaagggagaccgcgtcttgtctgcacggctccattagcggctggaggtgggactggagccgggagacccaactagcgtccaccgcctctccgccaccgccgccgccgcctcccgcaacttagggggttttgctgcgccggcgcggctccaatccgctccggggcggacctcgccggtcgacggccgccatgggcttcgcgcgcgtggagctgcggtgccctagggcactcgacccccgcccgagctggaccctcggcgacgtcctcaccgagctcgacgcgctcgaggccactcgccgcaccgcgcagcccacgcccctcaagcagccgccggagtgggctagcagtggcagcgtgagggagaaggcctttgtgatgcgggttgaagaggaagatgacacggatgaggacgattacgacagtgatggggagtcccgggctcttgtggccaaggccactggagcaaggttctcatgcaatgatcttgaatccagtgatgctgaagaatcagaggatgaaatggatggcaggattgcaccatatcacctgatggagaaacggagcctagagaagagcattctgcttgagctggaacgtgagcatcatctgaaagttcaagaggaagtcagaagtaaactatctgcattggaggtatgccaccaaagtgaaatccagcgaacagtttctgcatttgctcgactacagaaatacgcagaatcaagaaaagagatagacagaaggctagatgtccacttccagagaaaaattgcagaagtacttgataaacatttgtctatggtccaaagggatcatgaacagaaatcgcaaattgtggaacgtagaataagagatgatgctgctcttgaagaagctaaaagaaaggagcaagccatgaaggacgaaaaaataaggcaggaaagagccaaacaagaagcagaggccagacagaaggcagctgcaaagttagcagtggaagcacagaaagcagcagctgaggctgctgcaaaggaagcagcagaagctcagaaagcagcagctgaggtttccaaatccagccaaaattctcagaacaacgttgcaggaacaatgagggcaaacaagagtgaaattaaatctgaattaccagggatcaaagtctttgctgatcattctgcactggaagcagaattgcggaggcgtgcattacttgatcaagtgccagcgaacattcattccagcaaggagttcagcagatatgaccgacaaattgcaaaatctattggtaaacttatgccgactactgacagtgtaaaagcaagggctggtgagcttattaaagctttggatggacaggattgcccacgtccaattgcttgccgtatatttgcaaacaagattatttcaatcgtcaagagtagaaatacaaaggacaaaacatttggaaatttggcctttgcttgtggatatgtcatgcttctagtcaccagccaggtaccagatgcaatggattatcttctagctgagttccacagagtttgcatgtacacagttccaaagcatctgcatgctttaaacgcacaagtacggaatagagattattacagactgattggctaccaggaagaaaatggacaactcgagagcactgaaagttatttgacatatgttgccgcatacgtcaagctgtatgctgcaatgattcagaccgaaattaggggcgtgcggcatccacatggcttagctgaggggtggaaatggcttgccatgttccttaatactctcccggccaccacagcaactgcttgtgcccttcatgctttcctcaaggttgctggttttgcacttcacaagaaatacggatcacagttcatgaaacttctagatgtaatattgcggtgcttcttacccgctttgaaggaacaaggctcacgaattcaggctgaggctgcaagtaatctacagaattatctgactgacaaggtttaccttgaggaaccagaaggccagtaccttgcgcaacagcttctatctaaagagttgttcacgtgaggatcagacaccagatcagcatggcgatgtggcactgcacactggccaagtttgtcaccgcggttagcaatggctgttgccagataatgctctatgtgtgcagcaagacatttcatactgtccaaatggagcaacctgcacggttatatgatggcagagaaggccagaatcgccctgaagaaatgtcttggattgcgcccccaaggtctccctttttaagccaccaattttaatgtataaatgccatgtacgaatactatagattagatgcgatgcaatttgttgtacgcctgtattgagggcgagcctgtaatttattcgaagtaaatgttactctggacatgtgctgtcttatataatctgttgtacgcttgttgcc

SEQ ID NO: 23399 - DNA, 1259 bp, Oryza sativa
  ref <308>: DATABASE ACCESSION NUMBER: AK073511
  ref <309>: DATABASE ENTRY DATE: 2001-12-06
gggcttcactcgtcttccaatccttcttcctcctccctcctctcctctcctctcctgcagcagcgcccaccgccatcggagcctcgccctcgcgcggccatgcttggtctgaggggagccagggcggcgcagctcccgtacgcttccgccgccgtcgctcccacccccacgccctcgttttccggcttcgcgcgccgcctcccgctcctcgcctccgcggccctctcgcctctgccgccctccttctccttctcctccgcttccgccgtcaggagggatagggaccctcccatgcgtcccgtctccggcgccctctccaggtccaggccaaccaccagggttttctgctctgcggctgctactgctcccagggagggcaaggagttgcttgtccagcatctgctcgtcggcgaacaggatgtcaggcttttggtcgatcttgaaaagaacatcattacaggaggtgcagacttgagcgatttagctgtcgagtactctttatgcccatcgaaagaaaatggtggaatgctggggtgggttcgaagaggacagatggttccagaatttgaggaagcagctttcggtgctcctttgaacaaggttgtacggtgtaagacaaaatttggatggcattgttgcaagtgcttgctgagagagaacaatgcgtagtggaagacattccaccagaggagcttcatgcaaaaatgcaagatcctaactttcttgaagaagctcagttgattgatgttcgggagcctgatgaagtagataaagcttctcttgaagggtttaaagttctacctcttcgacagtttggaacttggggaccagttatgacagatgaatttgatcctcagaaggacacttatgttctgtgccaccatggtatgcgctcaatgcaggtagctaaatggctgcaatcacaggggttcagaaaagtttacaatgttgcgggtgggattcacgcttatgccgttaaagccgattcttccatcccaacttactagacatctccatgatcaccaatgcaacgtcagagccttttctacgtgttcgtttttcaggccaaaccaaaagcatgcttagtatagaatgataggattttccacgatgattttgtacggaatatcggtaccagaaattcagagttaagttttgtcgttctcatgctgctgtcatgtactagcagttctcttgaaattttatatggaggatatatcacttttattagtttgaatacaagggaaatacctgggagg

SEQ ID NO: 23400 - DNA, 2019 bp, Oryza sativa
  ref <308>: DATABASE ACCESSION NUMBER: AK073512
  ref <309>: DATABASE ENTRY DATE: 2001-12-06
gaaggagttcttgaagttgctaccttttacttggtctctgaaggaggagtatgatcaggctgtgggtggtggtcacatggctggttctttgggccgcagctgcggtgcaccccggggagcagccgctgtcgaggattgccgtcgagaggatggtccttgccgtcaacgagtcggcacatgtcagggcgtcccctttggttcttgggctgaagggtgagaccaatgaatgggtagaggtagagttcttcaatccaaacccctccaatactgactgggttggagtgttttctcctgctgattttagttctgcaatctgtgaggcttatggtgttccacagtattacccaatgctctgcacagcacctatcaagtaccaatatgcaaacttcaataataatggttatagtaagtctgggaagggcaaactgaagcttcagttgatcaaccagagggaggatttctcatttgctcttttttctggtggcctcgagaatccaaagctggttgctgtctcaaacaagatcgcatttgcgaatccgaaggcgcctgtttacccacgtttagctcaagggaagtcttggaatgaaatgacagtaacttggacaagtgggtacgattttaaagaagcagttcctttcgtcgaatggggcgcgaaagggggacaacgggtcctttctccagctggaacattaacatttgacagaaatagcatgtgtggtgcaccggcacgaactgtcggttggcgccatcctggttacattcatacaagctacttgaaagaactgtggccagattcactgtatacttacagacttggccataggttaccaaatggtactcacatctggagtaagtcatacagcttcaaagcatcaccttatcctgggcaagattccgttcagagagtagtcatatttggagacatgggaaaggcagaggcagacggttcaaatgagttcaatgacttccagccaggatcattgaacactacttaccagatcatcagagacctgaaaaacattgacatggttgtccatattggggatatttgctatgcaaatggttacttgtcgcagtgggatcagttcactgcgcagatcgagccaattgcttcgactgttccatacatgattggcatgggtaatcatgagagggattggcctggaactggttcattctatggaaaccttgactctggaggagaatgtggtgttcctgctcaaactgtattctacactcctgctgagaaccgtgcaaaattatggtatgcgacagactatggcatgttcaggttctgcattgctaatacagaagaggactggaggccagggactgagcagtacaagttcatcgagcaatgcctatcgtccgtcgacaggcagaagcagccatggctcatattccttgcgcaccgagttctcgggtactcatcctgcaccttttatgaagaagagggtacatttgaggaaccgatgggccgagaatcactacaggagctttggcagaagtacaaggttgacctcaccttctatggccatgtccacaactatgaaagaacatgcccagtctatcagaataaatgtgttgttagtggttcagatcattacagtggtcctttcaccgcgacaacacatgtggtcgttggaggtgctggtgctggtacctccgactcagaattcaccacttcaaatatcaaatggagttactacagggactttgactacggttttgtcaagctcacagctttaaatcattcatccttattgtttgagtacaagaaaagcagtgacggcaatgtgtatgatcatttcacaatctcacgtgattaccgagacatcctggcttgttcaattgacaactgtcctcggaccacactggctacctaaagcatgaacagttctagacaggtttacaggtagattgattgacagggcctcaaagagcaatctagttcctgtacaaagtcttttgggactattccaataaatcataataaacacggaattttcttgactgcgt

SEQ ID NO: 23401 - DNA, 1033 bp, Oryza sativa
  ref <308>: DATABASE ACCESSION NUMBER: AK073513
  ref <309>: DATABASE ENTRY DATE: 2001-12-06
ggcgaaattcccccccaccattgccgcggtcgtctgctccgattccgctcgcggcagggatccctaccgctctcgtcgccgtcgccgtcgccgtcgccgacgagatcatccgccgcgatgcctcggtactattgcgactactgcgacacctacctgacccatgactctccatctgtccgtaaacagcacaatgctgggtacaaacataaggcaaatgttcgaacctactatcaacaatttgaggagcagcaaactcaaagcttgattgatcaaagaattaaagaacatcttggacaagctgcagctttccaagttggtgctcctttcaatcaacatcttctctcatttccaggaggtgtgcctcgtcctcgtcttccaattctgccaacacctggcatgccacttggtgttcctcaagtacctggtgcacctttgatgccaggcgttaggcctcctattttgccagctcctggtattccaggttatcctggtgctccaaatgttccaaccatgccacaaacaggcgccccacctggttccatgccgcctggctctatgccacctggttctatgcctatgcagatggcacctctcccaaggcctccgacactaccacctccaacatctggagccccaggggcccccatccccaacagtggggcacctccagccatgtatcaaacaaatccaccgcaacctgcaggcccaacttctggtgctccacctccggtttctgctccacctccagcagcacctccacaggctcctttctcctatgcacaacctcctgagggcaaccactgattgtgttctttgggcttttatttaagaagcatatgaagtatgcccagtctgatccattggaatatgatgctgctatcgtttaaatgagatcaactgtcacttaatttgagggattgttgaagaaggcttcttgtaactgtatctgtgcatctggtgatggtattttagatatgtaacgttaattttgtaatctgctgaagttagtattgatttcagaacacatttacct

SEQ ID NO: 23402 - DNA, 1129 bp, Oryza sativa
  ref <308>: DATABASE ACCESSION NUMBER: AK073514
  ref <309>: DATABASE ENTRY DATE: 2001-12-06
gccgcctccttccatcccctcccctcccctcccacgcgacggcggcggcggcggcggccggagcgcgcgcctccttcccaccaccgggctccatctcgcctcgaatcgaagggtagtagtagtagtagaggatacacgatgcagtctctgctgcggcgcgtctatcttgccggaagccatggctccgcggcgaagctcttggaccgtgcagcttctggagtcgcgcagtcgggtgctaacctgctgtccatcaagcacctgagttcttgcagctggattcgtccatttgggaactcaatcgtctccggtgatagtgttcattcccatgggttctgcgtgaataccatgccaatgaggggtctatcaacagtggggagtgctgaggtttctgtcgaggaggaaagttctgactctccaggagtcgagcatcctccgcgcatcaagtttaagaggcctgacaagacggccaggcacattatgaatatcttgaacaaggaggctgttgacaaggtccgtggggaaagagagattcctgatgtgcagcctggatgtattatccaaatgagattgcaagttcctgagaacaagcgtcgtgagtctacgttgaaaggcattgtcataggaagacgtaatgctgggatcaatacaactttcagactgcgtagattagtagctggtgttggagtcgagtctgtctttccactttactctccaaacatcaaggaaatcaaggtcttggacaggaagaaagtcaggagagcaaagttgtattacctgcgggacaggatgaatgcacttaagaaatgagactgctttagctccccttttatttttttttagttgatctgcaaggtttcttgtgacataaagctttcagttcaggatgcacattttgttagttccatctcctaaaagctactgtttgtatttctgatacttggttctttcaagtacacaagcagtgcaggcagcaatctgctcccgtggttctgaattgacagcgttgatatcttatattttatgttgtaacctctttctgatgatagaaatgaccacatatcaagctccccgcattaaagacttgtttgtgtttaagataaaaatagtttgaagcttagttcttcaaagc

SEQ ID NO: 23403 - DNA, 2340 bp, Oryza sativa
  ref <308>: DATABASE ACCESSION NUMBER: AK073515
  ref <309>: DATABASE ENTRY DATE: 2001-12-06
gggcgcctcgccctcgccgtcccctcctccccccgtcgcctccggtggcggcgcctctcttggtcgccgccccgccggtactcatctcctgcgtcagatccgtcgcatcccacctcgtctgcaagatcccacgttctccttcgccgccgagctcgacaaccgtctcccaaaaccgcggcggaagcatccgatggcgggcgcagcagatccaccgcacaataccgcctccttccgccatcgacgagccccccgccaagtcaccggcgcgcgcgggggggctactgaacggccaccgcggcctgcatctgtggcggtcagctggagatcgagcacatttgatttcagtgctcatccggccttagcaagcaaccatgagttatttcctgttcctttccatgttcgtactgcacaagtgcaaattgtgaactgaaggagaccaataatgcaaaaggtctggaggatgcgaacgaatggttcgatctaaaagagtatcaaaaaaagaatgcaaattgtgtctgggtagaacattcatggagaatctgtacatttggtttctgaagaagcaccctgctagtgctagttggtattcagagcgacggatttacaaatgggacaccagttcttctgccggagccagttctttatgcaggagaagtggtagtaatgtttgcagaccatcttgcccacctcctcaccatctgaatattcctcctgaagaatgcacacagaaagatttcgtacatagtagtcagtacaatccaactctgcaaacagtgtcatgcgcaatctactcatgcaaatgaacttgcctggcatatgctgcattttctctcacaatcttcatgagttcctgaagtagtggccatgtacatgcttctgtctagacacttggacagcgcgtcttctgaaaggccagtgcttacggtgccaattctatctcccaatgctagcaattcctacagtgcagagcatcacaaatgaactgagaagtgaaaacaagtcatgaaagatgaaagatgctgcagaatgaaatgtgcgtgagagagagatgtcaagaaaaaatgacaggtagtagcagaatcctcagggaaacataactagcatacctcataagacatgccgtcaatgtccattctcatccctctgtaccgatcattgaatatgaagtagttctcaagctgcgagacagaatataactatgtgagcaccaaaatggattgcacataattcagttttttcactgtaccaaagctagctcgcccgcacataattctgcaaatcccttggatggacactgtgatgtgcaacaaaaggaatgatctttacctcttcacttccttccatattgaagcgccagtacccatttgcatcctctatgctgtcgtccaaagatgaaagtagtccctgatgattacttctgtatcttgccaagaatccagatatgaatccttcagtgctatctcttgctgcctgctcaactagcaagaaatcatcgacatccctatctgaattcctcctggtatctccactgctgtctctgcgtacatttacagctcctgcatttgcaccttcatctgccttccttattcgggaagctgcccgatgcgacggtcttgagactgtgcggctactacttgaggaagtagcacttaatccatttggtgatgatggactgttttctctgttcaatgatcgttttcttgatgcattgaccctctctttgagacgagcgattaaatcacgccctggagtttctcttggcctattgtcgttttcgctataggagcttgctgcattcctgctgatgttatcagtagcagtacttccctgaggagtcctcgtgctgggtttcctgaaaatctgtgatctccgaggggtttctgatgcttccttggctgctgttgctgccctgtgtgtttgcttgtctttgccggccaaatgcttgctgctgcaaccgtgtcgcgtgcagcaattggtggccttgtgacgcgcactgtcttctctgaagagaagaattgagccccccttggtgaagagaaggccaccaactgtccgtcttcccatgtgatcatccatgttagatgttcacctgaaactggaaatgactccatggagtcagatatcttttattaactggaaataactccatgatcgaactgatggagtgtatttatgttcaacatataagcatggtaaattctggtagcgcgttgttcttctggagaaaagaattccggtaacaggtaatgaaaaaatttcaaactactgccaacgaacctgtgatatggacattctggtgcgttctatgatccattgtctaataaatatacaactttgacc

SEQ ID NO: 23404 - DNA, 752 bp, Oryza sativa
  ref <308>: DATABASE ACCESSION NUMBER: AK073516
  ref <309>: DATABASE ENTRY DATE: 2001-12-06
tgatctctcctctcccttaatcatgggtggtgtgcggcggcaaggatagctgaggtggcaaagctcgtggcgcgtggcggcggcgcgacgggggcttgcggcagtggcgcgcgggcggctcacggccggatccgccgctgacgccgacggtggaggtcggatccgccgccgcgatgacgttggaggccggatccgccgccgcgacgaagggggaggccgacgaggagggttggtgcggatccgccagcgtcagtgctcgggctgtccttcacggcggtgaaggaggtggatccagcggtggacgacgacgacggctcccgcgacgacgaagacggctaccgtgacgatgacaacgatggctacggcttccttgcgacccttcttgctcgccggctcgccgctgtaccgccacaaggtgcctcaagggaagcccgcttgtgatgatggtgatggtcgtcgccaccgccgtgtggaagttcatggcgttcctgaacaaggcggtggccacggcgaggtgtcgtgggtggcggccaaggaggtggtgcagctgtagcgattggaggaggacgccggagtttacgctacgtcgagtcctccatggatttgggattttgggattagggattggggattttggggttttttttttgcaggaatgtgaattgtggatttgggatgtgaattggggaatgtgaattgtggagtagattttgaaacgagaacatgaagtttgaaatttgatttgggatgtg

SEQ ID NO: 23405 - DNA, 2636 bp, Oryza sativa
  ref <308>: DATABASE ACCESSION NUMBER: AK073517
  ref <309>: DATABASE ENTRY DATE: 2001-12-06
gtctccgtctcgctttatcttcgattctccgtttgcgctatcgtaacccttgtttgcgaagagaaacgccgttcccggcggaggcacggccggaaaacttccgccgcctcgcctcgctccggcgcacgtcgccggcgacgaggggccgggggcaaaccggtggtcggtcggcctgctcctctcctccccgcccgtgcgccttctcccctgctgcccgcgagcaggtgcgaatcgaatcgaatcgaaggtcaaccacgatgaagaagcccaacgtcgccgccaaggtcaaggcggccgccgccggtggggcggatggggggtcgtccaaggggagcccttccacccctgcatcgctcagggtgactaagttggtcaaggggaaggcgaaggtgaaggcgaaggctagccgggagaaggctgctgcgccagccgctgcggctggtaaagaggccgcgtccctgggtgatgctggtggcaatgctgatgcatcgcctgcggctccggctttgcgaccggccgcggtggctgatgcggacggggcatccaaggggagcccttccacccctgcatcggtcaagaagacatctaggttgaataaggtgaaggcgaaggcgaaggctgcagcagctgctgccgcttcagggtccccatccgttggtgctgctggtggcaatgctgatgcatcgcctgcagccccggctccgcgatcagctactgtggccgatggatcagcagctcgggtgatatcgacgccagcggcagctacggctgaagcatcaacgccaaagcgaaggctaaagctaaaaccaaagctggctgaggctaatgctaatgctaatgctgtagttgccaccaagaatggtgtaggtgctgataacaacgatggtgatgccatcaagaagagaaaaagagagattgctggggagaggactagcaatgtgaaggaaaggaggaaggaggaggagggaagcaagaaggaagagaggcttgacagtaagggaggagggcttatattcatgtgtaatgcgcagactaaaccagaatgctttcagagccgcttgtttgggtatcccagagggaaaatcggaatagttgagaagatccgaccagggatgaggttgttcctctatgattttgacttgaagctactttatggggtgtacaaggcagtatcaaagggtgggcttgatcttgttcgagatgcattcagtggaaaattccctgcacaggtgaaatttaagatagataaagattgccttccacttcctgagagcagatttaaggatgcaatcagagagaactatagtgcaaagagcaagttcaatcccgagctcaactctagacaagtccataggctaatagctctatttgagtctgtgagtgtacctcaaccagctccacagaagcctcttggagagatgcaccactatgaaggaaaaacacagccacatcaatatgaagaaagacgatcttctttgcctgtcatgcatgttcctccccctaaagacttatacagggcaacacgctttgatccacatccagtggattataggattgatcattctttgtctaatgctcatgatggtccccacatacattatcagcaaacacttgttgcacgcgagtctcagcgtgttcctcttgacatagagcctcgtcttgtgccgcatgccctagagcctcgtcatggcccttctatcccagagattcagcatgttccacatgcatactaccgccatttggctccatctgatgttccatattatcgttctcaagtggatccactgcctgatcgtgttgctgccagaactgtggctgatccatttctttcaagagattatacagcagtcccagccacaagatctgatggtgctgcccgtgttgaggaactcaggcggataggggatattgcttcacttggtgctcgggtggaggagctctacagtccaggagagcttgctgctcgcggttctcgtgtggaggagctctaccgtccaggagagattgttgctcgtggttctcgtgtggaggagctctatcgtccacgagaggttgctgctcacagtgctcgcatggaggatctgtatcgtccaggagaaattcctatccgtggtgctcgtgtggaggatctgtaccgtcctggagaaatttctgctcgtgctgttcgtgtagaggatctttaccgttctgaccaacgcatcactcatgctgtggacctccctctccacgcaccctatccaacagctcattatgaggtccccaatcccgcatattctgatatcagtcaaaggtatgcctctacaaggcttaatgcacctggtgcatcggtttcgtctctctattcctttcctggcgcgccagcgtatcgatgattggtactctgaatttaccatgtttttaccctgagccggttatactgctagatgcatcggtgccatttagaagttgtccaaaccttaggaaacctggatggttgtcacagttcctgtcactgtggtttgctttacctgtattttctgtcctcgttgatctgctccctgcacaaatgatgtcctggtccaaccttgttcacccatgctgttgaattgtgctgcaaagttatatccatgaatcttaagctcatctttttgtttgcg

SEQ ID NO: 23406 - DNA, 2666 bp, Oryza sativa
  ref <308>: DATABASE ACCESSION NUMBER: AK073518
  ref <309>: DATABASE ENTRY DATE: 2001-12-06
gccttcctttctctctcgagccttcctcttcctcttcctcttcctcctctactccacctcccctctcgccactccagatcgattccccccccacctcgcccgcgcgaattccccgctccgatctccgccgcctccctcccagcatactattagctctcctgtgaaagagaagaattgagaggtttctttaacatcaaggatgtcggtttctatgaaggatttggatccagcttttcgtggtgctgggcaaaaggaaggcttggaaatatggcgcatcgagaacttcaagccagttcctattcctgcgtcttcatatggaaaatttttcatgggtgattcttacatcatcttgaagacaactgccttgaaaaatggttctcttcgacatgacattcattactggattggcaaagatactagtcaggatgaatctggaactgcagcaattttaacagttgagcttgatgctgcacttggtggacgcgctgttcaataccgagagatacaaggcaatgaaacagataagttcctctcatattttagaccatgcatcatgccacagccaggaggagtggcatctgggttcaagcatgttgaggtcaatgagcaggagcacgaaacccgtctgtatgtctgtacagggaatcgtgttgttcatgtcaaagaggttccttttgctcgatcgtccctgaatcatgatgacatatttattctggacacgaagtccaaaattttccagttcaatggctccaattcgtctattcaagagcgtgcaaaggctcttgaagtcgtgcagtacatcaaagatacatttcacgagggcaagtgtgaagttgcagctgttgaggatggcaggttgatggccgatgctgaagctggtgaattttggggtttttttggtggctttgcccctctaccaaggagagcccctgtagaagataatgagaaatatgaagaaactgttttcaaattgctctgttttaaccaaggaaagttggagcctatcaattatgaatccttattgcacgagttgctcaagacaaataagtgttacttgttagattgtggtgtcgaattatttgtttggatgggcagaaccacatctttgcaggagaggaagagtgccagtgaagctgctgagaaattgctctctgatgataaccgaacaaaaacacatgtaatcaaagtaattgaggggtttgagacagttatgttcaagtcaaaatttaaagagtggccacagacacctgacttgaaattgtcatctgaggatggaagaggaaaagttgcagctcttctgaaacgccagggcttaaatgttaagggcctgatgaaagctgctcctgcaaaagaagaaccccaagcttacattgattgcactggcagtttgcaggtctggcgcataaatgataaggacaagatacttctgccatctgctgaccaatcaaaattttacactggcgattgctacatatttcaatatatgtaccctggagatgacaaggaggagtgtcttattggaagttggtttgggaagaagagcattgaggaggatagggtaactgctatttcacttgcaagcaagatggttgagtctgcgaaatttcaggctgtccagacacgactatatgagggaaaagaaccaattcaattcttcgtcatatttcaaagcttccaagtgtttaagggtggtctaagctctggatacaagaaatttattgctgaaaatggtattgatgatgacacttatttggaagatggacttgcgctcttccgaattcaaggttcaggaccagaaaacatgcaggcaattcaagttgatgctgcggcatcgtctttgaattcatcctattcgtacatcctacatgatggaaatactgtattcacttggactggaaaccttactacgtcattagatcaagaggtagttgagaggcagctagacataattaagccaaattcgcagtccagatcgcagaaagaagggtcagaaacagatcaattttggagcttacttggaggcaaatctgagtatccaagtcaaaagataggaagggcaaatgaaagtgatccccatcttttctcatgtatcctacccaaaggtaaccatgaattgaccattctattataatttattcagttcacattgctcttcgagttttctgatatatatctgctcttctattctgccaacaacacctattggggtctctgccacctgtctccagaagagcttactaaggcattggagatggttgcacaagacaaccctagcttcgaagctaaaggagacgaactggaacttgatatggatgctcagagtgagacaaccctctggaggttgaaattctttgtgagggaagcattggaacgacaggccaacgtcgcttctggcaggactgatgaaaatgcgaaaagaaagagggagatatgcaatgctctggccagaactgcttcaaaaagagtcaagcagcaacctaattagtggcctctgaccattgtgcatttgtgtcttcacttgttgtttagaatgtttctgagaaatagccttgcaaaataatctcttccttctatggagcatgtaaataactagtctctgcttagctgtgtggggttgcaacaatagcgaaatgtttcccaaaaaaagggtcttatgttccacctgt

SEQ ID NO: 23407 - DNA, 3161 bp, Oryza sativa
  ref <308>: DATABASE ACCESSION NUMBER: AK073519
  ref <309>: DATABASE ENTRY DATE: 2001-12-06
gtcaagcaaaacccttcccttcctcggagagaaggtatcggcggcgagattttcctccctctcgccgtcgccatgggcggcgcctccaagctgctctcctccctcctcctcacctcctcgccgctccgcctccgcccctccgccggcgccttcgcgctcttcctctccccgcccgcgtcccgccgccacctgctgctctcctccccggctcccctccgcaccctctccaccgcctccgcctccgccgccgccggcggagcctcttcggattcgtacagctcgggctcgtgccactctccttttcccgagtggtcacgcctggtcgaccgcctctcggcggcgggctacggcgcgcgcgcaccttcccccgccgatgagctcgacctcgaccccgaatgcggcctgtcgtccgacgctgaggccgcggtgtcctccttcctcgccttcgcacgcgaccggcctgacctcctcaggtctctgccgaggaaggacgtggaggtcttggtggccaacgcggcgccggctctgttcaaggacggggaggcatcagagctgcgtctgcggcaataccttgccggggaagggagcgatgtgactcagtcagagagagcggaaaccatcgatattgttcggtacttattaagttacgcatacggttctccggtcagctatttgaaagataaggaactgactgattcagctgtgagaaatatcttggctgagtttgtaagttttagtggatttcctcaaacctccagttacgccgaatcaacagctaggcaaaatacattgggctctaggcctccaggacaaaatattgaaatgaagcgaggtgactggatctgtacaagatgtagctttatgaatttcgctagaaatgcgagatgccttgagtgcaatgagcatcgaccaaagaagatgttgactggtggagagtgggaatgccctcagtgtgtgtattataattatgggaggaacatgtcatgcttacgatgtagttgtaaaagaccaggaacaataccaccaaatcctgctggtgctggtttagatggagtggcacagtttcttaatacatccattgttggtaaatctgaaattgagagaaaactcgctgaaaatgaccagaaggcagaaaggtggttgaacaaagtatcccaacttgatgattctgctgatttaagtagtctagcagccgacgaggattttcctgagatcatgccgattaggaagggggtcaatagatttgtggttagcacacgcaagacaccattggagagaagactggcaaatgcacagtacagcagtaacaatagcccccaagatggatcatctgactccaagataagtaaaacattagacaggattcttgggcgttctacatctacttcggtgcagaacaatcaatctggtgatggagatgtaaatactagttcaaataaaacaacaagcaatcttggtggcattgatcctgttcctttcgtgccattatctgcagatcagtttgctaagccacaaaatagttttggtgatggacaatcagacacccaaataagtacagaggctgattccatggcaaaaagccaaatggattcaatggagaggagagatgacaagcgatcatttggtaccactgaggaatggtccaagaaagttgcagagctcagtaatgtaaaggactttccaagtgcaatttctgatcaagactttcctgagattatgccaatgaggaaaggtgagaatcggtttgttattagtaagaagaaagaccgctcactgacatcgccacagtacaaaaggcgcagtgtgctcgagcatgctgataattccaatttcatcccatttgtcccattccctcctgattactttgccaagaaaaataagcctgtggagaattcatcagatgcaggaatagtgccagaaggccctccatcagctgaaaaattaccagaaacaaaatattcatctggaaatctgggaaattttcagaacagctcacaggtgatgggcagtcaggcagcaaacaacatgaacaatgagaacaggaacggaaattatccacatcaaaacttgagtacaagtggttatgggtatggtgaaagcatcacttatcagcatcaaccacaatctcaagggatggtcggtcgttctggtggtgcttctgaaactggcactcggaatgcaaacaacaaccagggaagctttagcgaaagcagagatagatctacttacaacaggggaagccattccgcacagccaccttataagtcaggttatggtaacaataacaatgcttggagcagtaacaacaatggcagcaataatgcttggagcagcaccagagattatgacaatggtggtcggagcgacaacaatccctattacaacagcagtacttggagcagcaacagcacctatagcaacaacgctgcctggagcagcaatagcagctacaacagtaacagcgcatggagcagcaatagcagttacaacagtaacagcgcatggagcaacaatagcaacaacagttggagtggctcatactctgataatggcggcaccggtagtggcagttccgcatctagacctaaccaaacagcaggctactcaagttacggagaaagtgcgaatagaggatatactggaaagagcttggaaggatctgcagtgaaggatcctgatccattggatatgtctgaggaagctaaggccgagagatggtttaggagggcagcacagataaaggacatctccgagctcgccaacatccctgacgaggacttcccggagataatgccgatgaggaagggcgtgaacaggttcgtcgtcagcaagaggaagacaccactggagaggagattaacatcacctcagtacagaagaaacctgcctatcgtaagttctgaaccgaacgaagacgctaactaaaaaaaaaggtgtggttacgaaatttccagtgcaacagcgaggagttaaaacaccaagggcattctttacagcagttttgtgataataagccagcacaagacggttctctgtattgtaaaatttttgttctgaaccttccatttattttgtacttccagggaatccatgttgtatatgaaaccttcgatactgaaactctgcatgacactgttgaactattacttttctgcggcttc

SEQ ID NO: 23408 - DNA, 2281 bp, Oryza sativa
  ref <308>: DATABASE ACCESSION NUMBER: AK073520
  ref <309>: DATABASE ENTRY DATE: 2001-12-06
gaagttgttcccatctgatctgatccatcatccatctcaatgtgcagcagcagcagaagcagtgtattattctgttgttaggagagaagttcagagaagtagtagtagtccctataagaaaggggaaagaaaaaaaaaagaagaaaccctatccaaacaaaaacaaagggaagagagaagaaagttggagacttggaggaggaaccctccaccaccagcaaagccaatagagggatcatccgccgtaatctatctagccatcaatccatctccctctcctcctctgctctccatgaagagcaaatcctccaggaaggccgccgacgaggatgaggccaagtccaagaagctccgatcctcccgcggcaagcagcggcctaagcagcgccggcgaggccgctgcagcagcacctcctcccgctctgaatccccaccccgcaagcgctccaagaagctcaaggtctctgacaagaagagcaccaagaacaagggccgcagacgccaccacagtcttagccccagccccagcccttcatcgtcgtccgtgagttactcaacgcgcagcagcagcggtggcggcggcggcgcttctgagaggtcggtgagcccaccgcgtaggagccgctctagagatgttaggaagaagaagaaggagagggggagggacagcaagagggtgaggaggtcaagaagatctacaagctattcaaccagtggagagagtaattccagtagtcgcagcaggagtaggagcaataatagtaagagcaggaatcgcaagtccggtggcaataaggatcatgcaagcaggaataagattgtgcaggattatgacaatggccatgctcatcgggctgagaatgtgaaatctgttgagattgcggatagggatgagaaagccatggctgataccagcaaggggagctctattgagatatctcactcaattattgatcatgagaagaatgagtccgttgagaagatggagagcgctcctaccaaggatgctgatgaaacacaagacatcttacctgctggtagtggaagccctgatgctcaggatctggagctgattctcaggcagaaagctcttgagaacttcagaaaatttagaggagcagcgctcatggcaggcaagccgcaaaccaatggtacagggaaggaagtggtaacggatagccccaagagcagtgacacgaaaattgctgaagcgagttctgttgacaaaccttttcagaggcaaagaagtggtctttcagtgaactgctctgttggatcccctagattggaggatttcgggaaccatataactcctcgaaagcaggaaagctccgctggcaagagcgttggcgttgaatcacctggaacattttaggccggcagcaccagcgggcgaactgagcagaaaggaagcagtctagaacctactcgatcaaattcacagattaggctacaggatggtaggagtagttccagcataatgcataggttgggaagccctccaaggagctctgccagcgtgattcgaaggttaggaagcagcgcaggggtgaattatgtgaatggaaatcccagagttagatcagttgtgagcatacccactaaggaagggcttgatagtggtacatctatcactacccctagtgcttgtgataattctccccctgttgaaaacattagtgaagtcaggcatcctcctattgatactaacaaaattgaaggaactaaaggggatgaaagaaattcaggtgaagcttcagctcctaatgtttctactttgtcaactggtgaggtcaaggatcagcctgggactgaggtcaaagatggttctcagtttgagaaaaagacattctctagaatgcatgagggagaaactgtgcaggtcagttacaaagtctacataccaaagaaaagtccagcacttgcaaggaggaagctacagcgctgaagttgccaagattgtcaccaaattctcattatttgtcttgtctacaccttagttatgtagctggatatacttttactctctgctgccatgtattgacaatacatgccttccggaaatcattcccacatcaaaattgctcatatttcagttttgatgctcgatagctcagatagaagcctggatagtcaaaacatgtcatagttgtttcttttttactgcaaaatgaacattttgactgtaactcgctccgaattctgacacagtgtatgggcagctactgttgtcatggcctgcagtgaactattgcaatgaattattggacaaatatctggc

SEQ ID NO: 23409 - DNA, 3053 bp, Oryza sativa
  ref <308>: DATABASE ACCESSION NUMBER: AK073521
  ref <309>: DATABASE ENTRY DATE: 2001-12-06
gtgcgacagagagatcctcgcctcccgccgctaactctcggtctcgccatcgccaaaactcagattaggtcggtggccgcgccgctgctcaccggcggatggatcttgtgtcatctcgattcgcagccgacggcgtgttcgtcccggcccaggggaatagtttccagtcgtgcatcgtgcttggattttttttcttttttggggggagttgggagtttgatttagcggcggcctttcctgcattcgaattagagagatgcttgggccattggcgttggagtttccagcctgggtgatctgaatgaacccaatctgcagaatgttctctccctttccggttgccccgggggagggattgatggaatgggatagggtggggggctttattctgatgattttgaatgaactcaagccacagaatgttctacaggtctcaaattattctgttggtctatcgggtagtcttcgatgctgtatgtaattccagttaggctccggtttgagattatttttttcttgcagtaaattggtaggtttcatgaactcctgctcagctgcggacgcgagcgtctgcgatttgatccaagctggggagctcaatcttcggagaacatggatatgcattgttctgttattctcgacaagccgacatcatcgttcttgttcaggggattgactgatggatcctgaaaaccccgatgtttttcgcagatttattttgtactacaagtttgagattcagagttcatacactatagactatgggtgagtttgagaggaggggaaaagagaagattgggaagatacgcaaaacgagtcaagcagtagtggtgccagatcaaaccttccagtctcaacaggaaagccgttgacaccgaccttttctggtcaatctggatcagtttcaggttttcgtcatcctggttcactagcaccaaggggttcctcaatgactggtagttcatcccttggggttcaaccacctaggggtagtatttctggtgcttggtttcctccaaatagtcttcaagcatccatttatcaggtcgggtatcctgctctcagcaaccgaggaggtatgcatgttgggggaagtcctgtttttactgctgctccagtttgtgggaattttggcccgcgaataacttatgtggctagcgttgcgggtgggggcaacattgggagaaccataagctctgccggaatgtctatgcctactgttgcatcccctgtgaatttgtctggaagtggggctcttaatatccgaggatcaaaccaaatgggtggtactcatcaacaaggattgccggctatgaatatgcttggaagctctagttcagcacctggaggaacactatctaagaaccaattgcaggcaggaagcagttcgtctggttctccaggaatgcgacatgatggtaactttggtgaaaattctctatttgacatcaatgattttcctcaattagttgggcgacctaattctgctggaaatattcaggggttatatggtaatgctgacatgcaaactaaatattctgaatgataatattagttaactaacttttctcctttataacaaatgaaggacctctaagacaacaagcatttggtattaatgctgttcagcaaaaccaggaatttagaatccataatgaggacttcccagctttaccaagattggaaggtatggagttgcatcgcaaggatcatcttcctaagaatgcaaatattatgcaagcacaacattatcctatgggcaaatcatctggctttaacacgggcagcagttgtccaccccgtaaacaacataagcagacagctaattcggttcaaaatactgggcctgaaaatgttggaccaaagccagtaaattctccaaggttgcctttaaatccgaggcctcgtgaacaagttatccagcaaaatcatgaaccacaggctcagaagtcagttaggctgcagtcatcttccggcccagagtctcacaaggttcagagtcccaagtcttctcagagaactgataccacaccagagtcttacaaggttcagagtcccaagccttctcagagaaccgataccgcaccagagtctcacaaggttcagagtcccaagtcttctcagagaactgataccgcaccggatccatatgatccatatggcttacatggactactgagggtaatgaagttgaaagaggagggaccggcatctcttgctttagggattgatttgacaacactagggttggatatgaactcttcagataatctttacaagacatttggctctccttggtcaagtgagccagttaaagaagagtattcttatgaaattccggattgctactcttctatgcagcctccacccctgcaagcgttgcattttctgaggtttcacctcatgacactattctacatcttctacagtatgccacaggatgcagctcagttatatgccgcgaatgaaatatgcaaatacgggtgggtttaccacaaagagctgcgtcagtgggttaaaagagctcctaatacgacccctctcgtcaaaactacaacttatgaacaaggactctgctatctttttgatgccaacatttgggatgcaattcctaaggacaactttattctccgttatgacgatatcgagaagatacctgcccttcctccccttcttcctgccacccaaaatcctgccacccaaaatggtagtgtaagaataaacaagccattgcagtaggttctccgtgttgaagattagagtttcatggcttggatcaattgttggtattattaagggtatgcatgctggttctggggatcggagctcctgcgatggccggcgtttgtggtagctgcgaaataccgcggttcataattcgttggctgcaatcagttaaacccatttttaagttttgaaacaaagttgaaccccgttttaattatgtttcggtcttgtgatgactgaatgttttgaatgtttaaacctgtttttacctgtaccgtaccagatatgtcgtttaaacttatcaggcaccgacattttggatcttg

SEQ ID NO: 23410 - DNA, 2632 bp, Oryza sativa
  ref <308>: DATABASE ACCESSION NUMBER: AK073522
  ref <309>: DATABASE ENTRY DATE: 2001-12-06
ggtgctggtggcctagaatctctctgactctcctctctctcttcgcctccttgtcggcggccagccgccgccgccgacctcgccggtcgccgccaccggcgccgccggcggagacgccgagaaatgggacggagcctctccgtggcaaggtgcccccgcgagcgtcgccaaagcgagacgaattgtttgatcctcgtttcgcttggaatggactagggttccggtagaaattggcgcgcgcttgaggagacaaagagttacgacgaaattagattattttggggggtgatatgttccaaataccgaagactgattctgattgccgctgctgtttgttggaggaccagaagacatctcacaaatatttttggggttggcatataatacattattatgcagtctcgtgaggtcttaatctccatttcacaagaagaatcctgtaaatgatgcacagctgttatctcgtctcataagtgtgtcttggttcagtaaaaaaccaagtgtggctggggagatttcagttgtttgaggatgaccttactcatgatatattccaggtacaaggttgacaaattcttactgggaacaacacaattagacagcagtttataccggcaagcttgttctaaataatctttgtaccggcgagaaatttacttatcagattagactccaggcaactactgaagggaagccccaggattacatcagagctactttcgtgtcaagaatgaggtgcacggtgctctattgtatcttacagttggcctgcctcttctgaagcttggttcagatcagcatatctaaatgcaataactccactaccactatgaaaattctttcttctgtgaccaagcagccaactcttgttccttgggatcttcgctatcaagaagagtgccaaagcaaaggaagcaacacttgcagtgatggcaacgccaatgaatattgatcgtccactgctttttatactttgcacctctttggcagcaaggcgaagccgcctgctcgatcatctagctcccagtcattgggtgatcgtacagagaagcccttcatacacttgcagataggaagcttgctctcttcgcagactgtgaaagctccacaaatgccatacacatcacactgctttgggttggtgtaggttggtacccaatcttgcacatgctccacccacaaaaatatcttggtctgaccagagatgtccagcataaaacgcatgatcgttgcgttatctagtaaggtatatgtgaagtacacttcttcatcattgttgacaaaagtaaaatcaattaagcgttgacctgtcatctctggtatggaaccaaagtaatgtccgttccattctccactagaccaatatggtatagaggagttgagagctgcaaggatgaacctggtagaaccattgttgtcagttaactcgtaactgtacatgccagaagctgggtctacagagtttttcctggaaacaagacggcggtttaagccagtgaccttgttccggcctagcttcgcaccggcgagatgggtatttgttgggtagtcaaagctttgccacaagacaaccgaagaatttgaggtgttctgcaggacaaggttgccattatccaatagcttgaccattgttgtgtttgctgtgatgtcagcttgggttgaccagaagatggactttgtggcctgatctaagatgacaaggtttccgtcaccggagattgtggcctccggcgaagtggggccagtgacaggctcatctccattggcaacccatgctggagtgagctttggcacctggttgaaccatatccccaggtaccagtttgaagcattgtgggaggacttactgctggttgggaagaagccaagcgcaaacttgccgttgctggagacaagtatgtcattgccggcgagtgtctccccagctgagatggtgtctgtcaccttgcaggatgcaggaatgtgcagtgtgaagaggaggaacaggacagtgatgggaagagccatggtgaacaaatcaagaactagctagcacagctgcaaaggtacttgggtgaggtagatgacagaggatgccttggctgtgtacatccagtttggatgtagaggccgggtttaatcaattttatctaaaaaaaaaggatgacagaggatgccaactgcggcttgcgcgtgtggatacgagagaacacactgcaagagggaaagtgagtaagcttgcatggtcgttgggacttggcagatggtaacatatttgaaggcagaaagaaggatggagtcattggcctgacctagcatatatggcagtaaaaaaattacatcatgatacagacatataaccgactcttagggctttgtgaccaattagtcggctggcgaattaaagaatccgaaagtacggctgatttctgtcaaatggtcaatcgaccgggttgtaatttggactcagttgttggtaaatgatacttcctccgtttcatattataagactttctagcattgtccacattcatatagatgttaatgaatctagatatatatgtatgtgtatagattcattcataaatgaaacggagggagtacttcaatagtggcataaatgactttctgaaaaccagaaatttgtagcgct

SEQ ID NO: 23411 - DNA, 2721 bp, Oryza sativa
  ref <308>: DATABASE ACCESSION NUMBER: AK073523
  ref <309>: DATABASE ENTRY DATE: 2001-12-06
agtggcatcggcgcatcgcctcctccccttccttctcttctctctcctagtcgtcgccggcggggagcgagcgatgctgacctcggggctgctgcggccggtcgacgatgcgcacgcgatcgacgaggcggcgctgctgcgctacgcggcggagcacgtcgccgggttcccctccccggcgcgggggctggccctgacgcagttcggccacggccagtccaaccccacctactgcatcgaggcctccgcccccggcggggtcaccgcgcgctacgtgctgcggaagaagccgcccggcgccatcctccagtccgcccacgccgtcgagcgcgagttccaggtcctcaaagctttgggcacttacactgatgttcctgtccctaaggtgttctgtctttgcactgatgcaagtgtaattggaactcctttctatataatggagcatctagaaggactaatatacccagacaacaagttgacgggagtaactccaactaaaagaaagactatatatcttgcagctgctgaaactttggctgctatacacaaagttgacgtgactgcaattggactgcagaagtatgggagaagagataactattgcaaaagacaagtagaaagatgggggaggcaatatctctcttccactggtgaagggaagcctgctcgttaccagaagatgcttgatctagctcattggttgaaagaacatataccaaaagaagattcatcggcaggatttggaacaggtcttgttcatggtgattaccgtgttgataatcttgtttttcatccaacagaggaccgagttattggtgtacttgattgggaactatctactttgggtaatcaaatgtgtgatgttgcatacagctctttgccgtatattattgatgcaacaactagtacaggttattcttatggtggatttgaatatactggcattccagatggcattcccccactggaagagtacctcgctgcatactgctctatctctgcaagaccctggccggctgcaagttggaagttttatgttgccttttcgctttttcgaggggcatctatatatgcaggagtatatcacagatggactatgggtaatgcttcaggtggtgagcgtgctagattttctggcaagattgctaatgctatggttgaccgtgcctgggatatcataaatagagaaaatgtcctgagagaacagcctgctaggggtatgcatgcctcaaatggcccatcgcaagaattccaaagaaagcatgaaggatcaatttcgacaaaagatcaaggaaaatttgttcctagtgaaaaggttatgcagcttcgaaacaaattgatgaagtttatggaagattacatatacccgatggagagtgagttctataaacgcgcacattcgacctcaaggtggacaattcatccagaagaagaaaaactaaaagccttagcaaagagagagggactatggaacttgtttattccgctagacagtgctgctagagcaagagagcttctgtttgaggacatgtctcatggttctcctggaagttctgaggagcttttgctaggtgcaggtctcacaaatcttgaatatggatatctatgtgagattatgggccgttcaatttgggctccacaaatatttaactgtggtccacctgatacaggcaacatggaggtcctgttgagatatgggactaaggagcaacaaaagcagtggcttgttcctttgttggaagggaaaattcgttctggatttgcaatgacagaaccacaagttgcatcttcagatgcaacaaacatcgagtgttcaatatcaaggcaaggagatttctatgtgataaatggaacgaaatggtggaccagtggggctatggatccaaggtgccaaattcttgtattaatggggaagacagatttttctgcacctaaacataaacagcaatcgatgattttagttgatgtcaaaacacctggagtgcagataaggagaccgttgttagtatttggtttcgatgatgcacctcatgggcatgcagagattacttttgagaatgtgcgcgttccagccacaaatattctccttggggaaggccggggttttgagattgctcagggaagactaggccctggaagattacatcattgcatgagactaataggggcagcagaacgtggcatgaatttgatggtcgagagggccttaagtaggaccacttttggaaaaaagattgcgcaacatggttcctttttagcagatctggcgaagtgccgggtagaactggagcaggctagacttctggtgcttgaagcagccgatcaacttgaccgacatgggaacaagaaagctcgtggtatccttgcaatggccaaggtggcagctccaaatatggccctgaaagtgcttgacatggcaatgcaagttcatggtggtgctggtctctcatcagacacagttctatcacatctatgggcaactgctaggacactgaggatcgccgacggccctgatgaagttcatcttgggacaatcgctaagctggagctgcaaagagcaaggatgtagtctcgcgtcatcaggatgccgcccagatttcatgaataataaatactaggggagagggaaatcgttgtgtaacatgtccccgtttttattgaacgaaattggaaatgacactacgatagttgtcacttgtatagaatggttgatatgtggcg

SEQ ID NO: 23412 - DNA, 1143 bp, Oryza sativa
  ref <308>: DATABASE ACCESSION NUMBER: AK073524
  ref <309>: DATABASE ENTRY DATE: 2001-12-06
gaaactacattcactgaaacgaagagaaattgagacctctaggctccagccgtacatggccatggcgactaccagctctaaaaacgagaggtggagcctcgccggcgccaccgcgctcgtcaccggcggcagcaaaggcatcggccgcgccgtcgtcgaggagctcgccagcttgggcgcgacggtgcacacctgcgcccggaccgaggcgccgctgaacagatgccgggaggagttgacggccaagggccttgccgtcaccgtctccgtctgtgacgtctcgttgcgtgccgacagggaggcgctcgccggcacggtgcgcgagctcttcggcggcaagctcagcatcctggtgaactgcgccgggatgtcgttcctgaagccggcggtggagctgacgccggacgattgctcgcaggtgatggggatgaacttcgagtcgtgcttccacttgagccagctggcgtaccctctcctcaaggcctctcagagaggttgtatcatcaacatctcgtccattgcttcggtggtcgcgttctgctctcttcccaacgccgtctactcagctgctaaaggagcaatgaaccaagtcacaaggaacctggctgctgagtgggcgaacgatgggatcagagttaactgtgttgcgccaggcttcattcgtactccgctcctatctgaattcgtggagggtaacgagttggggcgagcagagttcagccgtgttcccatgggccgtctcggtgaaccagaggacatcgcatcgctggtggcgtttctgtcaatgccagcgtcctcctatataaccggtcaggtcatatgcgccgacggcggtcgctgcctttcttgaagtggatggtcctgattcctgaaagatatactaattacctgctacgttgagagatatggaagaattaatggaatttgtctaccacgtgccaaccaggctaggattaatttatctgggaagagcacagattgctgggtgtgtcaaaatgatagaagttaccacatatattttaaataagtctgggaaattaggtagaatagtttgtcgggacgcgtctaatgtgggaattcccatggaacagaagatcgatctggtttctaagactaattaatcttataaaaatattgtgctgg

SEQ ID NO: 23413 - DNA, 1962 bp, Oryza sativa
  ref <308>: DATABASE ACCESSION NUMBER: AK073525
  ref <309>: DATABASE ENTRY DATE: 2001-12-06
gggtgtcgttgtttgtcctgctgcttcagagttcagctgcatccccgtgaacacatcctccgccgccgccgccgccgatctccatccatcccacgagcgagcaggggtgtcgtcgttcgtcctaccgcttccgccgcatcctgattttgatttggcacttgaagcttgtgtcagcacacaaggtaaagatcctaggtgtatccgccactggccggggtggatctggtacgacgcagatacccccaccagcacagatttcgcaacaacagagaagagcgaggtggggcaatggaacaagaagcagtgacagctttggtggccgatcaagaggaagtggcgcagctcggggagggtatcctccaccacttcgaggaaatcctccatcaagaccccctcatagatgaagtggggttcttgcacccaacatagttccagtcgctagaacacagccaaactggttattggacatctcaagcacctgaatgtcctcggagatacctctggtgcaaagaccacaagcttgccatatccatggaaatcctacctaagctctaccgtgctgcacggcatgcatactccaattcagcagcagccaaggatggtccactcatggaaattgatctgatgaggcacagcaaggcattgctcattctttgccctgacatgctcactgcatggaattcgaggaagatggtactatcagtgaattatgatttcactaaactcaaggatgagctgcaattgtgtgccttgatcctttcatgctcaccaaaaaacgaaagcacctggagccataggagatgggtgatcaagaaggtttcagaacacaaccaggatgtgtcggagcttatagagagggaatctgtactagtgaaagagatagcagagaaatcaaagatgaactaccgtgcgtggaggcatcgctgctggcttattccctacatgacaagagaacaggttctgaatgagttaaagaaatcaacaagatggaacgagttacatgtcgctgacaactgttgttttcactaccgacggtccctactgcttgcattactagacagttgccatgtagaggacacagaagattcccttgataggaagtcagaagttcatttactgtggaaggtatgttgtatttcattagaatctatacctgcttcactatggttccccttgtgccatctttccctctgtttttcattgtacatctgttacaaaggagaaactcgcctgtgcattttttttcgggaatacgcaaggagcgctcgcctgtgcattttgttttatttcacaaacattgatttctctggtgcttgagtaattgcatctgacaggaggaactgacgtggaatcagatgcttatcagacgctaccaagggagagaggtttgaagtttggccatcgtgattctgacattttatccataatttattgtgtatgttgttcccttgcgttgattgtgctgattcgttggtgtagtctttgtggatccatcgtattttcctctcgcaatggtgggtgaagttctcgctcagcagtgaggaaacagagtgtgctgcaggcacttcgctggtggacctcttcctagcccaggagatatacctcctgtcagaccgcctgaatgctcctgccgatgaatttggtgaggcatgtgttcaaactgagcttgcagccctctacattctctggatatcaaagcaagttccggctgtgaaactaaagctggaaaaaaggctacattcggtggggagcctggaggatgtcttagcaagggcctgcccactattgaaagcagaacaaggacatgcattgcagcatacgtacagagttactgatgaaacgacgacatatggttatctagtactgtagcctgtatggtctaatatgttcattgttctgcttttctgttgcagtcttctttatgtagtggaaatactgaagaaatggctatgcacattgtac

SEQ ID NO: 23414 - DNA, 1213 bp, Oryza sativa
  ref <308>: DATABASE ACCESSION NUMBER: AK073526
  ref <309>: DATABASE ENTRY DATE: 2001-12-06
gactacgaggccaccaccaccaccactctcgctcgctccccccactcccactcgcctgaaaccctagcaaggagctcccggcggatggacgagggaggcggcgctggtgctgcggctgccgccgccgggaacgcggcgggggcggcggtgcaccacaacgcgcggtccgcggaggacgtcttccgcgacttccgcgcgcgccgcgcgggcatcgtcaaggcgctcaccaccgatgtggagaagttctaccggcagtgcgaccccgagaaagagaacctgtgcctttatggattgcccaatgagacctgggacgtgacccttccagctgaggaagtacctcctgaacttccagaaccagcactgggcataaactttgctcgtgatggaatgatcgaaaaagattggttgtcgctggttgcagttcatagcgatgcatggctactgtctgtagcattttactttggggctcgctttggatttgataaggaagccaggagacggctcttcaccatgattaatggtcttcccactgtatatgaagttgtgacgggaattgccaagaagcaaacaaaagtctccaacggcagcagcaaaagcaacaagtccaaccctaaaccatcgaagcaatccaattctaacagcaagcctgcaaagccacctcagccaaaagatgaggaagacagcggcccggaaggcacagaggatgaggaccaggcttacatgtgtggcgcttgcggagagacttacgcgaacggtgagttctggatctgctgcgacgtctgcgagaagtggttccatggcaagtgcgttcggatcacccctgcgaaggcagagcacatcaagcagtacaagtgccctggctgcagcagcaagaggagccgagaatgaccacgggaggctcccggttgacatgttttagaatcgttaggaattggtgaagaggcggagaaccgcttcacccgcaacctgctgccgtgcagcagcagacccggcgtgcaggccggttgttgtattagtttcagtcattgtgttgtacccgacatggtaagtagctattgtatttagcaggcaggcaggctaactgctgtggtcgtagtgtgatgtgaacctctatgagagagttggatactctcggtgttcagtagtgattaagttatgggttagtgtgtatgattctatgataactgcctcccctttcatgaggtttctaccc

SEQ ID NO: 23415 - DNA, 3202 bp, Oryza sativa
  ref <308>: DATABASE ACCESSION NUMBER: AK073527
  ref <309>: DATABASE ENTRY DATE: 2001-12-06
ggccagtctctcctctattctctctcctgtgtttccggcggaggcacgagcgcacggacagcctcctccccccgcctccacctccgcgcggtcgccgccggcgaggaggcggcgccggacgagctcctctccttccccgccacgccgtagcatcctcctcctcccccgcgcgcgcgccgctgggcgagcaagtctgggggccaggagcgagcagcgcggcgcggcgcggcccggccaggcctctcattccaccaccactggcgcccatctcggcggctcggatcgaattcagagtttcgtcgcttgctctccgacggcggcgatgatggaggcggaggaggcgttccctccgcagaggaatccccgccgcgcgcggcgccgcgacctcaacgcactggatcccagtttagaagagtctgatggagaggatattggtgttccagaagttggcatggtgttcaataaccacacggaggtcaaccgattctaccgaaggtatgctcgccgtgttggctttggggtgtctgttaggaggtcctcattttcacaagagggcacctgcttatatctggagctcatgtgctgcaaaggagggcggccacgttatgagccaaagttcaggaaacgggcctcttcaaccactaactgtccagccaagatcagagtaaagctatggggagataaattgttgcatgtagagttggcaatccttgatcataatcatcctgttagcccagcaatggcaaggtttttgaactcctataagcagctatctggccctgcaaagaggcgattacgtatgggtggccctggagctatgccagtggaagaaccaagcaagatgcctgttgataagttgggtgcacttgaggagcttttgtttggagagagcaagcaccatagttttgttgagaggggccgcttgaagttccaacctggagattcagaagcccttcggcttttctttactcgtatgcaagccaaaaatgcaaacttctttaatgtcattgacttggatgatgaaggctgtgtcagaaatgtcttctgggtagatgcacggtcaagatccatgtatgagttctataacgatgttgtcacacttgacacatcgtatgtggtcggtaaatatgatatgcctcttgcaacttttattggggtgaatcatcatggccaatctgttttattgggttgtggcctgctttcagatgaaacagcagaaacctattcatggatatttaaggcttgggtagcatgcatgtatggtaatcttccaaaggctatcatcactggccactgcaggggcatccagagtgcggttgctgaggttattcctggagtccatcatagaatatgcctatttcatataatgaggaaggcgacagagcgattaggtggtctgtcggagtacgcagctatcagcaaggctttccaaaaagctgtatatgattctttaaccatagatgagtttgaaggaaattggaatgctctgattacatacaatgggcttcagggtaatgactggctaagatcaatttatgagtgccgatactcatgggttcctgtttttcttaaagatacattttgggcaggaatgtctgctacacaaagaaatgaaaatatcattcctttctttgatggatatgtagatttgaaaaccacattgaagcactttcttgggaagtatgagatggccttgcagagcaaatatgaaaaggaggcccaagcagattttgagacattccataagcagcgcccacctgtgtcaaaattctatatggaagagcaactgtccaaggtatacacccataacatcttcaagaaattccaagatgaaattgaagcaataatgtactgccatgtatctttcattaatgttgatggcctcatatccacattcgatgtcaaggaatggattttccttgaagatggtaaaaggactatgagcaagatctttacagtgacaaataacacagataaaaatgatttaacttgtatctgtggaggtttccagtttaatggaatattgtgtaggcatagtctctcagtcctcaagtttcaacaggttcgtgaaattcctccacactatgttcttgataggtggaaaaaggatttcagacagttgcatgtgatggggcgtccttcaagtgatgttgttccaaacaatcgtgtggatcgatatgattatttgtcaatgagatgtctgcagctagttgattcagcagtcctatcagataaatatcgtcttgctttgagattggtgagggagatggagaagtttatgttaaacagcaacacgcatgatgatacacaaccaaggatcaagtctcgcattcctaaagcaaataaaccaaatacagtggttggtcaaaatctggtaaacgttggcacttacaatggaaatgataggcccaaagcaacaacagaggcttcttcattaacacagggattggatgtccagaagggaggagcagaaaagggcatagttcctgctggttacattggactgccagctaatgttcagcaattcgtaggcagtcaaacagcgattcgcccaagcattgtgtatatggttccgagtggtgttgacccacaggcatttggaaatggtgttctgatgcctgttgtgtaccagcagatgttccaggtaccccagcagccaaatggaaccatgccagatacttcagcaaatggaaaaaggaagcggcctcgtgcccagaagccaacagaggcatctgaacagtcaaatggaaccccggcaacaggacccacatctgggtagattgaacagtttctcatttagtcagaactcagaacaggtctttgtaaatatgcagaggaagtgaagagttgcctagagaacttcaaacggatgctagcactaacaaaagtacatcaaatccatcttggctgtgatctgaagcctttgtgctgcagagattgagcacggccaagcccaagcgccattcttcatttggatcatcctggagtgaagtccagggttgaaaaatagccttcacctcatttgactttagttgattccagcaacattagccgataatgtttttgtggctctgccatgatatacaagttctgaaatctcgctgtcgtttccatggtaatatgtaaatgattttttgatggactaacctggtcatttgactggatttttttagttcggaggcttaaagactcccttagcatc

SEQ ID NO: 23416 - DNA, 2593 bp, Oryza sativa
  ref <308>: DATABASE ACCESSION NUMBER: AK073528
  ref <309>: DATABASE ENTRY DATE: 2001-12-06
gagggttcaaactcctcccccaaaatccaatccccaatccgcgccgcccccattcgtctccccttcttttcaaatcccctctcctctcctctctcctcgccgccaccgcctacctacctccgccgcaggaagcttccagaaggttccgggaggccgcggcggagaggcttcaggggtacaggttgagggagaggaaggtatggtttggtgagtcacaggaagggatgcggagctagaagattggaggctacaatggctcaagccgctgttcaatcttctctgaatggtgacttgttgattgggagggccgcgggagttccgaggatgaagaggaagaccccctctgaactcagaggagagcaattgaagcggcgtgcttctgacaagcctgctaatgaccaatcactccattctgcggcatttgatagggcaagcaatgggtttcggaacccagagcaatcaaaaatatcgaaatacatcagtactcgtgttacagaggtgttcccagtaaaaaaatctagaaaccttggaaaggaaaacttcaagaataatgagaaggctcccaagtctgctgatgctgtgacaacttctgattttgcatcaccttcactcccatgtggttatggtgactctgctaagttggactctgctgttccatcacatactgaggcagctaaaccaagttttaggaaagttgagaaatgcagtgaaaatgctttgcggagtgtatctgagctccatattggtgatgagcagcagtctggcactaataaatttgatatggaaaaagtactcaaaggttttggagctcgtgatgcttttgtggcctctaagctcactgacccaaacatacaagttggtgttgtaccctcgaaatctttggatttgtgcccttctgagatcgctgttccaggaaaaagagctcctttggatctcaccctgaagactactttgcaatttgtttcatcatcttctgtaaagtggtgtcacaagataagtacaagttttggtaggagcagcattgtaggacccattgcccaaagttatcatcatgggtgtcaaaattcaggatgctcaaggcctgagagaaacaaggaattcttgttctcaaaggcactacaatcatgggtatatccacaatccttgttgcctgcttccatcatatctgcaatggtatcatcaactgtacgaggagaaagtgattttctcctcaaaaggcatcaggactgggaagattcatttcagaatctttactacatgctccggaagaatctgttgaatattttttatgtttatacgccacaatttgttgctctcttcatcggtggaaattgtttggacaagaagcagacctgtaatgcgtacctatcacaatcaacacgtgggatacgatcattgctgcgaagacatggtgtttgtttttctatgcctctttgcaacactgaagtggagcaggttacagaggatgacctgattgaactttcagaaatccaaaagcgcaatctaggccaggcgctccacattgacgctatgtctgaagtcgacaacaccacacaatcgcttctttcatttgtgggcaataagagtgttcatggtttatatgacttcttgttgaactacaagtcattcttaaattctctatctgccacagatatcccggtgttatattccccggtgccgtttcaaaatggctgcctccatattccagaggtgaaatgcaaggagatgaggaaggcagatataggcctggtttcaggtgggtttgatgcaggagagcctggatctactttcgcttctttaacgggcaatatctgctatagcatggaaataaaggatcccgtacttcctccatgggttgtttctggaatctgcgctgcaatgagctctgatgcaaatagcttcgatttaatgatggcaacagagccttcgtcgatgggcttaaacgctgccttgagctgcgtaagctcaaattcccagtccaaggcacattcctctgaaggctgtgaatcattgggcatccctgaggccacattggttccctccttgcgatctgcatcttctctgcggcgcctcagctacaaggatggcgagtacatcgcatacacaacggtgtgagctacaacgcaacacctcgaagccatagctgggaagcaagacaagtactcctattccagtcaagtgcagccacttttgatgttctacgactaccaatgggggttctatctggttgagctcctcccgtcaagaagcctcaatgcctcgtccatgagacaagcaaggcaggcaggcagagaagctgttagctgctgctggttttgtggttttttttgcaaggcaatgtgtccagtatctggaatcatctaactgtttttgggtgagcctgtagattatctacaggacaatgagctgctcttgaatggtgcagtaatttatgggattgtacagtgtatttgatgcccttgacagtgcatccttcgatgactgatggggggggggggggggtagtgaggagggggaagtgactcttttatggcgttctctgctgtcatcctctctagtctgcaagataattgcgcttgatctttaacgttgc

SEQ ID NO: 23417 - DNA, 2928 bp, Oryza sativa
  ref <308>: DATABASE ACCESSION NUMBER: AK073529
  ref <309>: DATABASE ENTRY DATE: 2001-12-06
gacacacactcatatccactactactactagctaccgagcactgagcactgcactctgctgctctagaactgaagctttgcattggttggttagtgagagattaattattccaagatgttgggcgggatcatcggcggcctgacgggcaacaagaacgcccgcctcaagggctccctcgtcctcatgcgcaagaacgccctcgacatcaacgacttcggcgccaccgtcatcgacggcatctccgagttcctcggccgcggcgtcacctgccagctcgtcagctcctccctcgtcgaccccaacaatgggaacagggggagggtggggacggaggcgagcctggagcagtggctgacgagcctgccgtcgctgacgacgggagagtccaagttcggggtgacgttcgagtgggaggtggagaagatgggcatacccggcgccatcatcgtcaagaacaaccacgccgccgagttcttcctcaagaccatcaccctcgacaacgtccccggccacggcgccgtcgtcttcgtcgccaactcctggatctaccccgcctccaagtatcgctacaaccgcgtcttcttctccaacgacacttcactgccgagcaagatgccggcggcgctgaagccgtaccgcgacgacgagctccgcaacctgcgcggcgacgaccagcagggcccgtaccaggagcacgaccgcgtctaccgctacgacgtctacaacgacctcggcgagcccgactccggcaaccctcgccctgtcctcggcggctcccccgaccgcccctaccctcgccgcggccgcaccggccgcaaacccaccaaaactgaccccaccgcggagagcaggctgtcattgctggagaacatctacgtgccacgcgacgagcggttcgggcacctgaagatggccgacttcctgggctactccatcaaggcgctcgtcgacggcatcgtgccggcgatccgcacctacgtcgacctcacacccggcgagttcgactccttcaaggacatcctcaagctctacgagggcggcctcaagctgcccagcatcccggcgctggaggagctccgcaagcgcttccctctccagctcgtcaaggacctcatccccgccggcggcgactacctcctcaagctccccatgccgcacgtcatccgggaggacaagaaggcgtggatgaccgacgacgagttcgcccgcgagatcctcgccggcgtcaaccccatggtcatcgcccgcctcaccgagttcccgccgcggagccgcctcgacccggccaggtacggcgaccagacgagcaccatcacggcggcgcacgtcgagcgcgggctcgaggggctcaccgtgcagcaggcgatcgacggcaaccttctctacgtggtggaccaccacgatcatttcatgccctacttgttggatatcaatagcctcgacgacaacttcatctacgccacgcggacgctgctgttcctgcgcggcgacggcacgctggcgccgctcgccatcgagctgagcttgccgcacctgcaggacgacgggctgatcaccgccaggagcaccgtgtacacgccggcggcgcgcggcggcaccggcgccggcgccgtggagtggtgggtgtggcagctcgccaaggcgtacgtcaacgtgaacgactactgctggcaccagctgatcagccactggctcaacacgcacgccgtgatggagcccttcgtcatcgccaccaaccggcagctcagcgtggcgcacccggtgcacaagctgctgctgccgcactaccgcgacaccatgaccatcaacgcgctggcgcggcagacgctcatcaacggcggcggcatcttcgagatgaccgtgttcccgcggaagcacgcgctcgccatgtcgtcggcgttctacaaggactggagcttcgccgaccaggcgctccccgacgaccttgtcaagcgcggcgtcgcggtgccggacccggcgagcccgtacaaggtgcggctgctcatcgaggactacccgtacgccaacgacgggctggccgtctggcacgccatcgagcagtgggccaccgagtacctcgccatctactaccccaacgacggcgtgctccagggcgacgccgagctgcaggcgtggtggaaggaggtccgcgaggtcgggcatggcgacatcaaggacgcgacgtggtggccggagatgaagacggtggcggagctggtcaaggcgtgcgccaccatcatctggatcgggtccgcgctgcacgccgccgtcaacttcgggcagtacccgtacgccgggtacctcccgaaccgtccgtcggtgagccggcggccgatgccggagccgggaacgaaggagtacgacgagctggcgcgcgatccggagaaggtgttcgtccggacaatcaccaagcagatgcaggccatcgtggggatctcgctgctggagatcctgtccaagcactcctccgacgaggtgtacctcggacagcgcgacacgccggagtggacgtcggacgccaaggcgctggaggcgttcaagcggttcggcgcgcggctgacggagatcgagagccgcgtcgtcgccatgaacaaggacccccaccgcaagaaccgtgtcgggccgaccaatttcccctacacgctgctctacccaaacacctccgacctcaagggcgacgctgccggcctctccgccaggggcatccccaacagcatctccatctgatctccatctcatcagatgaggctgctccacggaggcgccagcgtggacaagagtagttttacggtggtctttaccggtagtattttactttcaataattgccatgacacctacacccggaggtgtcatggaggatgaattcgttgtgtaatttccctttcagttcctaataaagaataaggaagcatatggttgtgtagc

SEQ ID NO: 23418 - DNA, 2062 bp, Oryza sativa
  ref <308>: DATABASE ACCESSION NUMBER: AK073530
  ref <309>: DATABASE ENTRY DATE: 2001-12-06
gagacggccgccatggccttctcctcctcgcctcctcggtgactccgcccgccgccgctggctgccggcgcagcgccaccctacaagtcaccgccccaccgcgagaggagggcgggcatggccttgccctgctcctatggctcccactgcgccgccctgcccttccccgccgtggtctccagggcggcctcctcgccgccaccgcgctcccgggggagaaggcccagcctaccacccgccggatgcttccacgccgcgccaagggacgccgctctggtgtccggctccgctgctggtggcgtgagcaggaggaggtgtgagttatttgacccccatcagcacatcgttccatttgcggaatcttgggcttggcagcagtccattgtgacaaggaggaaagggttggtaggcacggatgaagatcactccgacaccttaatcgcgctgcagcatccaccagtttatacgctaggcactgacagcaccgaggactacctccatttcgatgttaaagatgctccttttgaggttcaccgtattgaccgtggtggggaggtgacatatcatggtcctggacagcttgtaatgtacccgattatcaacttgcgatatcatcaaatggaccttcattggtactttagatcacttgaagaggtgatcattcgtgcccttcagtccgcattttccatcaaggcatctagggtagaaggtctaaccggtgtctgggttggagataagaaagttgcagcaataggaattcatgtctcacgatggatagcatatcatggtctagcactcaacgtaaccactgacttaacaccatttcaactcattgttccctgcggcataaaagatcgtggcgttgggagcatcaaagagatattgcaaatagcatctgatggaaaagagatagacgaaacagcattgatcgataaagcctacagaaccctgcttaaagagtttgctgaagttttccagctctctttatatcacaaccctaactgggatcttcaggaaagcaaaaattttagttaactgcagaatattttattggattcttgaaattcaacttgcattgaagtcagaaaccagtacaggtggatagagaggcaaacataattagatcaaagtgaagtctccttcactctaatatcaccaaaactgcagaactagtcatccatgtgcgcaagctcaaacttttgcttcacctgccaatcagataacgctatcagttttgaagatgatggtaatatgtaggagaggtgagaagttcagccaagccaattaaccttctgttaggagccatgtgggctgcaatatgggctggatcagctactttccaaagaagtccaagcaagcccaagaggcaaccatatataagtagcagtagcacttctaggaggggacgaacagattgattggccaaggcggcgaacggcggcggcggcgacctggaggctggctggcctctttgtcgatctctcctctatctcccttcttctctactagtctagaagctactagaaccttctagcccttgtatccttccatcttccacctcaaaaccactccactattgtaacagacttggttgttccctgtgttggatttggcactgctatttctgaaattacattgttgggtgggtctctaacaccttctttggggttcgaagtggatccatctgcctttgtgtcaacacccggccatggcttgcaagtacaatgtttccccttctcgataccgtcgtaaacggatgcgacatgtttaccacatccattccaggtgaacttgccacatttgctgcattccaccttgaagcacatcctgtgctcttcttcaggtgctcctttggtgcgtggtgggcagtggcaaatgttgggatgttcttttggataggttcctctggtcttcatggatttcagcattttatagcatcatatgctgttcttcttctgaaggaacaatgtacaaataccctatatatgctgttcaatgtagtctttgactctttggtgatggatacaatgtatggataatgtgtaaaatcttgcagttagtg

SEQ ID NO: 23419 - DNA, 1220 bp, Oryza sativa
  ref <308>: DATABASE ACCESSION NUMBER: AK073531
  ref <309>: DATABASE ENTRY DATE: 2001-12-06
gattcttagtgaccaccccccatatcacatcctctccttcctcttcctctgctcactcagctctcccccgcgcgcgccaccgtcgtcgccatgtcgggcaacatcgccttcggccgcttcgatgactccttcagcgcggcctccctcaaggcctacgtcgccgagttcatctccaccctcgtcttcgtcttcgccggcgtcggctccgccatcgcctacaccaagttgaccggcggcgcgccgcttgacccggccgggctggtcgccgtggcggtgtgccacgggttcgggctgttcgtggcggtggccatcggcgccaacatctccggcggccacgtcaacccggccgtcaccttcggcctcgccctcggcggccagatcaccatcctcaccggcgtcttctactggatcgcccagctcctcggcgccatcgtcggcgccgtcctcgtccagttctgcaccggcgtggcgacaccgacgcacgggctgtccggcgtgggcgcgttcgagggcgtggtgatggagatcatcgtcaccttcgggctggtgtacaccgtgtacgccaccgccgccgaccccaagaaggggtcgctcggcaccatcgcgcccatcgccatcggcttcatcgtcggcgccaacatcctcgtcgccggccccttctccggcggctccatgaacccggcgcgctccttcggccccgccgtcgccagcggcgactacaccaacatctggatctactgggtcggccccctcgtcggcggcggcctcgccggcctcgtctaccggtacgtctacatgtgcggcgaccacgcccccgttgccagcagcgagttctaattacccatttcgccatcggcaacacgcataaaaatggtggtcactccatcgtcagaatcttgtgaggatgtgttgtgaaggactgatttggttcagatggggaagaaggcttttgttgcgaggatgtgacacttgggtgatgatcgatccatgtttagtttcttcttgattaatttgtaatgtgatcagtgtggagcaagttggatgagatgcatgtttaagatcgaacacttctgttgagtttcattgtgagatttcatttgattcgggccatgtcatttcagtttgtttgtagcctccaaaataagcttgtgtcttctcctcgcgaataggaaatcagaaataaaattgttccgggaaatcatttgttgcttcttgtgctc

SEQ ID NO: 23420 - DNA, 1461 bp, Oryza sativa
  ref <308>: DATABASE ACCESSION NUMBER: AK073532
  ref <309>: DATABASE ENTRY DATE: 2001-12-06
gatcgctatttccagtccgagggagaggagcggcgacgacaggcggctcccctccagcgctggctccggcgagcccgctcctccttcctccaaagagtcctccctcctccctccggtaacaggttccccccccccgtgccgccgccccggcatcaccggcgccgaaaggcatcaacgtgccggcgcggccccggccggccggcctcctcccctttgcctcgctttgctcccgctacgatcaccggccgcccgcccttgtccgccacccaccgccggtccgccgcctcctaggtcctctctccaaacccgatcccccacttccccctccccagcgccgccttcccccaccccaccccacgccgtcgctgttcctcccctcccgggctcttccgctcacctctccatcgcctcggtctcgcagcttccgcctcagtctccccgacttcccgttgtccgtcgccaaccgaggtgccgagccactgccgtcatttgccctcccgtctgctcaatccacggagcggcagagggtcgaggaaccgccgcgacaaggcaccacggccaccgcaaggcagacgccgaggcgccatcggccgctggcaccgggatcccatgacccctgaccagccagcttaattaattttgtgctctcgaaaactcggactactaaacgaaaaattcctagctacgccactgcctcctgcccattgccagaggcgcggcggcggcggcggcggcgggggcggcgaagagtcccgtgagcgcctcctagatggggctgctcagcatcatccggaagatcaagcgcaaggaggaggagatgcgcatcctcatggtggggctggataactcggggaagacgacgatcgtgctcaagatcaatggggaggataccggcgtcatcagccccaccctcggcttcaacatcaagaccatcaagtaccacaagtactcattgaacatatgggatatcggtggacagaagactatccgatcttactggaggaattactttgagcaaactgatggactagtttgggtggttgatagttcagacattaggaggcttgatgattgccgtgctgaactccacaatctcttgaaagaagagagactagcaggagcttcattgctggtgtttgcaaataagcaagatattcaaggcgctctcaaaccttctgaaattgctaaggtactcaatttggaagcgatggacggaagccggcactggcagatcgtaggctgcagcgcgcacaccggggagggccttcttcaaggtttcgattggctcgtccaagacattgcatctcggatctacgtgctagaatgatgtgaacctcgtttctctgtagtatttatgtgctggaacgattgaacctcatttcttatcaacctcttcgtcttgttctgtaacggtgaactattggcatcatgatttttgagcatgatggttctgttttgtgc

SEQ ID NO: 23421 - DNA, 2939 bp, Oryza sativa
  ref <308>: DATABASE ACCESSION NUMBER: AK073533
  ref <309>: DATABASE ENTRY DATE: 2001-12-06
gatcactccgccttctcgacgccgcgtggtcgccgtccggcgagcggagagtgcgggcggtggcggtggcggtggcggtggtggggaggggacgaggcggcgggggcatggtcaccatgtcggccgcggcgagctggaccgccgaggacgacgtcctgctgaagaacgccgtcgaggctggtgcctcattggaatccttggctaaaggagctgtatgtttttcccgcaaattcactcttcaagaattacaggatcgttggtcctcattgctgtatgactcagagacctcaggacaagcatctgccctcatagtcaagtatgagactgaactttcaacctccaacccgaccaaagcacataaacttttctacgtgaggagaaaacatctttctctcaggaagaggaaaattgagagtgtaaagaatcagtattatgcaatgagaaagagaatctgccatgatccatgtttggctgcagattttggttatgttatcacaccctgttcatgccctgtaggtagtgattgtgtatgtgatggattatttaacttgttggaagataatcatttgatccataacgttaatcaagctccagatgttgtaaatggctatggtcacataggcgaaagctatgctgatggacaagatgtacatgccaaagataatggacattatatatcccatagaaggcatgataaagctgctgggacagtggcaagtgatggaagcactaattgtgaaagtgcaaatggctgttctgatgtaggtaagttatatggatacaacttcatgccaaagaacattcagtcaagtgaaaggaatattgcctctccaaaggacctttctgatgtccaggactgtgtgcagcctcagcaaccaattctttgtgaagaatcagccaatggaatgacagggttaaaggctttactgaatactgatcaagattgcataaaacagaaccagttttctggtaacagcaatgaaatattgcaagacccaggctcgctaaaagcaatgagtgaacattggtgttctcaggcacctagtgctcctactaggaagaagtttcagggtgttaatgcacctgacatgctgacagatgtgcatcacaaagagcaagaaattcttgccttttctgatgacaagaaaaaggaaactactaacattgacacattttcatgcaaggtgaatgtggagaatggaatgtctggatctggcttagacgatgcaacagaaggtgaagttatgcactcatgcttaatggatgccagtcagggtgaagactttgagctacttaatagcgagaatattttggattcttctcttgacccaaatctggaaggtttaggcgatcgacatgctaatgttattctgaaggacatctccaaagagcaccttctggacattcctcatgtaagcagtgcctgtggtaacaacacagatccaatccatgagaagcatgatgtggcagatatttctggagtggacatgatatacacaacagaagtgccttttccttgtgctggtattgtgtgcatattaaacaccgaagatcctgaaatcccttgcaatgatgatatctttacacctgggcctgtagcatccacctctacttgtgaccagaattcacagcacaatatgcatttggtttctgccaaacctattcctccactaaatgctgctgacttgaatcacaccgacttggttagtgatgtccaaccattgttacttacaatgaagttggaaccttacaccttggaacaaaaggaaactttggtgggtcttaatgaatcttgtaccgtaagaagcaagtcacctgttatgcctgttgatgctagcaatgcaaatgcatgcacatcaactttccattctgctgcagaatttgttaaaaaatctacatgtggtttagtgcaacatgaatgttttgataacttggggagtgtgtctttggatgagtgtattggagtgcttgatgaaatgaattctaaggttcctgatgagtcaggaataagttgtgatgctactacccaaaacagcatttcagcgcatgcattgccagatgtggaatttcttaatcccataacaaccacttcaagcccagaagggggaggatctgacagtgaggacggtattccaaactatttcgacatagaagctttgatacttgatcaggatttaattccatgggatcaagaatctgatttcatccagctcgaagtttccaggtttcagtctcttgaaagtaggaaagacttgataagattagaacgaggtgcccgctctaatacaaacagatctattatgtcccatggtgcttttgcagttctttatggccagcatttgaaatactacataaaggatccagaggttacacttgggagagaaacaagtgaggaacatgtcgacatcgatttgggaaaagaaggaaaggcgaatacaatatcccgtcaacaggcaattatcaagatggataaaggtggatctttccacataacgaatataggaaaagctccaatcttcgtcaatagcaaagaagttccatgcaacgaatgcactcacttaatttctgatgcattacttcagataaggcacatgaaattcatttttcacatcaatcaggatgccgtgaggcaacatatagttcgcagtaggagaggaacctcccaaggcaagtacgcagtatttaattgggatgaaaagccatgaattaaggttacgatcaagctcatgtgtgaatttattgtcagtaatatatatcggcaggatagaagtatatagcaccatatctaattcggtcccatcctttgcatgtaaatcgttgtatatttccatgcttatcatttagtatataatagatatatgctcaattatcgtcttcagatccatattgttgtaaggtgccacggttttatgtttgaaatttggatttaaatttcatcg

SEQ ID NO: 23422 - DNA, 662 bp, Oryza sativa
  ref <308>: DATABASE ACCESSION NUMBER: AK073534
  ref <309>: DATABASE ENTRY DATE: 2001-12-06
cctctctcccttctctgtgactctacgaggccggcactgcgaagcggaagaggtggagggcgtcggcagccggcgacgggcgatgcgaggggagggctgcctgcctgtctcctcgtcgtccgacgcgaggcgccgcggcggcagccagcgatggagggcggtgggcgacaggagtggagctgggcagcggcggccggcgggagagggcagccgccaatccgccatggcctgccgcggaggtggcccgccacccgtggacgacgctggtggttagggcgcagatcactcgctcagagtcgtggctcagcgccgatcgatgtctcacgcaaggtcggcggtaaaactgctatattcagtaaggcttgctcaccatgcgattctactgaatatagtttcaaactgaacagcatgaaggcagcaaatctccttcaaccccttgtcgttcctgaatcttgttattttaccatgctgctcattagctaaatagttagttcctgtgagctttagttgtttctcagggttggcatgctgcacagtagctagttcttgtgagcttagttgtttgcagtttcagagttaacaatgctagtatgctagtgctgctctatgcacaattgtacggggcacattccatgaaaaaataaatcagcaaagtcttatgc

SEQ ID NO: 23423 - DNA, 2396 bp, Oryza sativa
  ref <308>: DATABASE ACCESSION NUMBER: AK073535
  ref <309>: DATABASE ENTRY DATE: 2001-12-06
cctcctccctctcgtcctgcgccgtccctctccctctcacgccgccgcccgcctctcctcctccctctcgtccccccgccgcctctccctcgcgccgccgccgtcgcgtcctcgtcgcctccgcctccgcccacaaaccacattttttcttgggggttctgcggttcttgggcgaggagaggagatgaaggagatggtggttgggtcggtggcttcggcgccggtggggaggtggggggcggcgtcgcccaggtgctcctggagaggatgaaggattacgggcaggagggcgttcacgctttggggcaacctctcgcctgaggacctggaactgctcgtcagggatatcgaggcttcctttgcccaccgtcaagctggtgtcggagtccagcgtgttgaaggtagaggagaggtcggtggtggaacaaggggctgaaggccatttcggaggggaagctagccgttatccttttagccggtggagacttggcctggcagctctgatcctaaagggtgtttcgttcaacatctggtgggataatcgatagagctatatatgcagaggataggacatggtgactttatgaaattgtgaaatatcttggaatatatgtcgattacttaagatcttgttgaaggatatctggaattggctgcagagacaatcatttttgtggcagtcatgcccgggtagggtgtagagtactgcattacagtggatgttgatctacatgtaagtataggtgtttgaactactgccctctaatttagcatcatcttgagtcttttttctccatgcttaaatttaatttgttcatagttcagacatttcatctttattaaattaaatttatgctaagtatttggcatacaaactgtacactctaagttgacaaatctcatatatgctattatctccaaagttgttgcttccaaagataaaaactcaaaatctttagattttaaaattctatctcaaatctagtgggactgcactcaacttagttgatttgtgattgtttggtgaaacaatgtagtttttcaaataattatacttaacttatcacctatgtatagcttactgcaaagcataactcatgtatttcagtattgcatttctccttgcttttcaccaaataatatatagtacttgaactctatagtttcccgtcctgaatttgacaagaataagctaaaattacgggtaaagtttgctttggagtgtaaatttgctattctgccatagatttatagttacagctgggagctatttctagacagtcaactctcctgaaaatcgattcatattccaaaggcaaggcatcaggtatacctaacctctctttctatctaaattgatttgctttcttcccaggatataatcaaatacaaacaattacaaataacaaaatacggagtaacacaaaggcagttactaaagactccctatagtgttgtcactcgcattttagcatagcgatctcccacggacaaagttgtgctgaaacacggtctacatctatcatatagtgctgcagcatatgacctcataaaattttcagccataccacccaccaacaacagaagatattcactaagtcgcttcagtgctacacgttctagcaatgcctacgaacatctatagacattgttattcatttacatcatctgcatcttcccatccaatgaaaactcacatacaaatatattcgtgcaggtaaccgcgggcgtacatttagggagctgtgcttttgcgaaaaaaaatgtccagcccacaactgatctaaaaaagtacatcgaagctattaagcggttcctacaccattcaagcagcttctatgctgtaaccatcaacagcacattcatcaagcaagatagagtttactttacaaaggaattttcacagaactacataaaaccgctaatggaaggtaaaaaaccgtcgacactgaagtacaagtagcaggaggtatttcaaccagcatgatcctccacgtttcaacagatgaccgttgcaacttgaagaaagggtggacaaagttcgcagcacagatgacatagctctcggatcagtttgcatcttccatttctacaggacaacctgcctggaggttactattgatgtcctgtgaagaccatatgggcattcatagctatcttatgatcatgcttctgctgccagtaaacaagctgatcactatcaggatcggccgcttccctcccctggaattgttaccatgcttattagttctacaccttaggtgcttactatccatagtgcactagcttggacattttaagaaacgtctgtgtatatccatgttgctgctaaagactactagatatcggtatgcctataactgtttggcactgcagtttacttctatttcacttcc

SEQ ID NO: 23424 - DNA, 2781 bp, Oryza sativa
  ref <308>: DATABASE ACCESSION NUMBER: AK073536
  ref <309>: DATABASE ENTRY DATE: 2001-12-06
gacctcctcgaccccgccggcgtccgctcctcctcctcgccgtcctccgccgccgccgcctcctccgtcgaccccgctcgcccagacccgcttaccgccttccccccctcccctctcccctcctccgcccacacggccgttgcgcacccttcgccccctccgcgcgctcttcctcccccaaggttggcgccgcctccctccgctccgtgcggtcaaggaatttccccgtgattgctgccgcagcagcgccgcgtgaagtaaaacaagtgacttgtttccaaaccgtgaattgtatggagatgggaatgacgccagaacaaatctatggacaaaatgtgtatgttcctgcaactgcgaatccttatccgtatggttatacagaagttggatcacctacggaatggtataataaccaaagctctttaggatatgatggccaagacatctattttccgggttttcaaaccgaaggcacacagtgcatgtactatgctgcccctgacaatggatctggtcatccttcctacagcccttacccaataaattcttctttcatagtcgacggttcatatctgccccttgaatatgttggtgatgctgctgaccaaacatgccaaatagttccctcgccctattatgttccaactattcttccttatgcacatgataatgttctgggaaacacaaccgcacctcttcaccccccagtctatgttcctactttgccaagctatactgtaacatcaacaagtcatgcattaccctcagttcctcctgttgccacaaaaaatgatgtcattgcaaatccacctatacaatctactattgtcacctcaaagcaatttctggatcatgcgagtgatcccaaggttcaattgcgtaatccaattccactgaagaaagagctggcagatggctccatgatgcctgtcaaatatcctcacacttcacaggcattttcaaattttcctgagaggcgatctgctgccaagcattcgccacaggagaaattttctgtaaacaatggctctggttttgttgggtctaatgttcagaggtgggctgcagcagagaaatttgagcctaattcaaatttgagtggtcgtattggtagtgctagcccaaagatgaaattatcgaacgtggatggcttaggaggtgcggataaaccttgcggtcagaagtcttctgccataatcgcaaaatcctacacatcaaggctctctgttggtgatccagaagggactattgttatacgatgcaaccaatataacagtgatgatctccgagtggactatccctttgcaaagttccttgttatcaagtcaattggtgaagatgatgtccataaatcaatcaagtatggtgtatggtcaagttcttctagtggaaacagcaaactggacattgcattcaaggatgctaacaggatagctaagaggaattctaccaagtgccctgtttttctgttcttctccgtgaatggtagtgggctcttctgtggcatggctgagatggttggtcctgttgattttcataaggacatggacttttggtgtcaggataaatggactggcagctttccagtaagatggcacatcgtcaaagatgtacctaattataccttgcagcatattttgctgcagaacaatgaaaacaagcctgtcacacacagcagagatacacaggaaataccatatgttcctggaatatctatgctaaagatccttaaggctatcaaagtgaaggagtgtttgcttgatgatttcatgaaatatgaggaggatgaggcgagaagtaaacattatttcagaaggtccaagttgagccataatgctccggattttgttcctgtcgctcaacgaagaaaagacgtcactgatgttcggcagccaaaatcaggcaacgtactgatagacagaacaccggtgatacagaatatgtcagtgaagccacagggtagtaatgcgatcaagcctcaggatcaatgcctacaagttgttgaaaaacaagccagcgatgacgggaaagagaacagacatcaagagaaccgcaatgtcaggcaggctaatgataaagtggtgaaaactgggactaagcagccacaggcatcaacagttaagacaagtgtggatagtaaacaacagtactggaagaaggttgagttccctgggcaaaatcctaacagtgctgttcatggctcatcgaaagcacatgaaaagcatctaaacgaatcaaaagcacctgaaaagcattcaaatggtgctaactgtagctcggcaactgtcagtttgaagacagccagagaggaaactatcgttgccagagtcagttctcttgctatcagttatcagaattcctcagttgatgtcgtgaagattggctcgatgccagttttggttaacaaagctaatgtgtaggtgtggttcctttttaagcttttccaatgtggtctgcttttcttttttgcatttagcagggtctgcttctggtattacttctcatcatcataggttgtctgtcttctgtttagtgttgctcgtcttaaatgtggcaacgaaaatgaaaagagaaaggaaagaaaaaaaacatcatagattctagtagttccctggtggagaaattttgttctttcttttgaaaggaaggaaaggatgaatacaagacgtactctctaaacatatgaagagaagaaagtgatttgggactgaatgggttccccagttttggcactcgatttgctttgtacgtgttcccagtaaaaggcttgcatgctttgct

SEQ ID NO: 23425 - DNA, 4566 bp, Oryza sativa
  ref <308>: DATABASE ACCESSION NUMBER: AK073537
  ref <309>: DATABASE ENTRY DATE: 2001-12-06
gattcccccatccttctctctctccacctaaggctcgaatcgaagccgacctcctcctccgctcgccgccgccgccggcgtcgtccgcggcgagatggcgccgcccttcgtcttcccctcgaccctccgggacctggagcgggacggagacggcggcggcgacgacgagccggccctccgcccgcagaaccccgtcgccgtcggcgcactccgcgccgccgacctcgaggagttcgtcaaaggcacatcgtttgacctgtctgacaaggaactcttctgcatcgaggagcaggacgtgtttgaccgcgtctattccctcgtgcgtgacttcacttgcttgccccctgccctcaagttcaaccttgttgagaccttgcgctccaatcttagtgttctcctcccaaacatagactccctttcacgagcttccatgtcatccccttctgatgggatcccagtaactgatcgcattgcttcgcatcggaatgcccttaagatctactccttcttcctcctctccattgttgttgctgaagaatcgggagctgatagttgcaatggccctaaggtggcagtacatggtcggaagaagaatgctgtatatgcttggaattgggaagcacaaagaggccgcatcatgaatcttattgctaattcacttgaagttgacctatcactattgtttggtccaggcggtgctgatgaacaatatctctcttttgtttcaaagtgtacttttgttctctgtgagaaccagaacgtgctgaaagatgaggaaataagaaatggcttgtgccgaataattggtgcaattgctacgaagcatcaaagagtatctcaaacaagtgcatctgtcttgcatttgattcataaatttgatttcactgtcgtgcttctagcggaatcagttgctgctgcagagaaaaggtttggtgatggaagccttgcgattttgctgataagggaaataggtcggactgacccaaaagattatgtaagagatagtgccggtgctgacaatgccgggagattcctagtagaacttgcagatcgcttgccaaagctcatgtcaaccaatattggtgttctgatacctcattttggtggggaatcatacaagattagaaattctcttgttggggtcttgggcaagctggctgcaaaggccttcaaagatgttgaaggcgatagtgacgcccattctttaaggctccgaagtaagcatgctatgctggaaattttgcttgaacgttgtcgagatgtgtctgcatacacgaggagtcgtgagcttcaggtatgggcagagctgtgtgaagaaaatgctatttcaattggcctgtggaatgaagtggcatcagttgcttcgggcagactggaggacaagagtgcaattgtgagaaaatcagcactgcaattactcatcacaatgctgcagcacaatccttttgggcctcaactaaggactgcaacctttgaggcaactctagaaaggtacaaggagaaattgcaaggaatggagcctccttctcccgagaaggatgagctcttgaatgattcttcactgggtgaagtgattgcagggcaggatgaaagtgtcagtgatagctgtttaccttctagtcaagacccaaaggatcaagatcccacaattgtggatataacaaacttggaacagattagagctttagttgcatcacttgaggctggtctgagattctcggcatgtataacttcattaatgccaactcttgtccagttgttggcatcgtcttcagccactgatgttgagaacacaattcttctattaatgagatgcagacaatttcagattgaaggttcggaagaagccctccggaaaatgttacctctggtattttctcaggataagtcaatatatgaagctgtggagagtgcattcatcactatatacacaaagaaaagtcccacggaaacagccaaaagtttattaaaccttaccattgaatgcagcattggtgaccttgctgcccttgaaagcttagttagttcattggtatcaaaaggagaaatttcatccaacacgataacagccctgtgggattatttttgctttcacatcaatggtgtgaaaccagtgcaaagccgtggagctttatcgattctttgcatggcagcaaagtcatctcccagcattttgggtactcatttgcaagatattattgatattgggtttggacgctgggctagggaggagcctctgcttgctagaactgcatgcattgccctgcaaagattatccaatgaagacaaagtcaaattaattagtactggtagtagggtattcgctgcattgcaaggcctgataactagcctctcacttcctgagaaaatatggtatggagccgcagataaagctataagtgccatctacgctttacacccagcacctgaaatcttcgctgctcagattgtaaagaaatcacttaattctgtattcggtgtcttaggaactgattgcatgtcaaatgaaaatgaaactcagaatggttccatgctgtcatcgacaccagccacaaatctgggcagatttcttttcattattagtcatatagcactgaatcatttggtttacattgagacttctgttaagaaaattcagaaacagaaacggaagaatgacaaatcagagcctactgccgaggatcttcaggcagatgcctccaaaaattcggaggcacaaggtataaatgctgagttgggaattggtgcatctgtagatattgcaatagagtccctcgctgaaaaggcagaaagggagattgtgtccaattctgaaaagaatcttattggatactgtgcaccatttctcgcaaaactctgcaggaacctggctttgcttcaaaagtttccagggttacaggcctctgcaatgcttgctctttgcaagctaatgattattgatgcagaattctgtgaagcaaatcttcagatcctatttactgctgctgagagcgcgccttctgaagttgtccgatcaaactgcactatagctcttggtgatttagtggttcgctttccaaacctcttagaaccttggacagagcacatatatgcacgcttacgtgatccttcggcatctgtgaggaagaacactgtgcttgtcatttcacatcttatattgaatgatatgatgaaggttaaaggctttattaatgaaatggccgtaaggatagaagatgaagacgagaggatctcaagccttgcaaaactcttctttcatgagttatcaaagaaaggaagcaatccaatttataatcttcttccggatatcctgggtagattgtgcaatcaacaactcaaggatgaaacgttctgcagcattatgcaattcttgatcagctctattaaaaaggacaaacaaatggaagctcttgtggataagctctgcaatagatttgctggtgtaaatgatgttagacagtgggagtatatatcctattgcctttctcagctgactttcacagagaagggtttgaaaaaactagttgataatttcaagatatttgagcatgcattatctgaagattctgtaatgaaccacttcagaactgtgatagcaaagtgcaagaagtttgccaagccagatctcaaagtttgcattgaggaatttgatgagaaactcagcaaggttcatcaggaaaagaaagagcaagaggccacggccaggaatgccgaggcacacaaacaaagaattggttcacttgacaaactcatggtaactaagagaactgggaaggataagggaaaatctgctgaagtggcagaggaaactagtgaggtagttgatccatcaacggagagcaattctgaagataaggagaacatgccagaatgcagtgacaatatttgttcggaaaagagtcatacatcatccacgtttacagaatcagacggtgacagcacagaggttcaatcagcgagaacttcttgcaaaggcgtgtcgcgttcaaggataaataaaatgagagaaccggaagactcagaagacagtgctccaatgagacgtgtgtctcgcagaagaccagttaggtgatgccgaactgtaatatggaccaggtggcaacaactcctctctgggaagatctcgccttgagatcttggagttctgaagcaactggtctccctggcgcttgtcccaccagaaactctatctaacgccgatatatttgttgaatcataatgtttataagcctgcgttgacctgctaaatcttggtcagctccacacggaacggtttgctggatgctgatatttcatctagtaggttgcctctgattgataatccgtaattggagttcggtatctagtctccttgccccgtatgttgaattttttgttcgttacgatttgcgctgcttgaacaaatctatactcgcttggtcgaatccagaacttggtactactagagagatgtacctgtatgttgtctgtagactgtactgcctccattctcagtattggagtacatgttttaggtgtatgcaggtaaactttggatatatatgtattcctaaatgtattactagc

SEQ ID NO: 23426 - DNA, 1900 bp, Oryza sativa
  ref <308>: DATABASE ACCESSION NUMBER: AK073538
  ref <309>: DATABASE ENTRY DATE: 2001-12-06
gacgattccagccgatcgctgcgtagctcgccggatggcgcagcagcagcagcagcaggggtcggggtcggggtcggcgtcggcgtcgagctccagctcggggctgcacctgctggcgtcgccgttcggggacaccacctacaccaaggtgttcgtgggcgggctcgcgtgggagaccaccagcgagaggctccgccgcttctacgaccgcttcggggagatcctcgaggccgtcgtcatcaccgaccgccactccggccgctccaagggctacggcttcgtgacgttccgcgatcctgagtcggcgaggaaggcatgcgaggacccgacgccggtgatcgacggcaggcgtgccaattgtaacctggcgtcgcttggccgcgctcagcctgcagttcctctcgggaggccaagatcagctgggtcctactttggcgttccagttccaaggggtgtttatgtagggggttatggtcagcaccggacacttcctcttgggtattaccaaggattcccggttccgcaatacagctacactacatatgggacagaatacatctatccacagggtacattaaacccatatgttggtcagcaatatgttccaatttatggagtttcatccgcagcaaatactgctagccaaccatttagccagttcagcccgtccatttctggtgggggtaatggttatgtggctattcatggttacaatgtgccaggaaatccatttgtacagttaactggatcaaactttagcagtgcatcgcctacacctcggcccaccattcaggccccctttttagttgcaccggttcctactcacccgcacttggtcctcccagctcactcacctcagtttacacaggctagtggttcagaccaaagagcaagctgaactatgctgccaaacatttgtaccttgaggtacccttagattgcagcaggacaaaagagcagtgctgctgtatttgaagtactggttcttacctggcaagtaatcccccttgcattcataaggttgcccttatcatggtcatcagatgtacctggaatcatgatgttgccccgatggatgggacaatgatccaagagcaacggttgctcttgtcagttttgcttggttacatcctatgtctcaatgggactgcgaccattgctgcagcttgaagctctagatacagcattattgatcctgtatctgacagctcattagcccatggagatatactggatgctggaatggagtccagcactctgtaagatgactaatccccttggattagtcatgatgcactcatatgattgttcacctaaactcctgaagaatcatcaagctactatgtggttgattatatcccagtgttgaagtctggcacaagtccaacaaatgtagcccgtcccgtcagtcttgtgtctgtctatggtcatcgtcgtgatctatgcttgatcggcctttggaggtataaatagttattgcgtccgcttcactcatcatgtccaaaatgttggaccaagatggtccttcctcctgtatctgtaacccaagtgtctaccggaactgctcagggtcgttactcgttaccaactggtagcgaggtcacgaggactatcttctatggtgttactggtatcggtatcagaactaccgtctattgtgttactggtatcggtatcagaactgttgttatgtgtttaatttttcattgctatgtgctcagcagttcctcgacttccgagaacggcactttgttgtccgaccaaaataaatcagttcggatgagaaacccatgctttggggtcttatcggtgttgtgtaagcctggattgttaaaacttgtactatttgtacaaattgttttgctgttttgcagtgatgtgtattatgtgaaattgtttc

SEQ ID NO: 23427 - DNA, 1405 bp, Oryza sativa
  ref <308>: DATABASE ACCESSION NUMBER: AK073539
  ref <309>: DATABASE ENTRY DATE: 2001-12-06
gaatatctcaagagagctagctagagctccatttacaaccattacaagattgcatcagagaagatatcttcatagataattgttggagcaagaacacaagaaaacacgtaggttcaattataatcgatcgtggagatggtgaccagcaaggagtttgcatgggatcaggcggccatggatcagaagatcaagagcgacgtcggcgaggtggtgctcgccggagacgaggaagaagacggggacgtggtgctcccggggttcaggttccacccgaccgacgaggagctcgtcacgttctacctccggcggaaggtggcgaggaagtctctcagtatagagatcatcaaggagatggacatctacaagcacgatccatgggatctccccaatgcgagcacggtaggtggagagaaggagtggtacttcttctgcctgagagggaggaagtacaggaacagcatcaggcccaacagggtgacgggatccgggttctggaaggcgacggggatcgaccggccgatctactccgccgccgtcaacagcaactccggcgagtcgatcgggctgaagaagtcgctcgtctactaccgcggcagcgccggcaagggcaccaagaccgactggatgatgcacgagttccgcctcccgccggcgatcgccgccgccgacgcctccccgtgcatgcaagaagctgaggtctggaccatctgcagaatcttcaagagaagcatcacctacaggaagcagcagcagcagcaggcctggaggccgccggcgacggtgaccgtcaaggccccaccgccgggggactcgagctccaacaccggcagcttcgagtcggacggcggcggcgacgagttcatgaactgcggcctgactccggccatctcccagcagcagcagcacggcggccgtcatcagatgatgagcacgatgagctgcaacggcggctacttcttcaacgacggcatccatcacagccacagccaccacaagcttcatagtcaatggggctccctacaaatggcgccgccggagccgaagccggagccggagcagaagcctctgagctcgccggcgatgacgatcgccttccatcaaaacgaccatggcttccccgccgccgccgcggatttctacaaggatgggtacttggaagagattgcgaggatgatggaggtggctgatccaagtccaacaggattctatgactgtagatattgatcagtaggaacagggtttcagaatagatgctagatatgcagaattcgccgacaagaacagtgccccctttgtgtgagaggctgacatgtagggcccatgctgcagaggctgctatcactattagtcttgtacttttgttttctgatctaatatatacactccagatgggatgtgaactgtc

SEQ ID NO: 23428 - DNA, 3991 bp, Oryza sativa
  ref <308>: DATABASE ACCESSION NUMBER: AK073540
  ref <309>: DATABASE ENTRY DATE: 2001-12-06
gactcgtccccctccgccgcacccgccgacccctcctctctcgtccccggcccgacggaggtggaaaaaaaaaagaaaaagaaaaaaaaactcaaaccgccgcactcgcacatccggctcgccatagtccccctcttctccaacgaaatcttcgccgtgtcaacccgcgcctccgatttctccagcttttctttcccgggattgcgcgcgtgctccctcccgctcgatccggctccgcttgcccgtgctagccgcggactcggggggtggctctcacctgttgtgaggccgctagggtttcagctcgagctctggagccgtagggcgccgggatatggcggcccagggcggggaggcggctgccggatccgacgccaagcccactgcgggcacaggcatggagcagccaagtccatctccatatcaaccttcagcttctgatcatcatttgtggtcttcttcgactggtgctccctggaactattcaatgaataactctaaccaaaacacagtttattatgacccacaaagggatgtgtcagttccaggatctactgaaaatgtgacaagtggtgcaactcatgtggtccaatcagctatgggcattactggtgcaactgattcttatgctccttactcgaattctgttcaacccggttacaatgctccacagtatccaaactattactataactgtccacaaagtacaaatgaatcttctgttcaacaaggagtagatcaaagttcaggtgctgcttatcagcctcttacttcatttcagaattcaggatcttatgttggtcctacaagtaacacatattataatgctggtgctcatcagactgcaccgggatatgctaccagcaacaattattatcaaagcaattcctggactggcggaagttctggagataatcatgtacaatcatatcagagctatactccatcagatactaatgcagcccagagttctagttcactacccaacaattcttaccattatcatcagcagtataatcaatggccttattattatgatcagtccgcaccaagttctggtggtcctgcagttgctgtcagcagtgtttctgatgcaaacactgccagcgtcagttctggttatgtttatccgagcacccaaccacctccaccaggcactacatggagaagtgatgctggtgcaactgctgtccctcccccgcaggcaccaggaaccccagtgtttcaaaatcagcatgtcaaccaggcagcaggtcccccagggtatcaaaaccagtatgtcaaccaggctccaggcaccccaggattccaaaaccagtatgttaaccaggcaccagctgtcccaggatttcagaaccagtatgctaacctagcaccaacatatcaaccgggcactacatactatagtcagttaccactaagtaaccaagcagatcaacagaaggcttcacgttggcagggtccaatttcaaacgtttcttcagtcaatcatgtttctgaaagttctcaaccaacttttcagggttctgcgacatcagatgctctcagggtaaacaaaatccagatcccaacaaatcctcgaatagctccaactcttcctatggcaatgcccaaagtagagaagagaaatttagaagctgattcatcaaaaaagcctgcatatgttagtgtcgcagtgcaaaagaatgatgtgaaagcagctcaagatggtcacgaagctgtaacgcagggatcaatccctgtttcgcttcgtacttatgttgggcggaatgtttcccgttgcaaggatgatgcccagaggtctgccgtgcagaacatcttgaaagagataatcaccaaggcaactgctgatggtatccttcatactaagaactgggacattgagccactggttcctttgccagaaaacattacaagcacaaatttgacaagctctgcaaaggatttgagccccttctccttctcaacttctaggaggagccctagtagacgtgcaaaaagcaggtgggaacctgttgtagaagaaaaggttgcaaataaggtggaattgatttccaaagaatcagcaaagaccaatacctacaatagttcagaaacaactaaaagagcgggtagaagttgggatattgggaagtttctccaatcccgtcaggctcctttaagtcaatataatcagagacctagtaaaaagaagcggattggtggtaactcaagtctaactgaaaatggaaatgtttcaagtgacagtgataaggagcaggatctgacaaaatattatgctaatgcaatcacaatagcaaattcaccagaggagaagaaacgccgggagcatagatccaagcgttttggacgtagtcagggtgctgcatcctcaaaatctaggagctctgttccagataaggatggaacatccaatacatatgctaggagatctatgccaatgcttcttagcagaagtaatggagatgatgttagcttcgctgtggaggatttggattgggatgcactgactgtcaagggaacatgtcaggaaattgagaaaagataccttcgtcttacatcagcacctgatcctgccacagtaaggccagaagatgttttagagaaagctcttcatatggttgagacatctcagaagaattatctgtataaatgtgaccaactaaaatcaattcggcaagatcttactgttcagaggattcagaacgagctgactgtcatggtttatgaaactcatgcgcgcttagcacttcaatctggagatttacctgaattcaatcagtgccaatcgcaactgaagagattatatgcagaaggaatcaaaggctgtcatttcgaattctctgcttacaacttgttgtgtgtcatgttacactctaataacaaaagagacttgctttcttcaatggcaagcttgccaaaggaagccaagcaagacagaactgtcaaacatgctcttgcagttcattccgctgtttcatctggaaactatgttctatttttcaaattatacaagaccgcacctgacttgaattcttgtcttatgggtaaatatgatctccctctctctgtaatttgaagtgttcatctaatttcattgagatggtgtttttgctttgcaacttgcatgattggtgctgtagatctctatgttgaacggatgcgctttgaggctataaaatgcatatctaaatcatatcgcccaactttacctgtaaaatatgctgcacaagttttgggattcatggcaattgacgaagtttgtgaagctaaaagagctgatggattggaagaatgtgaagaatggttaaaagcgcatggtgctgttctttcagtagataacaataacggagaattgcagatagacacaaaggtttcttctacttccctatacatgccggaacctgataatgctgtttcacatggtgatgcatcacttgctgtggatgattttttggcacgaacatcataggtgatgccatgctgagcatttttatcactcatgtggcactgaacttcgaaggtatttctcgattgcatgtagcaatgcctgtagaggaatgttctgttaaatgcagggtaggaccttgaaatggatcagctgaagggggaagcacggtcccttgtcgaagagaacagaatgcacatgagcaggtcgctttctattatactcaaaacgtgctctgggcctctgaatctcagatgctgtgggatcgttggcatgttgctagctctacagccctgcagcagttccattttgacaaacaaaattctggaggcagcattaaccgaaaaaaaaaaaccctcctcgaagtatacattggcgggcattacttttgtaccgtcccagccagacgacaagtgtacatgttgagatgtagtcgtaccttcaggcttcagtgtattgtacaatttttgtttacatggtgaccctgatgttactcatttcattgatcaactgcaaatagttaatacaaatttggaagtaccc

SEQ ID NO: 23429 - DNA, 1718 bp, Oryza sativa
  ref <308>: DATABASE ACCESSION NUMBER: AK073541
  ref <309>: DATABASE ENTRY DATE: 2001-12-06
ggctcccgcctccatccctgctcacctgattccccgacaccatcgcacccagccgccatggcctcctcctccaagctcctagccctcaccctcacctcctccttcctccgctcctccctcctgcccgccccgtcccgccgcctccccaccggcccactcctctccctccgcttctgctccgccgcgggggatgtcgccgacgctcctgccgccgccgcagcaccagatcatccgtggcccgagtggggcgatttcctcgagaagcttcgggccaaggggtacttcgagcagcccaccctcgcgtctcgcgctgatgctgcggagggggaggtggctgcgaccgccgcggcggcggcggcggcggcgggggaggaccctggggcctcggccgacaattacccatccaaggacctgaacaggttgaagaacgcatgcctcaagttcggccgagagcgcttcgatctcctcagtgtccttcccaagcaggatatccgtgctattgttgagtgtggctgtcctaacatcttccggaagcctgtgaattctgcaaaaagactcagagagtttcttcagattgatgaaggagatgcctgtagtgcttgcaaattacgtggatcttgtgataaagcctatgtcattccgaacgctgaagacgaagctcgtactgtcgatgttatgcgcatactgctaaattatgcaatagatccaaccagcctttcaggagaaaactctgttaatggtggtgttcaagaatctgcgagaaagcttctttcagagcttactatgcttagcgacacaacaattgatccatcaattcctaaacctgtattccaaacttctagcaagaccaaaacttttgacaagggcattgcaaagcctaagttctcagctggaaagggtagggaaacaactgaaacagaaatgaagaagggtgattggctttgcccaaattgcaacttcttaaattttgctcgaaatcggcactgccttgaatgcaaagcagatggaccaaagaagatagaaacagctaccactgaaatgaaaacgggagactggatctgtccacagtgccacttcatgaactttgcacggaataagatgtgttttaaatgtgaagaatctcgaccaaagaggcagctcatccctggagaatgggagtgcccctcatgcagctttgtgaactttcgacgcaacaaggtctgcttgaagtgcaagcatgaaggccccgaaaatgatacccatgacagccagcacggacacaataggtggaggaacacgagaggggctgacagaagtagaagttttgatgactctttcgatcgggaggacgatggctctgatccagacgaaggcgagcgcagacgtgccaaagtgcgcactagggcagcatcaaccctggggagatccactggcaagagcaaaatttttgactcgattcatgaggatggtaacggtagggaggatgacagcgaggatgtcctgccgtacgaagggcagcgcaggcatattgtgagcaaaagggcgacaccagcacagaggagattcactgctggtagaagcgaggatatttgatagtctgatagatatatataacttcgatatttttccatgtagcgtatagtttcattatgtactgtgtactatttactcgagcactttatggttagactagcttggttgtaattcatactgcttagttccaaataagttcatttttt

SEQ ID NO: 23430 - DNA, 1770 bp, Oryza sativa
  ref <308>: DATABASE ACCESSION NUMBER: AK073542
  ref <309>: DATABASE ENTRY DATE: 2001-12-06
gtgagcgctgccttgccttgtcgcccttccccttcgactccattccctcccgcttctcgcgcaacgctatcccgccgccgccgcgtgtctccccaatcccaatcactagcctcctccgtcgaccgtccgccttcccctgagggcggcctgcgtctgcgtggctgcgccgtgccgccgtcgcgcccccgcagcttcttgcgtcttgctgcgcgccgtgccacccgccggcgcctgcgcctgcgccttcctttaccgggctaccaccctgcgccgtctctgactccccggccggcggtcgccctgcccgctgctcctgcacggcgtggctgcaccctagcccatgcccataactccattgtaacaccgcccccagctcgattgccgcctgacacaaggcagacagagtaggaacacccaacaagaaattcctggagctgccattgcggcgctgccttccatggagaccgagggctggcctgccctccagcctctgctgtgcctcgcctggatcgccactacactccccatcattgtcgccgcgctgccaatccccgcagctgctggtggtcacctccttcgccggctgctctcggccttctcctcccgcggcaagaccgtgaggccctcccccgcctcatcctctggttcctcctcttctaaggcgaagttcactgttccacaaaaatacttcatgcatttttatgtggtcggagtgctggcaacaacaattttgcttctggcaatatggttctatgcatatatgaaaatgacaccattattgcctgagtcatcaagttattccacaattgccagccatcttgtaggctcaaattcattctcttttggtcgtgttcactcgcgcaccatgggacacaagtatcatgtctggcgaacagtatttgtacttctattgatggaaattcaagtgctgagacgactatatgagactgaacatgtgttccactacagcccttctgctcggatgcatattgtaggatatttgacgggtctattctattatgtagctgcaccattatctcttgctagctcttgtatccctgaagcagcagagtatcttcaaggtcaagtagctgagttcatagtaaagggtcgtgcgagaatgccagatcttgtaattgattcatcatctctactacagcctcttctgaagttggggtggacccagtggataggtgctgttatattcatttggggttccctccatcagatccgttgccatgcaattcttggaacgttgcgtgagcacaaagattctgatgaatatgtaattccttgtggtgactggtttaatcgagtctcttgccctcattaccttgctgaactagtaatatattttggcatgttggttgctagtggtggagaagacattccagtgtggttcctgttcgtatttgtgatcacaaacctgtcatttgcagcagtagaaactcacaagtggtatcttcaaaagtttgaagactatcctcgctctcgctatgccatcattccatttgtatgctagtgtctacgaaatggctacattatgcaaagcttatgtatttgcacacaattacgacatgtaacttagcttgatgtaaatgtgataacaatcatactacgtaccaccgtagaggctggaagtgttgtattgtataacgtagccacgcagaatgtacctgtgacacttcatgctgtgtgttatgctacacacttggatatttatcaacattcttaagcatcgggaataaagttcttgcagaattggattgg

SEQ ID NO: 23431 - DNA, 1058 bp, Oryza sativa
  ref <308>: DATABASE ACCESSION NUMBER: AK073543
  ref <309>: DATABASE ENTRY DATE: 2001-12-06
ggttaccaccaccaccacctgcaagcaaccaaccaaccaccacccgctcgctcgccgaccgccaccggcgacccaatcacccctcgccgccgccgccggagaaggaggaggagggagggagcagccggcagcggggagggggcgcgctgcgccgttgatgagatgaaggaggtggtgctccacgtgtacgacgtgacgaacagcgactcggagaagacgaacaacaccatcctccagatcaaccgcatcttcaaggaccggatcggcctcggcggcatcttccacagcgccgtccaggtctatggcgaggaggagtggtcgttcgggttctgcgagaacggcagcggcgtcttcagctgccccatcgggaagaaccccatgtacacctaccgcgagtgcatcgtcctcggggagaccgagtgctccatcgccaccgtgaaccggatcctgcgggagctcagccgcgagtggccgggacactcctacgacctcctctccaggaactgcaaccacttctgcgacgtgctctgcgagaggctcgccgtccccaagctcccaggctgggttaatcgttttgccaatgctggtgataccgctgtggtagttgctgagaacacagcagttaagttcagacaggctaaaacagaaatagtcaatgccagtagagtagcatacagatttatggcaggcctggcatcgaaaaatcaaaacccacaaccagagtccccaagtaaccaaagcagaaatggcccaactttccaggggacttggttcaagaacatcatttcgaatggcgcaaagccttcctcaagcgaatcaacttcatcgcatgacactggtactggtggtgatgaatcctctttgcagaatcaaaaaccgtcggagcagtcaacacggttgtagccgctgccaccagttatcacctgttgaattgaatctgtagtgtaacagtagccagcatttgttaaaaatacatggcatgtttattcacgcatgaatctcttgtatctctgcgttgtcttgcaacgggaaacatgaaatgttaaaacacgtcatcc

SEQ ID NO: 23432 - DNA, 1322 bp, Oryza sativa
  ref <308>: DATABASE ACCESSION NUMBER: AK073544
  ref <309>: DATABASE ENTRY DATE: 2001-12-06
gaatggggcgccactgctcctggtggtggtggtgtgcttcggcttgagccccgtggcgaggtctcagtcgagcgactcgtgctccactccggcgagcctcgccgccggcgtcagcaagctcatccccttcgacacctccaacctcacctgcttcgacgcatggagctccgagaacttcatcgtccgctatacgagcagcgggagcacgtggagcttcgtgctgtcggcgccggacaagggagggtacgtggcggtggggttctcgcaggacggcgccatggtggggagcagcgcggttgccgggtggagcagcggcaatggcgtcggcggcgtggcgaagcagtacaagctgggcgggacgagctcgcgcagctgcccgccggaccagggctcgctgtcgctggtggccaagaacaccctcgtcgtggcgcagtcgtcgcggatctacgtcgcgttccagttcacggcgccgcagccgacgccgtacctcatctacgccgtcggcccgtcgaacaccaacccctcgggcaacggcgactacctcgcccagcaccaggtctacacctccgccgccgtcaactacgccgccggcacgacgtcgtccgccggcggcggcgcggcggacacgaagaagtggcacggcgccatggcggggctcgggtggggggtgctgatgccggtggggatcgcgctggcgcgctacttcaagaagcacgacccgttctggttctacgcgcacatctccgtgcagggcgtggggttcgtgctcggcgtcgccggcgtggtcgccgggttcaagctaaacgacgacgtgcccggcggcgacacccaccaggcgatcgggatcaccgtgctcgtcctcggctgcctccaggtgctcgcgttcctggcgcggccggacaagtcgtccaaggtgaggaggtactggaactggtaccaccacaacgtcggccgcgccgccgtcgcctgcgccgccgccaacatcttcatcggcctcaacatcgcgcacgagggcaacgccgcccgcgccggctacgggatcttcctcgtcgtgctggcgctcgtcgccgtcttcctcgaggtcaagctctggcggagccgaaggagcgggtgatccaccgccggcgtgtatgatgctactggtggtgtacacggagatgacacgattttagcgatacgtacgccgcgcgctacgtgggtagcatgcgcgtacgcgtacgtgcttcttttttttatttatttttgggtaggtgttatatgagcgtagatgctctctccgtgttcatgttcgagatggagtacatttatttcgtgtattattc

SEQ ID NO: 23433 - DNA, 1127 bp, Oryza sativa
  ref <308>: DATABASE ACCESSION NUMBER: AK073545
  ref <309>: DATABASE ENTRY DATE: 2001-12-06
ggttcttggagccttggaggaccaaagctacgtgcggacaaatcgtacggcaagtctaccccgctctggtttcctccgtcgcatcgcaaattcgcaatatcgcatcgacgcctcgtccctcctaggcctagctagtctactccgaccaagttgtcgccgagaagcgaggagcgccggcgatggaggtgaagtgccgtcggctggaggggaaggtagccgtcgtgacggcctccacgcagggcatcggtctcgccatcgccgagcgcctcggcctcgagggcgccgccgtcgtcatctcctcccgcaagaagaagaacgtcgacgaggcggtcgtgggcctcagggcgaaggggatcaccgtcgtcggggtggtctgccatgtctccatcccggagcagcgcaagaacctcatcgacacggcggtcaagaattttgggcatatcgacatagttgtctccaatgctgctgccaatccttccgtagataacatattagaaatgaaagagcctatccttgacaaactatgggatattaatgttaaggcatctattcttcttcttcaggatgctgctgcatatttgcggaagggatcatccgtgatattgatttcttcaattactggctataatccagaaccagcattgtcgatgtatgctgttacaaaaactgccctgcttggtctcacaaaggctcttgctgctgagatggggccaaatactcgtgttaactgtatagcccctggttttgttcctacaaattttgctcgtttcctcacaactaatgacaccattaaaaatgagcttattgacaggagcacacttaagagattgggtactgtggaagacatggctgcagccgcagctttcttggcatcagacgatgcatcattcattacagctgaaactattgttgttgctggaggaactcgatctaggctgtagatctaagctgggcttggctatggtttgacaggctggcgacttacaaagtgcacttcttgctggtaaataacctatagttcttgctataggcaatataatactatatgtacaaggaccgatgttaaactgcttaaatcgtgaccggaacttttttcgttgctttgaagtcacccatgtcaatatgcc

SEQ ID NO: 23434 - DNA, 2621 bp, Oryza sativa
  ref <308>: DATABASE ACCESSION NUMBER: AK073546
  ref <309>: DATABASE ENTRY DATE: 2001-12-06
gttggattgggatttttgggaggggaggagaggaaccctaatcctgtggcggcaagcgggcggcggaggtggaaaagaattaggagtcggagaggaagatggccagcaacatcaagcttcctttggccgatggggaggagcgcttgtcctgttgcggcgagctgttggccatggggaaaaagttggaggaagcggtgacgatcagcggcaagcttcctttggaggaggggatggggaaggggaagcggcgtccagtggtggcggagcttgaagatgaagaggagtttaaagatgaggagttgactgagcagataattgcgcgagacttccgtgtcagctgggaacatcgctttagccctcgctattccttccacgacaccagtaagccctttaatttcctttctagtttctttcaacttcttcctccgcaatcaacaagtactagggattgtttctgcaaatctatctatctatgccctttaatcatgttccgtatcgccattatattttacacacacacacacacaccccattagctcggattctggccggttcgtgttctattaacatcttgttttcttttattttggggtcaacagattggcatttagtatgtgaaacaagtgttagcgtttcctaattacactcaataaacccattacagcacaaatcctgtcaaccacatcatgatactagggaaaaaaaacaaatttggaccagacccgatagattatctggctatgtgccctcttgatggggtatagattgtccaggcggcataaagccagtgcttggcaacgacaaggtggactagttttgcccccttcctttgctcatgacggagggaggagcttttgcggttgctagtgtcaatgagagggcttggaggtggaaaggcgggcaatctctgcatcccccgatgtttcaagcaacgaggaaaaacttgaagctagtcttctaatattttctttttggttgtttgtttttctgtgtatctcggttatgagatgtggagtgtatggacttgtttatcctttggccgtatgtctgagcaattagagtctggattgctgctatccattagaccattatctaaaaaaagtgccctcttgataatatcgaccaattctatttcttatatatgttggcacaaaagcgtgtcaaataatccgtatcagtaggaaccaatttgttttttcttcacttagcaccatgaatgaactctggcagaattaaagtggattatcaacttaacggtcttttctttttctttatttcttgcttttcttttcttgccactacttgtctgagcaataacctaatttcatgtctgtttatcttactcctcattctcagcaagattaatgtctatatgtgtgtttaactaaaattggatttgagtcgaacatgggacataacagtatataacggacatggtgcaatcagcatccacactgctattatttgataacaaatatttctactacttgactgcagcaaccgtatctcccatgcgctatacagagggacctatcccaagatatgcttgctgctgtgatgctttgcggatcttctctctccaagtgaaagaagcaaaagatggtcttgactggccgctacatgtgtatggcttggttgccaccagggactctgtagatcaaaggcataaccttcttttcaagcgcacaagggataattgtcagattctcactccacaggattcacacctgctgttaacaggcccatctcgtgcagttgtggtaattgatccagtaacgtttgaagttgaactaaaagtaaggggaaaaacagaggctgaggataaagtgttgagcctgacggtctttatgcaccacacggcttacccataaacgaagcatacttacatgatccgtagatgtttgtccagcaaacatggcgagcttgagttgacatatgctgcacttgttggaacagttgaagccactatggtgagtttccaagttaccgaggggtcatggccagatcatctgcgaggagtagtcgtttgcaaaactgccagcgtagagggaggggatattgtgctgcttgattctcgggatggaaaaatgcctatcaattgcaatggtgccattgagctttcaaggcgtgtggtttctgcggaattagggggagagctgagtgttgatttggtggccttgcaagccaacaatagttcagaaatcgtctcaagaggcagggttgttttcacacctgacgaggctgggaggagcagtggtgtattcgatcttgtgttttgtaaggtggaagctactgtttgttggtcgctcctcgcaacccttgggcaaatgctatcgggcaacccttgggcataatgctcctggcagcagacgttgaacaatgctgtcatgatctatttgcctataatttctgcctaattgtattaagacggtgaatctgtgtagtcgagttgcagctagtgtgttaatctgtctgaatatttccaagggtgtttccttccttttggttggtatttagcatcatgttatgagggatctgatcaatgttattctgtctgtccttgcttgagatgttaatgcgatactcgtttgtaaatgatgatggttgatcttatatggagt

SEQ ID NO: 23435 - DNA, 1434 bp, Oryza sativa
  ref <308>: DATABASE ACCESSION NUMBER: AK073547
  ref <309>: DATABASE ENTRY DATE: 2001-12-06
gccctcaaatttcctcctcgcctcgcctcgcctcgtcccccacccaccagatctaagcaggttgaaatggccacgacgcagcactccaacggcggcgccgccggcgacaacggcgaggccgcgccgccgtcggttccgccctccctcgcgccgccgcggaaggtggccctggtgacgggcatcacggggcaggacgggagctacctgacggagctgctcctcggcaagggctacgaggtgcacggcctcatccgccgctcctccaacttcaacacccagcgcctcgaccatatctaccacgacccgcactcccagccgtcgacgccgcgccccccgatgcgcctccactacgctgacctctccgactcctcctccctccgccgcgcgctcgaccacatcctccccgacgaggtctacaacctcgccgcccagtcccacgtcgccgtctccttcgaggtccccgactacaccgccgacgtcaccgccaccggcgcgctccgcctcctcgaggccgtgcgcctcgccagcaagcgcatccgctactaccaggcggggtcctccgagatgttcggctccacgccgccgccgcagagcgagtcctcccccttccacccgcgctccccctacgccgccgccaaggtcgccgcccactggtacaccgtcaactaccgcgaggcctacggcctcttcgcctgcaacggcgtgctcttcaaccacgaatccccacgccgcggcgagaacttcgtcacccgcaagatcacccgcgccgtcggccgaatcaaggtcgggctccagaccaaggtcttcctcggcaacctctccgccgccagggactggggattcgccggggactacgtcgaggcaatgtggcgcatgctgcagcaggacaagcccggcgactacgtcgtcgccaccgaggagtcccacaccgtcgaggagttcctccaggccgccttcggctatgcagggctcaactggaaggatcatgtagtcattgacaagaagtacttccgccccgccgaggtggacagcctccagggggatgcaaccaaggccaggaaggagcttgggtggaagcccaaggtcgggttccagcagctcgtcgagatgatggttgataacgacattgagcttgccaagaaggagaaggtcctcgtcgatgccgggtaccgtgatcccaagcagcagccatagaattggctaccatatggtttggttcttgggagattggggttgcattattacctagaaactgatacattgtggctgtcacagaagaggtgggctcaagttaaccatcggtgtttccttgaggtaggaataaggagtgttgctgtttgatcgatcctatagtgcttttcattacgttttactatgtcatattgctgtgtcctcttaacagataataataataaacgagtcgatgccatttgc

SEQ ID NO: 23436 - DNA, 1078 bp, Oryza sativa
  ref <308>: DATABASE ACCESSION NUMBER: AK073548
  ref <309>: DATABASE ENTRY DATE: 2001-12-06
gggatcgttcgttcgcgccacaccgcactctctctctcaccccctacactgaccgatccactcctccacttcacacaatagtggcagttcgtgtgtgagaccgagacagtgagagtgagagagggagagatggcgagcaagccgcagagcccgctgcgcatcacgcacgacggcgagttctacgcgcggctgctcaccaaggagagctcccagggcaacccgtcgttccgctactacggcgccggcaccggcgccgtccccttcgtctgggagtcccacccgggcacgcccaaggtcgacgcctcctcccccttcgccgaggccggcggcgtcccggccatcaccccgccgccgtcctaccacctccgcgccgccgccgccatgtcgtcgtcgccgcagccgcacggccgtagcggccgcaggaatgttgttaatggtcgcggcaagtactgcggctactgcaggctcaagtggatcaagatcggcttcatcgccgccgtcttccgccgcctcgcgctcggcaagccatcccgcgcgtcgtcttcctcgtcggccgtgcagccctcgccgtccacccgctggctcttctccggctccggcagcgtcgagaccagcgacgagccgcagccgccggcgatttcgccggcgtcgacgaagcagggaggcctcctctgcctcggggtccggccgagcccatggatggtgcagctctgcggcgtccagagcatcaggagggtcgacaccggcagcagctgggctacgcacggctgggcgtaggccggtcgccgccggcgagccggcgacaagtcggcgtcggtagtaagtgtaacagtaacagaaatgcacgtacaccgtcgtccacgtacacagacgtactccatcatgcgtcacatgcagtggttgggcctccttaaattaacctactatagaaagattggtgtacacgacatcgatcgttcctgtcacgtatttgtgtgcattggtaattagctagctgttcgatccagtgtctgctgctgtgtcctgataatgtacaacatataagaaattctcaatattaagtgtatggatttgcatg

SEQ ID NO: 23437 - DNA, 2022 bp, Oryza sativa
  ref <308>: DATABASE ACCESSION NUMBER: AK073549
  ref <309>: DATABASE ENTRY DATE: 2001-12-06
gattaacgggtcatctcctgccttccccattggtccgaacagctaccgctagcacacaaaagtacagaattccaaaccaaatcctgtaccaaaacaggaagggcgcaggcatgcctcttcttatcgtgcagcccgtacccatttcgacaggtcctattgcctgcgctagcaccgcgcgtcctgcagcagcggcgcacgatgacgacggccaccttttcgacgatctcgtgctcggctacggcggcgacgacaagacgagcgccgacgccgacgatccagcgaggaagctcgagtggctcaggtcgcaggtcatcggcgcggacgcggagttcgcgtcgccgttcgggacccgccgcgtcacgtacgccgatcacaccgcgtccggccgctgcctgcgtttcgtcgaggacttcgtgcagcgcaacgttcttccctactacgggaacacgcatacggtggacagctacgtgggcttgcacacgagcaagctggcgtcggaggcggcgaagtacgtgaagcgcagcctgggagccggggcggaggacgtgctgctcttctgcggcacgggctgcaccgcggccatcaagcggctccaggaggtgacgggcatggccgtgccaccgacgctgcgctccgtggcgctggacgtcctgccgccgtcggagcggtgggtcgtcttcgtggggccgtacgagcaccactccaacctgctcacgtggcgggagagcctcgcggaggtggtggagatcgggctgcgcccggacgacggccaccttgacctcgacgccctggaggcggcgctggcggcgccggagcgcgccggtcggcccatgctgggatccttctcggcgtgcagcaacgtcaccggcatccgcaccgacacgcgcgccgtggcgcgcctgctgcacggctacggcgcgtacgcctgcttcgacttcgcgtgcagcgcgccctacgtcggcatcgacatgcggtccggcgaggaggacgggtacgacgccgtctacctgagcccgcacaagttcctggggggaccgggaagccccggcgtcctggcgatggcgaagcggctctatcgcctccgccgcaccgcgccgtccaccagcggcgggggcaccgtcgtctacgtcagcgcatacggcgacacggtgtactgcgaggacacggaggagcgcgaggacgccggcacgccggcgatcatacagaaggtccgggccgcgctggcgttccgggtgaaggagtgggtcggcgaggcgtgcatcgaggcgcgcgaggaccacatgctcgcccttgctctccgccggatgcaagcgtctccaaacctgcggctgctgctcggcggcgaccggcccagcggagggcgctgtctccccgttctctccttcgtggtgtactcaccgcgcgacggctccgagcaggatgagcggccgcagctgcactgccggttcgtgacgaagctgctcaacgacctgttcggcgtgcaggcgcgcgggggatgctcctgcgcggggccctacggccaccgcctcctcggcatcacgccggcgcgagccaaggccatcaaatccgccgtcgagaagggctaccacggcgtgcgccccgggtggacgcgcgtcggcctggcctactacacgtcgacgcgggaggcggagttcgtgctggacgccatcgacttcgtcgccagtttcggccaccggtttctgccgctctacgctttcgactgggaaaccggggactgggagtacaaccacagcttcggtcgtgtcctggcaaacaacaacgccatcagcaatgctgccgctgctgcttctagtggacgggtcaaagcagaggacgagtaccggagctacatggcatttgcacggagcctagccgactccttgggcggatgtctggataacactcctgctagacacgttcccaagggcatcgacccacagttgctttacttccctatgtgagatcggatagttggattctttgttgttgaattttacccttggtttttggccgaaaacctgg

SEQ ID NO: 23438 - DNA, 2399 bp, Oryza sativa
  ref <308>: DATABASE ACCESSION NUMBER: AK073550
  ref <309>: DATABASE ENTRY DATE: 2001-12-06
gattcgcgaagccgcacaacacaacgcaacgccgcgcttccgcctctccacccgccgccgcctccctcgccggcttgccgccgccgccgcggtcgcgaggcggagaccttgcgggacgatcggagcgacgtccctctacacccctccccctccgcaacggcgagaagaacaagggggccgcccgccatgctgcgccggtgcgtgcgggatctgtacccgctgcggcctcttaggaggatccctaggccgatctccagcgaggtcccaagtccagcatttcttcgacccagaagcaagtcgacaaaagcttcccaacagagttcaacacagaatactgtccctggccctcaaggagaaccttctcagtcaggaagcaatgttccgaaagttctgcttggaactctgatggtcggcgctgctgctatggctgcttatcaagctggctacatagacgatcaatttaaggatataatatttccctctacaatgaaggaaaaaaatatcagaaagatatacgatgatctgaaggctccttctgaacaaaaagttgatgagaagcaagtagtatcagatccaaatgttgacattgttcagaacagtaacaacgaggctcatcctcaaaaggaccttccaactgaagggatgggtccaccagaaattccaaccactgatgagcagactgtttcctctgaagaaaaggaaaaagaaacccttgcccaggggacaccgcaaattccagatgaacatggagctgctgctaaaccactgtcccaagatattcctgttattgacataaatccaagtgttgatgataaggcaacaggagaagttcttcctgaacaaactgacaagacaaccacttcagtttctccggtacaatcgagcctagcaacagcaggtccttcccatcatgtacacacagatacagatggaccaaaggatccatcaagcgctggtgcagttgaacataaatctctggctgagacatatttactacaagaacctgataattctaaagacatgggtgctaaggaaagtaaacacgatggtgttattagtacgggaacttctgatgatgggaaaattgtacttgatatcatagaggctattcatgctgctgaaagaaagcaggcagatgcagatgcttacatgtattcagaagagaaaaggaagttgaaggagaaatatgaaaaggagctgaaggacaccagggctcgggagctcatgtatgctgaagaggcagcaattctggacaaggagctgaagaaagagaaattgaagtcagctgctgtgattaaggaactgcaagaaaatgctgaacaaaagctaagggatgagctgcagcagaaggatgaggaaacaagtcaacaagttgagaaggttcgcgagttagcaaaggctgagcttgctgcagctcttgcaaaagagagagcatcccagatcgaacagattgctgaagcaaatctcaatatagatgctttgtgcatggcgttttatgcacgatctgaagaaactcggcagagtcatccggttcataagcttgctctgggtactcttgctttggaagatgctctatccactggatcaccaatccggacagaggtggatcaattgcgcaaatctcttgaaggtattgataaggactcactgttagaattggctctttcatcaattccagaagatgttctcgagtacggatcagatacccctatggatttgaaacaaaagtttaattccttgaaggaaacagtcaggcatttcagccttataccagcgggtggtggtggtatgctgactcatgctgttgctcatgtggcttcatccattaagatcaaagaggaccaatctggagacggaattgagtctcttctaaacagagtggagaacttgattatacatggagacttgagtgcagcagcggaggccttggaaagagggttacaagggagtgaagcagcagaaatagctagcgagtgggtgaagcaggcaaggaaacgtgcaatagcagagcagacgcttactctcctccattcttatgcttcttccatcacattctcgtgattttgttcatcaatgtagtattcaacaagatctgcgagttacagacttacgttactcagtccaatcacaaatatcttaagaccatattgcaaatacctgaatatataggagccagagccattcctgtcaggcggctgctgaactttcctccttttaacagagctaataatttttggcatgtagctacaagctacttggcattcttgatgttttagtcgccagttgaggcacaatttggatagaattgccgattttgctgcggatgtaaattttcttctgtacaatgatgatgattttcgggggtcgagtttatgaaatcagaaatcctgatgctggct

SEQ ID NO: 23439 - DNA, 924 bp, Oryza sativa
  ref <308>: DATABASE ACCESSION NUMBER: AK099359
  ref <309>: DATABASE ENTRY DATE: 2002-08-28
gagtactgctcattttttcagttccactcgagctaagtgcggtacactgatcaacgatggtgtcctccaagatccactgcgccatggccgcgctgctccttgcaattctcctcccggtttctcatgcgtcggggaggtatgtagctccggctccggctcctgttcctgttcctccgccgccgcgcacctcgccgccgagccgtatccagccggtcgtcgtcgtccagggcacaatctactgcaagtcctgcaacctcagcggctacaaccgctacatggacgcgtctcccctaccaaatgcgacggcgcagctggtgtgctacggggacaaggtgctgaacatgacgagcacggcgacggacaagaacggctacttcctggtgatggtgtacaggctggacgtgttccggcggagcaggtgccgggtctacctgggctcgtcgccgtcgccgctgtgcgcggcgccgttcatcccgtcgaacaagtggctggggctcacgctggagagggagagggtggcgtcgctgcccaagggcgtccgcggcgtgtaccgccccaagagcacgctcatgttcggccccggcaccggcggcaagtgcccggccgccgccgccgccgacgccgccggcgtgccgatgatgtgatgagacgatcgatattgacatggagaatttgagatgtgcgttcacgcatatcgccaatttagttagtggtttggttggatgatgcatggtttaattaagttcgtgcacgttatttggaattaataatgggtagaaattagctagctcgtcttttggtcgatggagcatttgttgtaaccttgtagtagctcgtcgcttaggtttgcagtggttttagttcgctcgtcagtgtaatgtcatgagaaaaaaaattatctgagtacgtctatcctttcggtcg

SEQ ID NO: 23440 - DNA, 1227 bp, Oryza sativa
  ref <308>: DATABASE ACCESSION NUMBER: AK073551
  ref <309>: DATABASE ENTRY DATE: 2001-12-06
tgagggaatgaaagatggcctttctctctccttcgctctcatcagctcgagccccgacagcaagtgtgagctactgaactcgagaccctcctgtcgcgcggcgcggcgcggcgagagtggccttttgatccgacgaagctaccttttatcagtctaagaccctgccaatgtccatttggagataggatgtcggaacagcaggatagtactagtaaaagctctagctcaagcatcagcagcagtacacaggagagcgaggaggaggtatctataacaataggtagcctcctcgcccaagcaaagaacaacagtgggcatagtcttggaaggcgcctctctcaattgggttcaatcccgcacactcctcgagttaatggaaaaatccctaatcttgataatgcaactttggatcatgaaagattgtcggaaaggttgggaaattatggtttggccgagtttcaaatagagggtgatggaaattgtcagttccgagctttggcagaccagatatttcgcaaccccgattatcacaaacatgtgagaaagttagtcatgaaacagctaaaggaattcagaaaacagtatgaaagctatgtacctatggaatataaagtctacttgaagaaaatgaaaagatctggggaatggggggatcatctgactttacaagcagctgcagacaggtttggtgccaaaatttgtttgctgacgtcattcagagacacctgcctaattgagatagtccccagggatgtgactcccacaagggagttgtggctaagcttctggtgtgaagtgcactacaattccttgtacgcaactgacgatctcctaacccgcaaaaccaagaagaagcattggttgttctagggcgtctcacctcgagcttccttgagcttctgctgctgcagttcttttcccttcaagttagcagcatctgtggtgcttactagttttactaccatggcaacccagccggcactgcaattccctaacctgaaagaagagcttatgtacagtttaactttcagtagtatgtttcgcaaggtacaaacctagaactgtgcaactttcagatccatgagtcccatgttctacccggcgagatgtagttttgtttttgcatagtatattgtgatctatccaggtgcttgctttgtaaaatcatcatgtgagctggctagattttttaccatatataagcttcagttgaattctcgaattccg

SEQ ID NO: 23441 - DNA, 1602 bp, Oryza sativa
  ref <308>: DATABASE ACCESSION NUMBER: AK073552
  ref <309>: DATABASE ENTRY DATE: 2001-12-06
ggctttgacccagcaagcaagagcgtctagtcacctcaaccacgaacttgaatccgctgctctgctgctgctgctgcaactgttgcgctttgagtgtgactacagtgtctgctactcctactactctgctttgccactacttggttcacaggagggtggcgagagggagagtgtgaggagctgagagagggagagggattgggatggagttcttggtggctcaagcgctcctcctcctcgtcgtcgtctccaactccctcctcctcccttccttgggtcttgctgtttcaggtcaagaagcacacgaggtggccatggctggcctccatgatcagcagccgccatctccggcagcggtggctgcgcgtgtatcggtcgctcaagcggacctccccatggtggcctcctcggttcttggggcggagtcctggctcagggcccatgtcctggctcactacccctccaaccacgtcaccgccatcgccgtcgccgtcgcctgcgcccgcggcggaagccgccatggccaagacctccgagcctcgcgcgccgccaagaacctgcaccacgccctcgtgcgctggggcctcgtcgacgaaatcaagatcgacgcctcctccgccccgtgcgccgaggaggtgggaggaggggctctgaagcggaggctgtacggcatgcaccacctgccgccgccgctgccgccgacgtcggtggcgagtccgccgccgcccggcgtgccgttgtccttcgcgccgaacgcgccaccggaggttgtcccgtcggttccgcccgccgctgcgccgccgagcacgcccgtcgtcgtcgtgcctgcgcctgctacaagcccacccatgtcaatgccggctactccgcctgaggcggcggctggcggcatggcgccgtgctcggctccaccgacggcggcgatgtcgccgcagccgtgttccggtgagggagggaacggtggtgggcaatggtgcgtggccaagcccactgtccctctggacaggttgcaggaggcaatggattacgcctgcagccaggatggggtggattgccaggagatttcgggcgggggaagctgcttctacccggacaacatcgcggcgcatgcgtcgtatgcgttcaatagctactggcagaagatgaagcatattggtgggagctgcagctttggtggtactgctgtgcttatcaattctgacccaagttatctccagtgtcgcttcatgatgagttgaaaaatgctgaacttgaatcttctatttgggttcgttgagcgaagcgaagatctggatctcttgatggccgatggttgcattgtgctgcgaaacatcaagtctcattttttttgcccatccggggtcctctgttaggacgccgtgctgatgtaggattgctatatgttaaaagtcagattagatgcatagtttcgtctgattactgttagagcacaatttctctgcttggctcatggtggcctggaggtactcagcatcttgctgctggccacacgatgattatgtaaggcagaaaagatacctcaattggaacctgcatgctgatgttatgtccagtttattctgaagtattgtttcatttttg

SEQ ID NO: 23442 - DNA, 2722 bp, Oryza sativa
  ref <308>: DATABASE ACCESSION NUMBER: AK073553
  ref <309>: DATABASE ENTRY DATE: 2001-12-06
gaatgcggctctcctcttccggtctggtgctcgggatctgggcctccggcgcggcgaggggtcggaatcggggtcctcgccgtcgccgtcgccgtctcgcgggcgggctcccaccgagtttgacttgggggtgaaggaattcgagctcctcgcttttcctcccgtggggccacaaggtttcccgggtgttagttgcttctcgtggcgatttatgcggaatgtggtggggaatttcggctgttcatggccaatttcggtgtctgggtagcagctgaattggcggctgcatgtgtggttttttttttttgtgctgtttgctctagtctgattcatcgcgcggttaattgggttctgcatcttgtggtaattggttaggagctttgggttttggcttgaaatttcttgtttactggcgattgagctcgagttcgtgttgaattagtgggatttggtccaatgctggtgtaatacgttggatttgtgtgctcttgtggaacaaggcatagattttgagttatttggggtttgggatggtagtttctggtcctttggtttgttacaatgctttgaactgtggtgtttccccatgcatgtgttgattttgagatgcagaagtaagcatttggtgttcaatttctggaatttagatgctcttaggtgtaaacttgatctggttgacttcaattgaaaatggagtacagggctcagtgcagattcgttttagccattaactgaataaagatgtgcttttttccttttacgtgcatgatttggttagcattcaggaccagtcgaactgtacatgtgttctccgctgttttcttctgttttcttggatttaagagcttaatttgttctacaaaatgatttgccgttacatagtaatttgctccgataattttgtcctttcttttgctgtaaatgtcaatcacttgcctggttaggacagcacaatggtcaaatatgggacaataactgtttccagcctgttgtgggtcattgttcactagtcactagaccttgttttattgtgatgctgattcttttcagtgtcacatggaattggatcttcttccattttgttggtttaagccgattttcgttattgtcaggagtgatttcatttgttacaattccgtcttctttctttgccctctttcttcccaaaggactcaacatgcattatgcatatcgtaactaaacagcatttccctctatacaaattcctgatggcatttcctgccaaattagaaactgtatctttttccaggaagaaagtatctactaccttttctttccagatgacattcttaattcttgatcaacttgtccatcattttgaccttgatttaagatgcactggaccttttgcaggctgctgctttttgatctgcccatcaagggaggaggctgacaaggcggtgaatgcatatcacaacaagcgcacccttccaggggcttcaagtccattgcaagtgaaatatgctgatggagagttggaaagactggagcacaaacttttcattggaatgcttccaaaaaatgtaacagatgctgaaatgactgatttattttcgcaatatgggaacatcaaggatttgcaaattttgagaggttcacaacagacaagcaaagccggctgtgcctttttgaagtatgaaacaaaagagcaagcgctggcagctatcgaagctctaaatgggaaacacaaaatagagggttcaagtgtacctttggttgttaaatgggctgacactgagaaggaaagacaagctcgaaaagcacaaaaggctcaatttcacccatctaatatgtcaaatccaaatgcaatgcaacagtcttcattatttggagctatgcagatgggatatgtaccacagtataatggttatggctaccagccacaaggaacctatggactaatgcagtaccctttatctcctatgcaaaatcaagctgccttcccgaatatggttcagtctgttaatcaaggaagctctattcgtggagtcaattctgaactttcacctaattctgctcctagatcgtttaactcaatgcagttaggcagtccttattcgcctgtgcctagtatgcagtatccgggatcatatcctggtaatgctatcaatagtcgtccttttgtgaattctcacaattcaatgaaagttccaaatgcgaatgctagttctcccacttcttcaagtactagcagcaaccccggtcctcagatagaggggtcctcctggagccaatttatttatctaccacatccctcaagaatttggcgaccaagatcttgccggtgcctttcagggttttggtagagtactgagtgctaaagtttttgtagacaaagcaactggtcttagtaaatgcttcggttttataagctatgattctcctgcttctgcacagacagccattagtatgatgaacggataccaattaggtggtaaaaaactgaaagtacaactcaagagagacaacagcaagcacagtaaaacttattgacagcgaccttttgtatgcccacacgatcaggaaaattggtacatatgtgtcacacaaattgatcgttacagttgttacctctggcctccaccatgtgttgcaaggtggcggcttgtgtatctttgttcaattcacattcttgaaaatttgttacattgtgtaatttgttgcagcatagttgtagaatctgtaccatcagatccattgt

SEQ ID NO: 23443 - DNA, 1505 bp, Oryza sativa
  ref <308>: DATABASE ACCESSION NUMBER: AK073554
  ref <309>: DATABASE ENTRY DATE: 2001-12-06
ggacctccccccattctatcaccaagaaaagaggggaaaaaaaaaagagagaaaaaaaaagagagagagaagagaggaagagatggagatggccatcgacacgccatcgccgtcgccgtcggcctcgtcggcggcggcggggaggcagacgcgcgcggcggagtcggtgcggctggagcaccagctgctgcgcgtccccctcgaggccctcaagtccaccgtgcgcaccaaccaccgcctcgccgagaaggagatcgccgccgtcctctcctccgccgccgccgcgccgggaggaggaggaggaggcagcggtgacgccgccgccgtcgaccacctcacctccctcgtctcccgcctccacggcctcaagcgcaagatggaggagggagcgcgggcggaggagctgcaggtgcagaggtgccgggcgcggctcaaccgtctcgcatcggcgagctctggcgatgatgctgagtgggaggaattgcggctcaagcggatcctggttgattacatgctgcggatgtcatactacgacaccgccgcgaatctcgcggagacttccggcattcaggaccttgttgacgttgatgtttttctcgatgcaaaaagagtaattgattctcttcagaacaaggaaatcgctcctgctttagcttggtgtgcagaaaacaggtctcggttaaagaaatcaaagagtaagcttgagttttttctgaggcttcaagagtttgtggaacttgtcaaggccaagaacttcatgcacgctatagcatatgctcgaaaatacctttctccctggggggctacacacatgaaagaattgcagcgcgtcacagcaacattggtttttagaagcagtacaaactgtgctccttacaaggtcctgtttgagcaaaatcagtgggacagccttgtggaccagtttaagcaggaattctgcaaattgtatggcatgacattggagccgttgctgaacatctatatgcaagcagggctcacagctctgaagacaccattctgcttcgatggtaactgccccaaagaagaccccttatccctgcctggcttccggaaactagcagagccgcttccattctccaagcagcaccattcaaagcttgtctgctacataaccaaggagctcatggacactgagaacccaccgctcgttttcccgaatggctatgtttatagcaccaaggctcttgatgagatggccaagaagaatggaggcaaggttacatgccctcggacaggagacatctgcaactacaccgatctcgtcaaggcctacatatcatgatcacacaacgcgtgtggatctcatctgggaagacactgatttgcgcgggtgatctgcaccctgaatgcttgtacatagactgatcagaacattctctattctgttaagtttagtctgaattgtgatgcaaatgcaagaaccattgaaactacttcagtactgatttctgattacactttgaccttttgtgtcattgcattcc

SEQ ID NO: 23444 - DNA, 1414 bp, Oryza sativa
  ref <308>: DATABASE ACCESSION NUMBER: AK073555
  ref <309>: DATABASE ENTRY DATE: 2001-12-06
gaggctaccacgcgagaagcgaacgcgacccggccaccaccacacctctcctccagctcgcggtctcctcctcctcggctcctcccaaaaaagagctctagaataaaagagaaggggaaaccccccccccaaatcccacgccgctcggctcaccgagtgctgcatcggatcggatcgggacggcggtggcggacgcgagatgtgggagtcggtggcgctcacgctggccggcgccgccggaaacaacgtcggcaaggtcctccagaagaagggcacccacatcctccctcccctctccttcaagctcaaggtgattagggcgtacgcgttgaacaggctctggatcagcggattcctcatggacatgtgcggcgccgcgctcatgctcaccgcgctctcgcaggcgccggtctccgtcgtgcagccgatcgccggctgtggcctcgccatactctgcgtgttctcccatttctacctcaaggagtccatgaacgggctcgactgggtcgccatcacattggccggtctaggcacgataggagttggtgttggaggcgaggagcagaaagtggacaaaattccactgttcaatataccttggctggtgctctccattgtcatcttgtttgtaggttcttctcaacacttggcttcatatctacaaaaggcaaaggcgtgaacaagagttgactggacctgaagtgatcgaggagatcatatatggattggaatctggcattctgtttgggatttcatcagtgatatctaagacaggattcgtgatgtctgaaatgggttttccaaagattgttgtaccggctgccatttcttgtagtgtgggctgcagtgctgtgggatttgtttatcagactcgaggtctgaagcatggaagggcaattgttgtgtccacttgtacatcagttgcatctattgtgtctggcgttgtagctggtatgattgcgcttgatgaacatcttcccacagctcccacgggccgcttttttctcttacttggatggttcttcattattacaggagtgatacttcttgttagttcaacccggataattgctcggctacccagatctatgcagaagtttttgaagagtaatgtggagcgtacccacagcatcaggaggcctagctcagcgcgaggaaaggaccccatcccaagcacaacaatccatgcatccacattgcatctgctaacatctccatcgaaagagaaggcctagaaaaagttcctgctggagcaagattgttttggcacctcaaatgtgccatgttgtttaattgactcctgatgtgaatgtaaagtctagagtagcatctttaaagtttgggttggtgatatcgtatactgcttgtctgctcttattgatctatacagcctctttggaaaacttaaccttgc

SEQ ID NO: 23445 - DNA, 1926 bp, Oryza sativa
  ref <308>: DATABASE ACCESSION NUMBER: AK073556
  ref <309>: DATABASE ENTRY DATE: 2001-12-06
gactctctatcctcgcggtggagttctccaataccttgatcatcacctatgcccacccttgccttctcttttcgcccggtctgtcggatctgagaatgatggtgtttggggatgtccaatccactcagtggcggtggttcttggggccgacagatctatgcatgagaaggcataggcttggcagatccatattcttcctgccgcccctttcttgctctgagctcaaagcctgcaggaatgcaggatgaggatgccaccgaggcaacttctgtaggggatcatgggctcatggcggtggcagatctggtgggtagaggacattgtggaataggagaaataggatagggaagcggtggccgagatggagaagggagagggggaggcacagtcgcgcagatggttgatgactgatgacgcatcagtaggctggttgcttggccatggaaagaaggggacaaatgtgattgttgccaccacagtttctattggaacaatactactagtggctgtctttattgccgttttcatctacaggagaaagacaacgaagacaatgataccaccagacaacaccggcaatgaggaggacaatgactatgttgacccaccgacccttaacttaacagtgttgagagctgcaacaaggaacttctcggcagaaaataagctgggagaaggaggtttcggagaagtttttaagggtatactagaagacggggaagaagtagcagtgaaaaggctttcgaagacctcctcacaggggttccatgaattgaaaaatgaactcgtgctagctgccaagctcaagcacaaaaatttggtgcggttactaggtgtttgcttgcaggaagaaaaactacttgtgtatgaatacatgcctaatagaagcctagataccatcctttttgagcctgagaaacgacaacaactggattggagaaaaaggtttatgatcatttgtggaattgctcgaggccttctatatctgcatgaagagtctagccagaagatcatagatagggatctgaagccaagcaatgtcctattagatgaggatatgatccccaagatctcagattttggccttgccagggcttttggtggagagcaatcgaaggatgttacaagacgccctgttggaacccttgggtatatgtcgccggagtatgcctactgcgggcatgtctccactaagtcagatatgttcagttttggggtcattgttcttgagatggtgaccggtagaaggagcaacgggatgtatgcttccaccaagtcagatacttatgaatctgccgactccacgtctctactgagctacgtatgggagaaatggaggacacgatccctagctgacgcagtggacgcgtcgttgggtggccgataccctgaaaacgaggtcttcagctgcgtgcagattgggctactgtgtgtccaagagaatccagccgacaggccggacatttcagctgtggtgctaatgttgagcagcaattccacgtcgctgcagactccttctaagccggcgttcttcttcggctctggcagcatcgcaagcttggatgctgctggtggacatgcatttttcggtggccggggttcagaagttgcggccatcagcagtaacaagatgtccagtaaccccgtttcagagaatgaggtcacgatttcagagcttcaaccgaggtagaagaacaaatgcgtctgcatcaattgtcagtattcaggacacttgatgtcccccgaatatcggtggtaatatggcaataatgtccaacagataagttagtgttcagcgtataaattattacactaaagcctctccaaatctctctaagaatgcattcccggtatgaaactaatggaaaagctataatgatatcgattagatcgcacattttgatattggaactactgaaatccttc

SEQ ID NO: 23446 - DNA, 2846 bp, Oryza sativa
  ref <308>: DATABASE ACCESSION NUMBER: AK073557
  ref <309>: DATABASE ENTRY DATE: 2001-12-06
ggctctcccccctcgattcccatttgatcccacacctccaccaactagctgccacgctcgctttcccctgcgacatgcgtgatgtgtgggcgctccacttgttaaccatctcgcgcgcacgccaggctcggctcctcgatcgacgccatgtcgctgcgccggctctgcttcgtgctgcccatggacgccgacgaggtggtggtggtagctggcgctgctggtgaggagcagcctcgacgacgagggatggcagcgagcgggaggctggcgtcgtacgtccgccgcaaggtcggccgcgcgctgcggtgcgggctctgcggcgcctggtgccaccaccgctcgtcgggagtctgcagcttcgaggacatcgccggcgtggacgcggtcggcgcggggaagctcggcggaggcgcgggcgggagccccaggatcttcagctactcggagctctacatcgggaccagtgggttcagcgacacggagatcctgggcagcggagggttcgggcgggtgtaccgcgccgtgctgccgagcgacggcacgacggtggccgtcaagtgcgtcgccggccgcggcgaccggttcgagaagtccttcctggcggagctggcggcggtggcgcggctgcggcaccgcaacctcgtccgcctccgcgggtggtgcgtgcaggacgaggaggagctgctgctggtgtacgactacatgccgaaccgcagcctcgaccgcctcctcttcagaccggcggcggcggcggcgcccgccgcgtcggctccggcgctgagctgggaccggcgacgccgcatcgtctccggccttgccgctgccctgttctacctgcacgagcagctcgacacgcagatcatacaccgggacgtgaagaccagcaacgtcatgctggactccgagtacaacgcccggctcggcgacttcggcctcgcccggtggctcgagcacgccatgtccggcgaggacgcgccgccgccgcagctggaggtgtccccgtcgcctcattccgcgcggtcgtcgtcgtttgcttccgcgaattaccagttccggctgatggacaccagccggataggcggcaccatcgggtaccttccgccggagagcttccagcgccgggccatggcaaccgccaagtccgacgtgttcagcttcgggatcgtcctcctggaggtggccacagggcggcgagcggtcgacctcgcgtaccccgacgaccaaatcttcatgctggattgggtgcgtcggttgtccgatgaggggaagctgctcgacgccggcgaccgcaagctgccggacggcagctacccgctgttcgacatgggccgtctcatacacctcggtctcctctgctcgctgcacgatcctaggtctcgtcccagcatgaagtgggtggtggagaacctctccggcagctgctccggcgacctgccaccgcttccgtccttcctagctctcccaaagtacgtctctctcacttccccctccgattccggcacgacgacgaacgccacggacagcacggtcacctctgcgtcgaagctctacggcacggcggccgggacgaccatttacctcaccgcggagaacggccaccgctccagaggtggcttggctgacaacagcggcggcagcagccagcgatcgacgcggccgctggtggtgatccccagcgtcgacactccccgtgagatatcgtacaaggagatcgtcgcgatcaccaacaacttctccgagtcgcagatggtggcggagctcgacttcgggacagggtacgagggcttcttggacaacggctatggcggcaatggcgcccgccgcgaccgcgtccatgtcctcgtgaagcggttcggcatgaagacgtgcccggcgctgcgcgtccggttcgccaacgagctccgcaacctcgcgaagctgcagcaccggaacctcgtccagctgcgcggctggtgcacggagcacggcgagatgctcgtcgtctacgactactccccggggaacctcctgagccaccacctcctccggcgcgatggcgcaggcgccgccgccgtcctcccgtggcgccaccggtacagcatcgtcaaggccctcgcgtccgcagtcctgtacctgcacgaggagtgggacgagcaggtcatccaccgcaacatcacgtcggcggcggtgttcctggaccccgaccgtaacccgcggctcgggagcttcgcgctggccgagttcctgtcaaggaacgagagccacggcggcgcgggcgggcaccacgttgccctgcccgccaccagctctgctgcgcggggcatcttcggctacatgtcgccggagtacatggagaccggcgaggccaccaccatggccgacgtctacagcttcggcgtggtggtgctggaggtggtgaccggcgagatggcggtggacgtgaggtcgccggaggtccttcttgtcaggagagcgcagcggtggaaggagcagagccgccccgtcgaggccatcgtggacagacggctggacggccaggttgatcgcccggagctcgagcggttggtgaggctcggcatggcgtgcacccagtctgacccggcggcgcgaccgacgatgaggaagatagtgagcatcatggatggcaatgacgagatcttgaagaaattcgagcagaggaagcagcagagcaaggaagagtgggagaccacaaatgctgctgctctgtccttagtaagaagactccatgctcttgcgatacactgaacacaacgtcaatatgtatatattttctctaatagagaaataaattctgttattatagttggacacgatatttttatatatatttattaatttcgttctcc

SEQ ID NO: 23447 - DNA, 2884 bp, Oryza sativa
  ref <308>: DATABASE ACCESSION NUMBER: AK073558
  ref <309>: DATABASE ENTRY DATE: 2001-12-06
gcagggcgtaccgcttggtgggatggggagtggtagcatttcaagaggtttcaggggagagttcaagaattggcatatcattcctggtttatgtgagacttccccggtcatggagaaccagttttcaatatttgtatctcgcgatggggggaacaaaaagtactcatcggtattgtctcccggacaccatgaaggtttaaagaaatgtaatgactctggaatttcttcatgggactggaacttgagcggtcaacattctacctatcatgctttatttcctagggcatggactgtttatgatggtgaaccggatccagaccttaaaatctcatgtcgtcagatatcaccattcattcctcatgattacaaagatagcagcctcccaacttctgtctttgtgtacactctagtgaacactgggaaagaccgtgcgaaagtgagcctgttaatgacatgggcgaattctatcggaggtttttctcatcactctggaggccattttaatgagcccttcattgcggaggatggagtttcaggagttcttctgcatcacaaaacagcaaaggataatcctccggttacttttgctattgctgcctgtgaaactcagaatgtgaatgtgacagtcttgcctgtatttggcctctctggagaaggccatgattcagccaagcaaatgtgggatagaatgaaacagaacggccactttgaccgtgaaaatttcgaagctggtaccagtatgccttcatcttcaggggagacactttgtgcagctgtctcagcatcaacctgggtagagccacatggtagatgtactgttgtatttggtttggcttggtcctctcctaaaataaagtttcagaagggctgcacatacaacaggaggtacactgaattttatggaacttctgaaagatcagctgttaatttggtacacgatgccttgacaaaatataggatttgggaagaggagattgagaagtggcaaaaccccatactcaagaatgaaaaacttccagaatggtacaagttcacactttttaatgagctttactttctggtagctgggggtactgtttggacagatggccaaccaccagttatcgatgaaaaaccaagtcctggttctaatcaacagaaatcttcaaaaaggggcactagagacactaaacaggaatcagttaaagataaccatgtcaaactgacagcagagcaagtcactaatggtggtgacctggctaatggcgaagagcaaagtgtgtcaaagtatgcagcagtacatggaccacaaatggctaaggcaaccaacggacttgggtcacaagagccaattccatacttgctttccaagaatggccctgaaaatgttggcaaatttttgtacctggaaggagtggaatacatcatgtggtgcacctatgatgtgcatttctatgcttcttttgctctgcttgatctgtttcccaaaatagagttgagtatccaacgtgattttgccaatgctgttctctatgaagacagacgaagaatgaaatttttggctgatggtacttctggaattcgcaaggtcaaaggtgccgttccgcatgacctaggaacacatgatccatggcatgaaatgaatgcgtacaacatacatgatacaagcaaatggaaagatctaaatccaaagtttgtgctccaggtatacagagacttcgctgctacaggtgatatgtcatttggtagagatgtttggcctgccgtctgtgcagtgatggactatatgaatcaatttgaccgtgacggtgatggtctcattgagaatgatgggtttcctgatcaaacctatgatgcttggactgtacacggaattagtgcttactgtggcggtctctggcttgctgcacttcaggctgcagctacaatggctcatcggcttggtgatcggccatttgctgaaaaatacaagctcaaattcatacaagcgaaagcagtatatgaggctaagttatggaatgggtcttacttcaattatgacagtggcacaagcagtaatagccgatctattcaggcggatcagctggcagggcagtggtatgctgcttcttcaggcttgcccccgcttttcgatgagaataaaataagaagtgctctgcagaaaatatttgaattcaatgtaatgaaggttaaaggaggacgattgggagctgtaaatggtatgactcctaatgggaaagtggatgagacatgcatgcaatctcgggaaatctggaccggtgttacatacggtgttgctgcaaacatgctgctccatggaatggagcatcaaggattcaccactgccgaaggaatttttattgctggttggtcagaagaaggatatgggtattggttccaaacaccggaaggctggaccatagacgggcactacaggtcgctcatctacatgcggcctctcgccatttgggcaatgcaatgggcacgttctccacccaaggcaatccttgatgcccccaaggtaaacctgatggacaggatacacctatccccacaaatgatccgggcaatgaacgagattaatgttagaaagatagcacccgacaatagatgtttccctagctctgcatttcgttgtgaatgctgaccacaaaaaaaaaagagaagcaaaatgcaacaactgagtagtaacatacatatatatactttccttttcggcttttccttggccccttacaagtttcagtggggttcatggggttttccttgaaatcagagggcatataaatctacggaaccactaagctcagtagctcacactctcacagctcgaaaagagctcttgttgtataattgtacagtaaactacaaaatcatatcgtcagcatcatctttgctctgcgtc

SEQ ID NO: 23448 - DNA, 1904 bp, Oryza sativa
  ref <308>: DATABASE ACCESSION NUMBER: AK073559
  ref <309>: DATABASE ENTRY DATE: 2001-12-06
gacaggatggtctcacttccagttggaaggtctcctcgtactcattcacctaaggaactggattcaccacgtcctgaaaatgaggttggtaaattagccacttctcaaaactcacctgttagacgtcggtcccggtctcctggaaagcatgagactaaccgcagaagggcttcttcacgtgagttatctccgcatggtcgacagaactctccatctcctccagaaaagaaagcacgaagggagcatcgacatggagatgggtcaccgcgacgaagatctgtgtctcctagaagaagggctttgcccaagaggagagactcaccaaggagagactctccatcaaggagaagggactcaccaaggagggactccccatcaaggagaagggactcaccaaggagggactccccatcaaggagaagagactcaccaaggaaggactccccattaaggagaagggactcaccaaggagggactccccatcaaggagaagagactcaccaaggaaggactatccatcaaggagaagggactcaccaaggagggactccccatcaaggagaagggactcaccaaggagggactccccattaaggagaagggactcaccaaggagggcatccccatcaaggagaagagattcaccaaggagggactccccatcaaggagaagggactcaccaaggaggtcctccccatcaaggggaagggactcaccaagaagggactccccatcaaggaggagggactccccacgaaggaggcacaggtcaaaatcaaggtcaccttcgaggaaaactgatggctctagacatagaagggaacatggtagatctcggttaaggtctcctcactcaaggagtcaccataggcgatctccaagaaggcattcaccacggcgcagatcatctccttccagtcatcgtcatcattcacctagaaggccgtggtcaccacctgccaacaggaagactggattgggtaagcctggacggaatctgtttgttgcaggttttagttatgccatcactgagcgagatttggaaaagaaattctctaagtatgggcgtgtgacaagtgcacgtgttgttcgggataaaagatctggggattctcgaggctttggtttcttatctttggagaaggatgaggatgctgatgcagcgattcgtgcttgtgatgagactgagtggaacggtaggatcattcttgtggagaagtcaaaggcacctacatggtgaatcttacaccttggagatcagcacaccatgagccgacaacattgcttcagcttgcacagcttttattgcaccaaagatttcctattgactataacataaattatcattaaatatggcaaactcaccagctattgatggtatattaggagtaagagtcataatgcacttcctatggctaccttgctgacaattacaacgaataagatgttatgtcacaccttagcttgtttcagggccctgctgctgataagagggaattaataccttttaatgtctgcaacctctgcgcacaagatgttatgccctgccagatatgcacgaggcgttcatcctcttcctcatggtcaccagctgacctggccaagtggttaagctccactgcattaaggggcatgaatggaattcagatctgtgaggctctgatactaaaccgtctagttgaccttccaataatttatagcaatgtaggttccaatcatcatgtttatatttgcacctttgcgaggtaaaagatggcatctttctttcttcactgtagtttgtggttttggattctagttactccgtgcttgataatggatatagccaacttgtattttctttttgctcgttatgttatcctgtatgttaccttccattaaattcaaaactatctatgctcg

SEQ ID NO: 23449 - DNA, 917 bp, Oryza sativa
  ref <308>: DATABASE ACCESSION NUMBER: AK073560
  ref <309>: DATABASE ENTRY DATE: 2001-12-06
gattccgtctcttgctctcaagcggcgtgcaaccatggcggccacggcctcctccttcctcgcccgccgcctcctcctcacccgccgcgtcctttcctcccccctccgccccttctccaccactgactcctcctcatcctcctcctcctcctcttcctccgacgactcccgtgcgggatctgatgcgggacccgaccccgagcagcagcaaccgccaccagcgggccaggatcagcaggccgccgcccggccgcgcgccggcgacacccgtcccctcgagaacggccttgaccccggaatctacaaggcgataatggtggggaaggtggggcaggagccgatacagaagcggctgaggagcgggagaacggtcgtgctgttctcgctcggcaccggcggcatccgcaacaaccgccgcccgctggaccgcgaggagccgcaccagtacgctgaacgatgctccgtgcagtggcaccgcgtctgcatctacccggaacggctcggcagcctcgcgctcaagcacgtcaagaccggttctgttctttatctggaagggaatcttgagacgaaagtgttttctgatcctataactggactggttcggcgcataagagaaatagctgtgcgctcaaatggccgtctcttgtttcttgggaatgattgtaatgcgcccaagttaggtgaagccaagggcgttggctacttctgaaactgaggtccactcgacatcaaggtatatcagttgataaaattgatttaaattagaggtatctcaactgtgcttagctttaagcgttcaacgtatggtgaagatctcagtagtggaccagctttatggaacaaatacagttggacatcattgtcgaaaccctctaataattgaacaactgattgtactgtataacttgattttgacg

SEQ ID NO: 23450 - DNA, 4208 bp, Oryza sativa
  ref <308>: DATABASE ACCESSION NUMBER: AK073561
  ref <309>: DATABASE ENTRY DATE: 2001-12-06
gaccgacactcccccgtctcttcctctcccccatttttttctttaaaattccatcactaatcctcgccacctcccccctcaccgacgctgccgccgcgcacacgcatccccggcccggcctctctctctctctctctctctctcccgctcttcctctgctccgtcgcgggggaggcgcatttgccagggcgcggaatccccgggagattcggagggagagagagagatggagatctggttgtagggcgaggagcggtcggcgggcggcgtaggaggaagagggcgagggtgagggtgtgcgtggttgattagcgggggggaggaggaggaggggcgatggaggcgagcgccggtctggtcgccggctcccacaaccgcaacgagctcgtcgtcatccgccgcgacggcgatcccgggccgaagccgctccggcagcagaacgggcaggtgtgccagatttgcggcgacgacgtggggctcaaccccgacggcgagccgttcgtggcgtgcaacgagtgcgccttcccggtgtgccgcgactgctacgagtacgagcgccgcgagggcacgcagaactgcccccagtgcaagacccgcttcaagcgcctcaggggttgcgctcgtgtgcccggggacgaggaggaggacggtgtggatgacctggagaacgagttcaactggagggacaggaatgactcgcagtacgtcgcggagtcgatgctccacgcccatatgagctatggccgtggtggggtcgacgtcaacggtgttccgcagccattccagcccaaccccaatgttcccctccttaccgatgggcagatggttgatgacatcccgccggagcagcatgcgcttgtgccatcttttatgggcggcgggggaaagaggatccacccgcttccttatgcggatcccaatctacctgttcaaccaagatctatggacccatccaaggatcttgctgcatacggttatggtagtgttgcgtggaaggagaggatggagagctggaagcagaagcaggagaggctgcaccagatgagaaatgatggtggtggtaaagactgggatggcgatggtgatgatggagatctaccactaatggatgaagctaggcagccattgtccagaaaagtcccaattccttcaagtcagattaacccctatagaatggttatcataattcggctggtggttttggggtttttcttccactatcgagtgatgcatccagtgcctgatgcttttgccttatggctgatatctgtaatttgtgaaatctggtttgccatgtcttggattcttgatcaattccccaagtggtttcctatcgagagagagacttaccttgatcgattgacattgaggtttgacaaggaaggccaaacatctcaacttgcaccaatcgatttctttgtcagtactgttgatcccttgaaggaacctcctttggtcacagcaaacactgttctatctatcctcgcggtagattatccagttgataaggtttcatgctatgtctctgatgatggtgctgcaatgctgacatttgaagcattatccgaaacatctgaatttgcaaagaaatgggttcctttctgcaaaaagtacagtattgaaccacgtgctccagagtggtacttccaacagaagatagactacctgaaggataaggtggcaccatactttgttagggagaggagagcaatgaagagagagtatgaggaattcaaggtgagaatcaatgcattggttgctaaagctcagaaagttcccgaggaaggttggacaatgcaagatggaactccctggcctggaaacaatgtttcgcgatcaccctggaatgattcaggtcttccttggccaaagtggcggccatgacatcgaaggtaatgagctacctcgattggtgtatgtttcaagagaaaaaaggccaggctataaccatcacaagaaggctggtgccatgaacgcattggtccgagtatctgctgtactaactaatgctccatacatgctcaacttggattgtgatcattacatcaacaatagcaaggctataaaggaagcaatgtgttttatgatggaccctttggttggaaagaaggtttgttatgtgcaattccctcaaaggtttgatgggattgatcgtcatgatcgatacgccaacaggaacgtggtcttcttcgatatcaacatgaaaggcttggatggtatccaaggccccatctatgttggtactggatgtgtctttagaaggcaggcattgtatggttatgatgcccccaaaacgaaggagcctccgtcgaggacctgcaactgctggcctaaatggtgcatttgctgttgctgctttggtgacaggaagagcaagaagaaaactacgaaacctaaaacagagaagaagaaaagatctttcttcaagagagcagaaaatcaatcccctgcatatgcacttggtgaaattgaggagggtgctccaggagctgaaaatgaaaaggctggtattgtaaatcaacagaagctggaaaagaaatttggccaatcttctgtttttgtcgcatccacacttcttgagaatggtggaaccttgaaaagtgcgagtccagcatctcttctaaaggaagcaattcatgtcataagctgtgggtacgaagataagacagactgggggaaagagattggctggatctacggatcagttacagaagatattctaactggttttaagatgcactgccatggttggcggtcaatttactgcatacctaaactacctgcattcaaaggttctgcaccactcaatctttctgatcgtcttcaccaagttcttcggtgggctcttgggtctgttgaaatattcttcagcaaccattgccctctttggtatggatatggtggtggactaaaatgtttggaaagattttcctacattaattccatcgtgtatccttttacatccattccactcttggcttactgtacattgccagccatctgtttgctaactgggaagtttatcactccagagcttacgaatgttgccagtctctggttcatgtcactttttatctgcatttttgctactggcatcctggaaatgagatggagtggtgttggcattgatgattggtggagaaatgaacaattttgggtcattggaggggtctcttcgcacctctttgctttgttccagggacttttgaaggtcatagctggtatagatacgagtttcactgtgacatcaaaaggtggggacgatgaagagttctcagagctatatacattcaaatggactaccttgctgatacctccaaccactctactcttattgaacttcattggggttgttgctggtgtttcgaatgcaatcaataacgggtatgaatcatggggacccctcttcgggaagctcttctttgcattttgggtgatcgtccatctttaccaattcctcaaaggtttggttggaaggcaaaacaggacgccaacaattgttattgtctggtccattcttctggcttcaatcttctcactcctctgggtccggattgatcctttcttagcaaagaatgatggtccacttctggaagagtgtggtttggattgcaactagggagttgggaactcccccatcggtgtgtgctgaaggaatacacacttggttctgtgtagatagaaacacgaaaggtgatgttttgcttttgtcccatggtggtagctcagcctcatatctgcaatatttgggcaaaccggaggctgcggcaaccttgtgaacttcggccaccaagtacagccaaactgcgtttgattgtccagcattatttattactgctttggtggtaaatttaattgggtgagctgaacagaaggtgttggcattgctgttcatgtacaaacttgtgtctcaataaggcaggcaggaatggatctgctatggagtagaaaggtgatgcacagtatttatgtagtgaaacgtgtgtgggtgcccattgaagggcttgttcattccttgtttctcttttttacttatctagaaccaaatggatcatttagtgttagtaatgtagtgcatccagtgttgtaaaggcgccctatttttggttggtaattgtaatcaatatatacttctgttgtcttgacattttcaaagaaaggttgtaaggatgatcgtgatcagatataatatactcgtttctttttgg

SEQ ID NO: 23451 - DNA, 2125 bp, Oryza sativa
  ref <308>: DATABASE ACCESSION NUMBER: AK073562
  ref <309>: DATABASE ENTRY DATE: 2001-12-06
ggccacccgctgcggcaagcgcttttttgaccgcttctgccgtctccctcctcacacggcacccggctcgcgtctctcctcccccctactactctgatccaccgggtagtactagacgcgctactactgccgctgtactgctctgccaccacttctccactccactccactctcctctactaccaccgccgctctcgtctcgtctcgtctcgactcgactcgcattgcgcctgtgctgtgctgtggtggtggccgcgcggggggcgagatggccggaggaggtgggggagggggaggggcggcgccggcgccgaagcacgacgagctgacgccgcaccccgtcaaggaccagctccccggcgtctcctactgcatcaccagccctcctccgtggcctgaggccattcttcttggtttccaacattatctggttatgctgggaactacagttatcataccaactgcactcgttccgcagatgggaggaaacaatgaggacaaggctgttgttatccaaacattgctgtttgtggctgggattaacacccttttgcagagtttctttggaaccagattacctgcggtgattggtggatcatacacatttgttgtaccaaccatctcaatcatccttgctggtcgttatgccaacgaaccaaatccacacacaaaattcctccgaatcatgcgtggaacacaaggtgcattgatcgtggcttctgctctacaaatcatatttggtttcagtggcctttggcgtaatgttgcaaggtatctgagtccattgtcagctgctccactggtgatgctagtcggctttggactttatgagcttggttttccctcggttgccaagtgtgttgagattggtcttccagaacttatcctcctggtgatcttcgcaatgtacctgcctcatgctatacacatgatgaagtctatcttcgaccgttttgctgttctgttcactattcctatagtgtggctctatgcatatctgctcacagttggaggcgcgtacaggaatgcaccaccaaagacccagtttcattgccgaactgaccgttctggaataattggtggtgctccttggataagagttccctatccctttcaatggggtgctccaacttttgatgctggtgaagcttttgcaatgatggctgcttcatttgttgctctggtggagtctactggtgctttcattgctgtttcaaggtatgctagtgccacacctctcccaccctctgtacttagccgtggaattggttggcagggcattggcattttgttggatgggctatttgggactggaaatggttcttctgtatcagttgaaaatgctggattgctagctttgacacgtgttggtagccgaagagtggtgcagatatcagctggtttcatgatattcttctctattctgggaaaatttggagctgtctttgcatcaatacctccgccgatctttgcagctctctattgtatcttctttgcatatgtcggttctgctggggttggtttccttcagttctgcaatctcaatagtttcaggaccaagttcatcctcgggttctcagtttttatgggcctttctgttcctcagtacttcaacgagtacacatctgttgctggttatggtcctgttcatacacactcaagatggttcaatgacatcgtgaatgtcatattctcgtcaaaggcattcgttgctggctttgttgcatatttgctggacaacacgattcacaggcatgatagttctgtcagaaaagatcgaggacaccattggtgggataaattccgatcatacaggactgacacaagaagcgaggagttctattccctgccgttcaacctgaacaagttcttcccatcagtatgagcataccgtggctaatgcaagagtaggttactgtgtactgtctgtcccttatgaacaggttccctggaagtggcaaactgttggcctgaattctctaggtatgtggaaatcgtagacctttaaacaaaagggaatcctgtggtatgaacaaaaaaatattggtggaattatggcacggatgtatattttaacctatctgggggcaatagtaggaaattttggctactcatttgcacatgg

SEQ ID NO: 23452 - DNA, 2104 bp, Oryza sativa
  ref <308>: DATABASE ACCESSION NUMBER: AK073563
  ref <309>: DATABASE ENTRY DATE: 2001-12-06
ggcacgcaaagaatcggtagccgcctttgtttgctgctctctgaaatctctctgagttttgtgctttcactgcactgttctggttcttggactccctgttcttggttcctgcatttcttttcttttttgcctttgtttgtcccatttttgttgggttcttggaggtggtggaggatggccggaggaggggcggcgccgccgccgaagcaggaggagttgcagcctcaccaggtgaaggaccagctgcccagcgtgtcctactgcatcaccagcccaccgccatggcctgaggccgtcatacttggattccagcactacattgtgatgctgggcacatcagtgattattcccagtgctcttgttccccagatgggaggtggaaatgaggagaaggctcgggtgattcagacgctgctgttcgttgccgggataaacaccctctgccaatcgttcttcgggactcgtcttccagctgtgatgggaggatcgtacaccattgttgcgccgacaatttccatcatattggctggccgctatagcaatgaagcagatcctcatgagaaattcttgcggacaatgcgaggaacacaaggtgctctcatcattgcatcgacaatccagatcatacttggtttcagtggtctctggcgcaatgtagttagacttcttagtccattgtctgctgttcctttgatctcacttgctggatttggcctctatgagcttggttttccaggggttgcaaagtgcgtggaaattgggctcccagaaatcattctactgcttgtattttctcagtatttaccccatgtcatacatgtggcaaagcccgtgttcgaccggtttgctgtgattttcaccattgctattgtgtggctgtatgcatacattctaactgctagtggcgcatacaagaatgcccggccgaagacacaagtgcactgtcgtgttgatcgctctggaattatcagtggagctccatggataagagttcctttcccttttcaatggggggctccaacatttgatgctggtgaatcttttgccatgatgatggcctcatttgttgctcttgtagagtcaactgggaccttcattgctgtgtcaagatatgcaagtgcgactatgatacctccatcagtgcttggtcgtggaattggttggcagggtattggtactttaataggtgcatttttcgggacagccaatggaactgctgtatcagtggaaaatgccggtttgctagctttgacacatgttggcagccggagagtagtgcaaatatctgctggcttcatgatcttcttttctatccttgggaaattcggagcaatctttgcgtcaattcccttaccaatattcgctgcactgtattgcatcttctttgcatatattggtgcctgtggtctgagcttccttcagttctgcaatctcaacagcttcaggaccaagttcattgtggggttctcgttcttcatgggcttatcggttcctcagtacttcaacgagtatacatcggttgccggttatggtccagtgcacaccggcgctcgatggttcaatgacatgataaatgtaccattcgcgtcaaagccgttcgtcgcagggctcattgcgtacttcctagacaacactatccagaggcgcgacaatggggtgaggagagacaggggataccactggtgggacaagttcaggagcttcaagacggacacccggagcgaggagttctactctctgccgttcaacttgaacaagttcttcccttccgtgtgatccgccttagctcgggttcggaccgcagcagaattgggggggagcttcagcttctacttgtatgggggcatgttttttcgatgttggttcgatggttttgtaaatcttaggatgggtgaattttggctggttgggggactaatctgtcatgccacatattattgcattttggttcagtacagaggtcagggaggggctgctgcttctggttgatctgttgttcttgaatcttgagagctttctgctaggagttccccttgtggtaaggtagattcaggattctgtacttctgttttgcccaaggagaatcacagtgcttagtagcatc

SEQ ID NO: 23453 - DNA, 2233 bp, Oryza sativa
  ref <308>: DATABASE ACCESSION NUMBER: AK073564
  ref <309>: DATABASE ENTRY DATE: 2001-12-06
gccagaaccaaaacctgaaaaccctcgccgcttctccccgtccttcctttccgagctgccccgcgccgtcgttacttcccccccccccccccccccccaaccagccatggcgggcgacaagacggcggcgccccctccgccagacgcggccgccttctcccccgacggcgagctcttcgctgccgtctccgatcggcgagtccaggtatggcgtacaggaggaggagaaataatagaaggatggactgatccaatttcagccccagatgattcatacagttgtattgcatgttgctctgttcagaaaaagcataaaaaggatggaaaccttattcttgttgctgttggtactacaaatggtcaagttttagttctcgattctactggtgtcatatggaagaatgctcctcatacttgcaaggttgtttctcttcattttgcaagacatgggcgtgttctttatactgctggcatggatggaattatatgtgaattgaattctcgcaccggggaatccaaagacactattaaagctacgaagaaaccaattaattcttttacactttctcatgatgagaagtttatgggtgtatcaagtaagataacaagattatttagtgtgagtgagaaaaaagagatcttgaggattccttctgatgttggtcctgtccagctgatgtctgtatcagatgatggacgttttttggtttctcatgttgacaataataaggaagtgcaagtgtggtcttgcgatcagaatagttgtaccatcgtttctacagcctcccttacaatgcaaaatcagccaaagatagtagagtgtacaaggagcacatcatatggagatgggggcattgttctcgcagtatcgaagaaaggtgttgctcatgtctggcatttacagaccctctcccaaaatgaagtactgcccacaaaaatctcagtcaaaaattcactcgataaaaaaggccgtatcccaataatttcagctaaattatgtgacaccaatgaagacaatactgttaaggttcatgttgtatttggatcaccaaactttttacagttcaaggttgtagaattggatgatacttgcaaggacatcaacttggttgcagagtatgatgaactagctaaacaagatatggtgtctccgcaggaaaggaatttggagcaagaagctaaagcaaatagcaaggatgcagaacctgttcaaggaaaagcaaagaaaaggacatcatccgttttggattccactaatgacacaaccaaggaagtgaatccagagtacaatcttgatgaaccgaccatggaggaaaaacttgcaagtctgaatttgctaaacaagtctgaaattactgaagagcaaccaccctctttagcgccaccaagtgcagattcagtccatgttttgctgaagcaagctttgcgtgctgatgatcacactgaattgctaaaatgcttgtacaatagagatgaaaaggtcattgtaaagtcagtatcactcctaacaccggcagacgtcgttaagcttctcaagttctttgtattgctaatacaatccaggggtgcaaaactggtttgtatgctcccatggcttcaggctttactttgtcggcacatgagcagcatagtgtctcaggaatcttctctactgttgctaaactcactctatcagcttattgatgcaagaacatcaaccttcaagtcagcacttcaactttcaactaccctagactatcttttcagcggggtttctgacggtgaaactgatgaggaggacgctgttccaccgataatatacgaggacaaggacacagacgatgaagaatctgaagttgatgctatggaaactgacgaggggagccaagagctgggagacgttactgatgcctctgagcattcagatgggagtgatatcatgaccgactgatttacttgcgctcttctttaatttagttcatgatcagcctgacaaggtaggagctcgcgaagttggacaaatcatggttgctcctgttgtagtgctgtgcctggaaatagttgttgctcttcacttggtagaagctccgattcgctcccaatatgattgccttagtgttaggatcagatcttgatgtaagtcaagccagcttgtatcaatagcataacatataactttaacctcctcgtcaaattttgtatctggcgagtgcataactgcatattactgcaagctgtttcagctttgtttttc

SEQ ID NO: 23454 - DNA, 947 bp, Oryza sativa
  ref <308>: DATABASE ACCESSION NUMBER: AK073565
  ref <309>: DATABASE ENTRY DATE: 2001-12-06
gacgggcaaagcgctatcaacgacacgcgcgcgtgtgttccactcctcctctacgtagtgtacgactgtacgttagttgccagccatggcagccgtggggaagtcgaaggaggcggacgcggcgcggtgcaggaggcacccgaagcaccggcacgcggcgggggtgtgcccgttctgcctgcgcgaccgcctctcgcgcctctccgccgaggtcgccagcgctgcctcgccgtcgccgtcgtcggcgtcgtcgtcgggatcctcctcctcgctgtgctcgtcgaccggggaggggagttactccgccgcgtcggcgacccaggcgccgcccgtcggccgccgcgcgaggctgggcatgctgatgcgacaggaggagcagagggagacgaccgcgacggcggcgacggtgctcggcgccgcaggtcatgacaagaaggaggtgccccctgcggaggaggagaagaagacggcgaggaggagcggcttctgggcgaggctgcagcagcagctccatcacgggagctggcaccggaaggccgacgggtgctcactggcgcactccaaggcggtcagcgagaaggccgccgccgccgccgccgcgccggccaagcggccaccggcgttgttctgatgcgcgcgtgcccgcgcgcacgacgagaggaagcgagcaccatgcagtacgtgcaggcgtgagccagccagcgcggcgtgatcgatgtttggttggtagtggtagcctctcgtcgcgtcgcgtgcgctgttcatccggggggctcacgttgatcacctggcatgtttcgttatctttcggtgcgctttttgggtcgtggcttgtggtgggtgcggggggtgccgaaagggcggcctaatggcaaacgtcccgttttgtatagatctaagatctgagggaagaaatggcactcggctcgaatcggctgcgtgattcc

SEQ ID NO: 23455 - DNA, 1217 bp, Oryza sativa
  ref <308>: DATABASE ACCESSION NUMBER: AK073566
  ref <309>: DATABASE ENTRY DATE: 2001-12-06
gggagatgtacttttgcttctacatgattcaaacatcaagtcttgaaaagctcgaatttttttttttgtaaatgaaaaaaatatgtatagaaccagctgagaaccttgttttaaccaaacactcaggctccaggttccggaaccctgcagtgtaaacctatttctggctgatctacctttgaaataattgttttccaactagtagttggtactcgccaatatgtgaaatctccagacttatttcagttttttttttctttttggcaggatcttggctttagggagtacattgaagaggttcaagcggcctacgaacaccataagcatgataccctggattctccaaaagcaagcaaattcactggtgtggagatgacagaggaacaagctgtagctgagcaacagaggatgtttgctgaggcccgagcaaggatgaacaatggtgccgccaaaccgaaggagccagaacctgaagcgcaacaacaaacacaacagccaccacagcctcagctgcaccctcaaccacagcaacccctgcagcctcaacttcagctccatcctcaaccacaacaacagccctcacagctacatcctcaacagctgctgcatcctcaatcgcagcaaactccgcagcctcaacctcaggtccaccctcaaccacagcagcctccacagctgcaaccgcaacctcagcttctccagcaaccgcagctgccccaacagctgcagccgcaatctcagctccccccacaaccgcagcagcccccacagctgcagctgcaatctcagctccacccacaaccgcagcagcccccacagctgcagccgcaacctcagctccatcagcaaccgcagccgcaggcagagctgcaatcacagtcacaaccacaaacagaacatggcttggacagttcatgattcagattccatgttgtgtagcctcagtataaggaaaagttggtgtacttccgctggcatttactaggactctgtgtgccccttgatagttttaggtttccatgcttcatgtacaatgtaaatccagtgtgatttcagttaccatgttgctaataatctgaagctctctctagtcactgatgttattacttttccaaacaccctttctctgactctatgactgtagtagtatcatggcatgtatgatgccttgtcaaaagggactccattagcagtgtaacttgacttttgccgatggc

SEQ ID NO: 23456 - DNA, 1660 bp, Oryza sativa
  ref <308>: DATABASE ACCESSION NUMBER: AK073567
  ref <309>: DATABASE ENTRY DATE: 2001-12-06
gggcggcgcacaaaaacaaacccagacacacaaacaggcgcacacatccccatagcccccaaaaaccaaaaaaaagaggagcaaaaaaagaagagaagaagagaaaaaaaaaatcccacgccgcgttggctcgcgatcccctcctcccccctcccctgtcgatttgctccacggtggtggccgcccacgacgaacccccgcgccgcgcgcgattcgatcgctccttccggattctgctcccggactcggatctcctcctcctcgtcgagctcctcccgccactgcccgtgtaggtctacctgagtttggggggcggagggggggaggggagggggaggtgatggggattggccgggcgcgctgggtggcgctgcttgtcggcctcgcggcagcggccgtggtggcgacgttgggtgcgtccgagggcgacgccgatccgctctacagagcctgtgttgacgaatgcgaaaagacgggttccctccgagagacctccgtgaggcactgccaagttccaactgatgaccatcctgctgataaatcatggtacgcacatgaaccattgtacttgcagtggaaagaatggaactgcaagagtgaatgcagataccactgtatgatggagagggaaagtgaaagggagcaacttggattagggtcagttaagtatcatggcaaatggcctatgaagcgtgcatctgtgtttcaggagcctatttctgctgctctttccgcgctctctctccttgtacaatttaatgggtggctatcttttttcctcctgctttcttacaagctgcctcttaggcctgaaactcaaatgacatactatgaatacactggcctatggcacatttatggtcttctggccatgaatgcatggttttggcgtgccatctatcacagttgtgatacagtttggacagaaaagttgtattattcatcatttgctgcttttattgggtactcccttatcttggcaatattgcgaactctaaatctgaaggatgaagcttccagagtgatggtggcagctccaattctggcattcacaacaactcatattttgtatctcaatttctatgaacttgataaaggcctaaacacaaaggtttgcactgctgctagccttgctcagttcctcctatgggcagtatgggctgtcatgacaaaacatccttcatgttttaagatcttgtttgtcattattggaaacgtattctcaatagtcttggaaacctatgacataccaccacgttggggatatgttgatggccgtgtattttgtgttgctatttctattcccctcacatatctctggtggaaatttgccaaggaagacgctgagatgcgcacttcaacaatcatcaagaaaacaaggtagtgttcagcacaagtgaatagcacaaggatttgagcctatgtgaaatcttatgctcgagattcagtcttagcttgtaaaaatttgatcgttcatgttctttctaggcagcttgtgaattatgtttttttccatccctttttgcctcagctcagaggtttagggttaatgcttagggtgtgactagtcactttatattcattttcttgtaatcccgacagtgtaacacggtatgcttgtagctgtggtaatgtaacagaggaacgtagattcgaagct

SEQ ID NO: 23457 - DNA, 1185 bp, Oryza sativa
  ref <308>: DATABASE ACCESSION NUMBER: AK073568
  ref <309>: DATABASE ENTRY DATE: 2001-12-06
gactccaccaccaccaccccccatggcggcagcaaggatgaagaacaccaccatgggttgcgccttcctgctcgccgcgttcgccatggccgccgccttcgtccccgtggccgagtccaggaccacccccgtggagaagacgaccaccacccaagcagaggatggtgtcaagaagccggactgcgtgccggcgttcgacccgcgctcgttccccggccacggcggcaccacgactccgacgccgatcccgggccaccacggcggcggcggctcatccgggaccacgccgtcgcacggcggcggcccctccgggggcgcgttgccttccccgtcccacggcggcgcggcgccgtcccacggaggagggtacggggcttccccgccggtgacgccctcccctggcggcggctacggcggcggctccccggcgccgtcccacggtggcggcgcctacgggagctccccttccacgccttctggcggcggctcctccccgacgccgtcccacggtggcggcgcgtacggcggcggcggagctccggcgacaccggcgtcgcacgacggccacggcctcatccccaccacccccgggacatgcgactactggaggtcgcatccgatggagatgtggtcggcgctggggcggtggccgagctcggtgggccacttcttcggctccggctccggcggcgctggaacggggatgagcatccaggacgcgctggccaacacccgcggcgacggcgccggcgagctgatgcgggagggcgccgccgcgctgctcaactcgatgacccgctccggcttcccctacacggccgagcaggtgagggacgcgttcgcggcggcggcggggggaggctccgacggcgccgccgcggcgcaggcggcggcgttcaagaaggccaacgagggcggccgcgcgtagacgacgacgacgacgtacgcaacgtacgcatccgtgcatgcatgcatggcttaattgtttaattaggcgggaaaattaaaaagtacgtgtgttaaattagttgtgtggttgatttgatggtgatggtctggttgtgtacgtgtggttggtgtgtttatgcgtgtaaaatcatgtgtaatcactctcgtgtttaagtttttttttttttgctgtttcaaattcgatcggtggcaaatgaaggaagtgagcttatcctt

SEQ ID NO: 23458 - DNA, 887 bp, Oryza sativa
  ref <308>: DATABASE ACCESSION NUMBER: AK073569
  ref <309>: DATABASE ENTRY DATE: 2001-12-06
gacagacttatattcagagtttcagacaccaagagcatcttgtaccacctacgcagagttttgtttgcttgcttgtttgcttgtcagtgtccagaatggcagcgagggtggcgtggatcggcgcggcggcggcggtggtggtggtggcgctgatggccggtggcgcggcggcgcagccgccgtcgtcgacaagcgggtgcacgcagacgctgctgagcatgtcgccgtgcctcaactacctgaccgggaacgagacggcgccgtcggcgtcgtgctgcggcaagctgggcgaggtggtgaagtcgcagccggagtgcctgtgcgtcgcgctcaacgccgacacggcggcgctcggcctcagcatcaaccgcacccgcgcgctcggcctccccgacgcctgcaaggtccagacgccgccggtcagcaactgcaagagtggcgctgctgctcctcctgcgggacagacgccgacgactccggcggggacagggtcgaaggcgacgccggcgacgcccgtgggctccggcgtcgcgccgctccgtgtctcgccggtggggatcctcgccggcatcgtcgtcgccgccgtctacgccgtctccgccgtgtgagctcgacgtcgacgacgaacccggcaagcctatcaccgtctgtatcaatcttgatcggtgcacgcatttgaggatttcgatgtgatgtgagcatggcacgcgtgcgtgtaggaattcgttacggatttgagctgttcttcctccattggtttatgctactgctgctcccatttgtgccacgatcagaggagcttgtttgattatctttttattattattattatctaggattgattcatcacttccattaattctgaataaaaacttgtatttctcccc

SEQ ID NO: 23459 - DNA, 3010 bp, Oryza sativa
  ref <308>: DATABASE ACCESSION NUMBER: AK073570
  ref <309>: DATABASE ENTRY DATE: 2001-12-06
gagtcacccggcccacaggccacagctactagcagcagcagcaagactgcaagagggggggaagaagctaggtagctagtagtacgatgcagcagccgcaggcgagcagcatgacggcggcggcgaggaggcggcagctgcagggatcggtgctcgccgggaagatggtgctcgtgcgcaaggctctcgacaccaacttgaactccggcgacgtcgtgtgccagctcgtcagctccacggtcggcgaccccgacaatggcaacagggggatgttgggccaggaggcatgcgtccatatcaactcggagctacacccaactccctacgaggcctccacattcagcttcgagttcatctgggacatgaagaaacagggtgtccccggagcggtcatcgtcaagaactattgcgacgaggagttcttcgtcaacaccatcaccctcgacattgtaccgggctatggaaccatcgtcttcaccgctgagtcgtgggtttaccccgacgagatatacgaccatctcccccgtgtcttcttcagtaaccaaccatacctgccaaaccaaatgccggcgccgctggtgccgtatagggaggaagagctccggaacctgagaggcgacgacaatccgggcccgtacaaggaccatgaccgtgtctaccgctacgacgtctacaacgacctcggcgagccagacagtggcaacccgcgccccgtgctgggtggctccgacgagcacccttaccctcgccgctgccgcaccggccggaggcggaccaacaccgaccccgactccgagagccgcaacgtcggcttccccctaaccaaccatttctacgtgccccgcgacgaggtgttcaacgaccgcaagaaggcctacttcgacaccaacaacctcaagctctatatcatgcaaaagtacgccacctttctcttgcacgccgaccagcagacccccttcgagttcgacagcttcgccgacgtgctaagcctctacgacgagggctccatcaacctgcccggatggctcaacactttcctccaaccattgctcggcataatccccttcaagttgctccagcaagtcctcacccccgatagcgagttcatcctcaagttccccatgccggcggtcatcagggaggacaagacggcatggcaaacagacgaagagtttgcgcgcgagatgctcgccggcaccaacccggtcgtcatccgccggctcggggaaaccgagttcccgcccaagagcaagctagacacaagcaagtatcacaaccagaacagcaggatcacagcggcacacgtcgagaagtgcctcgaggtcgagggcctcaccgtcgagcaggtgctagccgacggccgcctcttcatcctcgaccaccacgaccacttcatgccgtacctgctcgatgccaaccatcaacccgacactttcgtctacgcgacgaggacactgctcttccaccgcaacgatggcactctccagcctgcagcaatcgagctcagcctacctcgctttgaggccggcagcacactcatctcgtccgtcggcgaggtctacacgccggcgtcagacggcgtggagggccacatctggcagcttgccaaggcctacgtcaccgtcaatgactactcgtggcaccagctcgtcagccactggctcaacacgcacgcggtgatggagccgttcgccattgccacgcaccggcagctcagcgtggcgcaccctatccacaagctcctccacccgcactatcgtgacaacttgtttatcaacgccctcggccgccagagtctgatcaacgccggtggtagctccgagaacaccgtcttcctcggcaagtatgggctctccatgacatcggaggtgtacaggaactggaacttcaccgagcaggcgctcccggaggacttcatcaagaggggcgtcgccaagcgccgctccaatggcgagctggagctgctgatcaaggactacccgtacgccgtcgatgggctcgccatctggtcggcaatcgagacttgggtccgcgactattgtgccatctactacgcggacgatgcggcggtccagggcgacgccgagctgcagtcgtggtggaaagatgtgcgcgaggaaggacacggagacctcaaggaccacaaatggtggccggagatgaagacggtggccgagcttgtccagtcatgcgccaccatcatctggatcgcctcggcgctgcacgcggccgtcaacttcggccagtacatgtacgccggctacgtcccgaaccggccgtcggtgagtcggcggccgatgccgaagccgggcaccgacttgtacagggagctggagctccacccggagaaggaattccttctcaccatcactaagcaggacctgtccatagctggcattgccctcgtcgagctcctatctagccattccgatgacgaggtctacctcgggcagcgcgactcgccgaactggacgtccgacctggatgccatgaacgcgttcgaccgcttccgtgaacggctcttggaggtggagaagaacatcgtggccaagaacgacaagggcagtggattcaagaacaggacagggccggtcaacatcccctacaatttgctcttcccttatgcctccggcgacgcggaggccaacaccggggtcaccggcaagggcatccccaacagcgcttccatctgatcaagcactatactatacaacaagggcaagcaaggggacacatactccttaattagcaacatttctcttctcgtgtaatgtgataattcagtatgggtcataagtttgtttatgcaataaattaaaataaaatcggactacctataaaactgtcaaaagaaaatttctctaaaatatttcaaatgtaattatagtgtaactatattataattcaggtgtaaccgaaatgtaacttgtctaatcttatagaaagatcaagtggctagcatgcatggtttgcgggagcgaggtctagcaaatctgaaataaaataattc

SEQ ID NO: 23460 - DNA, 3140 bp, Oryza sativa
  ref <308>: DATABASE ACCESSION NUMBER: AK073571
  ref <309>: DATABASE ENTRY DATE: 2001-12-06
gatgcttcagtagttcagttagctcgctgctgcctgcatgtgcaatggagcgttcaacgccgggaacaatggcggcacggtcgtggttgcttctcctctgcttcgtcgccgtcgccaccgccggagtgctccaagctcgtgcccaacctgacagcaacggtttcatcagcgtagactgtggcctcccggggaagacgggcttcgtggacgacaagaccaagatatcctacgcggcggacgacggcttcaccgacggcggcgcgtgccacaacatctcggcggagtacatcacgccggggctcgccaagcgctaccacaccctgcgcagcttcccggacggcaagcgcaactgctacacgctccggtcactcgtcgccgggctcaagtaccttttccgcaccaccttcttttacggcaactacgacggcctcaacaagctacccgtgtttgatctctacgtcggcgtcaactactggacgatggtgaacatcacgggccccggcgacgcggtgatcgtggaggccatcgtcgtcgtgccggatgacttcgtgcaggtctgcctggtgaacaccggcgccgggacgccgttcatctccgggttggacctgaggcctctcaagaacacgctctacccgcagtcgaacgccacgcagggccttgtcctcctcggccggctcaacttcggcccgaccgattacaccgacgtcataaggtacccggatgatccgcacgacaggatatggttcccgtgggtggactcgaccaaatggagccagatatcatcgacgaagaaagtgcaggatctagacaacgacatgtacgagacgccgacggcggtgatgcagacggcgatcacgccgcggaacgcctccaggaacatcgagttctcctgggaccccgtgccgctgcccaacgacccgacgcccgggtacatcgccatcttccacttctccgagctgcagctcctccccggcaacgccgtgcgcgagttctacatcaacctcaacggcaagccgtggtccctgaccgccttcaagccggagtacctctacaacgacgccaccttcaaccggaacccattcctacggtacccgcagtacaacatctccatcaacgccaccgccaactcgacgctgccgccgctcatcaacgccgtcgaggtgttctccgtcatccccactgccaccattggcactgacccagaggacgtggctgcaatcacggcgatcaaggagaagtatcaggtggtgaagaactggatgggtgacccatgtgttccgaagatgcttgcgtgggacaagttgacctgcagctatgccatttctaaccctgcaagaatcattggcctaaacctgtcctccagtggtttgagcggtgaggtatcgtcctatttcgggaatcttaaggctattcaaaacttggatttgtcaaataataaattgacaggtccaattccagacgccctttcacagttaccttcattgacatttctagatttgacaggaaatcaactcagtggatcgatcccgtctggtcttctcaagagaattcaagatggctctctaaatctaagatatggaaataatccaaacctctgcactaatggcgattcatgccagccagcaaaaaagaagagcaagctagctatctacatagttattccaatagttatagttctggttgtggtgataatatcagtggcagtactactttgttgcctgttgagacggaaaaagcaagcaatgagcaattctgtgaagccacaaaatgagacagtgagcaatgtgtcgtcaaatggcggatacgggcatagttcatcactacaacttaagaatcgtcgatttacgtacaatgaacttgagaagataacgaacaacttccagcgggtgcttggccgtggagggtttgggtacgtttacgacggcttcttggaggatggcactcaagtggcagtgaaattgcggtctgaatcttccaatcaaggtgctaaggagttcctcgcggaggctcaaattttaacccggattcatcacaagaatcttgtctctatgattggttactgtaaggatggggaatacatggcacttgtatatgagtacatgtcagaaggaacactacaagaacacattgcaggtaaaaacaacaacaggatatatttaacctggagagagaggcttcgaatagcactagaatctgcacaagggctagaatacctacacaaggcgtgcaacccaccacttattcatagggatgtgaaggcgaccaacatcctattgaacacaaggcttgaggcgaagattgctgactttggcctatccaagacattcaatcacgttaatgacacccatgtatctacgaacacgcttgttggcacacctggatatgtggatccagagtaccaagcaacaatgcaaccaaccaccaagagcgacgtctatagctttggtgttgtcttattggagttgatcacagggaagccgtctattctacgtgaaccagggcccattagcatcatccagtgggcacggcaacgtttggcacgaggtaacatcgaaggtgtggtggatgcacacatgcatggtgaccatgatgtgaatggtgtgtggaaggccgcagacattgcccttaaatgcaccgcacagacatcgacacaacgacccactatgaccgatgtggtagctcagctgcaggagtgcctagagctcgaggataggcgatgtggcatggaagatacatataacaacttctatgccggcaacaacaatgatcccaactcaagttataacatgtacaacacggaccagtccactgatgtgagtcaaaacaacacgatggagcataattttgaaagagtgccaaccatggctacagggccagttgcacgataaaggcctttgccaatctgatccgagactgctagtcctaaaatagatacatgcagaactgaaacaatattgttgctttaatttaccaaagtaaatgcaagcgcataaagtttcaaacaatcaagatctagagcttttaccgtgtggaatttgtaatcaatacacttatctattctttgatatttataactcttccatactattcttcaagaagagaaaagtcaatatacacctaataattttttttatcttggc

SEQ ID NO: 23461 - DNA, 1416 bp, Oryza sativa
  ref <308>: DATABASE ACCESSION NUMBER: AK073572
  ref <309>: DATABASE ENTRY DATE: 2001-12-06
gactccacactccacgcctccgcccgctctcgtcgcagcgcaccccgtcgcgtgcgacgactccatccccgtcacaacaatgtcgtcccgccgagacgtcctcgctgttgtcctcgtggccgcgctgctcccgccggcgttgtcccgtgggctttggctggggcaccacgggctggggcacgggcacgggcgatggcgcgcgccgcatgtcggcggacacggccagggacaggggccgcagcagcacgcgccgctcggcggcggcgggtggtcgtcggcgcacgccacgttctacggcgggggtgacgcgtcgggcaccatgggaggggcgtgcgggtacgggaacctctacagccaggggtacgggacgaacacggcggcgctgagcacggcgctgttcaacaacggcctcagctgcggcgcgtgcttcgaggtgcgctgcgacgccggcggcggcgggagccactcgtgcctgcccggctcggtcgtcgtcacggccaccaacttctgcccgccgaacaacgcgctcccgtccgacgacggcggctggtgcaaccctccgcgcgcgcacttcgacatgtcccagcccgtcttccagcgcatcgctctcttcaaggccggcattgtccccgtctcctaccgccgggtggcttgccagaagaagggcgggatccggttcaccatcaacgggcactcctacttcaacctggtgctggtgaccaacgtgggcggcgccggcgacgtgcacgcggtggccgtgaagtcggagcgctcggcggcgtggcaggccctgtcgcgcaactggggccagaactggcagagcgccgcgctcctcgacggtcaggcgctctccttccgcgtcaccaccggcgacggccgctccgtcgtctccaacaacgccgtcccccgtggctggtccttcggccagaccttcagcggggcccagttcaactgattccgctcaattttactcgagcatcgtcgtggtagttgcagtagtactcccaactggacggtgctgggaagtgccattgttttatgattggtactcagtctcgccttggttcttgggaaagtatttagtgggtagtttggcctagtatcaacatgggctttgtgctggtgtcactgctagtggtagtttgttacaagtaccattagttgagcttttgtggtatcttttggctagggattggaagtggtggtaaggctgtggcttgattgacagaggccgccttgtatcacccgccaaaatagcaaaattgggcctaatgggaatggccttctgctagtaatggttttgcctggttgttgtctgtaccggaccccagtaccggacctcattttgggggtgccaaacagtttaggcatctggggtatgccctgtgtgctgcttatgaacaatttctttttact

SEQ ID NO: 23462 - DNA, 2701 bp, Oryza sativa
  ref <308>: DATABASE ACCESSION NUMBER: AK073573
  ref <309>: DATABASE ENTRY DATE: 2001-12-06
gggacgcctcctaacccgacctactaccctccatggccgccgccgccgccatcgccgccgcactcctccgccgctacacatcctctcaacaccaccggcgcatcctcctcctcccactcctctcccacctccagcgggccgcgccccgatccccttccccctgggacccaccgccccaccaccgcttcttcttctcctccgacgtgaccgccgagggggacagtaagccgcggccgcctcttgacgggaagcagctatggcgcgaggtgtcgacctcggagcccgccaccggcgcgtcgcgcctcccgaaggccacgtgggacgccgtggtggcgctcctccgccgcttcggcaaggacccggctatgtccgaccaagccctcgcgctctacatccccgcctcggcgttccccaccttagcccgccgcttccgccacttcctccccgcgcgcctctccctggagtccgccgagcacctcctctccctcccggccgacgacgcgcacgccctcctcctcccggccttcgctgagttctgcgtgacccacctcgcggacgagctgaggaagcacgagtctgtcatggccgcggcggacctcacggcgccgcacgcgtggtaccccttcgcccgcgccatgcgccggcgggtggtgtaccactgcgggcccaccaacagcggcaagacgcacaacgcgctcacccgcttcgccgccgccaagtccggcgtgtactgcagcccgctccggctcctcgccatggaggtcttcgacaaggtcaatgccctgggcgtctactgcagcctccgcactggacaggagatcaaggaggtgccattctccaaccacgtcgcgtgcacgatcgaaatgctctccacggaggagccctacgaggttgcagtggttggtgagatacagatgatggctgaccctgtcaggggctatgcgtggacacgagccgttcttgggctcaaggcagacgagatacatctctgtggtgaccctagtgttctgaagattgttcggaagatttgcgcagatactggagatgatttggaggtgcatcaatatgagcgcttcaaaccgcttgttgttgaagcaaagacactgcttggagacctcaagaatgtgcgctctggtgactgcattgtcgcgttttcacgcagagagatatttgaggtgaaactggcaatcgagaagtttacgaagcacaagtgttgcgttatatatggagctcttccaccagagacacggcggcagcaagcaaagctgtttaatgagcaggataatgagtatgatgtgcttgtagcaagtgatgctgttggtatgggattgaacctcaacattaggagagtggtattctatagtttggccaagtacaatggggacaggatggtacctgttgctgcttcacaggtaaaacagattgctgggcgagctggtcggagaggcagtatttacccagatgggctgacaaccaccttcttgttggatgatttggattatttgatccagtgccttcagcagccatttgaggaagcgaagaaagttggtctattcccttgctttgagcaggtggaaagttttgccatccagtttcctgaccttaccttcaatgaactgctggataagttccgtgaaaattgccgcgtcgacagtacatacttcatgtgtcaccaggaaagtatcaagaaggttgctaatatgcttgagaggatccagggtctctccctcaaggatcgctacaatttttgttttgctccagtgaatataagggatccaaaagccatgtaccatcttctgagatttgctacaaactatagccaaagccgtcgtgttagcattgcaatgggaatgccaaagggttctgcaaagaacgacactgagcttctggaccttgagacaaaacatcaggtcctgtcaatgtacttgtggttgtcacaccattttgaggaagatcattttcctcatgtgcagaaagctgaggaaatgtcaataaatattgcagatttacttgctaagtcacttgccaaagcaagctggaagcctacatcaagacaacaagcaaaaccaagacgagaaaatgaagaagacaacgatgtggagcaggcatcagatgataatgcaaagaatgattcagaagatggttgtgaaaggtcaatatcacgtataaaaccgttcatgaggaaaaggctggatagacctagtcaggacccttcttccttgaactttgtggcatgaattacttgtggcctgggtgattaaccccgactgattgcttcatgagatcgtgtgtagccaagtcgttgcagccatttcaacctcccagaactggcagttcatctatcagttctggtgtaggatggttggttatgttggctgaagtttggaattgatcttatcctcaaaatgacactgaagccatccagaggtgtaagctagtatgctttagtggcgccacgggatactttaacttcagttttgtagattatttgcacgagaaggatatatcgacatgaattcatcagaattaagttattagtgttttcctgatatgaacaagggagtaagggactgtggtaataagttagctgggggatatacggtttttttattgggtattcacttagccttggatgtaagggactagaaagtaaacttgttttgtttcagttctgtttgaatcaatggcagcggtataacct

SEQ ID NO: 23463 - DNA, 3282 bp, Oryza sativa
  ref <308>: DATABASE ACCESSION NUMBER: AK073574
  ref <309>: DATABASE ENTRY DATE: 2001-12-06
ggagagagagagagagagatgcggcgtggcagcagcagcagcagcggtttcggtggccatctcctgtggctggtgcttgtattgtggtcatggcggatcgctgccgctcaagctcagcaagcaccaaaaactgatccaatcgaagtgtcagcactaaacacaataatggggagatggggcctgacggcaccatcggaatggaacatcagtggtgagccctgcagcggtgtagcctctgacaattccgactgggataactacccgaaagaccctgccatcaagtgtgactgctcttccaacgacaacaccatctgccatattatcaaactgagagtaagaaagttaaacgttgttggtcgaatacctgcagagctacagaatctcacctttctacaagacctgaacctgaatcagaattatttgactggtgccatcccatcattcattggaaaatttgcttccatgaaatatttgggcttgggtttcaatccactgtctggacaacttccgaaggaacttgggaacctcaccaatctcctctcactgggcattagcctggacaactttactggtgaacttcctgaagaactgggcaacttgaccaaacttgagcagttgtacattgatagttctggattcagcggcccgtttccttcgacgatctccaagcttaagaacctgaagtacttgaaagcgtcagataatgaattcacagggaaattaccggattacttggggagcttgactgaattggaagatctggctttccaaggaaattcttttgaagggccaattcctgcaagtttgtccaatctgaccaaactaacaaacttacggattggtgatattgtaaatgggagttcttcactgggatttatcagtaatctgacatctttgaccaacttagtattaaggaactgcaggatatcggaaaaccttgaaacagtagatttttcgaagtttgcagcgttaaccatgctggacttgagttttaacaatattacaggccaagttcctcagtccatcctgaatctaggaatgcttcaattcctgtttcttgggaacaatagcctcataggaactttgcctgatgttataagctcttctttaaaagtgatagatttttcctacaatcatctcaccggaacctctccttcttgggctacccagaataatttgcaattgaatttggtggcaaacaacattgttcttggtagcaccaaaaacagattattcgtttgcggttgactgcggcagtgatatatctactaggggctcagataataccatatatgaagcagatgctacaaaccttggggatgcatcatattatgttactgatcaaataagatggggtgtcagcaatgttggatacttttaccaagccacggatagaatggacataatatatagctctgagcattttcagactgcagtcgactcaaaattgttcgagactgcaaggatgtcaccatcttcactgagatattatgggcttggacttgagaatggaaattacactgttatgcttcaattcgcagagtttgcttttccagacacgcaaacttggctaagcttaggaaggagaatttttgacatatatgtccagggtgctctgaaagaaaagaatttcgatataaggaagacagctggtggaaaatcttttaccgcaattaacaggacttacacggcaaccgtgttaaaaaacttcctcgagatccatctcttctgggctggcaagggcacttctggcatacctacccaaggttactacggaccgatgatctcagcattaagcgtcactccaaattttactccaactgtgcgaaatggtgtaccaaaaaagggaagcaaagcaggtgaaattgctggaatattgactggcgcttcagttttaggattagcaggctcatttggaatatttatgtggataaagaagcgaagaacaatggcaaagcagaaagaagaactgtacaacctggtcggacgacctgatgtcttcagtaactctgaactcaagctagccacagacaattttaattctcaaaacattatcggggaaggcggatacgggccagtgtataagacggttcttcattcaacagggtaagctgcccgatggaagagttatagctgtgaaacaactttctgaatcatctcatcaaggcaaaagccaatttgttacggaggttgcaacaatttctgctgtgcaacaccggaatcttgtgaaactgcatggatgttgcattgacagcaacacaccattgttggtttatgagtaccttgaaaatggaagcctggatcaagcaatctttggacatagtagcttaaatctagactgggcaatgcgcttcgagatcattttaggcattgcaagaggcctaagttatcttcatgaggagtcgagtgtatgcatcgtgcatagggacatcaaagccagcaacatactacttgacactgatctgatcccaaagatctctgactttggactcgccaagctctatgatgagaagcaaactcatgtgagcacgggaattgcaggcacatttggctatctggctcctgagtatgcaatgagaggtcatttgacacaaaaggctgatgtttttgcatttggggtggttatgttggagacagttgctggtcgatcaaacactaataactctctcgaagaaagcaagatcaatctccttgaatgggcctgggaccagtatgaaaaggagcaagctctcagaatccttgacccaaatctcaagggattcaacaaggatgaagcttttagagtcatccgtgttgcgctgcactgcacgcagggctcaccacatcagcgaccaccaatgtcgaaggtcgtggcaatgctcaccggagaagttgaggtacctaaggtggtcacaaagccaagctacatcactgagtggcaaatgatggacggtaatagaagctatgtcaccagcagctactcagggtctaccacccatgagttcggcaggcagaacgagatcgaacctctgcagcaatcaccacctataatcaaagcgggaaggtgaatgcaaagttgaattgtgcagatggtcgattttgggttgatgtgacaatattgaatactgctcgttcttacttacatatatagttgcatgctgatgttagtggtatttggatatttatagatatttcaggaacaaagctgtaataagtttaaactgtaataaggggcgacccaatagtgtcataagaaacaaaacttcatggaataaatggttgacacatgaggcaatgaggtgg

SEQ ID NO: 23464 - DNA, 891 bp, Oryza sativa
  ref <308>: DATABASE ACCESSION NUMBER: AK099360
  ref <309>: DATABASE ENTRY DATE: 2002-08-28
gatccagaatcagatccacaaggcagcagctgcagcagcatcgaccatggcgatggcgcgatccatcctcctcctcctcctcctcgccgccgccgcctccgcctccgccgacgcgcccttcctcgtcgcgcacaagaaggtttcgctctcccgccccaagcctggcgtcgagcgcctcgccgtctccctcgacctctacaaccagggatccgcaactgcctatgatgtgagcattaatgatgatacttggccaaaggaggcatttgagcttgtctctggagagatgtcaaagacattggaaaggcttgaccctggtgtcactgcttcgcatgcatttgtcttggagaccaaagtacagggcatgtttcaggttcacctgcggttattacctatcgtgttcccacaaaggctgcgcttcaggaggcctattcaacccccatccttgcacttgatgttcttgctgagaggcctccagaaaagaagtttgaatgggctaagaggcttgtggcgaagtacgggtcgctggtgtccgttgttggcttggttggagtgtttatctacctggttgcaagcccgtcaaaatccagcggtgcaaaagcaagcaagaagaggcgttgatatacttgcctaccatatataaggcagtgtttgttcttttttattaaaaagaggaagagatggtggcaggttttttagattgatagcgcgagagctttaaggctgccgcatccttgaactgtatgaattttctctgtttgtgtttttggaagttgaaaacctaacccagagaattggagagtagattttgtaacagatgaaatctcaatgcatcattttgaagttgcctgatacagatacctattcattgcatttggtaacagatgaaatccc

SEQ ID NO: 23465 - DNA, 1371 bp, Oryza sativa
  ref <308>: DATABASE ACCESSION NUMBER: AK073575
  ref <309>: DATABASE ENTRY DATE: 2001-12-06
gtaatgtgactattgtttttcccccacaagtccaaaacacagttttccaaacgcaagacaaatgtttcctcgattggttggtatcagcagctgctgtgggagaagctaacatgagagacggcgccacattggatcaaaacaacaatggtgcacaggataagtaccaagggcaatcagaacgttgcgagacgcagatgacgaaagaggcggggaatcatctaaggccatcttgcatgtcatcgttttcaatgcgcacagttcatgaatggtggccaaactctatattagctgggagattattccgttggcttgaggagtcatgtgatgacgatataaccggggtttggttcaagcacgacaagcctacatcaattgagataagtgccaaggaaatcaaaatgcaggtcatccgcggtggtattctacatgcggacctttgttcagcattgatcagactctaccaacagttagatgccaagatgaatacaaacccatgtgggcagcggtggcgtcacttcttcctaccccaattcgcgaaagctttgatgtttgaacgaaacttcagttccatgaaagcagtcagtgacatgtttgatcaacatattagcggctacaaaatacagaactgccaactgctcatttccccggttcaattagctagtgatacatgggcatgctacatttgggacatgggagaagaggcaaatgcacattttggaccctgtcttgcaacaccgggaggtctccgatgtgagtgctaagcaccgtcagacagttacgatgatccacacaggcttgctaacatgtataaacaaattcttcgatgactgggatattaacccggatggatggacatgtacgtaccacacaaagattagcccgaggtgccaaaaatggaactctgtttttcacacattatactatgcgcgcgagttctatgatggcaagctgagcaatgttctagattcgggtagggttgctgccttgcgcagggatcttttctacaagctcctgactatggaagggaacagcgctgagctgccaagtcacattgcgagatacttggagtagttgtaccaagtgtcatgctggtcgtttagccttttgctagtatgtttatgctgcaagtatctgacgagaacttaggaagttgtcttgtgaccaggataattcccaagaaatctcctttatctaaaaaaatattctaggcgtctagataagccagtgttttctattgataatagcttgcactgaataaaggtatagcagcaagttgtttactagtagcatgtagcaaaagccttttgtatggcttccggcatgttaggactctttgggaagtgcatcactgaatgaatgagttttctgagt

SEQ ID NO: 23466 - DNA, 4511 bp, Oryza sativa
  ref <308>: DATABASE ACCESSION NUMBER: AK073576
  ref <309>: DATABASE ENTRY DATE: 2001-12-06
gaatctgaagtctgaaacttatacgtccagcaccaaacactcaaacccaattaaccccagctgcagctggcaccatctttctcgatctgcaggcggaggagatccatccatggatgtggccgtcggtgcggcgagctggctcctcggaaaggtggtgacacagctgtccgatggcatggtggcggcgtacgtgtccagtacagagcttggcctcaacatggagcaaatcaagaccgatcttgcatacactcaaggactgcttgacgcggccgaagagagagatgtcagaaacaaccatggcctacgggtgctcctagaaatcctgaccaagcaggctgacgaggctgaggatgttttggacgagctccagtacttcatcatccaggaccagatcgacggcacccatgaggccactcccatggtagacgatggccttcgtggtcaagtgctcatccatggccgccatgctcttcatcataccaccggtaactggctttcatgtttttgttgttcctctgcacgagatgacgccgatgatccacatgatatacccaagtcccatagtgatgttcctgaccatgttagcaagttgacattcaatcgagtagacatgtccaataaaatcaagttggttatagagggcatacatgcctcatgtacacctgtatccaatttgctcaaaattatccatcctgcagtaggaagggcattaccaccgaagcgacctcctaccagctcaacaattacacaggataaattgtatgggcgggaaaacatctttaatcagactcttgatgccatgactaactttactattcatagtagaacactatcagttattcctatagttggtcctggtggaattgggaagacaactttcgcccaatacctatacaatgacaaaacaatagaggcacatttctctataaaggtctgggtttgcgtgtctactcattttgatgtggttaaactcactcaggagatcttgaagtgcatatatcatgctgaaaatgagggaagccgcagagtggatgaattatccaacttggatcagctccaaataaccattgcacaaagactgaaatccaaaagatttttacttgtcttggatgatatgtggaaatgcggtagtgaagctgagtgaggaagcctattagctccattcagcaaaggggatgccaaaggtagcatggttcttgtcacaactcgatttccatccatagcacagatggtaaaaacaactaagccaatagaactgcaaggtcttggggatagtgaattcttcacattttttgaagaatgtatatttggtcatgataagcccgagtattatgaagacaacataattgatattgcaagaaaaatttctaagaaattgaagggtttcccgctagcagccaaaagtgttggtcgattattgaagtatcgcatttcacaggaacgttggatagaaattcttgaaagaaatgagtggcaacatcagacaaataatgatgacataatgccagcactacaaattagctatgactaccttcccttttatctaaaaaggtgtttttcttattgtgccctttaccctgaggactaccattttaataatatagagattagtcatttttgggaagcattaggcatcatagattctggaagtcataaaaatagagctgaggatattggattaaagtatttggacgaactagaaggtaatggttttcttgtgaagaaagttgatgataggaccgggaggcaatattatgtaatgcacgacttattacatgagctagcacaaaatatttcatcacaagagtgcatcaatataagttcatacagtttcaggtctgataacattccatggtccattcgtcatgtatccatcaccttacaagataactatgaggatagttttgagagagaaatggaaaatttgaagagaaaaatagacataggaaatttacggacattgatgctttttggagaaggcaatgcaagcatgcttatccttttcaaagatttattaaaagaaacaaaacgtctccgtgttctattcatgcatgcaaactcgctccaatctttcccgcacaacttttccaaactgatccaccttcggtatctaaagttggaaataccttatgacgtagaactgtctctaccaaatgcagtaagtagattttatcacttgaaatttttggacctagggtacagtaaatgtattttgccaaaagacatcaatcatctagtcaatttatgcctcttaaatgctagaaaagaactctgttccaatattcctgggattggcaagatgaagtatttacaaaggttggaagagtaccatgttaaaaaacgggacattgggtttgaactaagtgagctaggggatttgacagatcttgaaggtgaactgaaaatatttaatcttgagaaagtggcaacaagggaagaagctaataaagcaaaattgatgtccaaacggaatatgaaaaagttggagctagcttggggtatggtgcaacggaccacaagatctgatgttcttgaaggtcttcaaccaccttctaatcttaaagcacttgtcataaagaacccaggtggttccattggtcctagttggttgtgtggtaatatttgtgtaaactacttgaaatctctgcatatagaaggtgtatcttggggcattctcgcaccttttggtcaactgatgcagctagaggaactaactttgaacaatattccaagcacgcgtcggtttgaacctaattttggtggtgttacacaacaaagtttctcacacttgaagaaagttgaatttgttgatatgccagaacttgtggagtgggttgggggagctcattgccatttgttttcaaagattacaagcatcaggtgtgaaaattgtcccaatctctctatgctgcttgtgccatcctctaggttctctgtctcctatgcacaagacataaacaccagatggttccccaacctgtgttctcttgagattgaaaattgccccaagttgtcactgccccctatacctcacacttccatgttgacatgtgttattgtctcagagcgtaagacagatttgttgcgtcttcaagaaaacaagctgatctcacatggatacagaggtgctttggtctttgataacctggacaaagtagaagatatgagtatcgaagaaatgccacacgtttcattgactgatctccaaaagctcagctccctaacaagacttgccgtcaaaggatgtgaaagcatgttatttagtgaagttgaagagggtgttatcttcccttcagttcagcagctcgaaatcagtgattgtcgtcttaccagaaattcattgacaaagctactaaaccgtttcccagctcttactgagttccacttgatcttctcttcatttgaggttggagaggaagcagtattgcaactcccatcctccaacttattgagctatgtcagaatctggtgctgcaagaacctggttcttcctgtggcggatggagggggtctccatgatctatcctcactccaagaagtcgaaattaggggatgtggcaagatgttcgatcggtgttccatggtagaggccggagctcggagcaacaagttcttccctgcttccctcagggaactcaatatcagcgacgagttgagcattcagtccatggctctgctcacaaatctcacgtccctcactcatctaacactgataaactgtgataacctgacagtgcatggtttcgatcctctcatcacgtgcagcctcaaggaattggtggtctacaagaaagccgatgacgagattcatctctactctttagcagatgatttgttcttagaggtggcaacaaggatgacgaaagtaatacctgcgggaggttcctacttccaacagctggaaaaacttgaggtggacagcatctcggcagtgcttgttagccccatttgcagtctcctcgctgccaacctccgcgagttgcgattcaggtatgatttgtggatggaaagcttcacagaagaacaggaagaggcacttcagctcctcacctccctccaatgcctgaaattccggaagtgccttcgtctgcagtccctccccgaagggttgcattgcctttattctctctataaactaaatatcgctggatgtccggaaatcatgtcgctgcccaaggacggcttcccggtctcattggaacgtctaagaatacgagactgcagcatcgatttaatggttcaagtcaaggaattagaagcatcaaacccagatttacatatacggctccactagcaaacttaccacccaagctatccagcaccattgcctcatctggaacctttcagagttcttccatcatcgtatagctgacaatgtaaatgcgaattacacgacaacacatgaagataaagagctctggatggcagagcagccactttggctttcagacataatggatgtcctttgtctattatccaatcaatgttatattgatcattacaattttggt

SEQ ID NO: 23467 - DNA, 2473 bp, Oryza sativa
  ref <308>: DATABASE ACCESSION NUMBER: AK073577
  ref <309>: DATABASE ENTRY DATE: 2001-12-06
tagacccctccacggcgacggccatggcgaacagcaagagcctgctcctctgctggtgctcgctcctcctcctcctcctcgccgccgcagcgccgcccgccctcgccatcccgctctgcaccgactccagggcgccggtgccgctgaacgggacgacgctgggcttctgcggcggcggggggagcgggagcagcagctgctgcggcgccgcggatgatgccgcgctgaggaagcggttcgaggcgatgaacgtctccgacgccgcgtgcgccggggtcgtcaagtccgtcctctgcgcgaaatgtaatccatattcggctgagttgttcaactcaagctcaaagattcggatggttcccgtcctgtgcaatggatcagcttcagctagttctactcaatcgaaggattctacacaagactactgcaaactagtttgggaaacatgcaagaatgtgacaatactgaattctccttttcaatctcctttgcaaggtggtgcaacattacctagttcatcatcaaaacttactgatgtttggcagtcagaaaatgacttttgtacatcatttggtggctcatctgacaaccagtcagtatgcttaaatggaaatgaagtttcatttagcacttcagaaccatcacccagtcctaaaggggtgtgtattgagagaattggaaacgggacatacttgaacatggctcctcatccggatggatccaacagagttttcttgtctagccaagcaggtaaaatatggttggcaactgtcccagaacaaggctctggaggcattctgcaatttgatgaagccagcccatttattgatctaactgatgaagtccactttgattctgagtttggactcatgggtatagcatttcacccaaagtttgctaccaatgggcgcttcttttgtttcttataattgtgacagaactcagtcatctaactgtgctggtaggtgttcatgtaattctgatgttaactgtgatccttcaaagcttggatctgataatggtgcccagccatgccagtaccaagttgttgttgcagagtactctgcgaaagtctcatcatcaaatgtttcggaggcaacatctgctaatccatccgaggttagaaggatatttacaatgggactgccatatacagcccaccatgggggacagatactttttggacctacagatggatatctgtaccttatgatgggtgatggtggaaacaaaggcgacccttttaatttttctcaaaataagagatcacttttggggaaaattatgaggcttgatgttgatggcgttcaaagccagagtcaaatcattaaccagagcttgtggggtaattattctgttcctaaagacaacccattcagtgacgaccgagacttacaaccagagatttgggccttgggcttgaggaacccatggagatgtaattttgattctgagaggccttcctatttctactgtgcagatgttgggcaggatttatatgaagaggtagatttgatctcgaagggtggaaactatggatggcgtgcatatgagggcccatacatttatcatccagaatggactcctggagggaatacatcgcttaattctataaatgccatcttccctgttatgggctacagccattctgctatcaacaagaacactgggtctgcatcaattacaggtggatttgtttatcgagggtcttctgatccctgcctatatggaaggtacatatatgctgatctttacgcgtcagcaatgtggaccggcacagagaccccagagagcagcggaaactacacctcaactctgattccgttcagctgctccaagaactctccaataccctgcgaatctgcatcaggcagcaaccaaccatcgttgggctacattttctccttcggcgaggacaacaacaaggatgtcttccttctaacatacaaaggcgtctaccgagttgtccggcctagcctctgcggctacacctgtgccgcggagaaaccagagaccaacaacaatggaacgtctccctcaggctcttcatcatttgcttcaggaaggaggatagggaagttggcagtagtaatggcgtttgttttgtgtgcattattcttctgagatgtccatccctgttagcttgttatatatcatgtatggtttctttcgcacctgctgtacagcattgacgagccctacacgtctgtgtgactgtttgtgattattagtagtatttggttgtgcttagttctcaagtggtgggcttgtgcaatgtagcattgtgatgactgaaaattaattagccgtgcttgcctttaggattgggcaatgggcaagaatatttggcaagtggaaccacgttactgttataaatgaaagttgtacggggggtaagctttgttctgaacctttagttttcgggcttgtttggtttggtgctaaattatgcccaactaattcattggtaattttg

SEQ ID NO: 23468 - DNA, 1810 bp, Oryza sativa
  ref <308>: DATABASE ACCESSION NUMBER: AK073578
  ref <309>: DATABASE ENTRY DATE: 2001-12-06
ggttggcttgcactgcctagcttgttgctcatctccttggtgtatctggctgcaggattgagctcagtgagcttgagcagcagcatgcagggtgcaatggccagggtgaggggtcccttcacgccgtctcagtgggtcgagctggagcaccaggcgctgatatacaagtacttggctgcgaatagccctgtaccacacagcctcctcatccccatcaggaggagcctcacatcgccctactcgcctgcctactttggctcaagcacattgggatggggatctttccagctgggctactccggcagcgcggatccggagcccggccggtgccgccggacggacggcaagaaatggcggtgctcgagggatgcggtcgccgaccagaagtactgtgagcgacacatgaaccggggacgccaccgttcaagaaagcatgtggaaggccagcctggccatgccgcgaaagcgatgcccgcggcggtggcagcagccgctgcctctgctacccagcctagtgctccggccgcccacagtggcggagctgttgctggcctcgctatcaaccatcagcaccagcaaatgaagaactacgctgccaacactgccaatccttgctctctgcaatatagcagggatctggcaaacaagcataatgagagtgaacaagtgcaagactcagacagtctctcgatgctgacttccattagcacgagaaatacgggcagcctgtttccgttctcaaaacaacataatccttttgaagtgtccaactcaaggccagattttggcctagtatcacctgattcactgatgagttctcctcatagctccttggagaacgtcaatttgctcacttcgcagagtctgaatgaacaacagagttcagtttcccttcaacactttgtggactggccaaggacacctgcacaaggagctctcgcatggcctgatgctgaagacatgcaagctcagagaagccagctctcaatatctgctccaatggcgtcttctgacctgtcatcagcctcaacatctcccatccatgagaagctgatgttgtcaccacttaaactgagccgtgaatatagtcctattggtctcggttttgcagcaaatagagatgaggttaaccagggagaagcaaactggatgcctatgttccgtgattctttgatgggcggaccattgggagaggttttaaccaagaataacaacatggaagcaaggaattgcctatcggagtctctgaatcttttaaatgatggctgggattcaagctcagggtttgattcatccccagttggtgttctgcagaagaccacctttggatcagtatccagtagcaccggaagcagtcctagactggagaatcatagtgtttatgatggcaacagtaacctgcgggatgatctcggttcagttgttgtaaatcatccgagcatccgcctggtgtgagcttcttgatcaacaaaaaatgcaacaagatgacaggcatgaggaaacgattcaatcagtcttcaccttgttacatatcgttatgacgtcttcaagtgtgagcatttacctcggtgctttgtcattcagactaatcttgtgtttttggtatttctgctctgttatttttcctttgctttgtaaccttcaccttggatcttgacgtgatatgacgtgtggtatggatggatttggtactccattgtggcatatcatcttaaaatatcccatgctgtgacgccataatcgcggatgaatgtaatccgatccttgtcttgctttctggtagtattcaatggattgtttgtgagctgat

SEQ ID NO: 23469 - DNA, 2404 bp, Oryza sativa
  ref <308>: DATABASE ACCESSION NUMBER: AK073579
  ref <309>: DATABASE ENTRY DATE: 2001-12-06
ggggctttctcctcatcgcttctcttctcatctccacccgtgaagagcgaattgctcaagccctaggaggcgacgagggggagtacggcgagggggggaggtcgcggggatcgtcgtcggcgggaggaggcgcggcggggctgccggttgctgctgcgcgcccccctttgcttcgttcgcgcatgggagaagaggaggcaatggtttgcactacccaagatactcagagaaggaggcttgaaaaggaaaagcatggcaaaactgtcgataaggaaacacagaagccaattacatccggtacggatcaagaaggctctgttagttggcaccgctgctttgttcacttcacaaataatttggtgcagcccggggaaactacacaagtaaatgcccatgatgtttcttgcaatgcaagttcatctcagaagggaggccagactatagaagtaactaggcctccatatcaaaatccgtgtatgatgaataagccaccggaaatatcttcagggcagagaattgatccattgagtttctctatggagaattcttcatcacagatgcaagattcggaatcctcaaaggagccaactaatgattacttgaattctcaggcaagaaagtcaataggcaagctcatctttgaagctggacttgagcctggtattctccacttgccatctttcaaggacatggttgatgtgcttgcctgggcccaggtggcaatccctacttatgaatcgattatggaggagcaactaagagaaattcaatgccatgcaagggatctcaagaaacactgggaaatgaatggctgcagtgtaattttggatacctgggagagtcgatgtggtaaaagcttcattagtgttttggtgcattgcagtaaaggcatgttgttcatcaaatcaatggatgtctctgatatcattgatgacgtggatgagctagcagtaatgcttttccgtgtggtggaagaggttggtgtcctcaacattgttcaggttatcacaaatgatgagtcaccttatatgcaagcagcagagcatgccgtgctaaagagatatggctactcgttcttcttcacactatgtgctgaccattgcatcaaccttctgcttgagaacatagcagcacttgatcatgtcaatgaggtcctaatcaaggcaagagaaattaccaggttcatttatagccatgcagtgccaatggaactgaaagggaagtatattcagggcggcgagattctgagcagttctaatttaaaatttgtggcaatgttcatcacattagggaagttagtatctgagagaataaatttggtggagatgtttagctcgcctgaatgggcttcctctgatttggcttctagaagttcattcaggcatgtctatgaagtagtaaaaactgataatgcattttggagtgctgctgctgatattttgaagcttacggatccacttatcactgtgttgtacaaactggaagctgataattgcccaataggtatcttgtatgatgctatggattgcgcaaaagaagacataaagtgcaatcttcgagacaaacatggtgattattggcctatggttgatgagatatgggatcattacttgcataccccagtccatgctgccggttatattctgaatccaaggatcttttacacagaaagattcagttatgatactgaaatcaaaagtgggaccaatgcctgtgtaacccgtctggccaaaaaccattatgatcctaagaaagtggccatacaaatggataggtatcgacgcaaatcagctccttttgattcagactcagcaattcagcaaacaatggaaataccacaagttcgttggtggtcggcacatgggactgacacccctgagctgcaaacgtttgcgatcaggatcttgagccaaacatgcttcggtgcttccatatacaacattgaccggagcatatccgagcagctgcatgttgtgaagaggacatatcctgagcaagagaggttcagaacgatggagtatctacactacaatcttcgcctcgcccattgtgagccatgcgtacgcggtgcttctggggctcaacagcatagtaggctcactagtcaactgggtgactggatctcatcagggcagaccacctcctattacaagtgagaaagtgctatggtctggagcagtgctttcagctcttttttgggtctttctggcattatgcttatcctccagactctgacaaagcatttcttagtgctcgtactatgctgtttctttgttggattacctggtttagtttcagtcaaatcacctctgtagtttaaccatgttacaaaatggaaaacgacaggtgaacatagtgttttggtggcattacctgtgttgaattaccctccttgtttactctc

SEQ ID NO: 23470 - DNA, 1943 bp, Oryza sativa
  ref <308>: DATABASE ACCESSION NUMBER: AK099361
  ref <309>: DATABASE ENTRY DATE: 2002-08-28
gagtgggtggaagaggaaaaggatctgtgtgtgatcgacacgacagatcggcatcggcgggcagggtagagtgagatggccgccgccaccgccgcggtttttgcgctgttgatggcgtcggcgctcgctggggctgcggccggcggcgacatcgttcaccacgacgacgaggcccccaagattccaggatgctccaacgacttcatcctggtcaaagtgcaaagttgggtcaacggcaaagaggatgatgagtatgttggtgttggtgctcggtttggcccgcaaatagtgtccaaggagaaacatgcaaatcgaactagacttatgttggcagatcctattgattgttgcacttctccaaaagaaaaggtttctggagatattcttctagtccaaagagggaaatgcaagttcacgaaaaaagcaaagtttgcagaagctgctggtgcttctggtataataatcataaaccatgtccatgagctgtacaagatggtctgtgaaaagaatgaaacagatcttgatataaatatacctgcagttcttcttccaagagatgctggcttcgctttacatacggttcttaccagtggtaactcagtttctgtgcagcaatactctccagatcgtcctgtagttgatactgcagaggtattcctttggcttatggctgttggtactgtcctttgtgcatcatactggtccgcatggagtgctagagaagcactttgtgaacaagagaagctcctcaaggacggacgtgaagttttactaaatgttgagaatggaagttctagtggcatgatagatatcaatgtggcatcagccataatgtttgtagtggtcgcgtcatgcttcttaataatgctttacaagatgatgtcttcctggtttgtggagctactggtggtaattttttgcgtcggtggtgttgagggcctgcaaacatgcctagtggctctattatcaaggtggtttagagctgcttcagaatccttttttaaagtgccattctttggagctgtttcataccttactcttgcagtttccccattttgcattgtatttgctgttctttgggctgttcaccgtcatttcacctatgcctggattggacaagatatccttggtattgcactgataattactgttatccaaattgttagagtacctaacctcaaggtgggttcagttctcctcagctgtgccttcttttatgacatcttctgggtgtttgtctccaagagatggtttcatgagagcgtgatgatcgtggtagctcgtggtgacaagactgatgaagacggcgtccccatgttactaaaaattccacgaatgtttgatccatggggaggatacagcatcattggattcggtgacatccttctacctgggctgttagttgcatttgcattaagatatgattgggctgacaagaaaagcttgcaaactggttactttttgtggtcaatggtggcctatggttctggactccttattacatatgtcgccttgaaccttatggacggacatggccaacctgcacttctctacatagtgcccttcacacttggtgcgctgatatcacttgggtggaaaagaggagaactgtggaacctatggtccaaaggggagccagagagagtatgccctcatcacatgcatatgcagcctcagccgaagacgcccccactagtccagtagatccgtcatcttgttaattagtactgtagctatccgtcaccagctgcatccgtttgcctaagcgagcttaatggtgtaaaaaatcgtctcctgcatgttcttaattagtaagtattaatctcaatgagttggtcgtttgctgcttctctatagtgaaagatgtttttggttcgataaactagtcatgagtagaattctctgtaatttacaactacagaagagaagggaactatatatgc

SEQ ID NO: 23471 - DNA, 3600 bp, Oryza sativa
  ref <308>: DATABASE ACCESSION NUMBER: AK073580
  ref <309>: DATABASE ENTRY DATE: 2001-12-06
gtggcagtgtttgcactttgcagtgggcgaaacgcgctatatcgtggagtggactcgaagttgagcggacttgcaatcgtgcagagctgaagcggtggggaatggcggtgcagtccgcggcaatcggcaaccccgggatctccgacgactccgccgccgagcccggccgccggatgctgggagctgccgaggaagccgtaaacaggtgggtatcccgggaggcggccgccgatggcggctacggcgtctccgatttccccgcgctcgcggcggcggtcaaggatctcatctccctcggctcacacggcggcgcctacagccaacgcgctaagcttgccttggaggtaacctgtatgttcagaaaatctgtaccttcatttacgcaaggtaatctgcatactattgtgtgtacactgtacatgttttcattggggaaagttttggatttgtttgatctagcagtagaagaatggtcagtatcctattagcagaagttagaaaggttgggtataaattcaaatagtaattatgagaccagtgaagtactgtataaaatactcagatttatgactatgagactgctttggtcgaattgcagattataatctagaattgatttttaaatgtttagaattcaaatttgtagtaattttaggggttttttttcactatttccagtgcatctagaactcattgcatgttttttttaaaaaaaaaatagctaaaatatatttaagattcaaaaaaacgcttgcagcatagctttccacctttcttcaccgtgtctatttatttgggttcaaagcatttaactaataactatgccatagctataattttacgctgagtccgccactagtaaccaggatgtatattcccaactggaaatgtcgcagtgcacgtctgagatgatgctttcaatgttgaaagtttagaagtcagccgccgaatgacaagctcaaaagaaataagattcgcacttacaaagaaattagagaaaacccgaaataccattcttgtgtaaatggcaagtggtatttcggaaagctgagaacgtgtgtcgatcgtatgagagcagttattcaaaactgtgcagaaggttttatgaacagagagtggttgcagacaagagaaaagcaaatattcaaaactgtgcagaaggttttcatcaaaggagctgcttgattaacaattttagaattctacgggatcttctttgtcgttgttacacaaatttattcaaaagtgaactacatgtatttcttgctttattctctcttcgaacagtgttctatgcattctgccgatctgcaagggactatctatcctactggcgccacaatgataaaccccttgggttgaagccctccctgtttgagatctcattttcctttcttcaatccttatggatattcttatcgttggcagtataagatattacaatttgaaaacaaaccattttcttgttcctggtgacttcttgaacgaatttctggtcagttcagaaaaaagacatctgaaactttgttacgcccacggtgccaccatcttatgaatgcaagtattgcctactagtagttacatctcactggaaatactacaccaccatagaagactacactaatgcagtttagtatcaaactttaagtccagtactagtactatgtaggaagtattgaactgaccattgttttttttctgctagtactttgtaggaagtattgcactgacaattattttttctgcagtctgcaatgggacaccttgaggacgacttctgccaagttcttatttcaggcacatactttcatccccctgacaacctccaagcatcactatatgacagcattgccctgcctgtccgatcctcctcgttctcataaataaccaacttggaggctgccagcttatcctcattcacaacaagctctagtgatgatagatggacatactgtactggacacagcagagattctttctccctggagaaggtacacctgtatctcatcgaccctgaagcttcaacattgctaaaggagatcgctgagctcatgatgcttgctggacatgaatcaaacctttctcatgcctatggtgagatccgtaatagcacattgatgcagtgtctttgtctgttcggtgttcaaatcgatcttaacagctataatccaagagcttctccttctgaaagtgggttcaacatgctactagatctagatggacaaaagatggaaatatggatccaagctctcagagtcattattggcacagtacttcctgaagagcgtcaggcttgcacacagatttttgggtccgacagcaaggtggaggaggactgctttgccagagccactatgcgttttattcaacaattatttgcatttggaagcctgatagccaatgtgaaagacgaacagtatgagaaagtgcccctgctcgtacaaatgcttgaggaatttctaaagcttaaaccgagcatagaagccctcaggtatggtgatgccaaggacgcaatcagccaggaggctgacatgcttcttgaaaagctcagggaagaagcagttcgcctactattgaagttttcagaagcacagatcaaccatgagtcctatgataatgaaacgatagtgctcaacggcagcgtcctatcgtttcctcagtataccatgggtgttatcaaacttcttgctggttacagtgacacgctcaatattattttaccagtagaggtgggtggtgttggcactgtgactacaagcccctggaagagctacgttctcactctgctcactcgtctacagctaaatattgaggagaaatccaaatcttacaaagacgaatgcctgcggaatgtattcctgatgaacaatgcgatgtatgtgcttgaaaaggcacgatctccggatctgaagatattgttaggagataactgggtcactaaacagcttgtccaggtggaacagcatgcaacggcttatctccgagcttcttggactgaacctctgtttcagttgaaagacaaagggatcaactacacagagagaagtttgatattgacaaaaaaattcaagaacttcaattcaatattcggagaaataagcagggtccagacgacgtggaaagtccccaaccctcagcttcgacaacacttgcgccttgttatattacagcaggttattccagcatatcgggcattcgtgggacgatttggtatgcttttgaactcaaaattcataaaatacactcttgaggatatagagaataatgtgttggacctatttgaaggctaggggtgagaagccaacatggaaatgtctaaataatggacgtactaggacctcatgttgtcatgcagtgagttacaagtatattgatcaacggaaggtagaatagatcacattcaacacggcaatatgaaaaatacttttgagactacttaatgtaatcgtgtacatatcatgttatatatgagcctctatgactggactacaaatgtttatctatgttatttatgttcttgcccgtatgtgggttttaaacttcagtgtaacaaagatgtactaatatttacacatattgttctcaaaaaaaaatatttac

SEQ ID NO: 23472 - DNA, 1345 bp, Oryza sativa
  ref <308>: DATABASE ACCESSION NUMBER: AK099362
  ref <309>: DATABASE ENTRY DATE: 2002-08-28
gatcaatccatcctacttaagcagtagctagtaagctagctaagcacacacacacttactaattcagctaaggatttggaggatcggagatggtgatggtgaagcttaacgcggcggtggccgccgccgccgttgtgctgtctctgttggtggtggtcgccgtgcatccggcggcggccgacgccggcggcgattggtacggcaagaagagcatcgaggagacggtgaggaaggaggtggagaaggccatcaagcacaatcccggcgtgggtgccgcccttgtccgtttggtgttccatgactgctgggtcaacggttgtgatggatcggtgctcttggacaagacgccgtacagcagcagcacggagaaggcggcggcgaacaacatcggcctggacggcttcgacgtcatcgacgccatcaaatccaagctgggcgccgccgtctcctgcgcggacatcgtggtgctcgccggccgcgacgcctccgccatcctcagcggcggcaggatcacctacgacgtcggcacgggccgcaaggacggcgtcgtctcctccgccgccgccgccgacgccgtcctcccggagtccaccttcgacttcgcccagctcaaggacaacttcgccagcaaggggctcacccagggggagctcgtcatcctctccggcgcccactccatcggcgtcgcccacctctcctccttccacgaccgcctcgccgccgccaccgccacgcccatagacgccacgtacgcgtcggcgctcgccgccgacgtcgaacggcagaagggtgtccagcgcacggacaacccggcggagaagaacaacatccgcgacatgggcgcggcgttccagagcgccgccgggtacgacgccgccggcgtggacacggcggcggtgggggcgctggacaacagctactaccacaacaacctgcagaaccgggtgctgttcaagtcggactgggtgctgcgcaccgacggcgacgccgccgccgacctcgccgagtacagggacaacgccaccaagtgggacgtggacttcgccgccgccatggccaagctcagcaagctccccgccgagggcacccacttcgagatcaggaagacttgcagatgcaccaaccagaactactactagtagtagtagtaactagtcaacgatcgagtcagcggaaaaaaatacgacggtattatactagtatacgcgtagtgtacgtacattaatacgactacttgtacgtacctactgtaatatcaccttggtttaaaattattactactgcatcgttaatcttaagtctttgattaattttgtagctaatgtataataagggcttataatgc

SEQ ID NO: 23473 - DNA, 1648 bp, Oryza sativa
  ref <308>: DATABASE ACCESSION NUMBER: AK073581
  ref <309>: DATABASE ENTRY DATE: 2001-12-06
gtagagccctactccccttctctcctcttcttcctctcccgcaagcaaagcgcacgccgcctttgccttagatctcctcgactccgccgccgccgccggcgcctccccacggtccctccctcgccatggagggtaacagtaccaacctcgatgcggcgatagagtcgctcctcaacgtggagaagcagatgaggctggccggcgatgtcgccggcacgaggaaggccgccatcgacatcgtcgagctctgctacaaggccggcgcctggaagacgctcaacgatcagatcgtggtcctctccaagaggaggggccagcttaagcaggctatcactgccatggttcagaaagcaatggagtacattgacttaacgccagacatggacacacgtattgagctaatcaagacgttgagcagtgtatctgctggaaaaatatatgtggagatagagagagcaagattgatcaaaagacttgcaaaaatcaaagaggagcagggacagattgatgaggctgctgatttaatgcaagaagttgctgttgaaacatttggctccatggcaaagacagaaaagattgcattcattctagagcaggtccggctgtgcttggatcgtcaagattatgtacgcgcacagattttatccaggaaaatcagtcctagggtatttgatgcagacccgtcaaaggaaaaaaagaaaccgaaagaaggtgataatattgttcaggaagccccagcagagataccttccctcctggaactgaagcgcatctactatgaactgatgattcgctattactcgcacaacaatgattacctggaaatctgccgttgctacaagtcgatttatgaaattccatcaataaaagaggatccatcaaagtggataccggttcttagaaagatctgttggtatttggtgttggcgcctcatgatccgatgcaatcaagccttctcaatgccacactcgaagacaaaaatctctccgagataccaaatttccggttactgctgaagcaacttgtaaccatggaggtgattcagtggacaagcttgtgggaattctttaaagatgaatatgcgaatgagaagaattttctcggaggagctttgggtgacaaagctgcagaggatctgaaattgaggatcattgaacataatatcttggttgtttcgaagtactattcaaggattaccctgaagaggctcgcagatcttctttgcttgagcttgcaggaggcagagaaacacctttcggacatggtaaactcaaagtcgctgattgcgaagattgacaggccaatgggtgttgtatgcttccgcacagcacaagacagtaatggtatactcaattcctgggcggcgaacctcgagaaactcctcgatcttgttgagaagagctgtcaccaaatacacaaggagacgatgatccataaggcggtgttgaaagcttaatctgtaaaccattttgcattggctggcttgcttaggttctctgcctggccttctatggtcaaattttacaatcacaggacgtcaagcttttctcagctcaagcatcacctgtttgctttgggaactcgtgcgtgaatgatcttaaatactgtgaccacagaatgatgacatattatttgttgttggggttc

SEQ ID NO: 23474 - DNA, 1584 bp, Oryza sativa
  ref <308>: DATABASE ACCESSION NUMBER: AK073582
  ref <309>: DATABASE ENTRY DATE: 2001-12-06
gaccccactacggccgcgtcccgctcggtcgccggagacaccatggcctcgccgctcgccggcgtcgtccggctcgccgccgcctcccgcgcgctgctcctcgccctctccctcctctcccgcctcctcttccgcccctacgacacctccgcctctctccacccaccctgcctcctcccctccccctcccccaactccaccaccaccgccgccaactccatcgcctccctcgccgtgtgggacggcgtccacttcctccgcgccgccgagtgcggctacgagtacgagcagtccttcgccttcctcccgctcctcccggcctcgctcaacctcctcgcccgatccgtgctcgcgccgctggtgcccgtgctggggtacagggccgtgctcgtggtctccggctacgttctcaacaacgtcgcgttcgtcgccgccgcggcctacttctacagattgtccgtgctgatcttgaagagcccgagtgctgcttaccgagcatctgttctcttttgcttcaaccctgcttctgtgttctactcatcactgtactcagagagtctatatgctctgttttcacttgggggagtattctacgtgtttaccggtgctaataccattgcaatgataatgctcgctctctccggttcagctagatcaaatggagcacttaatgctggttatttctgttttcaggctttgctacatgcatatgatgctgctttccagaagaaacagcccatgctggcagtacaggttcttgtcactggatttttgcggtctgtttttgtatttattccgttctttgctttccaagcatacggatatctgaacatatgcctacacgggaatatggaggaactgagaccatggtgcaaatctaaagtgcctcttttgtatggtttcattcaaagtcactactggggggttggtttcttgaggtactttcaagtgaagcagcttccaaactttcttttggcttcaccagttttgagtcttgcagtttattctattgttcattacacaaaaatgcttcgccaactctttgaatcaaatagcatacatgaactgattgttgctacggtcgaggggagatcaattgaagcatacaaaagctcagatgttgacacagtattaaagagtaaagtttctactaatgtaactaacaaagcacaaggaaatgcagttgctaagaggagaaaatcagttgctaccgaaaccgactcaaatgaccaaattattgaagttaataaggatgtgtgccccatagtagttcttcctttcattttacatctggcattcatgacattcactgcattctttgtgatgcacgtccaggtctcgacacgatttttatctgctagtcctccaatttactgggcagcatcgcacattttggtttctccaagcagttctaagagatggggcaacataatatgtgcttatttcatagcttatattctccttggtagcttgcttttctccaatttctacccgttcacatgaaaatagttatgtcaattatatgatccgacgatccacgctgtaatggattggtttgcgcaatttttatttatcattgcgtgg

SEQ ID NO: 23475 - DNA, 1147 bp, Oryza sativa
  ref <308>: DATABASE ACCESSION NUMBER: AK073583
  ref <309>: DATABASE ENTRY DATE: 2001-12-06
ggcctttctctctggtagcttcgccttgctctccagcttctgcttttgctgccgcccatggccgatccggccgccgaggagaccgtccccgcgccgccgccaaccccggcggtcgaccccgccgagggtgcctcggacgcgccgcagccggtcgagctgcccgccgacaccgccgccgcctcgccggagaaggtgtcgtcgccaccaccggagccggcgccggcggtgaggagccgggggttcaggctgctcggggaggacacctccgtgcacaaggctcttgggggcggtaaaactgctgatgtactattatggaaagacaagaagacatccgctgtagtgattggtggtgcaactgtcatatggatcttgtttgaagtgcttgattaccatctcttgactctgctttcccatgtgatgattggtgccttggccatcttgttcctgtggtcaaaagctaccacatttatcaagaagagtccaccagatattcctgtagtacagatacctgaagatgtcgccgtgaacgtgtcacgagcattacgcagtgacataaacagagcacttcacctgtttcgggagatcgcgttggggcatgacctaaagaagtttctgggcgtgattgttgctctctgggttctctcagaagtaggaagctgctgcgacttcctcaccttgatatatgttgccgtcctgatgctccacacggtgccgatcttgtatgacaagtaccaggataaggtcgaccactttgctggaagggctcactctgaggcctgcaagcactatgaggtgctggatgccaaggttttgagcaagatacccaggggcccggtgaagccaaagaagaactagaataagttgcgcaaggggactcgattcggaagggtggcgtcttttgtcgggtttgcgagttctcaggtgtacccaactgcgtcgcgtcctactgacggtagcagctgaatgttcgttctgcttgatgggtggtttgctggcttcgctgctgtgtgcttcagtgatgccagttcatgttcattctatcttgaagcctgtatctaaaatatctaaacgtgactgaatgctacgtttctgctactgaagctgcctgtagatatccgtgataaaacatgataaacccttgttcatg

SEQ ID NO: 23476 - DNA, 1242 bp, Oryza sativa
  ref <308>: DATABASE ACCESSION NUMBER: AK073584
  ref <309>: DATABASE ENTRY DATE: 2001-12-06
gcccgtctcctcgtctcctcgcgtgttcgcccgccgccctgcgccgaccagcgcagccgcagcggcgccggcgtcctgctgcttccgcccgcatcctcgccggtaagaggcagaatcacttcgttaggcaaggatgagcaaaggcccagctccgttcctcaacattgggaagagagcaaaagatcttttgtacaaggactacaattttgaccaaaagttttctttaacgacaactagcaattctggtttgggtctaacagccaccggtgtgaagatagacgaactcttcatcggtgacatacagacacaacataaaagtggcaaaaccactgttgatgtcaagattgatagtgaatctagagtgtcaaccacagtcactgttgatgaagcccttactggtctgaagacttcttttagcttcagggttcctgatcaaaagtccgggaagcttgatttgcaataccttcatgaccattttgcactgaattctaccattggtttgacatcaacgcctttaattgagctggcagcaactatcggcacgaatgaacttagtgctggtgctgaggttggattcgacagcacttcagcttctgttactaagtacaactcagggatctgctataacaaacatgatttttctgctgccgtactattggctgataaaggggagactttaaaagcttcttatatccacacgttcaatgaaaccaatggagctacagtggcggctgaagtaacgcacaagttaaaaacaaaagagaactatttcaccatcgggagctctcatgctattgattcttcgacgttgctgaagacaagatttagcaatggtggcaaagttggagttctctgtcagcatgagtggaggcccaagtctactgtaagtatttctgccgagtatgatcccaaagtggtgagatcgccttcaagattcggcgtggccatagccttgaagccttgattatcacctcctgtacaagtgttagatacttcttgcccgtgtgcatcctagccatacttacgaaagctccaccattttatgcccgttttgtaagtgtcttggccgaagaaacgttgttgtcttggagttggtcttagttttgtggaaccctaccaccagccgacttcatcccgagaattgaaaatacagagagttttgtactggaaacaatagatttactgttttgctgcttcagaaactattcggtgtcgattgtacaccttgaagagccccccttg

SEQ ID NO: 23477 - DNA, 954 bp, Oryza sativa
  ref <308>: DATABASE ACCESSION NUMBER: AK073585
  ref <309>: DATABASE ENTRY DATE: 2001-12-06
ggcacgttttgctacgaccatggcgttcttcctccctctcgcgttctccctcttcctcgccgtcatctccgcctacgtcctccagctcctcgccgacgctcgccgccggctgccgccaggcccgtggccgctgccgctgatcggcaacctccaccagctcgaccacctgccgcaccgctccctcgcgcgcctcgccgcgcgccacgggccgctcatgtcgctccgcctcggcaccgtgcgcgccgtcgtcgcgtcgtcgccggagatggcgcgggaggtcctgcagcggcacaacgccgacatcgccgccaggtccttcggcgactccatgcgcgccggcggccactgcgagaactccgtggtttgcctgcccccgcgccgcaggtggcgcgccctgcggcggctcagcaccgtcgggctcttctcgccgcgccggctcgacgccatgagggctctcctggaggagaaggtggccgagcttgtccgccgcgtgtccggccacgccgcgcgcggcgaggccgtggacgtgggccacgccgcgcacgtcgccgcgctgggcgtcctgtcgcgcaccatgttctccgtcgacctcgaccccgaggcggcgcgcgaggtgagcgacatcgtggacgaggcgtcggtgctgggcaccgggccgaacgtctccgacttcttcccggcgatcgcgccggccgacctccagggagttcgccggaggatggcgaggctggtgaagaggatgtacgccatcattgacgagcagatcgagcggaggatgcatggccgcaccgccggcgagccacgcaagaacgacctgctcgacgtgatgctggaggagggggagagtaaagaagatagcaacgaaattaaccgtgatgccatccgtggactttttacagtgagtacttgtacaacttgcggacggatattaatttgtgaataaaacaaactttt

SEQ ID NO: 23478 - DNA, 1120 bp, Oryza sativa
  ref <308>: DATABASE ACCESSION NUMBER: AK073586
  ref <309>: DATABASE ENTRY DATE: 2001-12-06
ggcgtcttccgcttccgaccgcgacccactcccaccattaccgtcggattcggagattgctccgccactccggcgccccacacatcgccggcgaaaatgctaatatctcctatgctcgccgcgccgccccctcctgcagccgctgcaagcccgcgctgccgcggcttcctcccggcagctgcggcgacggggagtcgacgccaccggggagggtgccgcttgcttcgccgctccgcacctcccagggtcggcgccgtcacgagcaccgtacgaacgcggcgtgaagagggccgcctcgaccgtgacgagctccggaggctgtgccaggagcctaacccggaggcagccgttaacctgctcgacgaaatgctcgtgcgaggcggcgctggcgcattggccgacctcgcgccggaggagcaagccgcggttctccaggcctgcggagaggcgcggtcgctggcgtcgctcaggcgagcgcaccgattgctgtccaagtccctgcccgggatcgccacgcccatcctgcacatgatctccacgctgtactgcaagctcggcgcccgcggcgacgcgcggcgagcactcgagggagcgtcgaggccgcgggggaaggatcatgagcaggagcaggagcacggcgacgaggcgaagaggcgggaggcgtacgagaaggtgcgggagctgcacgaggagatacgcgcggcggggtacgtgccggacacccgctacgtgctgcacgacatcgacgaggacgccaaggcccgcgcgctcatgtaccacagcgagcgcctcgccatcgcgttcgggctggtcagcacgccaccgggcaccccgctccgcgtcatcaagaacctccgcatctgcggtgactgccacaatgccgtcaagctcatcgccaaggtcaccggccgcgagattgtcgtcagggacaacaagcgcttccaccatttcaaggacggcgcctgctcctgcggcgattactggtgaggtgagccatctctccaccactactgtcattgacacccattgttatagttgaattccttcactacggttgtacattgttactgctactggatcatgtcagtgatgaagaaatgatgattcactttgcttagcc

SEQ ID NO: 23479 - DNA, 1659 bp, Oryza sativa
  ref <308>: DATABASE ACCESSION NUMBER: AK073587
  ref <309>: DATABASE ENTRY DATE: 2001-12-06
ggtacaaactcaccaattcgaccacagtcaccacagatcttcttccttcccgagacgccaggaaacgccgggagaaagcatgggttctctgggagcagcaggtaagccgcacgccgtgtgcatgccgtacccggcgcaggggcacatcaccccgatgctgaacgtggcgaagctgctccacgcccgcggcttcgacgtcacgttcgtgaacaccgagtacaaccacgcccgcctcgtccgcacccgcggcgaggccgcggtggcgggcgcgccgggcttccggttcgccaccatccccgacggcctgccgccgtcggacgacgacgacgtcacgcaggacatcccgtcgctgtgccgctccaccaaggagacctgccttgcccccttccgccgcctcctcgcccagctgaatgaccccgccacgggccacccgcccgtcacctgcgtcgtctccgacgtcgtcatgggtttctccatggctgccgccaaggagctcggcctcccctacgtccagctctggacagccagctccatcagctatctcggataccgtcactaccgcctcctcatggaacgtggccttgccccactcaaagatgtcgatcagctgacgaatggataccttgacacgccggtggaagacgtgccggggctgaggaacatgaggatcaaggacttcccgagcttcatacacacgacgaacccggaggagtacatggtaggctacgtcatcgaggagacggagcgctgcaaggatgcctcggccatcatcgtcaactccttcggcgacctcgagggtgaggcggtggcggccatggaggcgctcggcttgcccaaggtgtacacgctcgggccgctgccgctggtggcgcgcaaggacccgccctcgccgcggcgctcgtccatcaggctcagcctgtggaaggagcaggaggagtgccttcagtggctcgacggcaaggaggctggctccgtcgtgtacgtcaacttcggcagcatcaccgtcatgaccaacgagcagctggtggagttcgcgtgggggctggccaacagcggcagggagttcctgtggatcgtccggcgcgacctcgtcaagggcgacacggccgtgctgccgccggagttcctggccgagacggcggagcgcggcctcatggcgtcctggtgcccgcagcaggacgtgctgaaccaccccgccgtgggcgcgttcctgacgcacagcggctggaactcgacgctggagagcttggccgccggcgtgcccgtcatcagctggccattcttcgccgaccagcagacgaactgccggtaccagtgcaacgagtggggcgtcggcatggagatcgacagcaacgtcaagcgcggcgccgtcgcgtgcctcatcgctgagctcatggaaggtcagaaggggaaggagatgaggaggaaggcggaggagtggagggagaaggcgatcagggcggctaagcccggcggctcgtctcaccgcaacttcgaagagctggtccgccacgtgctcctggccaaagagtcgtagctcctcgcgtatgatttcctttgcgctagtgtcgttgtcatgagtgataagccatgaggtgatcagtgttgtattgtgtatttgtggctactggcctactgcctatatatactggatggtgc

SEQ ID NO: 23480 - DNA, 892 bp, Oryza sativa
  ref <308>: DATABASE ACCESSION NUMBER: AK073588
  ref <309>: DATABASE ENTRY DATE: 2001-12-06
gccccattttcctccctccacacaggcgttcgccaagcaaaaacttcgtacaccacgcattgccgccaccgccgcgctcgccaccaccaccgccgccatgagaacagccgcggtgcttctcatggcgctcgcgctcaccctcgccgcggccgggaccgggaccggggccgagctcgagacggcggccattagaaggaggcagagcaggttcctggcgagcgcgaagaactcgccgccgctgtcgtactacgactgcaagaggaagccgccgtcggtgtgcctggagccggggagccccggggcgacgtgctgcaagggcgcctgcgtcgacaccggctccagcttcgcgcactgcggcagctgcaaccacgtctgcaagtacggcgagacctgctgcggcggccactgcgtcgacctcctcagcgaccgcaagaactgcggcgactgcttcgtccgctgccccagcaagaagtgcagcttcggcctgtgcgactacgccggctaaccggccggcgaccggcgacgacggcggcggcggcggcggcggcgtgtgcattcatgtacgtggcgtgcatgcgatcatcgaggcaggaaatgcaatacaaattcgttcctacacatccatcagagaaataaaaaaaatggcagtacgtatatacgacgtgagtgcatacctattatatatatactccaaattgttttacaaaattgcaattgttgagctcctgaaacaagtatacatatacgaaaaaaaaatgataaaagttatacaaatttaaggatctacggtgcgtctgttcgtctcattatttatgtgtttcttattattgttggactacatatatataagtggtcttatggtatcaataaatcgaaataatgtgttgtaact

SEQ ID NO: 23481 - DNA, 554 bp, Oryza sativa
  ref <308>: DATABASE ACCESSION NUMBER: AK099363
  ref <309>: DATABASE ENTRY DATE: 2002-08-28
gagttatccatccatccatccatccatccacatagcaacgacctctcacaattcacgaatcaccactgcacactacactagcggcagcaaggatgaagcttattggcagcggcagcggcagcggcgggcagaggagagggatcgcgagggcactcaaggagcacaaggcgaggctctacatcatccgccgatgcgtcgtcatgctcctccgctgctgatgatcgagctgaggatggcgtgcacacgccttaatttcttctcggtggaatatctttcgcagtttttctctcaccaattcaccatggatcggtgggggcgaatgtttgtcccttgtttgggtagatctgtttggatctgtctctcttaaatttgtacatactgatgagctagtgtagaccatatcaatataggatgcagatggaagtagtattagttagtatgagaggtaaattagttagttggggctgaagaattgggggttgtcctctacccaggaccaattttgccttgtatgatgatcagaagtgggaatgcaagagaaatctacatgattt

SEQ ID NO: 23482 - DNA, 1111 bp, Oryza sativa
  ref <308>: DATABASE ACCESSION NUMBER: AK073589
  ref <309>: DATABASE ENTRY DATE: 2001-12-06
gacgggaaggtttcgtcctcgtttcgtttcttgcagcaggaagccaaagtgtatttcccgagctttgatgtgagctagctgattttgctagagctacaacatggccggtagtagcgagcagcagctggtcgccaacgcggcggcgacgacggtggccgggaacgggagcaggttcgcggtgacgtgtggcttgctcaggcagtacatgaaggagcacagtggaagcaacggcggcggtggcttcttgccggcggtgacggccatgagcctcatgaccggcggcgctgatgcggaggaggaggcgccggaggtgaggaagaccatggagctcttccctcagcaggctgggacgctgaaagacacgcaagaaaggaaggagatcaccgagaaggcgcagctgaccatcttctacggcgggagcgtggtggtgttcgacgatttccccgccgagaaggccggcgagctgatgaaactcgccggctcccgcgacagcacggcggcggcggccgtctcagacgccggcgccgcagcggggcagccttgcctaccagacatgcccatcgcgaggaaggtgtcgctgcagaggttcctggagaagaggaagaacaggatcgtcgtggcggagccactgccggagtcggagaagaaggaggcggagtcgagcaagcgtgccaagaaagacgatggcggcgcgtcgtggctccaggtgaaccccactctcagcctgtgagccgaagaaactgaagatagctggatcaaacaaggaaaaattaattactactactagtagtactgtattgatttaccatttgatttccacgtgtctgtggaaagtgtggaaccgtgtattattgatcgtttttccccatttcttactattttgcaacagttgttggtttcttccgggggaattagtagctaggtagcagctatgattggttaaattaatctgtcagcttatctgtttgtttgagaattctttgattatttgaagaattctttcatgcatgctgatcttatatgtaaggatccatgcacacggattgatgcctgtcggacctatggcttgtaaatccaaataaaatggtcaacaaatggtattatcctcttc

SEQ ID NO: 23483 - DNA, 2669 bp, Oryza sativa
  ref <308>: DATABASE ACCESSION NUMBER: AK073590
  ref <309>: DATABASE ENTRY DATE: 2001-12-06
gatccaacctttacgaactactactcctttccaatttatcgcccccaaaccggcagacggatccagcggtggcgtccgcaggaggaggaggcagtgacggcggcggcggcggcgactgtgctcgcggggggctgcagtggcggcgggaaggaggtcgcgacggtggtggccctcatgttccctttccggttggcgaatgcacgtcatgcaatgccatgccgccgccgccgccgccgccgccacggttcccgcctactgtgcccttatccgccctctggcctccgccggccgcgtcgatgccgtcgacgccgccgtcgcctccgcgcgctctcgcctctcccccgccaccatccacccgctctacgtcgcctccattcgcgcctacgcacgcgccggccgcctccgcgacgccgtggatgccttcgagcgcatggacctcttcgcctgcccacccgccgcccccgcctacaacgccatcatggacgccctcgtcgacgccgcctaccacgaccaggcccacaaggtgtatgtcaggatgcttgccgccggcgtttcccccgacctccacacacacaccatccgcctcaggtctttctgcctcaccgcccgcccacacatcgctctccgcctccttcgagccttgccacaccgcggagcggtcgcctactgcaccgtcgtctgcggcctctatgcgcacggccacacccacgacgcgcgccaactgttcgatcaaatgctccacacccatgtcttccccaacctcgccgctttcaacaaggttttacacgctctttgcaagagaggggatgtcttggaggctggcctacttcttggaaaggtcatccagcggggcatgtctattaacctcttcacctacaatatatggatccggggactctgtgaagctggcaggttgcccgaggctgttcgacttgtggatggcatgcgtgcatacgctgttcctgacgtcgtcacttacaatacgctcatccgtggactctgtaagaagtcgatgccccaggaagccatgcactatcttcgcaggatgatgaatcagggctgcttgcccgatgatttcacctacaacaccatcatcgatggctactgcaagataagtatggtgcaagaagctactgagctcttgaaggatgctgtctttaaaggttttgtgccagaccaggtcacgtattgctcattgatcaacggcctatgtgctgagggtgacgttgagagggcattggagctgtttaatgaggcccaggcaaagggaatcaagcctgatattgtcgtttacaattctcttgtcaaggggctctgtcttcaggggctcatcttgcatgcgctgcaggtcatgaatgagatggctgaggaaggttgccatcctgacattcaaacatacaatattgtcatcaatggactatgcaaaatggggaatatttcggacgccacagttgtcatgaacgatgccatcatgaaaggctaccttccagatgtgtttaccttcaacacattgattgatgggtactgcaagaggttgaagctggacagtgctcttcagcttgttgaacgaatgtgggaatatggcatcgctccagatactatcacatacaattcagtcctaaatggcctctgcaaagctgggaaggtcaatgaagtcaatgaaacattccaagagatgatccttaaaggttgtcatccaaaccctatcacatacaacatactgatagagaatttctgcaggtctaataaaatggaagaagcttcgaaggtgatagtgaagatgagtcaagaaggattgcatcctgatgcagttagtttcaacacactgatttatgggttctgtaggaatggtgatcttgagggagcatacctattgtttcagaaattggaggagaaagggtactctgcaacagccgatacttttaataccctgattggtgcgttttctgggaaactgaatatgcatatggcagaaaagatttttgatgagatgctcagcaagggccatagagctgattcatatacttatcgtgttctaattgatggatcctgcaagactgcaaatattgaccgtgcatacatgcatctagtagaaatgataaagaagggttttattccttcgatgtcaacatttggtcgtgtaataaactcactaacagtgaaccatcgtgtttttcaagctgttggaattattcacatcatggtgaaaatcggagtagttcctgaggttgttgataccatcttgaatgctgataagaaggagatagctgcaccaaagatacttgttgaggacttgatgaagaagggtcacattagttaccctacttatgaagttctgcatgaaggagttagagataacaaattaactagaaaacaccgaatgttgttgctcaacaacctcagtcattcataatcattagagacagcatggctttgttgtgtcaaccaacccacaagtgtttatgtttctagttctccaggatcttgtatgcagtcaaactttgttacttcaggtgcaatctaccatatattgcttagaatatggaaaacagagagcatctgatccgaaatgcaggaaaacgacagaaggtctgtggctattctttgtacttcatattctaaggacactaggctagagtcttctctacatttaatttcatacttcgcgt

SEQ ID NO: 23484 - DNA, 1520 bp, Oryza sativa
  ref <308>: DATABASE ACCESSION NUMBER: AK073591
  ref <309>: DATABASE ENTRY DATE: 2001-12-06
gacccacaaattaaacatactcggccatgtcgtccagctacaagatcgcgctcgtgctctcgctgctcgcggcgccgctgctgtgcgcgctcgccgccggcgatggccagcaccggccaccttccaagcccatactgacccgcctcgccaaggacccctcgacgtcgctctacaccgcctccgtcaagaacggcggcgggcagctcgtcctcgacctcgccggcccgctcgtctggtccacgtgcccggggaagcaccggacgatcccgtgcggcgccggcgtgtgcgccgtcgccaaccggaaccaccgccccaactgcccgtacaccgccgccggcagcaacggcggcgacggcgggcgctgcgcgtgttccgccaccgcgtacaacccggcgagtggccagtgcgggtacggcgaccttaccacggtgcagctgtcggcgaacgccaccgacggcaagaacccgctgttccaggtgtggctctccgccgtcgcgtcgtgcgcgccgcagccgctgctgggctcgctccccgccggcgccgccggcgtcgctggcctctcccgggcgccattgtcgctgccgcttcaggtcgccgggcagctgaaggtggagaagaagttcgcactgtgcctccccaccgccggtgatgtcggcgcggccatcttcggcggcggcccgttctagctccaagccgcgccgccgcagcaggtcagcgaccgtctcaggtacaccccattgctcaagaaccccaagaacaccgcctactacatcggcgtcatcggcgtcgccgtgaacagcgtccaagtccccctccccccgggcgccctgtcgctcagcgctcgccaaggcacaggcggcgtcgcggtgagcacggcgacgccgtacaccgcgctgcgctccgacatctaccggccggtgcgcgacgcgttcgcggcggccacggccgggctcgcgcgcgcaccggctgcggggccgttcgacctgtgctaccagaagtcggcgctgccgccgacgcgcatcggcccgtacacggcgagcgtcgacctgatgctggccggcggccagaactggacgatcgtcggcgccagcgccgtggtggaggtgagccaggaggcggcgtgcttcgcgttcgtcgacatgggcgccgcggccgcgccggcggtgatcatcggcgggcatcagatggaggacaacctggtggtgttcgacctggagaagtggcagttcgggttcagcggcttgctactcggcaccatgaccaggtgcggcaacttcgacttcagcatcggcagccagtgagtgaatcgtacgagcagagcgtgaatgcacgcacaaaataatcagacacgacacgttcagggaatatgtgttgttgccatttcgacacgtgtcagtcaattagttgagatgatgataaatctcactgtctttttttctgtagtatcgtcggccatccgtctgtcctatttcaaatcgatgaataaaagtgtcctcaatttgtcagcttggtttgaattc

SEQ ID NO: 23485 - DNA, 2865 bp, Oryza sativa
  ref <308>: DATABASE ACCESSION NUMBER: AK073592
  ref <309>: DATABASE ENTRY DATE: 2001-12-06
ggcccctccctgacatctccttcctctcccccttcgcctgcgcctctgctcctcgtcaggttgccaagatggtgaggtttacggcggaggagctccgcgcgagcatggataagaaggacaacatccggaacatgtctgtgatcgcgcacgttgatcatgggaagtcgacgctcactgactcgctggtggcggcggccggcatcatcgcgcaggacgtggccggcgacgtgcggatgacggacacgcgcgcggacgaggccgagcgcggcatcaccatcaagtcgacggggatatccctctactacgagatgacggacgcggcgctcaggagcttcgagggcaagcgcgacggcaactcgtacctcatcaacctcatcgactcgcccgggcacatcgacttctcgtccgaggtgacggccgcgctccgcatcaccgacggcgccctcgtcgtcgtcgactgcatcgagggcgtctgcgtccagaccgagaccgtgctccgccagtcgctcgccgagcggatcaagcccgtcctcaccgtcaacaagatggaccgctgcttccttgagctgcagcaatccggtgaggaggcgtaccaggcgttctcccgcgtgatcgagagcgtgaacgtcaccatggcgccctacgaggacaagaatctcggcgactgcatggtggctccggagaagggcacggtggcgttttcggccggcctgcacggctgggccttcaccctgtccaacttcgccaagatgtacaaggccaagttcaaggtggacgaggccaagatgatggagcggctttggggcgagaactacttcgaccataccaccaagaagtggacgacgaccgcaccatcgacgtcgtccaagacgtgccagcgcgggttcgtgcagttctgctacgagccgatccgccggatcatctcggcgtgcatgaacgacgacaaggagaatctgtgggacatgctgacgaagctcaagatcacgctcaaggctgaggagaaggagctgaccggcaaaaagctgatgaagcgcgtcatgcaggcgtggctcccggccagcgacgcgctcctcgagatgatcgtcttccacctgccttccccagccaaggcgcagcagtaccgcgtcgacaccctctacgacgggcccctcgacgacccctacgccaccgccattcgcaactgcgaccccaagggacccctcatggtgtacgtgtccaagatgatcccggcgagcgacaaggggaggttcttcgccttcggccgcgtcttctccggcacagtggccaccggcaacaaggtgcggatcatgggccccaacttcgtgcccggcgagaagaaggacctgtacgtcaagacggtgcagcgcacggtgatctggatgggcaagaagcaggagtccgtggacgacgtgccttgcggcaacaccgtcgccatggtcggcctcgaccagttcatcaccaagaacgccacgctcaccgacgagaaggcggtggacgcgcaccccatcaaggccatgaagttctccgtgtcgccggtcgtgcgcaagtcggtggcctgcaagaacgcctccgagctgcccaagctggtggaagggttgaagcgcctcgccaagtcggaccccctggtggtgtgcaccattgaggagtccggcgagcacgtcatcgccggcgtggggcagctccacctggagatttgcatcaaggatctccaagaggacttcatgggcggcgccgagatcatcgttggcccgccgatcatcacctaccgtgagaccgtcaccaaaaactcgtgtcgcaccgtcatgagcaaatcgccgaacaagcacaacaggctgtacatggaggcccggccgctggacaaggaggacctgcagcaggatgaaccgtcgctgtgcaaggcgattgacgacgagcgcatcggccccaaggacgacatcaaggagcgcggcaagatcctctcggaggagttcgggtgggacaaggatctggccaagaagatctgggccttcggcccggagaccaagggccccaacctgctcgtcgacatgtgcaagggcgtccagtacctgagcgagatcaaggactcggtggtcgccggcttccagtgggcgtccaaggaaggcgcgctcgcggaggagaacatgcgcggcgtctgcttcgagctctgcgacgtcacgctgcactcggactccatccaccgcggcggcggccagctcatccctaccgcgcgccgcgccatgtacgccgcgcagctcacggcttcgccgcgcctgatggagcccatgtaccaggtggacatccaggttcccaagacggcggtgggcaacgtctacggcgtgctcaacagcaggaacggcgagctggtggaagagagcgagaggactggcacgcccttgtccaacctcaggttctacctccccgtcgccaagtcgttcgacttcaccgagaagctgcgcgccgagacgtccggccaggccttcccgcagtgcatcttccaccactggcagaccatgcggtctgatccgttccaggagggctccgaagctgccaaggtgatcaccgacatcaggaagaggaagggtctcaaggacatcatcaccccgctctcagactacgaggacaagctttgagctgcctctctacatacgtatcctagttttgagtttttgagttttgagtttggtctaattttgggtttttgagtatggtcttggtctttcaaattaagtgtgtctcctgtctcttcctctgctaactgtttcgagtctgatattggttagccagcctttgtgccagtcagtttaggatgaaatggtgagttaagtagttgcaagttatgtttacctttcagcaaattttgttctg

SEQ ID NO: 23486 - DNA, 1246 bp, Oryza sativa
  ref <308>: DATABASE ACCESSION NUMBER: AK073593
  ref <309>: DATABASE ENTRY DATE: 2001-12-06
gaccagaacacgcttctctttcgagccacactcctaagaagactccaaggatagctccaatggaggtgaagtgcttgctgctcctggctctcttccttctgctaggaacacatggtggtgaagcgcagccgctcgtgccggccgtcatgacgttcggtgactcatcggtggacgtaggtaacaatgactacctcaaaaccatcatcaaggcaaacttccctccctacggaagggacttcaagaaccaggtacccacggggaggttctgcaacggcaagctggctactgatatcactgccgagacgttggggtttgaaagctacgcacctgcgtatctcagcccagatgcgtcagggaagaaccttctgattggagccaactttgcatctgcaggatctggctactatgaccacactgcacttctgtatcatgctattcctttgtcccaacaattggagtacttcaaggagtaccaatctaagctggcagccgtggccggaagcagccaggcccagtcaatcatcaacggctcattgtacatcatcagcgccggtgccagcgatttcgtccagaattactacatcaatcctttcctctacaagacccagaccgccgaccagttctccgaccgcctcgtcgacatcttcaaaaacaccgtggcacaactgtacagcatgggagcacggcgcatcggcgtgacgtcgctgccgccgttgggctgcctaccggcggcgatcacgctgttcggctacggcagcagcgggtgcgtctcgaggctcaacagcgacgccagaacttcaacggcaagatgaacgtcaccgtcgactcgctttcgaagacctactccgacctcaagatcgccgtgttcgacatctacacgcccctctacgacctcgtcacctctcctcaatcccaaggattcacggaggcgaggaggggatgctgcgggacagggacggtggagacgacggtgcttctgtgcaaccccaagtcgatcggcacctgcccgaacgcgacgacgtacgtgttctgggacgccgtccacccgtcggaggcggcgaaccaggtgctcgccgactccctcctcgccgagggcatcaacctggtcacataaattccggtggctttcagccagcagagggctgcattgtagatcgatgacaagaacaacacaggcttcaaactcgacctgtttgattataaatgagaataatgataataatgtttgctcggtggtttggcagcg

SEQ ID NO: 23487 - DNA, 1615 bp, Oryza sativa
  ref <308>: DATABASE ACCESSION NUMBER: AK073594
  ref <309>: DATABASE ENTRY DATE: 2001-12-06
ggctcgaactgtccagtccggcgtccgccgccgatggcccctcccgccgccggcgcggcgatcccccgcgacgccctcctccgcatcgcggcgccgctccgggactccctcgccgcggcgccctacgcgcctccggagggctcctccacctccaccaagtccctcctctcttccctcctcccctcgtcccatccccaggctccggctggcggcggcggggcccgcagcaaggaggccgcgggcctcctcctcttctgcgccgccgcgcgcgcggcctccccggagtaccccgcgctgcactgggttcccgtggcgctctctgacgctgccgccgccgcggtggaggagatggcggcggcgggcggctggggcgatgtaggggagatggtggtggggatgatgccggaggtggtgccgccgctgaaggatgttgtgaaggccacgtgcgtggacacggaggatgaggaaattggcaaggagaagccgcccaaagagcacgccgttgtcgccgctcaccagttcaggtggctggtgtctcaggttacttatcctaagcttggcgacttgtgttggctagtgattccgtgtgctttgactgccttggaccattggtcaccggaagttaaggaacagggaatggttagcttcatgcacatagcaaagagtgtgaaagcaacagaattaaatttgtatgaagatgcaatacttgacgcatgctgccataacattcccgccgatgatgagttgtggtatcgcgctgttgaggtatgatcgtatgctagctgagatgttgggccacctggagcggcaaccattaaataaaaaacgccgtgttgcatggcttacccttattgggccagtttttgaagctatgggcctcttcctattagcacattttcgtctccttttctctctcttctttcaatggatgcatgccgatgatgacaagacagttcttctggtaaggaatttttacatatcgtagataaaataaacttatatgaccattaggtaacatcagtgatacattcttttccttcctttttctgtaagataaccataccgatcaagcttatttatgtgttaaccatttgcaggtcttagagcgaatccatgaagttattaagctcacatggatcaggaaatcaccttatacttcaaggtattaggaaatatgagttatgagttacttcttttaatgccctcttgctctgcttgttataatatgatgatcaaaagcttatgttattagctaatgaaggtgagttgcaactcatgctgtgcatatttaggctggtggatgagcttgtccttttatacaaagagtcagccacaaggagcagccgtgaggtcgtgtggaatcacatcctggaaatgctcgctacactccagaaatgcaaggggcagcaatttgaggaagcttggaagaagcacgaagttgacccagacttgacgatgttgctatcatgtttcaatgaattatgtaccaaaaatcattcttcctgatttccagtgtgactggtattcttgttgtaaatactagctgttagatgaaattgagccttgaaaatcttggccgttggtcccttctctttatgagatttctttaccatgg

SEQ ID NO: 23488 - DNA, 1154 bp, Oryza sativa
  ref <308>: DATABASE ACCESSION NUMBER: AK073595
  ref <309>: DATABASE ENTRY DATE: 2001-12-06
ggaactgaattagtgtgtgcgtgttgtatcatcggcccgatcgagaagatgtcgaagctccaactccggccgcctctgttggctactctgcattgcagcttgctcgtgctcctcatcatcaatggcgccgccgctgccggcaagaccggcgagctcaccgtcatctggggccggaacaaggacgagggctcattgcgttcgacctgcgacaccggcctctacaccaccgtcgtcatctccttcctcaccgtcttcggccacggccgctaccggaccgacctcgccggccacccgctcgccggcgtcggcgccgacgtcaagcactgccaaaaggccaagaacgtcaccgtcctcctctccatcggcggcgccggcgaccagtactcgctgcccaccgccaagtcggcgcaggacgtggccgaacacctgtggcacgcctacctcggcggcggccgcagggggcgtgtcccgcccgttcggcgacgccgtgctcgacggcgtcgacgtctacgtcgaccgcggccggtggggccactacgacgagctcgccaggcgcctgaggagcttcggtcgcgagaagccggcagtgcgcctgacggcgtcgccggcgtgctcgctggcgctgttcgacgacgaggtggagacgatgaagacgctgtcgctgttcgagcggctgcacgtgcggttctacaacgagagctcgtgcgactacaactacttcgagacgcggccgttctggggcgcgtggaggacgtggacgtcgaggttcccggcggcgcgggtgcaggtggggtggccggcgatggaggagatgagcgggttcgtggacccgcagacgctgcgggagagcgtgctatcgtcggtgcaggacgatgccaactacggcggcgtcatgctctgggatcgctactacgacaagatcaccggattcggccgtgccatcaaagacattgtctaattgcaatgttactccagtgtttatactacatggttcactgtgttgtttaccaacctgcattgcgtcatctgttactatctgtacccgtctactggcatatgcatgttcgtatgggtcaggcttgaaagtagtatgattatgttaatttagttttgaaatataaaagaatccagcatgtttcactgtgctgtttacc

SEQ ID NO: 23489 - DNA, 1603 bp, Oryza sativa
  ref <308>: DATABASE ACCESSION NUMBER: AK073596
  ref <309>: DATABASE ENTRY DATE: 2001-12-06
ggggaaacggtggtggtgggaacaagaaggggaggagagactcgccgtcgccgccgctcgagacccccccgcgcggcgagttgccgtcgacgtcgtcgtcctcctcctcgcgcgccaccaagcgtcaccgcgtggcgggcatggcggaccgctacttccccaacgacctcccggacttcgtcgccgaggcccccgacggcggccgcggcttgctgtcgctcccttactccagcctctccgaaaggctcctccgcgccgcgctccggatcaaggacaaggtcatggaggagacgtggaccagggcgcggcgacaggtgacggactacacgctctacacgggcgcgctcggcacggcgctcctgctgttcaagtccttccaggtcaccggcaaccgcgccgacctcgccctcgccggcgacatcgtcaaggagtgcgacgccgcgtcgcgtggcctgccacgcaggttcttgacattcatctgtgggagggctggggtttgcgctcttggtgcagtgattgcaaaacattgcaatgaccagctgctactcacacactacctgagctcatttgatgagataatagtcactgagaaagttcccaatgagttgttatatggaagagcagggtatttgtgggcttgcttgttcttgaatacgcatctcggcgagaagacaattccccatgagcacattacttctgtggcaaaggacatcatcgatgagggaagaaagctggctaaaaaggggaactgccccctgatgtatgaatggcatggaaagaagtactggggtgctgctcatgggcttgctggcattatgcatgtcctcatgcacactgaactcaagctagatgagaaggatgatgttaagaacactctgctatacatgatcaggaacaggtatcctactggcaactatccatcgagtgaaggcagtgaatctgaccgcttggtgcattggtgccatggtgcccctggtgttgctcttacactcgctaaagcttatcaggtcttccatgatgaacatttcaagcagacggctgcagaggctgcagaagttgtctggaaccggggacttctcaagagagttggaatatgccatggtgtaagtgggaacgcctatgtatttctctcactctaccggctaactggcaatgttgagtacctgtaccgggctaaggcttttgcttgctttctgcttgagaaagctgatcagttgattgctgatggggccatgcatgggggtgatcacccattttcattgtttgaagggagggctgggatggcttacctccttctagacatggttagcccatcagaatcaaagttcccggcctatgagctttgaagggcatcataaatatatgtatcctgttaggatcaaatgctcagtgatccatccatccaaagtagctgtattgtgttttcttgcgtacccagtaatgtgtgcattgtaatttgttgtctttgtaaagttcagtatccagatggtgcaagcttgaacctttgtaaaatacatgtttgagggagttccttgaaatatgataatatttatgttggttgttgcctctatttgtttactgaataaaatatagttttgcctcc

SEQ ID NO: 23490 - DNA, 1406 bp, Oryza sativa
  ref <308>: DATABASE ACCESSION NUMBER: AK073597
  ref <309>: DATABASE ENTRY DATE: 2001-12-06
gtctggtggaaacctagccaagatccccatcgtcgccgccgccgccgtcgccgtcgccatcgccgccggcggccgccattggcagcagggaagaggatgatccggcgattcttgtacattgctgaccactgctttacaggcccctccctctcccacaggctacggcgagtcaacccatcacatctcttctaccccgatggccatccactagcaacgaaaccggagcgagcgacggtggaggtggaggacgctcgcctgcctccacccgccatggccttctgctccccgggcaccacggcgacggccatgggcatggagttcatgcgcaggaacgacggcagcatcgtcggcatcgaccacaccggccgcgccgtcctctacgaccccgccgcgcgcgccgtccgcacgctgcccgccctcgcggcgcccaagctcatgcccgtctcggccgccgtcggcgacgacctgtacgtcatggagacgacgcccctccccgacggcgccggctgcttcgaggcgctcgtacgcctcgaggataatcccgccgagtccgactccgacaagtgggaggtaggggacaactacctctggcaacccctgccgccgccgccgccgccgccgtccccgtgcgtgaacgcctacgccgccggcttcgaaggctcctcccgcggcatgatctgcgggtacgcggtggccggcgacggcgacggcggcacgcgcatcctggtatccaccacgaccaacggcacctactccttcgacaccgcgagctccgcgtggagcaaggccggcgactgggagctgcccttccgcggccaagccgagcacgtccccgagcacggcctctggttcggcatctccgacatggatcacaccattctcggcgcgtggaatctgtcctccacgatccagcagccgcagccgccggtggcgagcctccagttgaaggggttctccgtggagagccacagcgacgaccggaggagggagttggaggtgtacacatcgcaagtcgtccacctgggcggcggcaagctgtgcgtcgccaagatgttcagtgttaatcgcagagaaaggggtaaaataaatttcgctatgctcactggcgtggaggtggtacgctgccgtggcggaaagctccgcatcgtcaagcacaagtcgtgccgttataacttcggcgaagactacacccctgattatctactctaactagtagagtactcctacttagtactgtcctaataaaaacccttatttgattaatcctactcttatgcaggatacatattcatcggttagttttaaaactctgcattgcatagctctgtaaactctgttagtagagatgaatgatttcaaggaagcaattctattgttaaggacctgaaaaaaaaacatttataacc

SEQ ID NO: 23491 - DNA, 3170 bp, Oryza sativa
  ref <308>: DATABASE ACCESSION NUMBER: AK073598
  ref <309>: DATABASE ENTRY DATE: 2001-12-06
gaaaaaccctcccccgaattcgaaatcgaatcgcctcccacatctctctctctcgcggaagcttctggaaggttcggaggcggcggcggcggaggcggcggggacgacgatggagccgcagctgacgccgggggcggtgcaggcgatagcggagcacccggacgggacggggacgatccagccggtgctgcaggtggtggacgtgcggcccgtcaccgccaagaacgcgccgcccacgcccaagcccgccgagcgcttccggatgatgctctccgacggcgtcaacacgcagcagtccatgctcgccaccgccctcaaccccctcgtcaaggacgccacgctccgccccggcaccgtcgtccagctcaccgacttcatgtgcaacaccatccagggtaaaaggattattattgttgtgaaacttgatgttctgcaaaatgactgcattgtaattgggaaccctaaacactatgaaccaaagagtctaactaaggagcaagaccctaacttacaggccagtgtggctcaaaccaataatggaacctattctggtggcgcaagcatgctgggcccctccgttgcgccaagggcagagcaggctgctagcaacagttcatatggtggaccttataatagtgctcaaggaatgttgggttcttctattggcaggacagttgaacctggtcctgcaaatgtttctgctgttggctcttacggtgcaatatcagcacagaacacaacgaatgccaacatgatgcagcctacatctcagctgaacataatgaatgccaacacgatgcagcctacatctcagctgaacacaatgaatgccaacacgatgcagcctacatctcagctgtcctcgttgaaccctaatcaaaaccaaaggtttgcagctcctgcttcgggtggagtctttggccctcctggcaatgcttatgggcagccttcacgtccttcatatcagcagccacctccagtgtatatgaatagagggcctgcctctaggaatgactctgcaactcgtatcatcccaattaccgcgttgaatccataccagcctaagtggacaatcaaggcaagggtgacagcaaagtctgatatcaggcattggagcaatgccaggagttcaggaacagttttctcgtttgatcttcttgatgcacaaggtggagaaattcgtgcacaatgctggaaagaatcggctgataagttttttggccaaattgaggttggtagggtgtatttgatatctagaggatcactgaagcccgcccagaagaagtataacactttgaaccatgattatgaaataactctggatatcgggttatcaactgtcgaggtttgctctgatgatgataacagcatccccaggctgcagtacaatttccggcagatcagcgaactagagaatatggctaacgagaccattgttgatttacttggtgttgttacatcagttagcccttctgcaacaataatgaggaagatcggcactgaaacccggaaaaggtctattcaactgaaggacttgtctggccggagcattgaagtaacattatggggaaacttctgtgatgctgagggtcagcagttgcagttgcagtgtgattctggttcgaaccctataattgcttttaaaggtgcccgtgtgggtgattttaatggcaaatcagtgagcacaattggttcaacccagttaattataaatccagactttcctgaggtggaaaggctgaggcagtggtacatgacagaaggaaaaactgctccttgcatttctttatctcgagaaatgcttaatatgggccggactgatgcccgcaaaacaattgcacagatcaaggatgaaaatttgggacgattagagaagccagactggatcactgttaaggctgcaatctcccatgtgactactgagagtttttgttatccagcttgcccaaagctcttgcccgtcgggaggcagtgtaataaaaaggcaataaataatggtgatgggatgtggcattgtgaccgatgtgatgagagttttcaaaatcctgaatataggtacatgcttaggttccagatccaagaccacactggtagtacctatgctagtgcgttcgatgaggcaggtgagcagatttttggtcgcaaggcaggagaacttttctcgataagaaatgtcgaccaagatgatgcacaatttgcagagatcatagaaggggtccggtggcatctatatctattcaaactgaaggtcaaggaagaaacctacaatgatgagcaaagcttgaaatgcaccgctgtcaaggttgaaaaactggacccatcaaaagagagcaacgtcctacttggagcgattgacaaccttttactggacccaaaggggcaaagtgatcttgcccctaatgctggtttcaccgatccggtaggcggtcacggtgcgcctacatctagcaatgcctatgccatgaatactggtggcgtgaatcagtttgggcagcaagcgagtataagcgccgggatgtctactccactagcagcaacacgaaacttgcagacatgcagcatttgtggagcaaatgggcacagcgcccagatctgccatgtgggtgcagatatggatatgcaggaaacatcagccggtggaagctccatgggtaactacaactccatcgctggcaacggcagctcggagtgttacaaatgtaaacagcccgggcactatgctagagactgtccagggcagtccactggtggcttggagtgtttcaaatgtaaacagcctgggcacttttctagagactgtccagtgcagtctactggtggctcggagtgtttcaaatgtaaacagcctgggcacttcgctagagattgtccagggcagtctactggcgcccagcaccagacatatgggaataatgttgcagcatcaaggggttacaataggcaatcctttgttggtggctactgaagtattttgcaagggaagaagcagcagcagcagcagcatcttgattttgttcatcttggatggcatcggtgtatcgtgtatagttgttaaacctgccttatgtttatgcctttattacctccaatgtccactgggcagggaaccttgtgatctggactttgtatcgctaccttaaaaagtatattgtccttgtctgcaatcttgt

SEQ ID NO: 23492 - DNA, 1060 bp, Oryza sativa
  ref <308>: DATABASE ACCESSION NUMBER: AK073599
  ref <309>: DATABASE ENTRY DATE: 2001-12-06
ggccactagccgagccccatcgatcgtattcgcgtcaagcttcttctcttcctctccaaatttccaacctctccatccatccatcccgcatccgattcttccaaccaatctcatcttcttcctcctcctcggcggctcgccgattccccgacggcgatgaagatcacggcgctgctggtgctcaaatcccccggcgacggcgactcgtcgtcgggtggcggtggcggcgagcaggagcaggagcagcaggcggcggtggtggtggcgaacgcgaccgacgtgagccacttcggctacttccagcgcaaccccgcccgcgagttcatcctcttcgtcgcccgcaccgtcgccgcccgcacccccgccggccgccgccagtctgtccagcacgaagagtacaaggtgcattgctacaaccagaatggcctctgcgccatcgccttcaccgacgaccactaccccgtcaggagcgccttctccctcctcaacacggtgctggaagagtaccacaagacttttggggagagatggaggacagcaaaagctgataacacccagccttggcaatacctggatgatgccttgacaaaataccaggatcctgcagaggctgacaagttgctgaaaattcagagggatttggatgaaactaagattattcttcacaagaccatcgatagtgtactttctagaggtgaaagattggatagcctagtggagaagagttcagatctaagtgctgcttcacagatgttctacaagcaggccaagaaaaccaactcttgttgtacaatcctgtaatagaaactctggtatagagttctgcagtagcacactatgttggcattttctttgctgcaagtctgcgattaatgtcatagcatcctggtgtccgaggtgttaaacaaagttagcggttaacatatgccacagggctaccctacgtaattttttgtaagtaacacaagtgtggttgccattgagatgatctgtgcctggtactgtgtcaaagctataattagtgatgaaattgtgtactgtcatcttgacccccaacttc

SEQ ID NO: 23493 - DNA, 2257 bp, Oryza sativa
  ref <308>: DATABASE ACCESSION NUMBER: AK073600
  ref <309>: DATABASE ENTRY DATE: 2001-12-06
ggtctccatctcgccacattcgccgcgcgcgtcacacgagcaagggagcaagcgaggagagaggagaggcttagcgagagaggtgaggagaggagaggatttggaacttttgatctttgggatcgcgagacgacggagatggccggtggcggcagggccgatgacgagcgaaggatcggggtggcgatggactactcggcgagcagcaagagggcgctggactgggccatcgccaacctgctccgccggggcgaccacctcgtcgtcctccacgtcctgcatcacggcggggaggaggccaagcacgccctgtggggcaagtccggatccccgctgatccctctctccgagttccgggatccgacggcgatgcagcagtacggcgtgcactgcgacgccgaggtgctcgacatgctcgacacggcggcgcgccagttggagcttaccgtagtggcgaagctgtactggggcgacgccagggagaagctctgcgacgccgtcgaggagcagaagatcgacacgctcgtcatgggcagccgcggcctcggctcgatccagaggtataactcctacttctgtttgcaatgttgttgcctcatcaatcaagaatcaaaattgcaggcattgaccatagaacttgcctttgggccagttgctaatattcctgttcagatagacaagctctgtcgagaacgatgcactgcttaaatcgataattaaactacatactgtgtccagttccgtggtacggtagtttttaatctcaacacataattgcattgcactggaaatttgggggccaaatgcgtatctgacttggccttgcaacttgaatcattacagccaatgagattggattatcgagcatttcagttgcacttgtttttttctgtgggaccgccaaggcatcaacttgttgccttcacgattaataaattgtaagagcaagtacaatagctggctataaaccagctgtaaatatattttaagaagataaatgaggagagagaagggtagtgggctacagatttgtagccaactatagcacgaactccaagacgcagtgtgtgtatgacaggcgggaccaaatattaatagtgtagtatgtaattattgtataaatgagctattaggttggctatagatgaattggagctagtagttggctatactattaaacttgctctaaagtcgcatgttcatccttgagacatgtatatcctgattcttggtcggcgcgttgttttatgttctcatgtgaaactccttttcatattcaaatgtttcccatgtacagtttgagcataagaatgatgtatatatatagagttagttcaacaactagaatgcttgtgctatttcaatatccaaatacagaagtttatatacaggaacgtgattatcttggttttagcctcttaggttagtgtccacgtccaaagactataactatttagtctataacatattgagtggatgatatgcattgttagcttgaaacttactattgtcatcttgattcagaacagaaaattgtgaagtttggagatgcgatgtctaatgaacgtttgggagtatacgctttgcgcatatggcagtatttgtttagggctggtttggttcgatgcctaaattagtcttaccaatatttggcaatttcaatagtgtttagtgtctatttggtttgaagccaaattttgttatgcctaagaaaataggtcatttcaataatgaacttattagactattttggcttcaatctaaacacaactttgtcttaccaaaattagtcataccaaaaattaccaaattttggtactgatagaatttggtaaggcctatttagaccacaaaccaaaccaactctttagtgattctctagcttctgaattgaatccagcacaccatataatagtctcatcgactttttagctcgttatgatttcatctgcaactttcctgtctgccaacattttacaggattcttctggggagtgtgacaaactacgtgctgtcaaacgcatcatgccctgtaacagtcgtcaaggggaagtgatcgatgattcgacttgagtggatatactgttactgttgctactgtatctgaataaagcgtgtatggaacttcttttgtgtttgtaatgttgcagccttcccaggttcttctagacagttcactttgcaaacagtccatgcttgtgtgctcaaccatgtgaatcactttatatatatagaccgaatttgaggttttactttc

SEQ ID NO: 23494 - DNA, 1899 bp, Oryza sativa
  ref <308>: DATABASE ACCESSION NUMBER: AK073601
  ref <309>: DATABASE ENTRY DATE: 2001-12-06
gcccgtatcatcttgctccccaaaccaagccaaccccctcgacggccggaacacatcggggggacgcagccatggtgctcgaggcgacgatgatctgcatagacaactcggagtggatgcggaacggcgactactcgccgtcgcgattccaggctcaggccgacgccgtcaacctcatctgtggcgccaagacccagtccaacccggagaacacggtgggcgtcatgacgatggccggaaagggcgtgcgcgtgctcgtcactcccaccagcgacctcggcaagatcctcgcttgtatgcacggacttgaagttggtgctgaagcaaatttggctgcagcaattcaggttgctcagctggctctgaagcatcgccagaataagaggcagcaacagcggattatagcttttattggaagccctgtgaaatacgacaagaaagttttggaaacaatcgggaaaaagctgaagaagaataatgtggctcttgacatcgttgactttggtgaaaccgatgatgataagcctgagaaactggaagcgctaatctctgctgtgaacagtagtgatagcagccacatcgttcatgtccctcccggtgaaaatgccctttccgatgtgcttataagtactcctatcttcactggtgaagaaggtggaagcggttttgctgcttctgcagcagcagcagcagctactggtgcagctggatttgaatttgatgtggacccaaatgtagatccagaattggcactcgccctgcggttgtccatggaagaagagcgagcaaggcaagaggctattgcgaagaaggccgcagaagaatcttctggtgctgaaaataaggaccatgcctcaagctcaaacgctgattctgttatggcagaagcggaacctgcctcaaatgctgctgatgataaaaaagatcagccgaaggaagatgatgatgctcagctactacaacaggctcttgcaatgtcaatggaggagggttcttcaggggctgcagcggctgatgctgctatggcagaggctgctgtagatgaccaggacttggcactagctcttcaaatgtctgtccaggacgcaggcgggtctagtcagtctgatatgagcaaggtgtttgaagacagatcatttgttacatccatccttaactctctccctggtgttgaccccaatgacccctctgtgaaagatttgctggcatcattgcatgggcagggcgagcaagagaagaaggaagacaaatcagacaagccagaagatgagaagaaataaatcaactcctttgtgtcttccttgtaagatttcagtatgctgtcttacctccatatccgatatgcatgttttgcatatagtctattcagcccttgatgactatcgttctggttgtacgatatcttctactataaactagaagctggcgagttggctgcataaatttgaattttggagcagcaagttatgtcctcaagatacttgcatgtaaaactggtctatgtgtgcagaggttctgtcgctctgctctttttaggactgtcgtttcattgttcacaattatgattagcatattactgtttctatgcaaaactaacgtgttaacgtgtgcaatttgcatcaaagtttaccatttaccccacgcaacttatcaaaacgttgcgcgacctcgcaggcaaccacctcttgatcaatctcgcaggcgcccgaagcattggagatatctggtctcgctttatttggtcatggattctacttatcctcgtgtaactgtacttcaattaaaaaacttaaagggataatggtttatcacttcttctgtcgtcattttacgatttgcaattgtttactgtcgtggaatttacttattcgcttctatataattcgtcttctttcccgc

SEQ ID NO: 23495 - DNA, 1303 bp, Oryza sativa
  ref <308>: DATABASE ACCESSION NUMBER: AK099364
  ref <309>: DATABASE ENTRY DATE: 2002-08-28
gggtggaagaggaggcagttgctcgtttttgtgtgtgagagaggggagaggccggcggcgatggggaggacgctggacgtgttgctggggcggacgacgaagcagacggcgaggctcaagtcgatgctggggctggcggtgacgcggctcggcgtgctgcgcgggcacaggcaggtgcggtgcgcgcaggcgcgcggcgacgtggagcagctgctccgcctcggccaccccgaccgcgccctgctccgcgccgagcaggtcatccgcgagcagaacacgctcgacgccttcctcatgctcgagtcctactgcaatctcatcaccgagcgcgccgccctcgtggactcgcacagggagtgtcccgaggagctgcgtgaggcggcagcgggtttgatctacgcggcggcgaggtgcggtgacgtgccggagctgcaggaggtgaagcgcctcatggcggccaagttcggcagggagttcgtctcctccgcggccgagctccgcagcggctgcgggatcaatgccaagatcgtgcagaagctgtcgaccaagcagccgagcctggagagcaggcagatggtgctccaggagatcgcggcggagaaagggatcgccggcgtcgtggtgcacgtcgtccacgagccttcttcccacgacgaggactcgggcctcagccacaggaggcggcggtgcgacggcgagaggcggcacagggtccatcaaccccaggtcgacctggaggaggacggctcttcgaggtacaggaacgtggaggccgcggcgcaggccgcgttcgagtcggcggccaccgcagcggccgccgcgaaggccgccatggagctctcgcgaggcgaatccgggggccgcgacgacgacaggagacggccgggaggcgcgcagttcgacagggccgacgaagagacgctcgccggcggcgaggtttcgggtgatggcaagaaatctggcaggatcagacgtgccagcctcggccggaactacagttcagagatcgaggattcagctgaggatgatgaagtggtccgccatgagatcactgcagagagcgaggtgaaaccgcggggtctgaccaggagcgtgccggtatcagtcagaacaaagagggtgagttagctgcaaccagatggcaacaagagtgatgggagatgatttcttgaattcgtgatattagcagctgctattatatttttgcagattcatcgttcgttagatcctaggcctgtaggccattgcatgcatgtaattaaatggagccaaacaaaaaaaaaggaaaaaaaaaacttgattc

SEQ ID NO: 23496 - DNA, 1136 bp, Oryza sativa
  ref <308>: DATABASE ACCESSION NUMBER: AK073602
  ref <309>: DATABASE ENTRY DATE: 2001-12-06
gagcctccctcttccccacccaacccgcaaatccccaaatcgaacccgccgcctcccaaaccctcgctctcccagccccaagaacctcgccgcgaccactcccgcagctccaacgcgcccctcatgaccgacctcgacgacaacatcgtcgccatacccaacccctccggccgcggccccgggtaccgctacttcggcgccgccaagaagctccctggcgtccgtgagctcttcgacaagccacccgaggtccgtaagcggcggacccgctatgagatccacaagcgcatcaacgcagggtactacggttactacgacgacgaagacggcatgctagagcggctcgaggccgttgccgagaagcgcatgcgcaatgaggtcatcactgagtggcaccgtgtggagcgggtgcggcgggaggccatgaagggggtagtgagcggcgaggtggcctcggcaggtgggcgcggcggggaggctgctagggaggtgctgttcgaggaggtggaggaggaggttgaggaggagaggaggctggaggaggagaagagggagagagagaagggcgaggaggctgggaaggagtttatcgcgcatgtgccgctacccgatgagaaggagattgagcggatggtgttggagcggaagaagaaggagctgctgagcaagtacaccagcgacgccctgcaggttgagcaggaagaggccaaggagatgctcaatgtgcgccgctaggagagatggttggctattgttggaatcttcatgatctgaaacttcagcactgaagtacaacgaacacccatgcgatgctgacgctgaagcgcaggaaaacaaggaggagcccgttttgcagcgcattcatgaacgcagccctggcaaacatctgttgttaaagaaaaagcagggcttccctgtgttttatccattttatcactaaccttgatgagtggtgagtgatggcgaagcacttacatattcgtaatgtaaaccagagttctagtgcactgcatgcttttagtgtactctctaattactctttatagctgattagcttctaaaattttagttgtatactggagaatatgtacttcgtctgttttccggcttctatgatgtgcaagagaatccatgtc

SEQ ID NO: 23497 - DNA, 1413 bp, Oryza sativa
  ref <308>: DATABASE ACCESSION NUMBER: AK073603
  ref <309>: DATABASE ENTRY DATE: 2001-12-06
gaatcttgtctctgcagggcgccggcgggtggggaggaggccggcggggagctcctcctgcgtggccgcgagctccgcgtcaaagggtggtgggtgctgccggtcaaggcgtaccacgccgcggggcggctgacgggcgccgcgtccgccatgcttgccgtcgcaacctgcgggatgcctctgcagcatggtgccgttgcgcggggccaagcgccggaggagaaggctgcaatggcggcggccgctgtggcgggtggcgcgcccggagcagatcgcgaggcggaccgacgccgatgccgcgccgggggagagcacagcgctgcgggcgcgctcctacggctgcatccgggtgttcctcgtcctatccctgctgctgctcgccgtcgagatcgccgcctacctctaggggccttgctccccccgccgccgcctacctcggccaggaggacaggggagcgccgttttcgtacccagccaccaataccccatcttgaatattgatatatactctgaattttgagagcttttggtgtgtgtttttgtttcatggttgccctctcgatcttcatggtcatggggcgactttgtcctccagcggaatcgatcgatccacccgtccgtggccatagccgccgtcgccggtcaatacatcatccacgcaattgtcctgctcctctcccaagaaaaccacgcaagcgagctccgcggaaaccgatctccgctgccgacgacaaaataggcgatttagatgcaagattggggaacggcggggaggattcctgctccatgttgatcttccgcagcagccgtgaccgcgtccatgtccccatcagccgccatcccgccatccggcggggacgagggtcgccctcctcctcccaccaccgcgctcgcctcctgccctgtgccgcgccgtgccgttcctcatcgtcgacagcctctcccgcaaccacgacggcgcgccgcagcggcgtcggggcagacgggcagttgggcctccccatgctcccccttcgcctccccccatgctcccaccaccgccgccatcggctgccgcacctcctctcctgcctcgccccgccggcctcctccccacctgccgctgccctgcccgaatgaggtgaagagtgagagagaggaggaggtgagaaaacagtgaaaagagattggtgatgacgtggacagtctgacagatgggccccatgtgggtcccacgctgactcagccgccacggcggacaaaaccagggacaaaatcaccgaaggacctaaaatgaacggttttgtaagttgagggatgtcctatatctgattttgtggttggaggatgattttgaaatttgatgacaagttgagggacctttggtgtacttttttcttccataaatagatttccactattagtgccactgcc

SEQ ID NO: 23498 - DNA, 1347 bp, Oryza sativa
  ref <308>: DATABASE ACCESSION NUMBER: AK073604
  ref <309>: DATABASE ENTRY DATE: 2001-12-06
gtcccgcccggccgccacacacgcctctctagctacccggcgcccgttcgagtagcctgtaggcgcgtggcgtcgtaatggccgtggcgcccgtccggctcgtggcgtgcattgtcgccctggccgccgtggcgccgggcggagtggcggggcacacacggggcgtgcggccagggagggcggcggggaagcagcagccgtcgttcccggagaacgcgacgcgggtggaggcgatcgagcggcagttcatggagtgggtacggtacatgggcgggctggagcacagcacggtccaccacgcgctcgcccgggcgttcccctcctactcgctcgtcgtcgacaagaacccggcgttcggcgacttcaccaccatccaggccgccgtcgactcgctcccgatcatcaacctcgtccgcgtcgtcatcaaggtcaacgccggcacctacacggagaaggtgaacatatcgccgatgcgcgcgttcatcaccctcgagggcgccggcgccgacaagacgatcgtgcagtggggtgacaccgcggacagtccgtccggccgggcgggacggccgctcggcacatacagctccgcgtcgttcgccgtgaacgcgcagtacttcctcgccaggaacatcactttcaagaacacgtcgccggtgccgaagccgggggcgtcggggaagcaggcggtggcgctgcgggtgtcggcggacaacgcggcgttcgtggggtgcaggttcctgggcgcgcaggacacgctgtacgatcactcgggccggcactactacaaggaatgctacatcgaaggctccgtggatttcatctttggcaatgcgctctctctgtttgaggattgccacgtgcatgcgatcgcgcgggactacggcgcgctgacagcgcagaaccggcagagcatgctggaggacacggggttctcgttcgtcaactgccgggtgacgggatccggcgcgctctacctcggccgcgcctggggcaccttctcccgcgtcgtcttcgcctacacctacatggacgacatcatcatcccccgtggctggtacaactggggcgaccccaaccgcgagctgacggtgttctacgggcagtacaagtgcacgggccccggcgcgagcttctccggcagggtgtcgtggtcacgcgagctcaccgacgaggaggccaagcccttcatctcgctcaccttcatcgacggcacggaatgggtcaggttgtgagagatcgatccatcggtcgatcgagttcattgtagcacaccgcacacggcatcatagcgtcacacgatgtaaaaagaaaaacagacgaatatatatacagattcatttgcagtct

SEQ ID NO: 23499 - DNA, 1059 bp, Oryza sativa
  ref <308>: DATABASE ACCESSION NUMBER: AK073605
  ref <309>: DATABASE ENTRY DATE: 2001-12-06
gaatcccactccacccaacgaggagatagcgcaagagaggagagggtttctgcggcggcgatggcggcggcggcgaacctggaggacgtcccgtccatggatctgatgaacgagctgctacgccgcatgaagtgcagctccaagcccgacaagcgcctcatcctcgtaggtccacctggctctggaaagggaacacaatcgcccattattaaggatgagtactgcttatgccatttagctacaggtgatatgttgagagctgctgttgctgctaagactcctttaggagtcaaggcgaaagaagcaatggacaagggagagcttgtttctgatgacttggttgttggaattattgatgaagccatgaagaaaccttcatgtcaaaagggtttcattcttgatgggttcccacggacagttgttcaggcacagaagcttgatgaaatgctggaaaagaaaggtacaaaggtcgataaggttcttaactttgccattgatgattcaattttggaagaaagaattactggccggtggatccatccctccagtggcaggagttatcacactaagtttgcacctccaaaggttcctggagttgatgatgtcactggagaaccactaattcaaaggaaagacgacacagctgaggttttgaagtctagacttgaagccttccacaaacaaactgaaccagtgattgactactactccaagaaggccttggtggccaatcttcatgccgagaagccaccgaaagaagtaactgctgaagtccagaaagttctttcgtaaatgtaccaccattttgagacgaaaattcgacagattacccagacacactgggtccggcttttagatgttcaaattgacgctgacatgcaaggtgtagactgctctctttttgtattgggtactcttatcagatttgatgagcacagtgctttgcgttgttttagttctaataatctctatggcattgatggaaggaacatttttttgtaccaatatcacagggttctttcacccttgagagttcccaaaaaagctttgcttatgatt

SEQ ID NO: 23500 - DNA, 1943 bp, Oryza sativa
  ref <308>: DATABASE ACCESSION NUMBER: AK073606
  ref <309>: DATABASE ENTRY DATE: 2001-12-06
gggttcttcccctcccttattctcccatcacactctcctcctcttcttcctccctggttcctaactcctctaccccacatcattccaatcctatcatggtggtggtagagaaatatagagagagctagaaggggaagagaagagagaagatttctagcttaattagaagggttgttactatgggggaggtgaaggagaatgaggtggtagagatttttgagcatgatcatgacaacaagatcagatctcctgaaaactctgtgccaccagccatggtgctggacctcaacgagggcttcggcgagggcagcgaggaagggggagttggcgaagacggagatgaagaagacgatgatgaggacgacgacgacgacgacgatgacgatggcggtagcacaagcgaagttgccggaggagggaggagctccagcaacaacagcagcaccaaccacaattccgggagcgacaaggaccatgacatgaacagcagcagcagcaaggccgacggcggcggcgacagggtgccgacggtgcggcagtacaaccggtctaagctcccccggctccggtggacgcccgacctccacatggcgttcgtccacgccgtcgagaggttgggcggccaagaaagagcaacaccaaagcttgtgcttcagatgatgaatgtgagggggctcagcattgctcatgtcaaaagccatttgcagatgtacagaagcaaaaagctagaccacgagtctggccacgagagaggagccatctcatcagtgttttcgcccatggagttccacatgaggagaggggaccatcgtttccaccaccacgacatgttcttccagcgagccgccgccgctggcgtctcgccgttctcctccaggatgctgcacgagaacggcggcgggttcttcgcttcgaggaatcccggcttgccggagtccagccggctctacggtctcttccaacgccggcagcaagctcccatgcaaaaattcgacttcaagaactgcaatagcttcagtaggaaccaggagtgggcgttcaaccagcagcacgcggcggcgagggccgccggcgccgtcaacggccacggcccggcgaaagggctcatccacgagatgatcttccggaaggaaggaaagccgacgtcgcatctgttcgacgtgagggacgccatcgcctccacccgggtgacctcggcgaccacggccgccgccgccgaccaccggctagacggcgccgggaaggccggcaactttgattggatcgggagcagctcctcccggccgctcacgaggacaatgtcagcggcggcggcggctaccatgggcgaccaccaccatcttcggtggcgaggcggcgccgccggcagcgggaacacgacggcgtcgtcggatccggtggtcgcaagcgaagctgccctaggttccctgctcgagagggcaaagacgaaagcgaccgaggcgatgcgcctcgagacgccggtgaagatgacggcggcggcggtggcggcggaggagatcaacggcaggacgccggacttgcagctgagtttgagcccgaacgcgggagatcacagatcagccggcgagaagaggaagttcttgagtgagcaggaggtggacagtgacaagcagcagctgccactcacgctttccctgtcgctccggggtggtggcgacaatggcggcggcggcggcgcagaagccgccgggaggttagaggaagagatgacaggtagcagcagtagcaagaaggccgctctggggctgagtactttggatctgaccatgtcgatcaaggcattggagtgagatctttcaagtacttgtcccaaggccttccaagacatgcacactgcaccatgagattaattattaataagactgttaattttgtttaaccatgcttccagaccatatataatacatatatatcttatgttc

SEQ ID NO: 23501 - DNA, 1651 bp, Oryza sativa
  ref <308>: DATABASE ACCESSION NUMBER: AK099365
  ref <309>: DATABASE ENTRY DATE: 2002-08-28
ggatctgctgcgagaagcgtggccatggccatggtggagaagacggtgctgctctacccttgccctgcggtgggccatctcaaccccatggtgcagctcgccgaggccctcgtccgccgcggtgtctccgtcaccctcgccgtcgccgacccgcctgacaagggcgctgtgctggccggcgcgatcgcccgcatcgccgccgtgtgcccctccatcggtgtccgcctccttcccatcccgtcctgcgagggcaagacgtactcccaccccgtcatgtggatcgtcgacgcgctccgcctcgccaaccccgtgctccgggagctcctgcgctcgttccctgctgccgtcgacgctctcgtggtcgacatgttctgcatcgacgcgctcgacgtcgccgccgagctcgccgtcccggcctacatgttctacccgtctgcggccagcgacctagcgatctacctccaggttccgcatgtcgcccgctcggctccatcctctttcaaggacatggccgacacggtgctgagcttctccggcgtgccgacgattcgcgcgctggacatgccggacaccatgcaagacagggagagcgacgtgggcacgacccggattcaccactgctcccggatggctgaagcgagaggcattctggtgaacagcttcgattggttggagacgagggccctgaaagcgatccgcggcggcctctgcctgccgtccggccgctcggtgcccgcgatctactgcgttgggccgctggtcgatgggggcaagctcaaggagaacgacgcgcggcacgagtgcctcgagtggctggaccgccaaccgaagcagagcgtggtgttcctctgcttcgggagcaggggcactttctcggtgtcgcagctgagcgagatggctcgggggatagagaactccggacacagattcctgtgggctgtgcgtagcaacctcggcgaggtggacttggaggcgttgtttccggaagggttcttggagaggacccaaggcaggggattcgtcgtgaagaactgggcgccgcagtcggcggtgctgcagcacggcgccgtcggcgcgttcgtgacgcactgcgggtggaactcgtcgctggaggcgatcatgtccggcgtgccgatgatctgctggccgctgtacgcggagcagaggctgaacaaagcgcacctggtggaggagatgaagcttggggtgttggtggagggctacgacggcgagcttgttaaggccgacgagctggagaccaaggttcggctggtgatggagtcggaggaagggaagaggcttagggagaggtcggcgatggccaaggagatggctgctgatgccgtcaaagatgggggttcgtctgacatggcgttcgccgaattcctgaacaatttggggacgaacaacgtgaaaagcggcccgagagatacacccgtgcatgactgaaacactgtagccgagttggttttagcaggaccgagaataatgttcttcagtatatttagatttcgtcagattttagagttgttcatgtcgtgatgtggccgaatctgtatgagactacggtgcaactatgctagcgcatctcatgcaaagtccgggcatccttacagagaacacactaatttatttcccagttttttctccc

SEQ ID NO: 23502 - DNA, 2621 bp, Oryza sativa
  ref <308>: DATABASE ACCESSION NUMBER: AK073607
  ref <309>: DATABASE ENTRY DATE: 2001-12-06
ctctctctctctctttctctctcgcagtcaccgcaggtggagagggtggaggagacgggtagggggggaggaagccgaggaggcgacgcgactagctgctgctgctgctgctcctgctccactccgccctaggtcaggtagtgcaataagggtttctcgggatgcctgaggaagacccagcatcggcaatggaggagaccgctgtagcgaatggaggagcagctgatgatgttgctgctcctgataaggacaatgacattaaagaaaaagctggcaaggacaacgaggtagcagtagagaataagaatgctgaagagcagaataaaggaggctcagagaatggtaccaagggtccatctgatggagatgttgagatggcggaggctgagactgcaaaggagagtgatgtgaagcagttggacactgaggatgcgaaaaaggatggtgcgcaggatgcagatgcaaatgaagaaaagaataccaaggacacagaaggtgaagatgtcaagatggctgaggctgaggccgaggcaggaaatgccgatgtcaaggatacagcagagaaggaagataaagatgagaacaccaatacggagaagcaggaattgaaagatgcaaaagaaagtggttctgagaagcaggaggaattgaaggagcaagataaaagtggttctgaaaagcaggaggaattgaaggagcaagataaaagtggtttagctgagtacgaggaaaagaaagcagaagaagagagtggtgctgagaagcaaggggaagaggaagcagaggaaaagggctctgctgataatgacaacgaggaaggagacaaaaatgcaaatatcagtgatgaacatctgaaaaaagatggtggaaaggatggaaacaaagatgaagcagaagaagaggaggtcagtgaagcagacaagaaggtagaagagaataaggaggaaacaccgaagaacaagaaggcaagaagtgcaagggatagaagccaaggtaaggataagaaacaggatgggtccaaatccagggaagcgaagagcttactgaacaccgccagcccttatggtactgatcgccctcagcgtgagaggaaaacagtggagaggttggttgaagtgattgaaaaggagcccaacaggaacttcgtagttgagaagggtcgtggtactccgttgaaggatataccaagtgtggcgcacagaatatcaaggaaaaaacctgctgatcttaagtttcttcacaatgttctttttggcaggaaaggcaagactgttgattttaaaggtcatatactccagttctctggtttcgtgtggcatgaaagtgatgaaaagcagagggcgaaggctaaggagaagcttgacaaatgtgtgaaagacatgttgttggaactctgttggatccttgctattccgactccaaaagcaaacatcagaaaggaagatattgtggcaaagctgttggatttcattgctgaacctcatgctatggctgattccgggcattcggatgatcaggggtcgaattctcggaaacgcaagagaggaagcacacccaagagttctagcaagaaatttgatgatgatgacgacataactccaagtaaaaagcggaataaagctctggaatatgatactgatgaagatgaggatgatgcggatcccatgaagtcagatagtgaggaagatgactatgattctgagaaagagaaggcaaagaagaactcctcagatgcaaaagataccgctagtaaaaagaaggctgcaacagggagcagccacaagacaggtactccaaggacagtgagcaagagttcaagcaaaacaccatcttcaaaagtttccaaggaaaaggagagccctgaggacagtgcaaaagtcttctctaggaagaagaaatctgtcacaccaaagcgtccttcaagctctgaaaaggagataaaagacaagaagtcatcaggtaaaaaggtgacaaagggtaaaggagaatcagcagaagtaggtctacccagtaaggacgagctgaggaaaaccataactgaaatccttaaaaaagttgatttcaacacggctactttcagtgacattcttaaaaagcttgaggatcgctacaagattgacctgacaccacgaaagtcagctatcaaaatcatgatccaaggggagctaaccaggctgtcgaaagaagacgacgatgaggatgaggacgaggatggaaatgaagacgctgagaagaaaaaaccacaacatcaagccaaggaggtggtggcctgagctgagcattggtgaaacctcgtaggtttagcacccgctgttaattattatccgctgttaattattattttgtacctgcatgtatgccgaaccttgtgcttgcatcatgggcagcccccatgttaattattgttaatccgtgtccacagatagccaaaaaccatatccctgtttggtaatgtcaaaaacaaggttcgcttaggcagccctacacctgtagctgacttgggaggcaatttcttaggtaactgttgatgtccaaaaactctgcaatgggatgtggcagagcatcatgtaatgaatcatgttcgtcataggtttgaataacaagtggacgtattaggctgt

SEQ ID NO: 23503 - DNA, 1211 bp, Oryza sativa
  ref <308>: DATABASE ACCESSION NUMBER: AK073608
  ref <309>: DATABASE ENTRY DATE: 2001-12-06
gagcagcaagttcctcaactatttcgttaagcaaattgttccagtttttgacaagattcctgaagagaagaaactggatttgctcaaaacagttgctgcaagctcaccatatgctacagcacaagatgcacggcagctgcttccccctgttgttcaattgctcaagaaatatatgcctgggaagaaggtggaagatatcaaccataattatgttgagtgcctgatgtacatttttcaccatttagcccataagacaccaaacaccacaaacagcctatgtggttacaagattgttactggacaaccatcggatagacttggagaggatttctcagaacattacaaagactttacggagaggttaacgaacagaagagacagttcgagcagtctcaaagagactaactcaggggatggcagattttaacaaggcaatatcttcagcaaagactgaagaagagaaaactaaaattaaatctgatcagcagaaatcaacaatgacaatgagggcctacaacaacatactagcaatggcgcagccgttgcgtgcgaaatcccctttatttattggtgacaagaaaatcactctctcatggatggagcagccaaagaaaccagcacctacaacaacaggagggaagaggtcccagcctgctacaaatgggaacacccctgcgagcaagaaggggcggggagagggagcagcccggaatcaacttgtgaacagagcttttgaagggttatcccgtggtggtagagggagtggaagaggccggggcaggggaggccggggaagaggatggggctaccgctgagaatagttggaaatccctgcaatctgatgggagaatagatcagctttctgctttgatttgaggtacttctcaggagataagcttttctgtatgcagcaaaatgggattggtgatagcccgtgaaggcatgctcaattgctgaatgcatacagaaagctcatatgatggatgcttgagtatatcgatgattttttagaccctagtcgtggaggttcaagaatgtggagtgtatgtacgccctagttcatttacatccctgaccgtttgttagttgaccagttctacttgttttggtggttcgatgaactcaagcagaacttttaaattctagaatttgttgttaaagactatttatttaagaatcaatagattgccgaggtgaattatgtttattgc

SEQ ID NO: 23504 - DNA, 2753 bp, Oryza sativa
  ref <308>: DATABASE ACCESSION NUMBER: AK073609
  ref <309>: DATABASE ENTRY DATE: 2001-12-06
gggaatttggattggaagcaggcgacaacaaatcgagggggacaggggcgtagataatttcgaaccgaaaaaaggagaaaaagacgggaaaaaaaaaacagacgaaccagcgagagagagatgcaacgagcttgaggcgatctcgaccgccaccatccatccatcctccgcgagaccgcgacccgccgtcgcctccagatcgtgctccgcccaggaagtgttggagaattttaatcataaattgacatgtaaaggagaggaggcaagctatctgtaactgaaatagtttcggtgggataccatggttgacataaaccctgatcacatctttgaggttccggacacccctgaccgaatacagcagtcaacatgccctgtatctagcccagctgctaggagaggtattgcaaaagcagctggaactccattaccatcgcgaagaattaaatttaagatcacaaataactccatccagggtcaatcaagtagaggcaatgcaagtagtgtgtcgcctgcacctttagatgctggcgatatttttaaacaagccgagttggcacgattgctgccagtggcagaagatcctgaagcaagatcatccttgctaaaatcaggtcggacgatagagacatctgttgagaatgaaaaggtgccaaaaaaatctggtttggatcagagcatgaatatttcaaacaatataaattgcaggggctctggagaaagggaccgtagttgccaaatcagaaaaggggatattagtgcacgggatgccaatagctgcaatgctgactttctctgtttaggatcaggtcttcctactactacggtgggaaaaccacgaaacagaatggggactatcacctttaagaagccgaaggaagtagtaggtgctaatgtctgttcagtatcgagtcctagagagggcaaaggggaagagatcactgacaagggcacaacaggaatttcaagctctacaccaagcattgttcctcaaaggcatgtgggccaaagaaagctggtgcggaatggttgtatttctccctccaacatagccaaaagaagtctgaaggttgatgaaaagcgagaaatatgctctacaagtggactcttacactatccagatactcaggttgatgcttctgggaagggaaatgtgatagatcttactgatagttcacctataataagaaggcagggaaacactgcaactgacatggaaaaaaggtcagggagaaagtcggcaataggcagagctggggagacggtaattccactggctgcaaatcaagtgaacagtattttttctgaaggtaacaagaataaaggaaaagaaatttcccatgatgtcgtgggtgctaagcagtctggagaggcttatatgaggagggtttgtccaagatccatgggagattcttcttccgttgcaaacaatgatcacaccggtataggttctgagcaaggttggagaacaacgcacaataatactagtaatatacccatgccactatcaggtaagatgaccaatagttgtggaagagaatctggatcttctgaacagtctaatctggatcgagcatctgcagcaggagacagcaataactcaattgagggaggagacaacaataactcaattggtggagcaaaaacattgcagactgctagttttgttaatagaacaataaggatcagtagcagaaagaggaagcgcatcgcaagttcttaccatcctggtgaaagctctagctctgttgatgttgatcaacctagagttgcatcatcagactcaacagctggtagaaatcataccactcaccgtcatcatattcctgtagtagatattgatgacatatgctctcctgaagtaaggcctagtttgagtgggattggtagcagcaatcggacctcagtggatcccaacataagagaacagttggagtctgatgagttattggctcgccaacttcaggagcagctttacaatgaaactcctcatgttgttcccacagaagagattgatgcgatcatagcaatgtcacttcaacatgaagataatgcgcagccgacatctagaactgcgaggcggttccaaagcactacaagaggtccaagggtattgcgttcaactgttcctcagcatgctaatagggttcgatatgactcaaacaacagaagaataatttaccagagagctctttccagataccctgctgcacatattcaacctaatattgatctaaatgattatgatgcactgcttgcattagatgaaaataaccaccagcatgctggtgcttcagaaagccagatcaataatttgcctcagtcagtaatccagtcaaatattgaagagccgtgtgcagtttgccttgataatccctctattggtgatacgatccgccgcttgccatgctttcacatgttccataaagaatgcatagacgaatggctaagaaggaagaaactatgtccagtttgcaagtctgggatcacataaaggtgacaattcggttccatgaatattctgcccttagactcaagaaaacagaaggaagtcgcctgcaacagtggttgcgtttctatctttagacgacagtggtatcggcgggaggttgcgcaatcttgtagagccttgttctaattgccttcggtgctaattctctggtttgtgggtttaggcacgatattttgtatatccatgtgttttattcatcaactggcataaaaggtcattatcgattgattgcttatcagcc

SEQ ID NO: 23505 - DNA, 1425 bp, Oryza sativa
  ref <308>: DATABASE ACCESSION NUMBER: AK073610
  ref <309>: DATABASE ENTRY DATE: 2001-12-06
gacggtgcggtttccctttcccatataaatcccccccgcgtccgctgcgaactactaaaccgagagagagaggcgcacacacgaagacgaggcggcgatggtgagcggcggaggagtagcggcggagaacggcgagatggtggggaacggggaggggaggaagggtgcgggggcgagcgtgctggtgacggggggagcggggtacatcgggacgcacacggtgctgcggctgctggagaaggggttcgcggtcaccgtcgtcgacaacttccacaactccgtcccggaggcgctcgaccgcgtccgcctcatcgccggcgccgccctctccgcccgcctcgacttcatcgccggggatctcaagagcaaggacgacatggagaaggtgttcgccgccaagaggtatgacgccgtgatccacttcgccgggctgaaggcggtgggggagagcgtcgcgcacccgcagatgtactacgagaacaacgtcgccggcaccatgaacctctactccgccatgaccaagtacggctgcaagaagatagtgttctcgtcgtcggcgacggtgtacggccagccggagaagaccccctgcgtcgaggattccaagctgagcgctctcaacccatacggcaccaccaagctcgtcctggagaactacttccggcaggtgcaggccgccgacccggagatgagggtgatcctgctcaggtacttcaaccccatcggcgctcaccggagcggcgacatcggggaggaccccaggggcatccccaacaaccttcttccgtacatccagcaggtcgccgtcggccgccgccccgagctcaacgtctacggcgtcgactacccaaccagggacggcaccgcgatcagggattacatacatgtagtggaccttgccgatggccacattgccgcactggagaagctcttcgctactcctgacattggttgtgtggcttacaatctaggaacagggtgtggaacaacggtgctcgaggtggtgaaggcgttcgaggaggcgtccggaaagaaaattcctatcaagatttgccccagaagacctggagattgcactgaggtttacgcttccactgacaaggccaagaaggagctcggatggagtgctcggtttggaatagaggacatgtgcagggaccagtggaattgggccaagaagaatccgtacggatacagcgccaatgctgagcagaattagggcgatcatattaccacttatatagtactagtatcaaaattgtccatggtcttatgaactgtgtgactagaaaatgttaataagacatgcgtgcctcttaagtggagtataccaattcttatttagtcgaatccgttgtgattttagatactggcaaatgttaatcaggtttatttaaatactatactagtagcaagatcaaattg

SEQ ID NO: 23506 - DNA, 1689 bp, Oryza sativa
  ref <308>: DATABASE ACCESSION NUMBER: AK073611
  ref <309>: DATABASE ENTRY DATE: 2001-12-06
ggggtgggccctcacttcctccgccgaaagccacgcacacgctgcccataaaaaggcgacgctgttctcaaaacctcagaaaattcctatatcctctgttcgtcactgccttcctctccaagtccatccccttccccgatctaagatccatccgatccaggccatggcggcgaccatccagagcgtgaaggcccgccagatcttcgacagccgtggcaaccccaccgtcgaggttgatatttgctgctcggatggaacatttgcgagggctgctgtgcctagcggtgcatctactggtgtatatgaagctttggaattgagggatggtggctctgattacttgggaaagggtgtcctcaaggctgttgacaatgtgaactctattattggaccagcattgattggcaaggaccctacagaacagactgtcattgacaacttcatggttcagcaactggatggaaccaaaaacgagtggggctggtgcaagcaaaagcttggtgctaatgctatcctggctgtctcacttgctctatgcaaagccggagctattatcaagaaaattccgttgtatcaacacattgctaaccttgctggtaacaagcaacttgttttgcctgtgcctgctttcaatgtcatcaatggtggatcacatgctggaaacaagctagctatgcaggagttcatgatcctccctactggtgcttcatctttcaaggaggctatgaagatgggtgttgaagtataccataacttaaagtctgttatcaagaagaagtatgggcaagatgctactaatgttggtgatgaaggtggttttgctccaaacattcaggaaaacaaggagggccttgagcttttgaagactgcaattgaaaaggctggatacactggcaaggttgtcattgggatggatgttgctgcttcagagttctacactgaggaccaaacctatgatcttaacttcaaggaagagaacaatgatggttcccagaagatatctggagatagcctgaagaatgtgtacaagtcatttgttagtgaatacccaattgtctcgatcgaagacccatttgatcaggatgactgggttcactatgctaagatgaccgaagaaattggagatcaagtgcagattgttggagatgatctccttgtcaccaacccaactagggtagccaaggcaattaaggacaaggcctgcaatgctcttctccttaaggttaaccaaattggatctgttactgagagcattgaggctgtcaagatgtcaaaacgtgctggctggggtgtgatgaccagtcacaggagtggtgaaactgaggatacattcattgctgatctggcagttggtttatccacgggccagatcaagactggagctccttgcagatctgagcgccttgccaagtacaaccagcttcttaggatcgaggaggagcttggtgctgctgccgtctatgccggagccaaattccgtgcaccagtggagccctactagatgggaatagaaccacttcgtttccgtaaattttgtgaagattgtgagggtttgagcaataattccccacggtcagatgtgggtggacatgctcccacaaaacgcttaattttgatgttgcgtggcgcaagcgtgatttgaaggaacacaaatgattatattaaacgttataagcaaagttcaacacc

SEQ ID NO: 23507 - DNA, 3819 bp, Oryza sativa
  ref <308>: DATABASE ACCESSION NUMBER: AK073612
  ref <309>: DATABASE ENTRY DATE: 2001-12-06
gtcgcgtccttactgtctctttcggaaaagagagagagagagagagagagccgcagccgcagccctccgcgccggcgatggcggcggcggaggacgtgccgggtagagattccggccggatgcgcatgcgcatgcgcagaagattcaagggagccgggtgaagtacggatcgtggtggtggctaatcgaagagcgcgcgcgggtgggcggctctgtgcttcatgtgttcgatgaaatgcgtcacccagctagtctacgagaagggcctgactaggtagcggcggcgagcagctggccctgaatgtttcgcaagggagagatcagagatgtcgcaggtgtaacaaccaagctctcctaggtcttgctcgactcggcccccgctgaagtgcttcacaatccaaggactggatatgctgtggctcggtttcatctttatgcaaatctttaaggggaaaaagaagagagtcaaacactacagtcaagatgatgctggaatactattatttgcttatcaggcttgtaagacatgaagtcaagttgccttgtcagcatgtttcagggttctgtttgccatcagcggcgaaccgcaggtctccttgtcattgcatgtctccttgaccaggaaaaccatggtctgaattctggaatgttcttattcttccaccattagctaaccaaatgtcttacaaatataacctgagcatcctaacttcaacagcagcagtgtttccatttccatgctccatagtaagatatggagggtgctgtcttcagtttgacggagggtgcagtcaggagcctgctgtgcaagcttggctgccttctaactgaggatacttggctggtgcagggtgtccatggtgagatacagtacatcaaggatgagctcgagtgcatgaatgcattcctacgcaatctgaccatatcacagattcatgacgaccaagttaggatctggatgaagcaggtgagggagatagcctacgactctgaggattgtattgatgagttcatccataacctaggggagtcatcagaaatgggattttttggtgggctcatatctatgcttcgcaagctagcctgtcgtcaccgaattgctctccagctacaagaactgaaggcccgtgctcaggatgtcggtgaccggcgttcaaggtacggggtggagctagcaaaggccacacatgaagaagcacatccaagactcaccaggcatgcctctctccatatcgatccacagttgcatgctctcttcgcggaggaggctcagctggttggcatcgatgagcctaggaatgagctcgtcagctggctgatggaagaggaccttcggcttcgtgtgcttgctattgtcgggtttggtggccttgggaagacgacgctggcaaggatggtgtgtggaagccctgtggtgaagagtgctgattttcagtgctgtccattgttcatcatttcacagacgttcaacatcagggcactttttcagcacatggtaagggagctaatccaggagccacacaaggcgatggcaatagcaggatgcaagcatggccttattacagatgattacctggagggaatggaaaggtgggaggttgcagcactgactaagaatctcaggaggtatttccaagacaaaaggtacattgtgatccttgatgacatatggactgtatcggcatgggagagcatcagatgtgcattgcctgacaacttaaagggtagcaggataatagtaaccacccggaatgcagatgtggccaacacgtgctgttctcgtccccaagatcggatttacaatatccagcgactatcagaaacgacatcacgagaactgttcttcaagaagatatttggttttgcagatgataaatcaccaactgatgagtttgaggaagtgtcaaattccgttttgaagaaatgtggaggcttgccattagcaatagtgaacatcggcagccttctcgcaagcaagacaaataggaccaaggaggagtggcagaaggtttgtaacaacttaggatctgaacttgaaaacaaccctaccctggaaggagtgaagcaagtcttaaccttgagctacaatgatctaccctatcatctgaaggcctgcttcttgtatctaagtattttccctgaaaattatgtgatcaagaggggacccttggtgagaaggtggatagctgaaggtttcgtcagccaaaggcatggacaaagcatggaacagcttgcagaaagttactttgatgagtttgtggctagaagcattgtgcagcctgtgaggactgattggactggcaaggtgaggagctgcagagttcatgatttgatgttagatgtcattgtctccaggtcaattgaggagaactttgcatcattcttatgtgacaatgggagtacattggcttcccatgacaaaatccgtcgcctctccatccacagcagttacaattcgtctcaaaaaacaagtgccaatgtatctcatgctcgctccttcacgatgtctgcttctgttgaggaagtcccgttcttctttccgcagctacggttattaagagtacttgacttgcaaggctgcagctgcttgagtaacgaaactttgcattgtatgtgcaggtttttccagctgaagtacctaagcctcagaaataccaacgtgtccaaattacctcatcttctagggaatctgaaacacctagagacgctggacattagggcaactcttatcaagaagctaccagctagtgcaggcaacctgagttgtctcaagcatttgtttgcggggcacaaggtacagcttacgaggacagccagtgtgaagttcttgagacaatcttcaggtttggaggtggcgactggggtggtcaagaacatggtggctctgcaatcacttgtccatatagtagtcaaggatagatcgccagtactgcgggaaattggcctgctgcaaaatctgacaaagctcaatgttctcttgcgcggtgtggaagagaactggaacgcattccttgagtctctgagcaagttgcctggccctcttcgctctctctccatccacactctggatgagaaggagcacagcttatcactggataatctagcctttgttgagtcgcctcctctattcataaccaagtttagcctggccggtgagttggaaaggctacctccatggataccatcgcttcgaaacgtatccaggtttgctcttcgtcgcaccgaactccatgctgatgccataggagttcttggggacctgccaaatctgctctgcctcaagctctatcacaaatcatatgctgacaactgcatagttttttgtcacggtaaattcgtgaagctcaagctgttgatcattgataatctggagaggatagagaagatgcagttcgatgcgggttcagtgactaatctggagaggctgacattgtcattcctgcgagaacccaagtatgggatttcaggtctggagaatctaccaaagctgaaggagatcgagttctttggcgacatcatattatctgtggtgaccaaagtggcatcatgcgtgaaggcgcatcctaaccacccaagagtcataggtgacaaatggaatattgtaacggagtatgcgtaaggagcaatatctgaagtctgaaaaacaacactgactagaagcctgtttggtttcttttgtcttctttttcttctttgttttttttcttttttcttttgagatgaggtagatgctggctgggcatgcctgtatctgcatttcggtagtactctgcgttgtttgttgcattcataagagtattatttagcagctagtgctac

SEQ ID NO: 23508 - DNA, 1053 bp, Oryza sativa
  ref <308>: DATABASE ACCESSION NUMBER: AK073613
  ref <309>: DATABASE ENTRY DATE: 2001-12-06
gatccaccttccccattcggtgagtcgtcttcgtcgtcttgggtactcgcgcgcgccagctcactcccagatctcccccctcctctcctccccgtctcagatctccaccgccgccgccgccgaaaccctagcccagccccccgccttccgccgcgcgcgcgggggtgacctccgcgccgccgccgccatgggcatcgtcttcacgcggctcttctcgtcggtcttcggcaaccgcgaggcccgcatcctcgtcctcggcctcgacaatgccggcaagaccaccatcctatatcggctgcagatgggggaggtcgtctccacgatcccaacgattgggttcaacgtggagacggtgcagtacaacaacatcaagttccaagtctgggatctcggtggtcaaacaagcatcaggccatactggagatgctactttccaaatacccaggctatcatttatgttgtcgattcaagtgatacagataggcttgtaacggcaaaagaagagtttcatgctatccttgaggaggatgagctaaaaggtgcagttgtccttgtatatgcgaataaacaggatcttccaggtgcacttgatgatgctgccataacggaatcattagaactccacaagattaagagccgtcaatgggcgattttcaaaacatctgccataaaaggagagggcctttttgaaggtttggactggctcagtaatgcactgaaatccaaaagcagctaatttaggagcctctgttccatggatcattgcttgatggtaaagaacagggacactgctcccttttcctcacaagtctgcgtgagaacccccattctctttgttttaactccagaagttttataccatcgattatctgtaaagtgcttgttaaagttttcggatacgactttagatgtacctccatattgagatcaagaatagatttgtagaaaatgacgagcaaactgtcaggactcttggtcactggtggctttacccgtaaatcccttctattgtgacatttttttccgatgattgaacacgcctaatttccacct

SEQ ID NO: 23509 - DNA, 1200 bp, Oryza sativa
  ref <308>: DATABASE ACCESSION NUMBER: AK073614
  ref <309>: DATABASE ENTRY DATE: 2001-12-06
gcgcgacgccatcgaggggatgaacggcaaggagctcgacggccgcaacatcaccgtcaacgaggcccagtcgcgccgctccggaggcggaggcggaggcggctacggccagcgcggcggaggcggaggctacggtggcggcggcggctacggtggtggcggcggcggtggctacggccagcgccgtgaaggcggctacggcggtggcggcggctacggtggcggccgtggcggcggcggcggctacggcggtggctacggcagccgcggcggcggcaactccgacgggaactggaggaactgagcggtggggccctcatggccaagttatctatctatctaatcgagctaccatcatcatcatccgatcgttatcatcgttagttttgtgtggaactactatctagtttgtgttactgtgtggttgcccatctgtgtttttgatcgcaagaagaaagctcgtctcgtgtgctcctctgccgtgcctccccctcctcctctggctgccacgccttcccacttcctcctttggccaccacgacagaatggggtggacggggcgaggtggcgcttgaggtggcggatcgaagcagctcaacgagaggagcaattgaggtcgtgctcgcgaccggcggcggtgatgagcgaggcggtggcgcgtggcccaagaggtgccgaggggggctccacctcgtcggggccggaaaccacggacgatggcgccaccaagctgtggatcaagcttgctggtagaggagacacggcacgcgaagagaaagctcctctccctctccctcctcctatcttcctcactaccggcgacctctcctccttccccaacgacagcagcggcgcttctcccctccccttctgcgtcgctacgtccccgtcgccaacatctgcccagccgctgtgtcgccattaccgtcgccggcctttctccgatcctctctctcccttcccggaggggcgcgggacaaaagattgtgggcccaaagctgcaaatctgatcatgaacctgtagcttattttggctccctattagggcatccacaatgtgcaaaaaaaaaaaaaaagtggatagtaagaagtcctattacctggttcaccattgtgggagtagctagtaaaatgggtagtagtatcatccggtagtagtgctactaccaggcaataaggaataaacaaatattaagaccc

SEQ ID NO: 23510 - DNA, 1340 bp, Oryza sativa
  ref <308>: DATABASE ACCESSION NUMBER: AK073615
  ref <309>: DATABASE ENTRY DATE: 2001-12-06
agatgccaccggccgacgccgagccctgcgtcaaggacatccgcgagatcgcgctgcccgtcgcaccgcagtcgccgccgccacccgccgagcacagcgacgtcgacgacgaccattccaacagccccaacctctctgacgtggagatgctgaggatgaagatggagggcatgtcgaaggggatgcgggagaggatggcggagtacagccgccggctggaagccgtcgccggcggcgacaacaacaacgccgccgacgattgccagtccaggaaatgcggcagccgtcacagccgaaagccgagcgcgagcagccagaggagctggagcggcggcagcaccaatgccggcgcgtcccgcgacaccgccgcctcgcacggtcgcagccgccacaccgtggcgccggagaagcatcatcaccatcaccagcagcacaagattatgtctgaagagtgcaaaatggtgggttcaggaagctgctgtgactgcagggaaatcgtggggaagataatggagcaagtaagaacagaatcagagcaatggactgagatgcaagacatgttggagcaggtcaggttagagatgcaagagctgcagtcttccagagatacatggcagcgtcgtgctattgcctctgacatcagtctacgctccctaaattctcaagtgctggagtggaaacatcgcgcgcaggtttccgaacagcacgtggaagatctgcagaagaagatctcggagctggagagcaagctgcacacattcaaggcccatttccccagcccaggtcagcctaaccaagagtggtccgaagcatgcaagatggagaagccgatcagaagcaacaaggctcagcacccgccccggccgtcgcacgagcccggcggcggcagggagaaagagaagcacgtcctcatctgccgcgtgaagcactcgcccagcgtggccgcgaagcgccagccgttccaggagatcggcaacatcagcttgccacggcacgcgccgatgaagcgctgagaggaggaggaggagagagctcgttcgctggccgcagccaaggttccaggcaggagtctgaagagagaattctgtcagctaatctcgcatcttccaagctgcttcgatcaatcaatatctatatatctactaaataaataaattataacccactgatgtgcaatgacggctgacttctcgtcagatctgtagtgagtagcaagtagaagtagctgaggtttgagacggagttaagatccaggtacagtgttgaggaataggtatgatacgtatgtaggcggatgcttcttttttgctgatatatgcagttttgttcctgcttcttcc

SEQ ID NO: 23511 - DNA, 1245 bp, Oryza sativa
  ref <308>: DATABASE ACCESSION NUMBER: AK073616
  ref <309>: DATABASE ENTRY DATE: 2001-12-06
gatcatatcgctcactctgcatggcttcggcttcttctgtcagcttaatgctgctcgtggctgcagctatggcctcagccgcctcggcgcagctgtcggcgacgttctacgacacgtcgtgcccaaacgcattgtccaccatcaagagcgcagtgacggccgccgtgaacagcgagccccgaatgggagcctcgctggtcaggctgcacttccacgactgcttcgtccaaggctgtgacgcgtctgttctgctgtccggccaggagcagaatgcaggcccgaacgctgggtcacttcggggattcaacgtcgtcgacaacatcaagacgcaggtcgaggccatctgcagccagaccgtctcctgcgccgacatcctcgccgtcgccgcccgtgactccgtcgtcgcgctcggagggccgtcgtggacggttctattgggaagaagggactccaccactgcgaacgaaagccaagcaaataccgacctccctgccccttcctctagcctcgctgaacttatcggcaatttctccagaaagggactcgacgtaaccgacatggttgctctctcaggcgcacacacgatcgggcaggcgcagtgccagaacttcagggacaggctctacaacgagacaaacatcgactccagcttcgcgacggcgctcaaggccaactgcccacggccgacgggcagcggcgacagcaacctggcgccgctggacacgacgacgcccaacgccttcgacagcgcctactacaccaacctgctgtccaacaagggcctcctgcactccgaccaggtgctcttcaacggcggcagcacggacaacacggtcaggaacttctcctccaacacggcggcgttcaacagcgccttcacggcggccatggtgaagatggggaacatctcgcccttgactggaacccaggggcagatcaggctcaactgctccaaggttaactagccggtgatgacgagtacgtgatggtctcagggaataaagctaggccccgacattgctgccaatagcgtgcagctagctgtggccatctcatcactttcatggttcaatggtttcatcagcaagtgcacggaacagactagagagtgtaggtgtatgcatgtgtgatgtcatgtaacgagttgccatgcaaaggcatgaggattacggacctatctttcgtcgtaatcctagcagctacagatttcaactgtcgtgttaaccaagtgaagtgctagtttcg

SEQ ID NO: 23512 - DNA, 1044 bp, Oryza sativa
  ref <308>: DATABASE ACCESSION NUMBER: AK099366
  ref <309>: DATABASE ENTRY DATE: 2002-08-28
ggcgccacgatcagatcacattctcaagaacacaaataagataatagcatcatggctatgtgagcttagagagagaataatgcagagccagagagacagagagaggtaggtgattgataataagaaagaagggaagaagaacacaggtctaaccggaggagggcaagagaagatggtggtgatgatgatgcagaagagctccctggacctggtgcttgtgccatgtggtctggtgatcatgttcggctaccacctcatcctcctctaccggattctccgccgccccgccgccaccgtcatcggctacgagaaccacaacaagctggcatgggtccgccgcatggtgcaggcgagcccggacgagacggggctggcactgagcgtcatctccagcaacatctcggcgtcgacgaacctggcgtcgctgtgcatcgcgctgggctcgctcatcggggcctgggtgagcagcacctccaaggttttcatgacggagctcgtctacggcgaccgcacccaggcgacggccaccgtgaagtacatctcccttctcgtctgcttcctcgtctccttcacttgcttcatccactctgcaaggtactatgtccaagccagcttcctaataaccacgctggattctgatgtcccggcaagctacatccagcatgctgtgatccgaggaggcaacttctggtcaatggggctccgtgcactctacttcgcgacaacgctgctgatgtggatcttcgggccaataccaatgttcacctgctcggtgttgatggtgttcatcctgcacctgctggacagcaattccctgccattgcacaaccatcagttcacaattagaaaacggcatgatcagagagctctggcatctacagtggttacaaggcaccccagccctcagaatccgattctcagtaacccggtcttgtctcctgtaactttttcaataaattaatagatatgtttgctgcaaagcttggaggtttgtatggagtaacattacatgagaatatgagattcaggtacaaaattttcatc

SEQ ID NO: 23513 - DNA, 1415 bp, Oryza sativa
  ref <308>: DATABASE ACCESSION NUMBER: AK073617
  ref <309>: DATABASE ENTRY DATE: 2001-12-06
gggctactccacgcatctccactcctcttgcatctccggcgagttctctccggcgagctccctcgccgccggcgatggagttcatcgacgacgactgggactaccagccacgcgcgcgagtcatccactcccgcagcaacgctaactccaacggtgccaccaccgcctcgtcgtcccaaccgacccgctccctcccccacaccgccgcctgcgccgccgcggccgtggcgctcctcgccgcggcgtactacctcctcccggactaccaggtcctcgcatccgtcgtcgtctgggtcgcgtcctccctcctcctcgcccccttcgcgccctcctccgccaccggcggcgacgtctccgtcggccgcggggatcccctccccgagcaggagcccgtcgaggaacccgtctcggatcccgcccccacctcccgccgcggtcggcgccagagctcgagctcgaacccgacgcctccgcccccgaagccctcagatccgatcgcgcctccgccgccgcgacacgcggcggctgcggctgcggctgcggcgacggccgtgtcggatggcggcgaggcggtggaggacgccggcgagtggaccgaccaagagatggacatcctccgccgccagatggtgaagcacccggcgggtgagccgcagcggtgggagaagattgccgcggcgttcggcggccgccgcacgccggagagcgtaatccgcgcggcgaagtccggcggcggcgctgctgccgcgggggcctcgttcgaccagttcctccgcaagcgcaagccgctcgacccgaggtccgaggcgaccgacgcaggaagtggcaatgccggaggaggaggaggggagagtggtgatgggtcttggagcgccggcgatgaccgggcattgctcaacgcgctcaaggagttccccaaggacacggcgatgaggtgggagaaggtggcggtggcggtgcccgggaagacgaaggcagcttgcatgaagagggtcaccgagctcaagcgcgatttccggagcagcaaggcagcatcggaggcagctccatagctgcaaatgctacctagttgcctgcaattcttctttgagagtaaggttttagacagagatttaccatgatgaaacgagaaacgaaaagccatttgctccggggtgatgccaaatgaaggagacaactgaattatagaacagatggtgtacttttattgttttgagaaaggtcaggaaaaaaatccttgatacatgaagatactgggacacacgaaaacaaacagattgccagattgtaaaagaaattgtagccccttgtttggttgtagtgtcactcaagcctccatccaacatgtgttaacattacgtgactgtttctgctcatcttttgatagggctaatacgatacacactgttctcttc

SEQ ID NO: 23514 - DNA, 1791 bp, Oryza sativa
  ref <308>: DATABASE ACCESSION NUMBER: AK073618
  ref <309>: DATABASE ENTRY DATE: 2001-12-06
ggcgcgggcatgggcctaggcaaggcaggtcgcccacattctccggctcgagcggcggccgtcagctgcgcggggctccccgtcggcagcgcgcaccgccggccggtggcggtgcgccagcgggcaagcttcccctcctgcatcttacctgcaggacgccccccaacaagcaggcagcgcaggccatgccattttcagaagaattgaggcaacggtaaatgtgtctttttgtgcacaggcacatatatagaactggagctaaccttttccactaagttcccttggcttcccagtgattggccagaccatctccctacttcgtgctctccatagtaatactgattaccagtggtgccaggacaggatcgagaagtatggtgctgtgtccaagatgtcactttttggctcgccgacagtgctgttggctggcccaggggccaatcactttgtattcagcaaccaggacctcattttcaccgagacaaaggcgatcaacgccctcgttgggcggtccattctgacactctcaggtgaggagctaaagcaagtccgcggtgctctacatggctatctgaggccagagatggttacaaagtatatgcggaagatggatgaggaagtcaggaggcacattgacctgaattgggttggtcataagactgtcacggttgcgccattggcaaggaggcttgcctttgacatcatctgctcagtcatctttggacaaggggtaggtcccatcagagaagcccttgctgccgactttgagacgatggtgaaggccatgctatcaattccagtgaatatacccttcaccaagttcaacaaaggcttgaacgctagccggaggatcaggaaggtgctgaggcaaattgctcgtgacatggaaggagcattgcagcaaggctattctagttcagctgatgatttcttcacatacatgcttgttttgcgctccaaaggcacacactcgctcacagtagaggacattgtggacaatgcaatcgttctcctggctgccggttatgaaacatcgtctgttcttatcaccttcttgatccggtgcctagccaatgagccagacatctttggcaagataactgatgaacaagaggagattgctaggagcaaaggacctaatgagcctttaacctgggatgatgtctcaaggatgaagtacacatggaaggtggcattggagatactacggacaatttctccaatttttggaagcttccgaacagctatcaaagacattgaataccggggctatcacattccaaaaggctggcaagtcttccatgctcaaagtatcacacatttggacgggaagtttttcaacgatccgatcaagtttgatcctactaggtttgacaaccagtctttgatcccaccttattgctttgtgccatttgggggaggtccaagtatgtgccctggaaacgagtttccgaggactgagacattggtagccatgcactacctagtgagacagttcaggtggaaattgtgctgcaaagaagaaggttacaggaaagatcctcttccgacgcctgttcttggactcccaattgaacttgagaccagaaccccccctgaatatgctcatgcttaaaatgatccatatgtttctgtctactaccatgaatttcagtttttggtttctccagatggtttacagagttgggagtgttgtagatgtgaaggttgtggtaaattattcagaaatgcagtgacacgttatcattgtgtagaaaaatgtggactggcgtatagtattataatctaatt

SEQ ID NO: 23515 - DNA, 983 bp, Oryza sativa
  ref <308>: DATABASE ACCESSION NUMBER: AK099367
  ref <309>: DATABASE ENTRY DATE: 2002-08-28
gcctctctcgccgtcgtcgcgcctcgacggcttttgctcccctctcccccaccgcctcctccggccgccgccgccgccgctgccgccgcccgacgacgtagtcaggggggctcgtcaggagtaaggagggagatggggctgagggagaagaagcggaaccagaggcgcgtgctcgcccggcgctcggccgctccccgctccggggagggcaaggacttcctgccgctggaagaaaggcctgggaagaagagggcccgggaggagcagcccgaggagccggagaacacgtccaccgtcctctacatcgggcacatcccccatgggttctatgaggaacagatgcaaggtttctttcagcaatttggaactgttaaaaggttgaggattgcccgaaaccgcaagacaggaaagtccaagcattatgggttcattgagtttgagaaccctgaggtagcaaagattgtggcagatgagatgaacaactacctgctgtttgagcacactttgcaaattgcgattgttccacctgagaaaattcatccaaaattgtggaaaggtgtgcgacgggggtttataccaattgatcgggtagcaattgaacggaggaggctgaacaaggataaaacaatagaagagcacaaaaagttggttgacaaaatcgtaaaacgggatgagaagcgtcgcaaaagaatcaaagctgctgggattgattacgagtgtccaccccttatcggcagcgttcagccttcagctaagaagatcaagtttgaggattagtgccttttgaccagtagtgacaggacagtcgagtaaaatgactggtttgtttttagtgacgaagacgtgtcaacatcattttgttgcgtgtttaatcggtgttgtatcagtgtgaccaaaattgcacaacgaagcaggaaatttctgagattacgactggtatatctttgagaaaatagaaatcatactgtgttttcccgccgctc

SEQ ID NO: 23516 - DNA, 2089 bp, Oryza sativa
  ref <308>: DATABASE ACCESSION NUMBER: AK073619
  ref <309>: DATABASE ENTRY DATE: 2001-12-06
gccctttgcctagcttgactcgtgcgccgcctactttcgccaatcgccatggtgcaagccgcctcgacctcctcgcgctttctccgcacaacccgtctccacggctcctccacctccaccacgccagcggagcccgcagcctccgcgtagccggcggcggctcctcctcctctcatcgcgctatctctctctctcggatttcaggatgtcgatttggcgtgtccctaattatgatgtgttggagaagtgtacagaagatatcctctctctaatcaaaccagtggagggtgaccgaaacaaacgaatatatgcaattcaggagctggcagatacaatctattcagctggggccttgagaggtgcttctgtaaaaccttttggatccttcgtatcacaactttatgcaaaatcaggtgatttggatgtgtcagttgagctgttcaatgccttgaatctccctataagtaagagaaagaagcaagataccctgagagaagtaaggagagctttgcaaaagcgaggtattgctagacatatggagttcattcctaatgcaagagttccagtccttcagtatgtgagcaaccaatatggtatttcctgtgatatatccattagcaattaccctggtcgaattaaatcgaaaatcttctactggatcaatactttggatgatcgctttggtgatatggttttattggtcaaggaatgggccaaagctcaaaacattaatgatccaaaaaatggaaccctgaattcctattcactttgtctacttgttctctttcattttcagacatgtgaacctgcaatattaccaccgctgaaggagatttatgaagggaacatcatggaggacatttcagataagatttcattatgggaatatggcttacctgtgatggatagtgactatctatttgtcagtgccttgctgtttaactgctgcattcacatacagggagggcgtactataatgagaaacatcttgatgaggtttgctccataaatatagaaagattccggcgccaaaatatggggcaaagaaatcagagctctctttctcatctacttgcatcattctttcacaagtttttccgcatcgatgccctttcggataaggttatatcgacttacactggtcggttggagagaatccaggacaatccaagatggatggacaagtcatacagcttgtttgttgaagatccatttgagaaacctgataatgctgctagagcagtcggttcctttgagttccaagatattgtcaatgccttcagcaacgcgagcaataagtttgtttctgatgcgcatgcgcttactgaccgaaatggattattgtcactgctttgcacacctgatgttggatcaaaacttggtggaagagccagtgccagccgttatacaaataccttagtgagtcctcatgacagatttttatgatatcttgactatgtggcacctaacccatacgatgatcatcatcaccagccagccagaggaggaagcaggtcaggtcagagtccacatgggtatactaccaaccggcaaactgcagtgcattaccagaacaataatcatccacaggcatataacacgcagcggcaaacaacagttcatcaccagaaccagaacaatcaacaggtgtatgctgcagggaggcaaacaggaggtcagtaccagaatacccagcgtagcaaggagaacacatcatatcgtcattcaaattggcgagcagcaactacatggcacgagccagtttgtggatgattctacaatggagaatggcagtaacgctctcagaccggcctgaccatcagcatcagttgatcataactgatggtcctaggatagcaacagattatctttagctcttgcctgacaatatgtcaatatgcatcacatttcgattcccttaggtctcgacaaacaatatgtatgagctcatgaaatttagcgcaagttattgccagccagctcgtatggttgagcgagcctggggcttatgtgcattttgagatctagaagatgtattgctgaacgtgcagctctatcacttctgatgttcaatatataactttaggcc

SEQ ID NO: 23517 - DNA, 1714 bp, Oryza sativa
  ref <308>: DATABASE ACCESSION NUMBER: AK073620
  ref <309>: DATABASE ENTRY DATE: 2001-12-06
tcctcctcccaaaccctcaatcgtcgcatcgcctcctcctcctctcgccgctcgcagcgaaaaagccagcgcctcccagcgcccacgcgatcccgacgaatcgaatcgagtccgagacgccgatctcggattcgagaccgttgatttcaaccaacacaagccctcctccggatcgatccgctcctcttcagccatggcaggaatggcacccgaaggctcccagtttgatgctaagcactatgacagcaagatgcaggaactactgcaccaaggtgacaatgaggaattcttcacttcatatgatgaagtttttgagagttttgatgacatgggcctccaagagaaccttctcagaggcatctatgcttatggttttgagaagccatcagctattcagcaaagggggattgttcccttctgcaaagggcttgatgtgattcagcaggctcaatctggaacaggaaaaactgctaccttctgttctgggatcctgcagcaacttgactatggattggtggagtgccaatccctggtccttgcaccaacacgtgagcttgcccagcaaattgaaaaggtcatgcgtgctcttggtgactacttaggtgtcaaggtgcatgcctgtgttggtggaacctctgtccgtgaggaccaaaggattcttgctagtggtgtgcatgttgttgttggcacacctggacgtgtgtttgacatgctacgtcggcaatctctccgcccagaccacattaagatgtttgtgctggatgaagctgatgagatgctctcccgtggtttcaaggatcagatctatgatatcttccagctccttccaccaaagatccaggtcggagtgttctctgctaccatgcctcctgaggcccttgagatcacccgcaagttcatgaacaagcccgtgaggattcttgtgaagagagatgagcttacccttgagggtatcaagcaattctacgtcaatgtggagaaggaagattggaagctcgacactctttgtgacttgtatgagacactggccatcacccagagtgtcatctttgtgaacacccgccgcaaggtggactggctcaccgacaagatgaggagcagggaccacactgtctctgccacacatggagacatggaccagaacactagggacatcatcatgagggagttccgatctggttcttcccgtgtgcttatcaccactgatctgcttgctcgtggtatcgatgtccagcaagtctcccttgtcatcaactacgacctgcccacccagcctgagaactacctccatcgcattggtcgtagtggtcggtttggcaggaagggagttgccattaactttgtcacccgcgatgatgagaggatgctgttcgacatccagaggttctacaatgtgaccatcgaggagctgccggccaacgtcgctgaccttctctagattatgtcttaggaagtaaggttctggataaaagtttgtttttgtttttgttttaatatgaccaactttctcgtttgggaggagtggtaaggacggggtctatttgaattgtggttaaggacggcttccatgtttttctcttttccgtatgcaactatgtttggaaatttttgtagctgttaggctgtgctgcttcctgggctagctgggagagggagacactactggaatatttactttctttattaagctatgcttgccttgtgttattattcc

SEQ ID NO: 23518 - DNA, 1001 bp, Oryza sativa
  ref <308>: DATABASE ACCESSION NUMBER: AK073621
  ref <309>: DATABASE ENTRY DATE: 2001-12-06
gtgataaaatatttccgcagatgcattcttcatggttttgttgttgttgttgttgtaaaggaagtgagagcaaggctagctctccccttctcctccatgcttgcaccatcatggcttctttcttctttagcatcactgcatcatttgtgccactaaagctccttcccttgtgagttgtgagccaatttcttgatgctccccagctcccaaatggccatacaactcacactcctactcatttcatgtagcctttacagtatgtattcttcttcttcttcctcctcctccgcatcgtcgtcgtcttcttctttctccacatcatcctcttatcttgcattgctggttcttgtcatctccactggcctctccttgctcttcaccaacctcagacagatgatcagagcaaggagccacaggggtaagcctcacccttccatggaggatcaggctgttcatcaagaggaggagagcattattgtgccacaagatgaggtggccgacgatgcaccggaggacttgaccggaagcctatcggagtcttcggattctccggtgagcgaagagtgcaccgaggagggctcggtatccgatgacggtgacgatgatgacgacgagagcctcattgagatctcccttgttgatggccactatttggggcaagagaagaagaaatgtgcatggaaggagcaggacctcctctccgagttcttgccggatttgttgcttgacaagagggacttcatggacatcttgtcagagattggtgaggaagacaacctgattgagattgacattgcaaggggatccatcaagtgctcaagctttggcatcaaggcatgaatctaccaaaggtttggtgaagttcaaaatcaaaatctttctctgcatttgcttcaaagatttgatcagggaaaggggagtaggttgtatgtacctggcctacatgttgtgcaaggctctttgtttttggcaaagcttaaatttttattttgtgaatcttc

SEQ ID NO: 23519 - DNA, 1016 bp, Oryza sativa
  ref <308>: DATABASE ACCESSION NUMBER: AK073622
  ref <309>: DATABASE ENTRY DATE: 2001-12-06
ggccgactttgcacggggaactcgccgtcccggcctcactcggccagccatggagctcgacctcccgccgaagcaacaagccccgccgctcgccgacctcgccgttgccatccaccgggccgccgaggccaccaccgcgctctccgcaccctcctcctcttcccaagccgccgccgccgcggtggtcgccctccgtgacgcccacgccgctataggcggcttcctctatcgcctcgacgtctcagtccctgcctcttcttcgtccagcgacgatcagccgatggcggacggctgcgaggaggagggggagggggagcagcagatggtagaggaggtggaggagggtctccgggagtgcgccctgcaggggagcaagcggcggaagcggcctgtgccgccgtcgtggcccctagggcgccgctcgagtggcggttgcgtggtgccggaggccgcgccggctcctctggacgtggaggggcggcggcgcgctgccatggatctcttgctacagttccatgggtaggatgagtgcagggttcattggcacaatacgaacgaaatgatgaggcgcctactgaatagtccataccaagtttgtaggtcatacactcgtgctgttcttcacgaagatatacacaaacatatcaaacaaaccacaagcaaataggtgaaatcaccaaccttcccaatactgaggcagctagaaatcaacacttcagcagtgagtgtgagacagagctagtatcaagcagtactcatcaacataatgagccacttagccttacagattgtgttatttcccaaaaaataaaaagtgagatgaaagactcagatttgagtcccaagattgttttgtttttcagtaaatgggctgaatcatttgtctcctcaggcgttaattcgttatcccctgtacctcctacgccaccagtcttatgagtggattgacagttgcttgctcaaacatgttcctggaaggtatttattttacatctaatattttttatttggggttc

SEQ ID NO: 23520 - DNA, 1127 bp, Oryza sativa
  ref <308>: DATABASE ACCESSION NUMBER: AK073623
  ref <309>: DATABASE ENTRY DATE: 2001-12-06
gagattccggaacttgtccaccacaccacctcgttgctcgcatctcttcctgatcccccccgttggattcgattcggggcgtaaaatttcctgctctgcaatccgtcgcaatcaagcggccgctttccgaggccccgggctcccttcccttcgcatttatcctcgctgagactcgagaaacaccgcgaccaggagaaatttcagcaggagcaggcgatggcgagcccgcagtgctgcgcgaacccaccgacgctgaacccggccggcggggaggggaaggtggtggagagcttcggcgggatcaaggcgtacgtcgccggcgccgcggagtccaaggccgccgtcgtcctcatctccgatgtcttcgggtttgaagcgccgaacctgaggaagatagccgacaaagttgcctcgtctggatactttgttgtggtgccagatttcttacatggggatcctttagtacctgaaagtactgagaaaccgtttcaaatgtggataaaagaacatggcccggacaaagcatttgaagaggcgaaaccaattattgccgctctgaaggagaaaggagtgtctagtattggggctgtaggttattgctggggtgcaaaggtggtggtagagttagtgaaagctcatgagatccaggctgctgtgatgtgtcacccctcttttgtgactgttgatgatatgaaagaggtcaaatgcccaattgctatacttggagctgaaattgatcgtatgtccccaccagaagtggagaagcagttcgagcaggttctttcttcaaagtcagggattggccactttgtcaagatcttccctggggttgaacatggatggactgtgagatacaagaatgatgatgcagctgctgtcaagagcgccgaggaagccctggcggacatgattgactggtttaataagaacctgaagtggatttgacatatccgctgtccacgatcggtttgtgtattgctcatgtttcatcgcaagcatcctgaatttacggttgagtagccttcccattatgtttgtgctagtagtgtatatgctttgcttgtgttaggaatttgctttgtgtcaacctgaacttccacttctgtaataaaaatggatgggcgagc

SEQ ID NO: 23521 - DNA, 2587 bp, Oryza sativa
  ref <308>: DATABASE ACCESSION NUMBER: AK073624
  ref <309>: DATABASE ENTRY DATE: 2001-12-06
gaggctttggattttcctctcgtgttctttagtctcagcctattagaggtttgaggaaagttttccatttcttagctctttttgcttccagcttcttgggattgctctgtttcttgctgagaattggctcgatttgggaggcctcatcttgtgttagctttcaggttttcttgcctgaaattgaaccgattgggtaggtttttaggtgcttcagtttcagttgctagctcgtcaggcttgttcttgggctcctgccttgaattggggtcaaattgggatgcttctgggtgctttgaggatggaggagaggaagggattgatggggagggagagggatcaattccccgtcggcatgcgggtcctcgccgtcgacgatgacccggtgtgcctcaaggttcttgagaccctcctccggcgctgccaataccatgtaacatcaaccaaccaggctattactgcgttgaagctgctcagggagaacagggacatgtttgatcttgtcatcagtgatgtccacatgcccgacatggacggatttaagctccttgagcttgtggggcttgaaatggatctcccagtcatcatgttatcagtaaatggagagacaaagactgtgatgaaggggataactcatggtgcctgtgactatcttctaaaaccggtccgaatcgaagaactaaggaacatatggcagcatgttgttaggaggaagttcggtaatcgtgagcgaaacaatcttgatttctccaaagaatgcaataagccgcaaagcgcggatactgatcatggaccataccaacctacctgtggttcttctgatcaaaatgggaggtccagcaggaaaaggaaagaactacacggcgaggacgacgatgaaggcgatgataatgattatcaagaaaatgatgagccctcagctgcaaagaagcccagagttgtatggtcagttgagctgcaccgaaaatttgttgccgctgtcaaccagcttggaattgacaaagctgtaccaaaaagaattcttgagcttatgaatgtggagaaactcaccagggaaaatgttgcaagtcatctacagaagtacaggctttacctcaagagactaggtgctgtagcatcacaacaagccagcattgttgctgcctttggaggcagagatccctccttcttgcatattggagcatttgaaggactccagagctatcaaccttttgcaccttctgctgctcttccatctttcaatccacatggcctgctaacccgaactagcgccgccgcggctttcggacttcaggagcttgctgccccctccagcacaattcagacttctacaggaaatgtcacagttggccattgcttggaagaaaaccagcaggcaaatctagcacaaggcttgaccgcggcgatcgggcaacctcagcttcaacagaactggattcatcaagaaggtaatggtctgtctgatgttttttctgggagttctctgaccaacactttgtccagcacactccaaagagttccaagcagttcattgccaccacaagaactcttggagtgcaaacaagccaaagttagcatgccgccatcgatacggataccgccttctagttcagcacttcttgagaggactcttggggtttccaccaatttgggagattctagtatatcccagcagggtgctcttccaatagatggtggattttctgctgacaggttaccattgcacagttcatttgatggcgctgttgcaacaaagctagatactagtttggcagcttcacagagagagattggccagcaggggaaattttcagttagcatgcttgtatccccttctgacaatcttgcattagccaaaaatgccaaaactggagctagttcttctggcagtactataattctccctcttgatactgcaagacattcagactacttgcagttcggaggtgcaagcaattctttgcagaaaatggatggacagaaacaagatcatatacagagctcaaacattatatggagttcaatgccaagcactcaactgccaagtgatacccaaattcataatactcaaaaccaaagattggacagcggaagttttaaccataaaattggtgcccatttggctgaccaaacaaatgcaagtgcgtcaatacttccgcaaatgaagtttgacacaagaatatcagaagagaaaatgaagcagaagaatacatatgacttgggtagttcaaagctgcagggtggatttaattctagtggctgcaattttgatggccttctcaattccataatcaaagtggagaaggatgatctcccattcatggacaatgaattgggctgtgacctttttccacttggtgcctgcatatgaatccatcatttcggacaccaaagattttgcataatctaaaagagtcagctgtgctgcctgatctgtgctacttcatccaggctttgtgtatactaggatctagggacagtagtggcttgtaatcttgctttatctcttctctagggttggctatggaagtatggttagatcaagataagaagaaaatataatgctgtaatgtcagcgccttttctagcc

SEQ ID NO: 23522 - DNA, 1380 bp, Oryza sativa
  ref <308>: DATABASE ACCESSION NUMBER: AK073625
  ref <309>: DATABASE ENTRY DATE: 2001-12-06
gggcggcgaatcctctcctcccctgcgcggcgaatcgtggccgcgccgccacccgtcgtccaacgtcgccgtcggcgagggaggccggccgtcgctctccgagtacgggcgtgcaccggggacccgggggctgaaatgccttcagatctgagagataagggcatctcaagatgaaagaatgtccctgctgagtagtaatcaggcaatgaagactgaagactaagtgaagacgaaagactggttgaaccaaatcaacaaggcacaatttattaaaggtgaaggtgggacgtacgtgtaggcatgtgcagcgacacctctgggtcgccggcgaagaacatgacatccgtctggtaccacaggctgcatcgcatcccgagcaccgcgccacccgtcaggccaccgccgaccatcttcttcccttcgtcgatgatgccgtccaggcaactccggcaattctccggcggcatgccgtccgtgcactgcgccagcgcatacaccgtctggctcttgaggtcgaaccaccccctgcccgtcaagtagttgaccggccgtctactcaccacggctgcagcgatcttctccatgagctcagagaaaagctggctgaactgcgcgcgatcagcatccggcggagggttcaggtaagcgctcacagtgcactccggcgcgttgctgaagctggagatgaaatccttgtcggagaagcttagcagggcctggaaatcatggtcgtacaaggtgacattcttctggttctgaaagtagccagagtcatcgccactagttccattgatgctggccgtgtcaagcactctctggaggcgggtagcgcagctctcggcggaggagtccccccggcagagcacggcgccgtatactgtgtcaggaccggccgccccggctgtgccgttggcagagtgcagctgcgtctggttgacattggtgatcaggtttttggcgagctggagcaggttggtcttgtaggtgccctctggcatgtgtgtgatggtgttcgcgttgctgcagaagggaagctgtttagctaccaacagattcggggtagagaggagaagcattaggagggaaacgatcagcatctgcatgtttgaggctttttcttctgcagggagcttatggaattgtgatgcgtatggaacatggcttggatgagtgcatattcttaagtactgtttggttggtgtctcgttttgtcaggacaaagtttttagtttcagtagaacgaaagtgacttcggctctagcttggactttgagtaatttaagtggactagtccaaactaaacgagattggaaagtgtggtgaaatttcagagaatactaaatttgtctactgggttctcttttggttggtttttgtccg

SEQ ID NO: 23523 - DNA, 1284 bp, Oryza sativa; identical to SEQ ID NO: 17223
  ref <308>: DATABASE ACCESSION NUMBER: AK099368
  ref <309>: DATABASE ENTRY DATE: 2002-08-28

SEQ ID NO: 23524 - DNA, 981 bp, Oryza sativa
  ref <308>: DATABASE ACCESSION NUMBER: AK073626
  ref <309>: DATABASE ENTRY DATE: 2001-12-06
gggggtattgagctgatcagctgaacagaactgcccccaagacttgtggagttgtagcgaagctgcaagagtgacgcggcggcggcgatggacggcggcggggtcgaggcggcgatggacggcggcggggtcgaggcggcgacgacggcggcgtggatggcgcggcaccgggggatgtacgagcgggccacgaggcacccgttcaccgtctccatccgcgacggcaccgtcgacctgtccgccttcagacgctggctgggccaggactacatgtttgtgaaggaatttgttgcgtttctagctagtgtactgctcaagtgttgcagacagtcagatggctcggacatggaaataatactcggtggcttagcttcccttagtgatgagctctcttggttcaagaaggaagctgaaaaatggagtgttaatctagctgaagtttctcctctgaaatccaatacagaatactgcaggtttctccaaagcttcagcgagccagagatcagctacgttgttgccataactaccttttggataattgaaaccgtgtaccaggatagctttgctttctgtatagaagaaggcaacaagacgccacctgaactcctggggacctgccagagatggggaagccctgagttcaagcagtactgccagtctctgcagagaattgcagatcgctgcctcgcagaagcgtcagctgatgctgcgaggagtgctgaagaggccttccttcgggtgcttgagctggaaattggtttctgggacatgagctcttctcgatcatgaacggcaacagcatctcgatcatgaactacttgggagaaataatcgaataatggtgcagccggttccataccgaaccctgcagtgtactactgtgttttcctcttccttttatccccatttctctccttactcccatgaacattgatgtatcatcgtaactatgaaataaatgaaataatgccgtttcctcct

SEQ ID NO: 23525 - DNA, 1010 bp, Oryza sativa
  ref <308>: DATABASE ACCESSION NUMBER: AK073627
  ref <309>: DATABASE ENTRY DATE: 2001-12-06
gagatgacctcgccgccgccgccgccgtcgtcgttgctccgccgcctcccgaccacgcgctgctgctgctttgcctccgcgtcgagcggctggagcgcgagtgcgagcgtgcggctcggatccctcggcgggaagcagcggcgggggcatcgcggcgtggcggtgatggcggcggcggcggcagggggaggaggcttcgaggcgcgcgtggcgcggatcgcgtccaccatccgcgtcatccccgacttccccaagccagggattatgtttcaagatatcacaacaatgcttctcaagccagatgcatttcgtgacacgatcgagctcttcgttgagcgatacaaggacaaagggatcactgtaattgctggtgttgaagctagaggattcatttttggtccgcccattgctttagcactaggtgcaaaatttgttccattgaggaagccaaaaaagttacctggtgaggtgatctcggaagaatattctttggaatatggtacagataaaatagaaatgcatgtaggagctgtggagccaaatggccgggccgttgttgttgatgatctaatcgctacaggtggaaccttatctgcagccgttaaacttattgagcgtgctggagcagaggttgttgagtgcgcatgtgtcattgaactaccagaactgaagggtcgggacaagctggggaacaagccagtttttgtccttgtgaaggcagactaagcggaatgaaacaactaagggcctctcaagttgtccctattaatatcagtgtccttctcgaagcatgttggaagcaactaagatatcggtcgtgacaatattagcttgttctatccagtgctctgcaataaaagtctcatctttaaatttgtaggcacatgagttatttgggaattcggacttgaatgatccttgtaatacatcaaaacacggcataattttttttaaaggagtgccaattattcatggggaatgagaatcacctattttggagtttgttgttc

SEQ ID NO: 23526 - DNA, 1197 bp, Oryza sativa
  ref <308>: DATABASE ACCESSION NUMBER: AK073628
  ref <309>: DATABASE ENTRY DATE: 2001-12-06
ggttcgtcttcctccgcttccgaagagacaaggtgagagaggagggtttaagccgagagagagaggacgcgaaggcgacgatggcgtggagggggctagcgagggatgcggcggcggcgtatctccggcggggcggcgctcccgcgcacgtcttctccgcggcctcccgcgctccgggccccgttgtcgccaaccctggcggtgagctccgcgcgttcgggttgttccggtcgccgatggccaggcgcgccgatgccttcgaggtcccttcggctgctgggaggcacggggcgcagggcgtgtggtcgcgcagctcggttccggcgttggttcgggctggtgcccccaactccagagctctccctttcctcgtggggagagtggttcgtggattctatccgcagctgtcaggtcacaagctggtaaagggacttgggatgggctccacccttgctgcgacgttttgttcacagaaggttgcatatgctgaagaagttgctgaacagccatcagaaggcctcatcggcccctcaacaaaacatcagattagcaaattatggactataatcaggaaatatcagctgcctgttggtttgattgctttgatcgcacttggttggcagaatccattgggtcttttcatcaacgttttgcttattctctacagttctaggcctagcccatattcaatatacttgtttcttcaggaggttcgtcatggagagatgcatcaaaatcgtgcattttggaaggaggaggctgtgcttacaaggaaagttgatactaaagattacaagctcttttccattggaacagttgaatcagcagacagagaagtactgcacgtcattgggattctgggcaactggtggatctatcgtgcatcgtatgggaagtgagaggggttggtatagcatctcatattctgaggagcgtttaaccaactagtgtgcaaacatcagaatgttgacagtagataactagaatataggcagtttcattaggcaactatggcactagatattttaaaagcgatggtgttcaatgtaattctaaaataccatcagggttgaaaacaggtcattctcaagggggttgtactggaaggagtttccacatctgactttgtaagttcatttgaaatatcttattctcttggtccaagaagactgtttcttggatgcatgagttaagctg

SEQ ID NO: 23527 - DNA, 1301 bp, Oryza sativa
  ref <308>: DATABASE ACCESSION NUMBER: AK073629
  ref <309>: DATABASE ENTRY DATE: 2001-12-06
ggccgccccccaatcccaaaccccgcagcagctccacctgcgccgccgtcggatcgacgggaaagaaccgcggaccgccgcgcttgcaccagcatccagatcagcgccgcctcgccgatctcctctgcgccgccgcccacgatttgctgccggcgctcacaaattgtcgtcgtcacgaaatcgcaaccctaatctccccacaccgcgccgccgcccctcgcctctccaccgcaccggtctcctctgcgagcgccgtcgctccctgcctctccaccgcgccgtcgtcctcgccgccaccctacggctctccaccacactgccatccactacgccaccctccgctcgtcgtgccgcccacatcgacgggagactgcccgttaagggcgagcccgtcctccgtcgtcttcccgtcgcacgcggaggcagcgatattctccttcgcccacgattttcttcgtcttcttcgtctctctccccttctcccacggcttgctgctgctgcccatatcagccggaccccatctccggcggcatccctccccaggcggcaggcgacggtgtgtgctgatgcccccacgtcggcggtgtcctggcggtcgtctcccgtggcggcggcgtcctgtcctgtcaagcggcgtgctgacaacagaaacacttataggatttggcgctgaaaattttttatgccctttgaacaacaaagcatgttcattatattgacatcaacaaaaatttctgctatcagatgtgctgcaaaaatcgagatgttgaggttatataatttagtgctgaaaagttaatgttctgtttcaggtgcctgcaatgattttatctagacatatgctggtgctgagtccattgcttgccttgatgtcggatcaactgaggaagctccctgcatttatgcaagatggcctttttgcgagcagttaggagcacaagtggactaggactgagcatgctaattcaaacaggcatccagtgtgaactatgtggggctgtgggcaaattcagtaaataacctgctcgtggcaaattgaggactaaaattttgattttgagcaccatcggtgcctttttggtgtgggctgtcaagaccatcgacagcttcctcccttgtccccaccggccatccgctccgcaaggtgatagacgttttccttgtatcgtgacgttcatgaataatgtagtcatgccatatgaagcaattgtatacttgtatgtgacctttttggcggttgattgaaaagtaaatgattggatctgggtgattgaataaagtgcttttagtattcagcttg

SEQ ID NO: 23528 - DNA, 748 bp, Oryza sativa
  ref <308>: DATABASE ACCESSION NUMBER: AK073630
  ref <309>: DATABASE ENTRY DATE: 2001-12-06
gaccagcaccatcgccgctgagctcccacgccggcgacgagggctgtgttcctcagctctccgttgcgtcgatttcccccgcgcttcctgttcacccccaccaccagtccaccaccctcgctcgctgcctaaggcgcctccgttggcggcagcgaagatcaatggcgacaggcgcgaaacaaaggctaacaaaggcgaaaaagaagagaggctaaaaggctatggtggagcaagtgggggcgttccggaggagggggcaagcttcggttgtgtggtgttcgttggctgcgctggcaagccggcttcgctggatgaggacgcgcgatgcgccggtggtgcaccgctcgcctggatcgacaagcctcgcggtggaggaagaagtcatcggagacggagaagaacacacgacgaaatcgagcctatagcacagtaagaaattcgagtgaaatcgcctttacaaaaaagcacttggcagaagcatagcaattgtcccattcagaagttggtagcttttcttggatactagttgggaaaaaaatgggtattctttttatatattcgatattgttacatctattgtgaattgtgtttgcttgcatgttgttgaggaataatatcagaacctacaagtaatctcatgtgttcctagcgctttggctaatgctaatgccgcatgatgtgaaatgtcgataattcaacagcacttcttctgttgacgacatacaataaagtggtcaattattgctcc

SEQ ID NO: 23529 - DNA, 1059 bp, Oryza sativa
  ref <308>: DATABASE ACCESSION NUMBER: AK073631
  ref <309>: DATABASE ENTRY DATE: 2001-12-06
gacttgaccagagacgagcagcaagggggcagttggattggattagagggtgcttttatatagaggagcacgaggaggaggaggaggagggccatcaagcatatccatctccgattcacagattctttctggagatccatcatccagcgagagcgagagcgagagggagaggaagagggaaagccgccaccgccatgttggggcatctggttgggctggtgaaggtgcgggtggtgaggggcgtcaacctcgccgtccgcgacctccgctccagcgacccctacgtcatcgtccgcatgggcaagcagaagttgaagacacgagtcataaaaaagactaccaatccggagtggaacgatgaactcaccctctcgattgaagatccagcagttcctgttagactggaagtgtatgacaaagacacattcatcgatgatgcaatgggcaatgcggagctggacatccgcccattggtggaggttgtcaagatgaagattgagggtgttgctgacaacacggttgtgaagaaagtggtacccaatagacagaactgcctagctgaagagagcacgatatatatctctgaggggaaggtgaagcaagacgtggttctcagactaagggatgtggaatgcggggaaattgagctccagcttcagtgggtcgacatcccaggttctaagggtgtatgaactctgtactctgcctattgcttacagtcttgcatagctcgcaagtccaactctaagtttatcagtggacaatcaaataagcaacagcttatattgatgagattcttttactgtccttgaggaggcagatacctcccagtgcctcctcaatggctgtaaaatcattcttatgttgacacagcaagtgtctcgaagatcccccactaggtgtttgggcagagcaaagttgtacaatatgtctgcaaagtatagtttggtgttaccctgtctgtagaaaaataatcagtggcaggggttgtaactattgaaactttgtctgtctttcttcttgtacgccaaagaccaatgctatctgcgattaatcttc

SEQ ID NO: 23530 - DNA, 3289 bp, Oryza sativa
  ref <308>: DATABASE ACCESSION NUMBER: AK073632
  ref <309>: DATABASE ENTRY DATE: 2001-12-06
ggtccgactccacccgcggcttatccctccttttttttttctttttcccttgctctcctccgctgtttgcttccccgcctcgtcttctcggttttttccgtgcggtcgaagcatcggttccttataccatacctttgcccccgttcttgattcggttcttgccaacagctttgtaacttctcgggcgcctcattggagtttctttgtgagattcgcaagggggagaggaggagtcctttggtcaagcccctgtttctccatttctggttctctgtccgtgcagatttgctgaggaagtagttcttgggttcatcagggagcgagaggtgcgggatttgaaggggaagccgcggggcggccgggcctgggcgccggggcccatggggaagccggcggcagccaagaagccgccggcgagcgcggcggtcgacggcgacgaggaggtgttcctggagctgtcgcgggagctcaaggaggagggcggcaggctgttcaaccggagggactacgagggcgccgccttcaagtacgacaaggcggtccagctcctccccagcggcggccatgccgacgcggcggcacacctccggacctgcgtcgcgcagtgctacatgcggatggcccccgccgagcaccaccgcgccatccacgagtgcaacctcgcgctggaggcggcgcccaggtacagcagggcgctgctgcggcgggccgcctgcttccaggcgctggaccggccggacctggcttgggaggacgtccggaccgtgcttgcctgggagccggctaaccgcgccgcgcgggagatctccgacaaggtcagggcggcattggaggagaagggcgttcttgtcttggagaaggaacccgtgccgccgccgccggagcacaaggctgttagtgcgaagggacaggggaagttgaagaaatctcataaacagtgtgattctgctattgaggggcaggagctgattcatgtcgaagattatgagcaaagtgagaaaacagagctgaagattaatggtcaggagaatggagaaaatcgtgccgggaaggagcaatttgattgtaatgtacctgtcaagcaagaaattcgaaccgaccagccggaagcaaatggagtaggaaaacatcaatatcatatggacgataaggaaaacaagggtttagataaggaaggaaagaatggcaaaccagggaagcacagtgcaggaaagaaaattaggcgtgctgacgccaagaagcaaaagcattccgctatggagccagtgcatcatgctgaggaaaatcgtcatgagcgttacacggagaccagtgtccatgtcaaggaagcaatgaaggatctgaagctggtctttggggaggacattagatgtgctcaaatgccagctaactgcaatctgtcacaattgagagacatagttcaaaacaagtttccatcgttgaaagcgttgcttattaaatataaggacaaggaaggtgacttggtgacgatcacttcatcggatgagcttagatgggcctacagcttggcagatctggaagggccaattcgactgtacattgtagcggttgatcctgcacaagagctaggtgtggatgtggtcaggagacgctcttcatttgcctcattagagaaagcttattatagcatgtcggagaatgggagcagtaggcatgatgatgatcacaactgctctattgatgactggatgatacaatttgctcggctattcaagaaccatcttggttttgattccgactcgtatttggatctccacgaccttggcatgagattgtactatgaagctatggaagacactgttgcaagtgaagaagcacaggaaatatttcaagttgcagagctaaaattccaggaaatggcagcattggctctgttcaactggggcaatgttcacatggcttctgcgagaaaaaggcctcccttgtcagacgatgcttcaatggaatgtatacttgagcaggttaaggttgcttatgaatgggcttgtgcggaatatgccaaagcgggcgcgaagtatggagaagctgtgaaaacaaaaccagatttttttgaaggtcttattgcacttgggcagcagcagtttgagcaggccaagctctgttggtattatgctcttgcatgtaagatagacatgggaactgaggttttgggattatttaaccatgcagaggataatatggaaaagggaatggggatgtgggagggaatggaaaatacacgcttgagggggctctcaaaaccaagtaaggagaagatcatatttgagaagatgggcatagatgggtacatgaaggatatgtcttccgatgaagcatttgaacaggcttctagtatccgatcgcatgtaaatattttgtggggcaccattctttatgaacgttctgtagtggaatttatcttgggacttcctagttgggaggagtctctaacggttgctatagaaaaatttaagactggaggtgcttctcccgcagacatcaatgtgatggtaaaaaaccattctgctaatgaaactactcaagaaggactgagttttaaggttgaagaaatagttcaagcatggaatgaaatgtatgatgcaaagaagtggagaaatggagtgccatctttccgacttgagccaatattccgacgtagagctccaaagttgcatcatatgctggagcatatacactatgcttgaccctctaatatatataagaggctctggtttgtcatcatggagaagttatttcatgattttatcaggtttgtttattctgggagctgtactgcacttactcgtcccgccaaaagaaaaaaatataagaaaaagaggaaaagaaaaggaaatattctcttcaacttcaagctacagattggttgagagtagtgtgtaggggtttcctcaactgaaaagacaaaaagaaagtgctaacaatgtggcttgcgtttgctgttatatttggtgcttcacgcaaccttctgcttgatgctatatttcctttcaagagatactgtggatattttgatgttgcacttcctcatatttcagtcatggaagtgcttcaagttgttaggtcatcataggaaatttctgaggatacactaattgtatttcacttgtgtagaagatcaccccagctgtgttttacacttttactccaggtcacacatgaagaaagctgaatacagttcgtgtaacatgtagctgaagtagcaggcacagaatgcttgtagtctaattgtgtgaaacagatgcttttattgaagaagttatcagatact

SEQ ID NO: 23531 - DNA, 1970 bp, Oryza sativa
  ref <308>: DATABASE ACCESSION NUMBER: AK073633
  ref <309>: DATABASE ENTRY DATE: 2001-12-06
ggcgcgttgtttcttctcctctcttcgtctctctctctctctcgtcgcgttggatttgacgagctcgtcaccaccggctgcggcggcgaggcaggcatccgcactcctcggcgtcgggccgtcgtcgttgtccgctacctggaaaagatggctggtggctttagggtattgcatcttgtcaggccttttctagctttcctgcctgaagtacagagtgctgataggaaaataccatttagagaaaaagtgatctacactgttatttccctattcattttcctggtatgcagccagctaccactgtatggcatccattcaactactggagctgatcctttctactggatgcgtgttatccttgcatcaaaccgtggtactgttatggagctgggtatcactccaattgtgacatctggcatggtaatgcaacttctagtgggatcaaagatcattgaagttgacaacagtgtgagagaggatcgtgctctgctgaatggcgcacaaaagttacttggtatcctgattgcaattggggaagctgtggcatatgttttgtctggaatgtatggcagtgtaagccagcttggaactggaaatgccatcctcattatacttcagcttttctttgctggcatcattgtcatctgtctggatgaacttctccagaaaggttatggtttgggttctggcatttctctctttattgctaccaatatctgtgagaatatcatctggaaggcatttagccccacaactatcaacagtggccgtggtgctgagttcgagggggctgtcattgcattgttccatctgttgattactagaaccgacaaagtccgtgccttgcgcgaggctttctaccgccagaatcttccaaatgtgaccaacttgcttgctactgttttagtcttcctcatagttatctacttccaaggcttccgtgttgtgctaccagtgagatccaagaatgcccgcggtcaacaaggctcatacccaattaagctgttctacacttcaaacatgcccatcattctgcattctgcactgattaccaacctctatttcatatcccagcttctctacaggaggtacagtggaaatttcctagtcaaccttattgggaaatggaaggaatctgagtactctggccattctgttcctgttggtggtcttgcttactatgtaactgctccatcaagtttagctgatgttctcgcaaatccattccatgcactgttctatgtggtcttcatgctgtcagcttgtgctctcttctcaaagacatggattgaagtatctggttcatcagcaaaggatgttgctaaacagctcaaggagcaacaaatggtgatgccaggccatcgtgagtcgaatttacagaaagaattgaacagatacatccctacagctgctgcatttggtggagtctgcattggtgcattgactgtcctagctgatttcatgggtgcaattggttcaggaactgggatactgctcgctgttacaatcatctaccagtattttgagacattcgagaaagaaagggctaccgagctaggtttctctgggttttgatcaccttagctgtataactcctagctggaacttcttgcgagtcgcagtgctgcttggccggctgtcatgtaatgggagacctcagaatcagcttaggttgccgacttacttacaatgagaatcttgtagcagtatgcgttttgttcatgccagtgtatggagttatttgtcctgctcctgccccgagtacagcaatggccatcgtagtaactggatgtgttgcgatcaatttttattatcttttaaactggatagtatatttgattcctgatctcttttttgctgcaaccttcgtgactaatgtttctgatcactggaaactaatctggtgttatgtctccctgctgcttctcttattgcaagtgtttggccacatggataaaatgttaactttc

SEQ ID NO: 23532 - DNA, 3008 bp, Oryza sativa
  ref <308>: DATABASE ACCESSION NUMBER: AK073634
  ref <309>: DATABASE ENTRY DATE: 2001-12-06
gactctttctcacgcttcactctccttcctcccaccatcccgatctccggcgatgtcgctccaccagcggccgcaccagaagccgccggcgaccgactccctccccgcctccgccgccgccgccgccgccgcgccttctcgcccgctcccactcctcaccctcccttacctcttctccctcctcgcgctcctcctcctcctcgccctcctcttcccctggggccctcccagccactcctctgcccccgcctcgccgtggcgggggtacacgctccaggaggccgccgccttcgccgctcgcgcgggaaacggcaccatcgtcctcgccgccgtctccgggccctacctccccttcctctccaactggctcatcaccgtccgccgcgccggccgcgccgaccaggtgctcgtcgtcgccgaggactatgacacgctcgagcggatcaatgcggcgtggccgggacacgccgtcctcgtgccccccgcgcccgacgcccaggtcgcccacaagttcggatcccaggggttctttaacttcacctcgcggcggccgcggcacttgctgcagattcttgagctagggtacagtgtcatgtacaacgatgtcgacatggtgtggctcgccgacccattcccgtatatcgtcggggatcatgacgtgtacttcatggatgatatgactcctgtgaagccattggatcattcacatgagctgccaccacctggtaagaaggggcggacttacatctgcagctgcatgatattcctgcggccaacggaaggggctaagctgctattgaggaagtggattgaggagctcaaggagcagccctggtcaaagaagcagaaagcaaatgatcagccagcattcaactgggctttgaacaagactgcaggacaggtagatgtgtatctgctgcctcagtctgcatttccaactggaggtttatattttaagaataaaacatgggtaaaggaaacaaagggcaagcatgtcatcatacacaataactatatcacaggatttgagaagaagataaaacggtttcgtgatcatgggctatggcttgtcgatgaacatagtgatgagtcaccacttggtagaatatgagcaagctggcaaagctacaccacatctgtccttgcaacagcatcaaacttttgcagctggtgtttaactggttgggattgcggaaccgtgggattgatttgccatccgccacacaaaaatacagcaactggatatgtgcagtagtttttaattgtacatcaagcccctttcagagcgacctgttgtcatgatgattatttttatttcattatcttttacgaatacggcagcagtaagatcttagggtgagaatgtagctatttaagggaatgtggccacaaatattagcgagtcaagtagtaactcattggtctatatgtatagcatggtaattttgttaacctgtaggcattttttttgacactggattgtgtttaatattattctttttacctcctttcataaagaactctaactgtcatgtgtgatggcctgctgggtgtccacaaaactgtgctaatgatgacttgtaagttgtaattccgtatataattatttaacatgctcaggtaatcccttgcttttctttaccatcgcaatgcaacacatgagatgagtagacctttcttagtatgcattaaatatggcatgcctctctgaaacatacaggacacacaggactatgatgaagtggcacaagataagatggctacatataagagggatcaggattcacggctgtatcatgtgaattttggagcataaagcttcagttcgaggctttgggccttgtgaccttctcgtctctccatgtctattatttttcttcacacaaacctgcggagcttgatgcgtcaggatcgaatcgcctgttttggctcattccattccagccaaaacgcttgcgattggagtaagaatccaagaaccagtgtggctgctgccattggaccctttccttctctggtgcctcccaactttgcttccagcagcggtaatgccgttgcctttgccacacacaacgaacaccggcgcgcacacatgtatatatgcttctgcccatgctcggatctgcacagaaaacaccatatttcttccttgtgatcacgagctaaccttgcatctctcattgtctttggcaaggatcgatgggccaggctgctgccaaggcgaagcaaggtggcgatcaggcagagaacaagactggcaaggacgagaaggttgcgaaacctaaggatgccaaggatctcaccgacttcatggaaaaaactacgactcgatcaaggacgtgacaagcttcgaagatttctaccatgccttctacgagctcatcgaaaaattctgtgaggaacgtgggcaattgcagtacaggataccggaaaaagcggaacttcagaagcagtacgagagggtgaacaagagcccccagaaggggcagaacctgagcaggaagcagttcatggagctggccgggcaggtgatcaaggtgaacagcttcaccttcggcaaggccaccatggacgtgctggtcgtcctcttcggcgcccccgtctgcgccctcctcgccaagagggtcgtcccgggcctcaagtccttctccgacgacgtcgtcatccccgtcgccacctccggcgccgtcgtctacctcgccaagaccaacaagctgtgatcgaggtgaatcgatcgttccagaatcatatccagactatggctaacaaattatcgcgagaataaaggtgagggagaaaaaacgtacgtggtgtcatgtcgtataaagtttgcgttgtggccttggttaaatttcgcccaaattgtaaagattatttgagagtggatttttatattcactctcttttatatgtcttcactgttcacacctgtgaaatctaggagaaatctgtataataatattcgtaaaatctgatatgtgcacatgcacgaatcctagttcgtcccc

SEQ ID NO: 23533 - DNA, 1205 bp, Oryza sativa
  ref <308>: DATABASE ACCESSION NUMBER: AK073635
  ref <309>: DATABASE ENTRY DATE: 2001-12-06
ggtcctcttctagctgctctatctgaacttctcatcaaacacactgcaaacattacggtatctcttgcgttgatgtcttggtgatcgacaggatgcaaggggaacaccatgaccatgtccctgtctacgagtcaggcaccgaggtgttccaaaagcttcaggagaaatggaattccaccaagcacaagcgataccgcgcgatgtactccagcgtcgtcggcggaatcatcctcgatccatcgatgatggtcatccccatcgacgatcacatggtccacagaggccatggcgtcttcgacaccgccatgctttccgacgggtacctgtatgagctggattcgcacttggatcggctgctgctatctgcatccaaagcaaagatcagctccccattctcccgcgaaacacttcgcgccattttggtgcagatgacggctgcgtccaagtgcaggaatggctcgatcaagtactggctcagcgccggccccggcgacttcctcctctcgccaaagggctgcactgcgccggcgttctacgccgtcgtcatcgcgtccgccgccgccgccgccgccggcgggcacccgcggctcagggagggcgtgagggcgatcacgtcgacggtgccgatgaaggacccgttcttcgcggcgatgaagagcgtcaactacctggcgaacgcgctggccatggcggaggcagaggagcgcggcgcgtacgcgtcggtgtgggtggacggcgacgggggcgtggcggagggcccgatgatgaacgtggcgttcgtcacgggcggcggcgacctggtggtgccggcgttcgacagggtcctcagcgggtgcacggcgaggcggctgctcgcgctggcgcccaggctggtggacgccggcgtgctcaggagcgtcggcgcggcgaggatctccgccgccgacgcgaggaggtgcgccgagatgatgttcgtcggcagcggcctcccgttgctgcccatcgtcgaatgggacggccagccggttggcgatggtcaagtggggaaaattgcccttgccctatctgacatgctttgcgaagacatcaaggccggtctcgacagagtacttgttccttatgatcaagcgagctagacgacgactcatagagctttggaagatcaactttgtataataataataataatgtaatacttccatttatgtgaacgaaatttttccgtg

SEQ ID NO: 23534 - DNA, 1551 bp, Oryza sativa
  ref <308>: DATABASE ACCESSION NUMBER: AK073636
  ref <309>: DATABASE ENTRY DATE: 2001-12-06
ggcaaggtcctcggcctggtccgtctcgtcgattcccaagattctccgcgacggcgcggccgtgcccttctcctccccggagcttcgagtcgctcagcctctcgtcggctgctcccgccgctcgccgcctgcgccgccgccagctcgcgcggtcatcaccatgaagatcgcggtggaggggtgcatgcacggggagctggacaaggtctacgacacgctgcgcgagctcgagaaggccgagggcgtcaagatcgacctcctcctctgctgcggcgacttccaggctgttaggaacgagaatgatttacagtgtcttaatgtcaaaccaaggtttcgtgaaatgaaatcattttggaagtactactcgggacaagctgttgccccatacccaacaatcttcataggtggaaaccacgaagcatccaattatttgtgggaactgtattatggaggatgggcagcacccaacatctactttttggggttcgctggtgttgttaagtttggaaacattcgaattggtggactatcaggaatatataagcaacaacattatcacttaggacactatgagaggcccccatacaatgaaaacactataaggtcagtgtaccatgtaaggcattatgatgttctcaagttaatgcatgtgaaggagcctctagatatattcatgtcacatgattggcctctgggcattactgagtacggaaactggcagaagcttattcgggagaaaagattctttgaagaagaggtcaacaagagaacactaggcagcgaaccagcagcaagactactgaataaactaaaaccaccatactggttttcagctcatcttcattgtaagtttccagctgttatccaacatggagagggtgggcctacaactaagtttcttgcacttgataaatgtcttcctcggcggggctttctccaggtaatagacattccatccggtccaggaccacatgagatccagtatgatgaagaatggcttgcaataacacggaaattcaacaatgttttctccttaactcggatgccatttacaatgctggatgaacaggttgacactcaagatgacttgcaatgggttaggaacaagttaaatgccagaggggctaaacctattgattttgtccagactgctgcatcttatgatccttcttgtcaagcatccaatccctccataacagttcattgtaggaatccacaaactgagtcttttctgcagcttctaaatctcccgtatcttctggactcatcaaattcttatggggttagtagaaatgagtcaagctcccagacaggacaagcacttgatagtgacgacatagagctccctgacgatgaagatgatccggcggacgatgatgactgaagaactgaaagcctgaaagtacatggcattagctctgtagggaacggaacgagctagggaaactgacctgtagacagtacaatttacgctgcttacgtgtagaagaattgaatgggatgtgtagacgaatgatctttcattgtgtgtattaacttgatttgcaggct

SEQ ID NO: 23535 - DNA, 2630 bp, Oryza sativa
  ref <308>: DATABASE ACCESSION NUMBER: AK099369
  ref <309>: DATABASE ENTRY DATE: 2002-08-28
gggcttcccgctcctctctctctccctcccctccggtcgcgcgtcccgtctccggagcagcagccatggacgtcaacgaggaggcaatggcggcgcacaagcgcgcgttcctcgacttcctcgaccaggatgtcgggaagggggtgtacatgcaggccgtgcgcgacatggtgcagaacaagcgccaccggctcatcatcggcatggacgacctccggaaccacagcctcgatctcgcccgcagggtgatacggagccccgcggagtacatgcagccggcgtcggacgcggtgacggaggtggcgaggaacctggaccccaagttcttgaaggaagggcagcgcgtgctggtgggattctcggggcccttcggcttccacagggtcacgcccagggacctcatgtcgtccttcatcgggactatggtctgcgtcgagggcatcgtcacgaaatgttcactagtaaggccgaaagttgttaagagtgttcactattgccctgctactggaggtactctctcacgtgaatacagggacatcacatctttcgtaggcctacctactggttcggtttatccaacaagggatgaaaatggtaacttgttggtcactgagtacgggatgtgtgaatacaaggatcaccaaacactctccatgcaagaagtgcctgaaaattctgcccctggacagctcccaagaacagtggacattattgtagaagatgacctagtagattcttgcaagccaggtgaccgagtatcaattgttggtgtttacaaggctcttccagggaaaagcaagggcagtgttagtggtgtgttcaggactgtccttattgcaaacaatgtttcacttatgaacaaagaagcaaatgcacctgtctatactcgggaggatttgaagaggatgaaagaaatatcaaggagaaatgacacatttgacttactaggaaattcacttgctccatctatatatggccatctgtggataaagaaagcagtagttctattaatgcttggtggtgtagagaagaatctgaagaatggaactcacttgagaggagatataaacatgatgatggtaggagatccttcagttgccaagtcccagctcctaagagcggttatgaacattgcccctttggctatttcaactactggaaggggttcatctggtgttggtttgaccgctgctgtcacttctgatcaagagactggtgagagaaggctggaggctggtgccatggttcttgctgatcgtggtgttgtctgcattgatgagtttgataagatgaatgatcaggaccgagtggctattcatgaagttatggaacagcaaactgtgacgattgcaaaggcaggaattcatgcgtcactaaatgcgagatgtagtgtgattgctgcagcaaatccaatatatggaacttatgaccgttcattgacaccaaccaagaacattgggcttccagattcattactctcacgttttgatttgctttttattgttcttgatcaaatggatcctgagattgatcgtcaaatttctgaacatgttgcacggatgcatagatattgcactgatgatggaggagcaagatctcttgataaaacaggatatgctgaagaagatgatggtgatgttaatgcagccatatttgttaaatatgatagaatgctccatgggcaggacagaaggagaggcaagaaatccaaacaggacagactgactgtcaaattcctgaagaaatatattcattatgcaaagaaccttattcagccaagactaactgatgaggcatctgatcatattgcaacttcatatgctgagctcagggatggtggtgcaaatgcaaagtctggtggaggtacacttccgatcacagcgaggacactggaaaccataattcgtctatctactgctcatgccaagatgaaattgagacatgaggttctaaaaactgacgttgaagctgcactgcaagttctgaattttgcaatataccacaaagagttaactgagatggaagagcgtgaacagagagagatggaaatgaaacaacaagctgatcatgatgcaggtgcaagtggtggtaatgcagatgagcatagaagttctggaaacgacccaatggatgtggatgtaggaaatgcatcgaatgatcaggatgttcctgcggagagaattgaagcatttgaggcgattcttggtcagcatgtgttggcaaatcatctcgatcaaatatcaattgacgaaattgagcaaactgttaatagagaggcagctgcaccttacaatagacgtcaagtagaattcattttggagaggatgcaagatgcaaacaggataatgatacgagatggcatcgttcggataatctaacttcaaaaatcatgtcttgcattgtggacaagctgattactgtgcatcatccttgtctttttcatctgatacttagccagtttggcattgcagaatgtctgcatctgcaccggaggttgatgtacccgtgtatcttaatttttaacagcgagatttatgatgatcatctgtgtctttgtactttaaattcatgtaccgtaacgtaacaattctcctgatctagtgatatgtagtccctgattttatatggtc

SEQ ID NO: 23536 - DNA, 1155 bp, Oryza sativa
  ref <308>: DATABASE ACCESSION NUMBER: AK073637
  ref <309>: DATABASE ENTRY DATE: 2001-12-06
ggaaccccctctctcccatcgccgccgccgccgccgccgacacagccgctgacctcgccgccgccgacgccgatggagatggccgcccccgtctcccccgcgccgcgcaccgtcgaggacatcttcaaggacttctccggccgccgcgccggcctcgtccgcgccctcaccgtcgatgtggatgagttctacggattctgcgacccagagaaggagaatttgtgcctgtacgggcaccggaacgggcggtgggaggtggcgctgccggcggaggaggtgccgccggagctgccggagccggcgctcgggatcaacttcgccagggacgggatgcaccgccgcgactggctctcgctcgtcgccgtccactccgactcgtggctgctctccgtcgccttcttcttcggcgcgcgcctcaacggcaacgagaggaagcgcttattcagcttgatcaatgaccatccaaccgtgcttgaagcactgtctgataggaagcatggaagggataataaatctggtgccgacaatggcagcaaatccaggcactcaggaaagcgagcaaatgacgtgcagacaaaaacctcgaggccagcagttgttgacgatgggtacgatgaagaagaacacagtgaaaccctatgtggaacctgcggtggccgctacaacgccaacgagttttggattgggtgcgacatttgcgagcggtggttccacggcaaatgcgttaggataacaccagcgaaagcggaacacataaagcactacaagtgccctgattgcagcagctccaagaagagtaggcaataaaaaccatggagctgctgctgtggctctctactgctgactaagctgatcaatcaaatgatacttgccatccctcttccagtcccaagttggcggcagatgtgaagaatttgctctagaacattgcgcactgttgtggtagatgctggaaaacaaaaaagaagaaactttacaggatagtttgtttcataaactggtcggttactgttgtggttgttcatttgagatatggatactgttacattgtagcctttagaggaaatttgttcatgccttgtttctaatttggtatgtccttcccttgctgcatgacattgatttctctctacaagtttctgtctgtcactgtgc

SEQ ID NO: 23537 - DNA, 1417 bp, Oryza sativa
  ref <308>: DATABASE ACCESSION NUMBER: AK073638
  ref <309>: DATABASE ENTRY DATE: 2001-12-06
gacttctccacgctctctctctcgcgcgcgcaaatggcgtcgtcgaccagcctcgccgcgctgccctcgcagctcgcctcccccgcccgccgcgccgccctctcccggtccgctaccgcgcggccgcgccaccaccaccaccccctcctccgcgcaccgcccaaaggctgcaggctggtgggacctgcaacgcgcagacggcggtcccgaccagcattgcgcagggcacgcccgtcaggccgaccagcatcctggtggtcggcgccaccgggacgctgggacggcaggtggtcaggcgggcgctggacgagggctacgacgtgcgctgcctcgtcaggccccgcccggcgccggccgatttcctccgcgactggggcgccactgtggtcaatgccgatctcagcaagccagagaccattcccgcgacgcttgttggtattcataccgtcatcgattgtgctacagggcgtcccgaagagcccattcggacggtagattgggaaggaaaggttgctctaatacaatgtgctaaggccatgggaattcaaaagtatgtgttctactctattcataactgtgacaagcacccggaggttcccttgatggaaatcaagcattgtacagagaagtttattcaggatgccggtctggattatctcatcatccgtttgtgtggtttcatgcagggcctaattgggcaatatgctgtgcccatactagaagagaagtcagtatggggaactgatgctcctacccggattgcttacatggatacccaggacgttgctcgactgacgtttattgccatgcggaatgagaaggctagcaagaagctcttaacttttgccggaccacgtgcctggacaactcaagaggtgattacactgtgtgagcggttggctggccaagatgccaacgttactactgtccctgttgcagtgttgagatttactcgtcagttgacacggttcttccagtggacaaatgatgtggctgacagactggcattctcagaggtcctctccagtgacacaattttctcagttccaatgaatgatacataccagcttcttggggtagattcaaaggatattctcaccttagagaagtatttgcaagattacttcactaacgttttaaaaaaattgaaggatctcaaggcacagtccaagcaaactgacatattcttttgacaagaaggatatctacaaacctatggatatattttctgatgcagatctgtgcttcaaaacacagatgagtgaatacaaattttcttgtatatctgttgttgtggtatgtgcaagaagtgcatgctattaggttatgtctacagaatcccaactattgaactatcaggtcatgtatataggatctcaactattcaactatcaaagacctggagtttgtgtagagc

SEQ ID NO: 23538 - DNA, 1596 bp, Oryza sativa
  ref <308>: DATABASE ACCESSION NUMBER: AK073639
  ref <309>: DATABASE ENTRY DATE: 2001-12-06
tttggggatagccccatgaatttgaaccggattattcagtgggctgaatatgaaatagaaacctttgcgcgtttggttaaggaaaattctcctttgcctgagagcgtatctgcccttcgttctgcctgcatatgcatccaaactagtctcactcactgctcttatctagaatcatatggcctgaaattctcaaatttactaatggtactattgcacccctatgttgaagaagtgcttgagctgaattttagaaggctgagaagaaagattgtagattcagcaaaaaatgatgatattctgcttcccagccctcaagaaggatcacggctctctagttcagttgcaccaaatataatgcttacaagcagtggaaagaagttcatgtccattgtcaatgatgttttggatcaaattaccccaatgactatagttcactttggaggaacgattttgaataaatttgtccagctatttgataaatatgttgaagcactaattgaagtcttaccaggagcttctgaggatgatcatctagtggagtcaaaagagcctatagaatttaaagcagagagtgatgcccagcagattcaactcattggaacagcatacactgtagcagatgaattattgccagcagctgtatccaaattttttgatatccaaaccgagaagaagagaattggtggaacaggcgagggccttggctctggatctatatactccatagaatacaaagagtggaaacgtagtctgcaacattcactggacaaactgagggatcatttttgcctacagtatgtcttatcatttatttacttagaagggaaatcacgactggatgctagaatgtacttggagctgaaaactgatgatcttctttgggagtgtgatccttcaccttctctgcctttccaggcgctgtttgtaaagttacggcagctagctagtgttgctggtgatgtcttactgggtaaagagaagatacagaaggtcttgctctcaaggctaactgaaacggttgtcatgtggctctccaatgaacaggaattctgggatgttttcgaggatcaatccatccaactccggccttcaggactacagcagcttattcttgatatgcacttcgtcgttgagattgctgtctgtggacggtatccacacagacctgttcagcagcttgtgtcggtaatcataactagggcaatcgcagctttctcagtgagaaatgttgacccacaaagttctctacccgaggatgaatggttcctcgacatggccaaggttgcaattaataagcaattagggacttcaggatctgagtccgagcttgaggagcctgtggttgtacatgatgaaatctcggattctgaagagagtagtatttcaagtccatcgacgataggatctgaagattcatttgcttctgcaaacaatgatgatctagaaactcctgtatatttcacggatcccgaggcataagagttatttatgcagggaggtgattgtagttatttaaacatctagtagtttaatgtcctatatacttgcagaaaaattgataatccatatttactgtcctcattttcttttccgtgc

SEQ ID NO: 23539 - DNA, 1513 bp, Oryza sativa
  ref <308>: DATABASE ACCESSION NUMBER: AK073640
  ref <309>: DATABASE ENTRY DATE: 2001-12-06
gtcttttctttctagggtttcgtctcccccaatggcggcggccaccacgtcgcggcgcggcccgggcgccatggacgacgagaacctcaccttcgagacctccccgggggtcgaggtcatcagcagcttcgaccagatggggatccgcgacgacctcctccgcggcatctacgcctacggcttcgagaagccctccgccatccagcagcgcgccgtcctccccatcatcagcggccgcgacgtcatcgcccaggcccagtccgggaccggcaagacctccatgatctcgctctccgtctgccagatcgtagacaccgccgtccgtgaggtgcaggctttaatactgtcaccaactagagaacttgctgcacaaacagaaagagttatgctggctatcggtgacttcatcaatatccaagtgcatgcttgtattggtggcaaaagtattggtgaggatattagaaagcttgagcacggagtgcatgtggtgtcaggaacacctggcagagtctgtgatatgatcaagagaaggaccttgcgtacaagagccattaagctcctaattctggatgaagctgatgagatgttgggcagaggctttaaggatcagatatatgatgtgtacagatacctccctccagaactccaggtttgcttgatctccgcaactctgcctcacgagatcttggaaatgaccagcaagttcatgactgatccagttcggatccttgtgaagcgtgatgaattgactctagagggcatcaaacaattctttgttgctgttgagaaagaagaatggaagtttgacacgctttgtgatctttatgatacactgacaatcacccaagctgtcattttctgcaacacaaagagaaaggttgattggcttacggaaagaatgcgcagcaataacttcacagtatcagctatgcatggcgacatgcctcaaaaggaaagggatgccattatgggtgaattcaggtctggtgcaacccgtgttctaatcacgacagatgtgtgggctcgaggcctcgatgttcagcaggtctctcttgtcataaattatgatctcccaaataatcgtgaactttacatccatcgcattggtcgctctggacgttttggtcgcaagggtgtggccatcaattttgtcaaaaaggaagacatccgtatcctgagagatatcgagcagtactacagcacgcagattgatgaaatgccaatgaatgttgctgatctaatttgagtgctggagtggcgctaccatgtttgatcatctggtctggcaacaactgagcttgtttgttgtgattttggttgacatgctttgccgtgactgtattgctatggactttaaagggttgcgagtctaatactagtgattggtttcgttcccctctcttgtgacatgatctgtatataattttagtgccagctcatgtaacactatgattgcatttctgctcagaacatgagacttgttcgttatatttattgccacaaggatttgatg

SEQ ID NO: 23540 - DNA, 1232 bp, Oryza sativa
  ref <308>: DATABASE ACCESSION NUMBER: AK073641
  ref <309>: DATABASE ENTRY DATE: 2001-12-06
ggtagcagcagttgtaccatagcaatgttgggcggcgacgggagaacgaagacggtgtgcgtgaccggcgccgggggcttcgtggcgtcgtggctcgtcaagctcctcctctcccgcggctgctacaccgtccatggcaccgtccgtgatccaggcgacgccaagaacgcccacctgatgtctctggacggcgccgcggagaggctgcggctgttcaaggccgacctgctcgactacggcagcgtggcggcggccatcgccggctgcgacgacgtcttccatgtggcctgccccgtgctcctctccgcccccaacccagaggttgatatacttgctcctgctgtaacgggcacgacgaatgtgctgaaggcttgttcagaagctaaggttgggagggttgtggtggtgtcatctgtctctgctgcgatggtgaatcctaactggtctgagggcaaggccatagatgaagattgctggtctgatgtcgattactgcagagccactaagaattggtatacccttgggaaaacacttgcggagattgaggcctttgattatgcgaagagaagtggattggatcttgtgacactctgcccatcgttggtgattggacctttgctgcaaccaactgtgaatgcgagcagtacagtcatacttggatgtctgaaaggtgattgtgaggtaaaaatcaaactgaggaactttgtggatgtcagggatgttgccgatgctcttcttttactgtatgaaaccccaggggtctccggacgatacatctgcagttcacacgcaagaaggatgcctcatatcattgacttactaaagagctggtatcccggttacaaatttgccgacaagtttgtggaagtgagcgatgagccgcaattcaactcggggaagctagagaagctaggatggaaaatcaagccatttgaggaaacactcagggacagtgttgaatcttatagagctgcaggtgtcctggattgagcaaatggtgtcctgtgtatataccaacacaattgaaggaattaccaacacattgatcgggttctaggcttagtttaatagatctactacataggtgtttgttttgatcgaccttaattggatctggcctctttggcaacatctgtatgtaagagctgcctatttggcagcagctgggagtagaagataaaattatcttttggtgatggatttgcgctgagaattatgccatttatgccctg

SEQ ID NO: 23541 - DNA, 1208 bp, Oryza sativa
  ref <308>: DATABASE ACCESSION NUMBER: AK073642
  ref <309>: DATABASE ENTRY DATE: 2001-12-06
ggccattctcgctcctcccgtcgccaggtcgccaccgccgccgaagccgcgccgcccattctcgctcctcccgtcgtcagatcaccgccaggccgcacctccactcttcctcgcttcgcccctcgtctcctccgccgcaccctcccctcctctccggctccctccccctcgcctcctccgtcaccgccctcccctcctcctccccctccggctcccctccccttccggcctcctcccctcgcgctcgtcgccggcgaggcggcccaaatcccttctcccttcgcgggcgaggtgttcgacggactcctcctcctcctcccttctgcgcggcctcctcgcgtcacgcgcgcccacgcacggccagcgacgagcaggcttggagggcgcgacgcggtgcccggcctccgcccctcccgcctctgccctccgtctcagttcgagtcgaatcgaagggcgaggctgatcgattgatgcatgggcgaggcggatcggtggaggtgtgcttccagggacgaagggtgcgtgccgctagcgacagacgtctggacgccctgccgatcgatctggaggtggggttccctggtaggcgaggagggcttcgtctcgtaagcgcgggatgttcatgaggagcagcagctcatcagattgatgattagtggtcagcgtcactgggatttaggctttgaagaaagatctcctaaggcatatcaaggtgactatataaactgcatctgttgatccgcgatctgtaactgcatttgccgtcaagactctgaaactgcatctgttgccaagatactctgtgccttgccctggcacgggataatccttcacgtggcacagactacaccaccggcaacctcgtccatggcgcactcacctccctaagactatttactaaacagattgccatgcgtaaccctgccaatcagagctctcctgtgcccatatcctgttgtttccagtcgacatccttggttcatgcctcaattgaaggttatggagacagaaacgggtgacttttgttaactaaatttgcacgatctcttaacaatttgtagtacggggaagaaaaatttctgaagtgtgtcacaagtgctaaacactaggatggttatttacctacagggtagtatattatatatatgtattaaatgctctattttgtgtccgcaacaaataatggaacaactctatacttttttaac

SEQ ID NO: 23542 - DNA, 1191 bp, Oryza sativa
  ref <308>: DATABASE ACCESSION NUMBER: AK073643
  ref <309>: DATABASE ENTRY DATE: 2001-12-06
gatctagaagcgtcgccgccgactcgccatctcctctctaggtcaccggatttcctagccggcggcgagctcgtcggctcaggcggcggcggcggcggcgatggactggagctccgtgactgcggaggatctggtggacgcgctgcgggaggtggactggtcgacgccgccgcgccccgtctccgagttcttctcccgcttcaccgccccgcgatcctactccaagtggaccagccgcctcaagtgcaacctctactactacaggacgaactacttcatcttgatcatgttcattcttgggatgggctttctccggaaaccagtttccatccttgcagctttttcaacaggcctcagcattgcatttctcaatgacagttttgcagttacattcaatgagaaagtcacaaggacagtcagacaattttcaccacatttagcagcaaagatgaggccacccttaagacctgtcattcgtggccgaccaagctcaaaaagatcaattcatatttgtggccggcctcgatgggtttttgttgtattattttctgtcgtaagctgcttcctctggatgacctcatgtagtctccttacggttctgtgggcactaattgttggtctgcttgcaaccttgcttcacgccagtttcagaacacctaatctgaaagcacgcctgaacacattcagggaggaatttcgagcagtatggcggaattatagcgagttttaaacgccctttttgtctaccccatgtgagtgccttcatcgctgtcttatggtcgaaaattgaatctagcgaagggcttaaagtgctacctgttctgtcagtgcatcattgtggagctgcttattggatgtctctgcggtggtgcaatgtagaaggacctacttcagtgtgctttcgaatttcttgattttctctgcagatttatgtggtaaaaatgttaccaagttccatatctctgctgcctcttgcgactctttaattgtgggagattaaaaataggcatgctattttctccagtttatggatttggctttagattgtggattattctagtcccccaccacatggatctccatagttttagcttctggtccaaaacttctactgtattttgatacattggggaaggaacagcatgtaaaagagacagctatcctgaagagaagaaaaaagatattgttgtg

SEQ ID NO: 23543 - DNA, 1483 bp, Oryza sativa
  ref <308>: DATABASE ACCESSION NUMBER: AK073644
  ref <309>: DATABASE ENTRY DATE: 2001-12-06
gatgcgcgcacctcccgcctcctcccttcctccgcctccgcgccctagaaccttccagaagcggcggccaaggcggcgtggaagctccaggtgcgcgccaccccgccctccggaaccttctggaagctctcggggaggggggaagaggtgggtgggtgggaggatggggacgtcggatctggaccggcagatcgagcagctgaagcggtgcgagccgctgacggaggcggaggtcaaggcgctctgcctcaaggccatggagatcctcgtcgaggagagcaacgtccagcgcgtcgacgcccccgtcacgatatgtggagatattcatggacaattctatgacatgaaagaactattcaaagttgggggtgactgcccaaagacaaactacttgttccttggggattttgttgatcgaggattttattctgttgaaacatttttgcttctgttggccttaaaggttagatacccagatcgtataactttaatacgaggaaaccatgagagcagacagattacacaagtctatggtttctatgatgagtgtcttcgtaaatacggctcagtgaatgtctggagatattgcacagatatattcgactatttaagtttgtctgcactcattgagaacaagatatttagtgtccatggaggcctttctcctaatattacaactcttgatcagataagagtaatagatcgcaagcaagaagtacctcatgatggggccatgtgtgaccttctttggtctgatccagaggatgctgtagatggttggggattaagtccacgaggtgcaggattcctatttggtggaaatgttgtttcttcttttaaccacacaaacaacatagactatatttgccgtgctcatcaactagtcatggaagggtttaagtggatgttcaataacaagattgtcactgtatggtctgctcctaactactgctacaggtgtggcaatgttgctgcaatcctagagcttgatgagaatttgaataagcagttccgtgtatttgaagctgccccacatgaatcaagaggtgttcctgcaaagaggccagcgccagattactttctgtgaggccgcagattcagcagtgggtacagcgtatcctgcaaacaagcaccggcggattaagtcttgcgagctcccattttctgagatgagctgagctcatgctttacaagactcttaagccaggagtgctttcgagatgtataaattgattttatgtccccagtcctatcatttgtaagccaagagagtggctcacatttgagcttgagaaaatgcccctgtgaagggagtggtgtagatgaggccactcctttgattccatgggtgtgcgttggtccatgatgtaaaattttgttgctagcccgtttgccccctaggaaatcctgtgctggagaatgatatgcaaatgctgtgcctgagtatttattgttgtcagaatgcaaatgcaggaagttttgt

SEQ ID NO: 23544 - DNA, 1205 bp, Oryza sativa
  ref <308>: DATABASE ACCESSION NUMBER: AK073645
  ref <309>: DATABASE ENTRY DATE: 2001-12-06
tggaggaagaaagccagcccaccactccagccatgtggcgccgcgcctcccacctcctccgcgccaccgccaccgccaccgccaccgcggtctcccgccgcgtccctcacccacatcccgcccccgcaaccgcaatctccaccgttctgcccgccccaaagctcgcctcatccttatcctacgccacccaagccgcggcggcggcggccgtgccggcggcgagggccccgagaacggtggggagtctgctgcggctcaacgacctgagggacaatccgggggcgcggaagcagaagacccggaagggccgagggatcggctccgggaagggcaagacggctggccgcggccacaaggggcagaaggcgcggggcaccgccagattcggcttcgagggcggccagaccccgctccgtcgccgcctcccccgtcgcggcttcaagaaccgcttctctctgacgtttcagccatgtggtctggggaaaattgcaaagctcatcaacgctggaaaaattgattcctctgaattgatcacaatgaagacactgaaggatacaggtgctattggaaaacaaataaaggatggaattcgactaatgggccgtggagcagaggaaattaaatggccaatccaccttgaggtatcaaggacaactgctagggcaaaagctgcagttgaagcagctggtggaacggtaagactggtgtactataataaccttggattcagggcacttctcaagcccgagtggtttgcaaagaaaggccgacttttacctaaagcagcaaggcccccacccaagcaacgagacaaggttgatagcattggccgcctgcctgccccaacaaagccgcttcccttcacaccagaagaattggaatttgcagcaaaacgtgaagctgctcgagtgattgcgtagaagggagcatgaagatgctcctctgaactagagttttgaattgggcatgcacaagaatcaactgtcctttatttgaaggatcccttggtagcaagttcggtatgtttgcttgtcatttagaccagtatgtcatttttctttacccgtagtcacatcaccaacacgtgagccagacagcactgctatacctcttgatctaaaactcaaagatgctcgtgtcgcggtcaacaactgctgtgagtccagcatttggattattttagatatatatttagttctgatatc

SEQ ID NO: 23545 - DNA, 1146 bp, Oryza sativa
  ref <308>: DATABASE ACCESSION NUMBER: AK073646
  ref <309>: DATABASE ENTRY DATE: 2001-12-06
ctgcagtttatgcaggcacatgctcaaactcctgtctgtcacaggacatcgggttaacgacaggctcctaacagaagcaaggaggttgagatggacagcatccgcacggatatccaagacatcgtcgaggacgagcaggtacctctgggatgacagagacaccagcctgacgaactccgcctgaagggcaccaaagctcatctggtcggcgcacctgtgtgtagccgcagtagcagtagcacccggtccggacatccagatctcagccaagaggtccttgttcctgtacttgtgtgggacgctcgcccagatcacatgatcaaaccttgcttgaacgtccacgtgcctcagcgcgtgctgagcaagcgcagtcttgccaacgccgccgtcgccgacgaccgccacgacttgaccgccgccattgccattgccaccaggccgccggggaggatcgtacagcaaggccgacaccagccgatcgtactcctccttgtgaccgtagagtttgccgtccggcaataggcccgtggccgatcttggcctcgacgcggacgcacccccatctcctcctccttgtgatgaccggaaatttgacagctggacaagatcccgctggttctgctgcatccgtggcaggtcattcatcgacttgtccagccggttcaacgcgccgtctattccgactatccgcttagcttgttcaactatagaatggataacctgcctgaccttgtgcttcctcgcccagatactgtctctgtagtcgacggcgtccaagatgtcctcagcctcgtggatggcgtccatcagctcactcagttgccccacgatccgacggtcgctcatgaactgttcctgttcctccaccgtgtccacggccactgcgatcttccccacttcacccaccagctgtgcaacgtcctttctgtaatctctcaagcgtctgtacttcctcgccacaaaggattccgcgatttcggcgatcttgatgcccggcgaaatcgccggcccaaccgtcgaaattgctccaatcggcatgcctagccgccgcctctctccctctctgtgtacaaagaaaacaacagctagcagagataattaagaatgatgaactacgaactacaaagtgatatgtttaattagttg

SEQ ID NO: 23546 - DNA, 1206 bp, Oryza sativa
  ref <308>: DATABASE ACCESSION NUMBER: AK073647
  ref <309>: DATABASE ENTRY DATE: 2001-12-06
gatccacatgccaccgcttccccctccccttgtctctcgctctcctccgacggcgccgcttcccgacgtccggcggcgatcagccggctgcgggtgtgccctttgggcggacgatctgggtcccacgggcgtagtctccgcggcatcggtgacggcgacggcggccggccggcgggaaacttttagctccggccagattggcggcgccctcgccgccggcttccgtggagagcaggtcgctaggcagagtaggtgttggtcatatggtgtacatctcttgtttgacaaacctgccccttgagttcagcgaacatgtaacttgtttgaagctgcacattccatatatattatttgaagttgctataatgcatttgtaacataacttgaattgttctcttagctacataaatagcacagagaatagataagtgcttcagagaataagggttccaacagatgatgtaataaagatggggccaagcagttttcagaaactttttaggagtgtatcatgggtaagatttaaagattttcttcaaccccaggtactttgctgacctgggcaaccccaggtacttcagcttggataacaagcacgcccgtaccgagttgctattgacagtgactgggtgacaccaacattgatctcactgttgatgacaattaatcttcaggcttgaaattactgagtttattatgaagtgaaaattatggcttttgcttgaattcgaggttcttttgtctagggtgagccaagtggactgctgatgacgccatgcacataagtagtaatccgctatggcttgcaacaatttatttcagtgagtttgctgcacatagctgagtggaactcactccagcaccaggtggtctccgccttcctcgctgcggtttacagcgaaaacatgctgacctcggggaagatgatggtgagctgcagcagacagagagcttctttctggccaacctgtgcaaatttgccaattcccagaatgaatcaatcatgatgccataatgcatgctaacaatgaacagaagctgcacgtctgcacctcgaagcagaagcttcacaagtggcataaagggcagctgaagctatatgtttatgccaatcacggttcacggatactcagaatgtcagaagttgcctcagtttctctgttattacatctaacatggactgaatcactggacatttggggcagg

SEQ ID NO: 23547 - DNA, 2681 bp, Oryza sativa
  ref <308>: DATABASE ACCESSION NUMBER: AK073648
  ref <309>: DATABASE ENTRY DATE: 2001-12-06
gagcactgccaactcccattttttaaagctcaaaaaatccattcttttttctgaaataagattttcttttttttcttggtttgcattagcagtatatatgcacacacactcattcctacactaacaatcttactacatcatatcattaacacttgcaggcctgtctagagggcagccatggccactgtttctgacatcggcctctccgcggctatcaacgtctcgatggccgttgcattcttgctggtctttgcttttctacgattacagcccatcaacgatagggtttactttccaaaatggtacctcagaggaatgagagacagccctgtttcctctggtgctgcagtgcaaaaggttgtcaatttaaacatgagatcatacttgaaatttttaagttggatgccggctgctctcaagatgccagaggatgagttgatcaatcatgcaggccttgattccgctgtctatctacggatatacctaacagggatcaagatattcgttccaatatcaattttagcttcgcttgttctgttccctgtgaactggacaaatgacaccctagacagcatgaaggtagtccacagtaaaattgacaaactttcaatatcaaacataccttatgggtcaaacaggtttgttactcacttggttatggcttatgctgtcacgttttggacctgctatgtactgttccgagagtatgagataattacaacgatgagattgcggtttcttgcttcagagaaacggcgaccagaccagtttacagttcttgtgcggaatatacctccagatcctgatgaatcaattagtgagctcgtggagcatttcttccttgttaatcatcctgatcattatctaagacaccaggtggtttacaatgcaaataaacttgctgatctggttgagaagaagaagaaactgcaaaattggcttgattactaccagctcaagtatgaaagaaatccatcaaaaaggcccaccactaagactggctttcttggctgttttggttccgaggtggatgccattgaatactacaaagcagagattgagaagattgggaaagaagaagctgatgagcgtcaaaagatcatgaaggatccccagtcagctgttccagcagcctttgtttcatttcgttcacggtggggggctgctgtttgtgctcagacacagcaaaccagtaatccaacagtctggataactgaatgggctccagaacctcgtgatgtctactggaataatctatccattccatttgtgtccctcacagttaggaggctgatagttgctgtggcattcttcttcctcaactttttttatgtcattccaatagcattcgtgcaatctcttgcaagccttgaaggaatagaaaaggcgcttccatttctgaaacccttaatcaaaattgatgtcatcaaatcattcatccaaggttttcttccaggaattgctttgaaggtcttccttatattgcttccaactatactgatgtttatgtctaagtttgaaggattaatatcacagtcatcactggagcgaagatctgcatctaaatattatatcttcttgttcttcaatgtatttttgggaagcatcgttacaggatctgctttagatcagcttaaggcatacattcatcagtcggcaaatgaaataccgagaaccatcggtgtagccattccaatgagggcgacttttttcataacatatgtaatggttgacggttggactggtgtagctggtgaaatattgagattgagggcacttataatcttccatttgaaaaactttttcttggtgaagactgaaaaggacagagaagaggcaatggatcctggtagtatctgttttgattggtgtgaaccacgtatacagctatatttcttacttggccttgtctatgctgtggtgacaccgttattgcttcctttcatattggtattcttcgggctggcatatgttgtctaccgccaccagataataaatgtctacaatcaacaatacgagagtggtgcacagttttggccgagtgtgcacgggcgcataatcattgcattgatcgtatcacagctacttcttattggactgttgagtacaaaaggtttcgaggagacgacaccagttcttgttgttcttcctgtgttgacgttttggttttacaagtactgcaagaaccggtttgagcctgcatttgtgaggaacccactacaggaagcgatgaggaaagacaccctggaacgggcaagggagccaaccttcgatctgaaagcgtacctggccaatgcgtacctgcacccggtgttcaaaggcagggaggaggaggacaatatgtcaatatccgaggatgtcgggatggaggaggtgatcgtgccgaccaagcgtcaatctcgccggaacactcccgcccagagcaagtacgaaggctccgacacgctctctcttcctgaaactgtacacgaacgatagagctacgggaatatcagggtgactactagcttgttgaattctttatagtctgtacagatagattgatacatacctactcctacggggatgttggcagatagctttgctgtacactttacagcacgagaggtatatggagggattgttcaacacccacagactgatgattggattgccaatattatgatttctttgttggttcc

SEQ ID NO: 23548 - DNA, 1564 bp, Oryza sativa
  ref <308>: DATABASE ACCESSION NUMBER: AK073649
  ref <309>: DATABASE ENTRY DATE: 2001-12-06
gccccactctccctcctcttcctcgcctgctctgctcgcggcggcggcggcggcggcggcggagcaatggcgcggtcggttggcggcgggtggtggcggtcccggaagaccctggtcgggctggggctgggccaactcgtctccctcctcgtcaccgccaccggcttcgcctcctccgagctctcccgccgaggtatcaatgtgccaacgtcacagtcgctgctcaactacgtgctgcttggggtcgtgtacgggagcatactgctatacagaaggaagtctttgcagatgaaatggtactactacttagtactagccttggtcgatgtagaggcaaattatctagttgtcaaggcttaccagtacacatctctgacaagcgttatgcttcttgattgctgggctattcctgctgtgatattccttacatggatgtttttgaagaccaactacagattcagaaaatatagtggtgtggcgatttgtgtctcaggacttgtgctagttgtattttctgatgtccatgcaggtgatagggcagggggtacaagcccagttaaaggtgatatacttgtaattgctggtgctactctttatgccatcagtaacgttagtgaggagttccttgtgaaagtcggtgatcgagttgagttgatggggatgctgggactatttggagctatcatcagtgcttgtcagataagcatatttgaacgcaatgagataaaatctatacaatggagtgttggtgctgtggtaccgtttattgggtttgcagtcgcaatgttcatgttttactctctagttccaattttactgaagatcagtggttcaacaatgctaaacctttcattgctaacctcagacatgtgggctattctcatccgtttgtttgcctaccatgaaaaggtcgactggatgtactatgtggcattcggtgcagttgcaattgggctggttatttactcaggcgattccaacagcgacgatggcagaagggggcaagttgctgaggccactgatgttgagggaaagctacctgatgaggaggaggctgctgttcatccaaaatgccagggtgcagcatcatctggcatccgaaaattcgatgatggtaaaactcctcccactattagacctaacgagccacatgctcaaacatgaaagtaactatggactacagaacatagtggaaacaaaaaagaaaatcgaacaaggagagattttgttaacgcggataattatgtttgtgttgaaggaaatggcccctatcatgccctcagcaacgaggagctgagctgagagttatctcgggaatgactagaaattaggattatagaatcatagtattggaataaacatgtgtggtaggtcagcatattcatgcaatttgctgtaatgtaattttgcaatgtattcttgtcttctctttggtgcttctaaaggaagttccagttagccagaaagtatttgagtgcaaaatgttgtattggggaaattctctgccatgtaactgggtaccgaagatttgatgtatcaggtgataaacaagcatattattatg

SEQ ID NO: 23549 - DNA, 2188 bp, Oryza sativa
  ref <308>: DATABASE ACCESSION NUMBER: AK099370
  ref <309>: DATABASE ENTRY DATE: 2002-08-28
gaggccaaccaaagtcctctgctcccctgctccttcactctgcttcactctcactcactcaccttcttggtacattgcaattttgcaatggccaagaatggtggtgctcacggtgcagccacattgtttggtctcttggcacttgcatcaatggtgaagctgggatttgttgctgggggtggccatgactatgccatggcattgaggaagagcatcctctacttccaggcgcagcggtccggcgttctccctcctaaccagagggtctcctggagagccagctctggcctctttgatggaaaggccaatggagttgatcttgttggaggttattatgatgcaggggacaatgtcaagtttgggttgccaatggcgttcacggtgaccatgatgtcgtggagcatattagagtacggcaagcagatggcggcggccggcgagctccggaacgccatggacgccgtcaagtggggcaccgactacttcatcaaggcgcacccggagcccgacgtgctctacggcgaggtcggcgacggcgacaccgaccacagctgctggcagcggccggaggacatgacgacgagccgccaggcgttccgcgtcgacccccagcaccccgggtcagacctcgccgccgagaccgccgccgccatggccgccgcgtccatcgtcttccgcggcacgtaccctggctacgccaacctcctccttgtgcactccaagcagctgttcgagttcgccgacaagtaccggggcaagtacgacgccagcatcacggtggcgcgaaactactacggctccttcagcggatacggggacgagctgctctgggcggcggcgtggctgttcgaggcgacggaggacaggtcctacctggagtacctcgccggcaacggcgaggcgctggacgggacggggtggtccatcaaccagttcgggtgggacgtcaagtaccccggcgtgcaggtcctcgccgccaagttcctcctccagggccgcgccggcgaccacgccgccgcgctgcagaggtacaggcagaacgcggagttctttgtgtgctcctgcgtcggcaagggcgccgtcaacgtcgccaggacccccggcggcatgatgtaccaccagaggtggaacaacctccagttcgtcaccagcgcctccttcctcctcaccgtctacgccgacttcgccgccatctccggccgcggcgccgtccactgccccgccggcgccgcccaaccattcgacatcctcaaattcgtcaaatctcaggtgaattatattttgggtgataatccgagggggacgagctacatggtcgggtacggcgcgagctacccgcggcaggtgcaccaccgcggcgcgtccatcgtgtccatcaagagggacccgtcgttcgtgagctgccaggaggggtactcgtcgtggtacgggagggaagccggcaacccgaacctgctcgacggcgccgtcgtcggcgggcccgacgagtacgacgacttcgccgacgagcgcgacaactacgagcagacggaggccgccacctacaacaacgcgccgctgctcggcgtcctcgcccgcctcgccgcctcctgcggcggcctcaaggaggaggaatacgaacaagaaacggcgactccggtggtgaaccggacgtcgtcgtcgtcgtcgctgccggcgacggcgacggcgatcgggatcgagcagaacgtgacggggacgtgggcgaggaggcggaggacgtactaccggtacgcggtgacggtgacgaacaggtcgcgggggaagacggtgagggagctgcacctgggcgtgtcggggctccgggggcggctgtgggggctggaggaggcgaggtacgggtacgtgccgccgaggtggctgccggcgctgcggccggggaggagcctcaggttcgtgtacgtgcagccggcgccggcgccggcgaacatctgggtcaccggctacaaactggtctgaaatgaactcaagtactcaactattctgaaatggtaatttgtggtagagagagagtagagtgtggttatttggaggaagtagagaagagtccaaggaacgcgagtacgtatactcatcctcttcctcctcgaatactatgattttaggggtttggagagatgagatttagttgttcatcgtcctccttttgccctatcaagtttaattaagt

SEQ ID NO: 23550 - DNA, 1092 bp, Oryza sativa
  ref <308>: DATABASE ACCESSION NUMBER: AK073650
  ref <309>: DATABASE ENTRY DATE: 2001-12-06
gtccccacgacgccaccgagcccgggagggagaggccgacgcgacgcgacaagtccacacccacacacgcaccagcaccagcccaactcactcctcctcctccagattccgccgctccctccccctcgccgcgcggcgccgccgccgccgcggtggccaccagcaacgtcgagctcgccgtcgcccaggccggcggatgagagccagtgaaccatgggaggattttgctgttgcctctgcactgacgatttcgaggagtacgctcatccaaataaccctatctataggcaaggtgtatgcctaaggaattttttccacaacttttttggcgggtatactgccacattccagaggctcgaatctagacctagcaacccagctcaaggggctgctccattggcatccactaatccaagtaccaatataactgacaattcattatccgaaacttatcaccttgtgtccagacctccaccgtatgatactgatcctagatatgcccgtgttcaaagagagggtttggtatctaggcgtgaaaagtctataaatctaacacaagaagagtcactggctcttaggcgaaatggcagcagctctggcattgaacatttagctgctcagaagaaatggagcagcactgaacctgagggtgaatataaagtccatcgctctgaatccaccaagagtttatccgcaaaatcgtataacagcagttttgcagttgtcacttcagaagatgaagatgtctgccctacttgtctagaagaatacactccagacaatccgaagattatagctaaatgctcccatcattatcatcttagttgtatctacgaatggatggaaagaagtgatacttgtccgatttgtgggaaggaaatggagttttgtgaaaccccatgagagatttctcgctggttgtatcagtggaaggcaaaagatctacagtgtgatatgctggagagtctgtaaataatactagttgtccagatagatctcttttttgagatcaaattcttatgtgtactgaaatcatggcctacaaaaaagaaaatgcgctagaatttgatatatgaatatatttttgaatgc

SEQ ID NO: 23551 - DNA, 2449 bp, Oryza sativa
  ref <308>: DATABASE ACCESSION NUMBER: AK073651
  ref <309>: DATABASE ENTRY DATE: 2001-12-06
ggcatattgcgcgttagattctggcgtgatctgagccatgagtccatccatggccccaacctagctagtgcgtgttgtgttctttagttggtcgccacacgggcaatgccaaagtaaagccaggcatgatgccggaggaggaggaggagaatatgagatgagatgaacacttaaaaggagaaagaaagaaggaggagaatatacaaagggaagttgttcccatctgatctgatccatcatccatctcaatgtgcagcagcagcagaagcagtgtattattctgttgttaggagagaagttcagagaagtagtagtagtccctataagaaaggggaaagaaaaaaaaaagaagaaaccctatccaaacaaaaacaaagggaagagagaagaaagttggagacttggaggaggaaccctccaccaccagcagagccaatagagggatcatccgccgtaatctatctagccatcaatccatctccctctcctcctctgctctccatgaagagcaaatcctccaggaaggccgccgacgaggatgaggccaagtccaagaagctccgatcctcccgcggcaagcagcggcctaagcagcgccggcgaggccgctgcagcagcacctcctcccgctctgaatccccaccccgcaagcgctccaagaagctcaagtcctctgacaagaagagcaccaagaacaagggccgcagacgccaccacagtcttagccccagccccagcccttcatcgtcgtccgtgagttactcaacgcgcagcagcagcggtggcggcggcggcgcttctgagaggtcggtgagcccaccgcgtaggagccgctctagagatgttaggaagaagaagaaggagagggggagggacagcaagagggtgaggaggtcaggaagatctacaagctattcaaccagtggagagagtaattccagtagtcgcagcaggagtaggagcaataatagtaagagcaggaatcgcaagtccggtggcaataaggatcatgcaagcaggaataagattgtgcaggattatgacaatggccatgctcatcgggctgagaatgtgaaatctgttgagattgcggatagggatgagaaagccatggctgataccagcaaggggagctctattgagatatctcactcaattattgatcatgagaagaatgagtccgttgagaagatggagagcgctcctaccaaggatgctgatgaaacacaagacatcttacctgctggtagtggaagccctgatgctcaggatctggagctgattctcaggcagaaagctcttgagaacttcagaaaatttagaggagcagcgctcatggcaggcaagccgcaaaccaatggtacagggaaggaagtggtaacggatagccccaagagcagtgacacgaaaattgctgaagcgagttctgttgacaaaccttttcagaggcaaagaagtggtctttcagtgaactgctctgttggatcccctagattggaggatttcgggaaccatataactcctcgaaagcaggaaagctccgctggcaagagcgttggcgttgaatcacctggaacatttgaggccggcagcaccagcgggcgaactgagcagaaaggaagcagtctagaacctactcgatcaaattcacagattaggctacaggatggtaggagtagttccagcataatgcataggttgggaagccctccaaggagctctgccagcgtgattcgaagggttaggaagcagcgcaggggtgaattatgtgaatggaaatcccagagttagatcagttgtgagcatacccactaaggaagggcttgatagtggtacatctatcactacccctagtgcttgtgataattctccccctgttgaaaacattagtgaagtcaggcatcctcctattgatactaacaaaattgaaggaactaaaggggatgaaagaaattcaggtgaagcttcagctcctaatgtttctactttgtcaactggtgaggtcaaggatcagcctgggactgaggtcaaagatggttctcagtttgagaaaaagacattctctagaatgcatgagggagaaactgtgcaggtcagttacaaagtctacataccaaagaaaagtccagcacttgcaaggaggaagctacagcgctgaagttgccaagattgtcaccaaattctcattatttgtcttgtctacaccttagttatgtagctggatatacttttactctctgctgccatgtattgacaatacatgccttccggaaatcattcccacatcaaaattgctcatatttcagttttgatgctcgatagctcagatagaagcctggatagtcaaaacatgtcatagttgtttcttttttactgcaaaatgaacattttgactgtaactcgctccgaattctgacacagtgtatgggcagctactgttgtcatggcc

SEQ ID NO: 23552 - DNA, 815 bp, Oryza sativa
  ref <308>: DATABASE ACCESSION NUMBER: AK073652
  ref <309>: DATABASE ENTRY DATE: 2001-12-06
tgctttctgttaggctgcatgacagacatacctaaaagcagggtcagacagttagttatgcagccgttaaactgtgtaatcttcctgcttgggctggccatcctatcggtaacatttggaccctttgtcaccattgcacatagagaactgatgatggcaacttacagtgagaaaggcccagaaaacaagctggatcatggtgtagatgaaaccagaacatatgaggagatcaaaagcaaaatatttgcaggacggaagatggcttttggagttgcagtcatggagaaccacccaaaggatgctagaagcaaaccaagctcaggagagattagcaactactcatccaactcacgtgtaccttcaagcttaaaggatagtagcagctcgacgatgaaggcaagaccatccgtggacaacataaaactagaaggaagcacatctgagcagacactgaacataccaaatccccaacatatcataatactgccattcaagccttattacaggcatctgagtttgggctccaaaaaagaacaaaaaggttcgagtatttgctgcaactcatatagaactaatgaagactggaaggagaaaatgctggagtccagagatgaagttctcagattgcttaacaaggattaccatgccaacccccataggaggccaccagttcataactaagaaagggcaaggcactcaagcctgagtcatgtattatggcccaaactaatgtctggtggtgtctcactataactgtatgatgttttgctttgtaatgtatcataaggaataaaacaattgggccacttaacttg

SEQ ID NO: 23553 - DNA, 1857 bp, Oryza sativa
  ref <308>: DATABASE ACCESSION NUMBER: AK073653
  ref <309>: DATABASE ENTRY DATE: 2001-12-06
tcggcgatcccaaggtgacatcaccaccacgcgccgccgatcctctcgccgcctccagctctcgagctctcgtcccccattgcttccggagaagcggaccctgttctccaggtggtggggtgggtgcccatttcgtcaaatctcggaatatttgaggttttctcgtgacctgggttttggctttgggacgctgaagatttggggttttgcgagttcgatgaggctgctttggtgagcttgtggggggttcttggggacagtctttgcaggtgtggagatggaagggaggatgcaggggaaggcgccactgtcggattccaaccggcggatcatggacgccgacgcgccgccgcggcgggtgtaccaggggtggaaggggagcaatatatttttccttggagggagacttatttttgggcctgatgtgaggtcactcatactcacagtgtgtttaattgtaattccagtgatcctctttgctgctgttatttctggacagcttgaccatgagtaccacaaccaaattggaggttgggttgcatcagtagctatcatctttacagcatatattattgtccttctgcttctcacatctggccgggatcctggaattattcctcgaaatgctcatccaccagaacctgaagatgttggtgaatcctccaacttatcagagtggccaggtggtcaacatggttcgacgggtttacctctcaccaaagatgttcttgttaatggtgttttagtcaaggtcaaatattgccatacatgtatgctatatcgtccaccaaggtgctcccattgctcaatctgcaacaactgtgttgaacgttttgatcaccactgcccttgggtaggccaatgcattggaaagagaaactaccgattcttctttatgtttgtgtcttcaacaactttactatgcgtatatgtgtttgcattctgttgggtcgatctcaggataataatggacacacatagatgcaaattagggagagctatcatgaaatctcctgtctctggcattctcatcttgtacacatttattgctgtgtggtttgttggagggttgacctcattccacctctacttgatttctaccaatcagacaacttatgagaacttccgataccgctacgataggaaaacgaatcctcataaccgtggactggtccagaatttcattgagatcctgtgttcaagaatccccagctccagaaacaacttcagggcaaaagtaaaggaagattctgccaccttcccctcatcactcggtatggggcgggcactaagtccgccgaagatgagtgtggacctcgagatgggaatgaaaaggcaaactgtggccatggaggaactggaagacttacacagccaaatcggcagtgctatggggctggagcgatgcggcactgaacccccacatattgtcggtcgaaagggctgctctgaaattgcaaccgacatagaagcatttgctgaagagtttggcctggaacaaaggttcactgagaggaagaagattgagcaacgtacaagtcataacccatagcgcattcctcccaatccttctataaccttcagaacctcacctaaaagtggcaaaatcttgggaggaaagaaaagtaggacaaatgttagatgatataatagttttctcggctgaaatttccagccaaattttcggtcatgagtaactggtgttgtttgtatatcaagtggttagtgtttaacaatacagacatggtgaagcattgaagccaaaggttttgctgtacttctggaatgctgggtctatgtactgtgagtccatctgctgtgctgtatatttggcagtgtgctactgaatttgtgttg

SEQ ID NO: 23554 - DNA, 1221 bp, Oryza sativa
  ref <308>: DATABASE ACCESSION NUMBER: AK073654
  ref <309>: DATABASE ENTRY DATE: 2001-12-06
gatccccgtcgcacccgcaagcaccgcgtgaggttgatctctctctccctcgtgccccccacccacgagagccagtgagctcggtctcccctctcccgtcgtcccccaccagcgagcaccggcgaggtcgagctcgcattcccatctgtgtggacgagctcaagagagaggcgcggagcagcgacggtggttccgcttagagaggcaacggtgctcggggagaaccgtgtcggaggcagagcttgacgaggtggcgcgctccagggatgcggagctcgagctcgatgaaaggccgcggcggagttcgaccaagcggcggcgcttggggacgccgagttcgatagaggcagaggagcttggggataaggagctcaagtttgacgaggtggcagcagatggcgaagcttgagcttgacctcatcctcgaccaggtggcgatggtgctccacaacgcttcatagggaagactccggtggagaagaagcggcgatgcatgtgacggcgcggggagattgtcggcgtcgagatccaggcccacgccatcctccaaagttcaagaccaagccgcgccggcattggaggcggcgcgcccgacgtgctcgggtgaaggccgcggcacgggcaagaagcggcgctcggggaaacggcgggaagccagagcttgagcttgctggcgcatggaggaggaggcgctgggtatgcctccatcagctgcggcggcgccggccgcgtcgacatcgaccatctgctcctccgcggcggccactcgctgtccctggctgccgtgacaacaccgccttcgcccaagatggagcttgggacaggcaatggcggcgatgcggagaccctgagcagaaattcgctgagctcggagaacacgggtacgattgtgagctcgccctcgctggagctgcacatacccatggaggtccttgctgggaagatgaaaaaggggagaaagagccgaagaggatgaggacgaacgtgctgacatgtgggcctcactactttgtacagttggcatcctagtggacaaaaaccaggtagaaatcaactttgggagggtcatctgcatggtattgaaagttggaggggtttggatgttatgttttagagttggagggtgttttctagacatagtgaaaagttcgggggtgtagaatgaacttatcccttaaatctaacataaaatatattttaataatatatttattttgtgcc

SEQ ID NO: 23555 - DNA, 827 bp, Oryza sativa
  ref <308>: DATABASE ACCESSION NUMBER: AK073655
  ref <309>: DATABASE ENTRY DATE: 2001-12-06
gacccaagcccatccatccctgcaagcgacgaacacatctcatcacacccgtcacctctcctctccccaaatctcgcgctccgctcctgctcctgctcctgccatggaggaggctcaggttgtggaatccaaggacggaacgatctcagttgcttcagcatttgctggtcatcaggaagccgtacaagacagggatcacaaatttttgtctaaagcagttgaagaagcttaccaaggagtagattgtggccatggaggtccatttggtgcagttgttgtccgtaatgatgagatagtagttagttgccataacatggttttggattacactgatccaactgcgcatgctgaagtaactgcaataagagaggcttgcaaaaagcttggaaaaattgagttgtcagactgtgaaatgtatgcatcatgtgaaccttgcccaatgtgtttcggcgctgtgcatctatcacggattaagaggctggtgtatggagccaaggcagaagctgctattgccattggattcgatgacttcattgctgatgctttgaggggaactgcttactaccagaaggccaacttggagataaggcgggcagatggcaatggagccctgattgctgaacaagtcttcgagaacactaaggagaagtttcggatgtactaattgtaagtaaatacattgtgggatttcacatcgcaaaagttccaaacgttcagaagtcagaaagaataatgtaaccttcggcattctgccattagtggaccataagctatcaatttaaatatatgttactctcattatgaggaaagaaaattgttctatctcg

SEQ ID NO: 23556 - DNA, 973 bp, Oryza sativa
  ref <308>: DATABASE ACCESSION NUMBER: AK073656
  ref <309>: DATABASE ENTRY DATE: 2001-12-06
gtggagtgtgagaggcaacggcggtcagggagcaggcgtggttcgtcggcgagcagctgcgggcaacggtgccttggcgtcacgcatccgccgtcactcacctcaagcttgcgggctctgcgaccaccctctcatagtcataggccacagaagcaattggtcttgccaccgccgtcgcacgcgctgcccccaccaagtctcccccgaggccggccgcacgaatcacgctatgccgcattgccacgggctgccgccggcaatccatgtgcgctgatgtgcagacagaggtgcaggaggaggggaaagcgcggcggggagaagttgtcgtatatgatggtggtacgggcggcgctgctcctcctcgtggcgctcagcacactctcgctgctcgccgcggggtctcgggacgaccgccatgccggcctcggtctcgccgcgcttctgcccatccacagttgtccccggcaagcctctccccgcagcatcgtcgcggtggctaggcaccgtgatggcggcgagctcctagccgtcgggatcggccggaggagcgagagaagaagagaagtgtggttgatagtgggccccaccatttttcttttatccttgccactgacaggtgggtcccacctgctgactcagcaagtcaacagggtcaaagatgccacgtaggacaaaaccgcctccaaaaccacccggggagttgatttgcaacggttttcggagttgggggacgggttatacctggttttgtggttgagggatggtattcatacacggccatgttgagggagggatagtggacttattcctttgtgtgtgtgtgtgttggtgttggggggggggggggggcaaaagggccttaggttgctggaggtggaggtgggccgccgggaacggagtggtcatcgatgcaggcgacgctttctgtatgctacagcctataggtggaaaacgaaggtcatctgaaaggatc

SEQ ID NO: 23557 - DNA, 1153 bp, Oryza sativa
  ref <308>: DATABASE ACCESSION NUMBER: AK073657
  ref <309>: DATABASE ENTRY DATE: 2001-12-06
gggcggcgaggaggagggttttgcacccttgcccccccgccatggccgcggcctctcgggctcccctcgctcgccgctccctcctcctcctccgctacaaggccctccctctctcctccccctcctcctcctcctcgtcgacccacagcctcctcccgaggccccccgcgttgtggccgcctccgcctccgccgccgccccacggatgcgagcggtggcgcgcgttccacgacgggcggccgcggggcccgctgtggcggagcaagaagctgatcgggaagggggccctgttcgcgatccaggggctgaagcggttcaagggggacgaggagaggctcggggagttcgtgaggcggtacgtggcgcggctgctcaaggccgacaagctcgccgtgctcggggagctggagcgccaggaggaggtcgatcttgccgtcaagatgtttaggataatacaaaaagaggactggtacaagccagatgttttcatgtacaaggacttgattgttgctctagccaagtgtaagaagatggatgaagcaatggtaatctgggggaacatgacagatgagaaccttttccctgacgcacagacatatgctgaagtcataagaggattcttgagatacggttccccatcagacgcaatgaacatttatgaggaaatgaaaaagtcacctgatcctccggaagaattacctttcagggtattattgaagggtcttttaccgcacccacttttaaggaacagagtgaagcaagattttgaagaattgtttccggaaaggcatatctatgatcccccagaagaaatatttggtctgcgctgaggttgaggattcaacgacttcatgcaccttctgcgtttggacttcattcggattacctgcatctccagaagttctccagaatttgatgtttggagtggaaatctgtcaggtgaaagattaagttatcgatgatcatgcttaagagaggtagacagaaacaaacagaccattccattagctgtactgtaatatctatggttacggaaattttgttgttcaggcaatctcttaaaatatcaggccttttattcacaaatgccactttgtgtatctgtaatccaggatattttgaaaagtagcataaaaaaaactctttcattggg

SEQ ID NO: 23558 - DNA, 901 bp, Oryza sativa
  ref <308>: DATABASE ACCESSION NUMBER: AK073658
  ref <309>: DATABASE ENTRY DATE: 2001-12-06
gactgcctgcctgcttctttcccccactccattaatccaccaccattaatatttcttgcgctagctgcttgcgatctgctagcactcgcactcgcagctgctgcaacaaaagaagaagacggggagggagggaggatgctggagatctggagcagcttcggcctctggatgctgctgctgatgctggaagctgtttcccctgcatagatccacgggaaccccgcgaacgacctggtggcgctggtgaacgccaaccggacggcgaccaagctgcctcatctgcgcaccagcgctggccttggctgcatggcgctgcagtacatctccgactgcattggcattggcattgggtgcgccggtgacaacacggtggcgtgccagccccccgaggcccacatcaccgatgtgtacgccgacaactgcggcgtcgagctccccacggtggacgtcatcgcgggccgcctcatagccgtccaccaggagagttgcccatcggaggccgcgtgaacggccgtgatctctggctccggcaggagcactacagctataaaggtcatccgcggaaagaagcacacacagatagctgccgggttagaccgcgcgcacctccgcaggccgttattcaagagcctcctattcaccagcggtagggccatgtccactttcctggtcgaggcgggcgtcaagggcgtccaccagtctcttgaggggttcagagagcgtgagaccattagtctctctgtctccggcagcagtgccaaggccgatggtgtgcgtcttctcctcttcatcgacatcctcctaacagtggatcaagtttattattagtaattagcggtgatcacagtgccccaggtctagtcgttttctgagcccagtaagatgcatattttattttgat

SEQ ID NO: 23559 - DNA, 1231 bp, Oryza sativa
  ref <308>: DATABASE ACCESSION NUMBER: AK073659
  ref <309>: DATABASE ENTRY DATE: 2001-12-06
gactaagcgttggcacactgaagaagtaaccatgtccgggcacgccgcgccggcgccgcacgtcgtcgaggactatcgcggcgtcatccagctcctcagcgacggcaccgtcgtccgctccgatgccggctccggcgccggcgccctgctgccgccggaggacttccccgacgtgccgggcgtccagtggaaggacctcgtgtacgacgctacgcacgggctcaagctacgcgtgtaccggccgcccaccgccggcgacgccgagaggctgccggtgctcgtctgcttccacggcggcggctactgcctcgggacgttcgagaagcccagcttccactgctgctgccaacgcctcgcgtcggagctccgcgccgtcgtgctctccgccgactaccgcctcggccccgagcaccgcctccccgccgccatcgacgacggcgcggctgtcttgtcatggctgcgtgaccaggccatgtccggaccgggcgccgattcctggctcgccgaatcggccgacttcgcccgcgtgttcgtcgccggcgagtcggccggcggcaacatgagccatcacgtcgcggtgctgatcggctcgggccaactcaccgtcgacccgttgcgcgtcgccgggtacatgctcctcacccccttcttcggcggcgtcgagcgcgcgccgtcggaggcagagccaccggccggcgcgttcttcacgcccgacatgtccgacaagctgtggcgtctgtcgctgccggagggggcgacgagggaccacccggtggcgaacccgttcggaccggacagccccagcctagcggcggtggcgttcccgccggtgctcgtcgtggtggccgggcgcgacatcctccatgaccgcaccgtgcactacgcggcgaggctgaaggagatggagaagccggtggagctcgtcaccttcgaggaggagaagcacctgttcttgtcgctgcagccatggagcgagccagccaacgagttaatccgagtcatgaagcgatttatccacaaagatgaaggttctaataacttctaaatccaagtaaattaagttggatcagtagagatgcatggttggtgttctcatgtggtctgaatctgtgttctgtttcatcttttgtgtaagtgtgcaacttcgattctgtaaaacttggcaagtagatgaacgatgtcatttatatgcgtgtagcttgtcaaaatacaaagtagaaacctgtatctg

SEQ ID NO: 23560 - DNA, 1264 bp, Oryza sativa
  ref <308>: DATABASE ACCESSION NUMBER: AK073660
  ref <309>: DATABASE ENTRY DATE: 2001-12-06
gccaggcgttcgagagctacctcaccaagaccatcatgtcctcgtccccgaccagcaccctcatgtctccgcccaagtcgcccccgtcggagtccccgccattgtcgcccgacggtgccgcggccatccgtcgcggatcttggcccggcgtcggctcgccggtgaacgacgtcctggcctcgttccgccagctccgcctcaacaaggtgaagtcgtcgccgtccggcgggtggagctacccttcgtcgtccgccgtctacgggtctcccaaggccgccaccggcctctacagcctccccaccactccactggcttccacggcaacggtgaccaccgcctccagcttcatgcccaacctggagccactggacctcgggctcatcggcgacgaggagccggtccagagggtggagtccggaagagccctccgggagaaggtgttcgagcgactgagccgggatggtgccatctccggcgacgccacagccttcgccaccgccggtgttggcctcgacgttgattgggtgtccgacctcatcaactgaggcttccaagtcgctattggaagccccttttgtgagcatcaaggatgatggcatggaggaggagaaggtggcggtaagaagaaaatgatggcacgacaaaaaaatccttcattttcttttgtgatttcaagtcaagtttctactaattcctgtacatatctatctcccatgtgaatattcatggttggtggagaggaggcaagtatggaaagatgggtggatttgttttggggttttgaggtagtagcaaaattacccacaaaaaaattaggtgaaaaaaaaaagaggagtagaaatggaggtgattcagtgtctcctgtgtgcatagggtgtgtggaggtgaaggaagcacggaaggaagaagatcatggcggaagaagatggccggatttcggccgccgtcgcggcggcggccctgcctatttcagtgatttctgggggtttatcctctgttcatcgtttgttgcatcatcgactagctgatgaagatcgtcgatcgatttcaatcaagccccccctcttgttgatttcctattttgttgatgtaatctttgttttgttaagaacccccaacagcatattttgtaccttagctttaaatctgaaaatcttttgctgactcatctacctatatgtggtgatgaagcccccctcaatgtattgtaatcacctgcttcaagtaaatgatccaataatattatgttgctatatgtttcatt

SEQ ID NO: 23561 - DNA, 2001 bp, Oryza sativa
  ref <308>: DATABASE ACCESSION NUMBER: AK073661
  ref <309>: DATABASE ENTRY DATE: 2001-12-06
tctctcttcctctcctctaaccccctcctctctcccttctccatcgacacggaaagcctcccccctctcctcctccccgaaaagaaaaaaaaaaaacgacgaggaggaggaggagaaaaaaaaaataaattagggctttctcctcgtgctccctgcgattgcgccgcccccgattcgcccaatccaatgccgcgcgcctccagggccccgaatccccctccccccgccgccgccgccgcggagaatgtgagtagcgatgctggccatgctgagccatcttgcagcacacctgctcatcatcaggttttccgccctgttactcggtctatgacccgtaagcctactgctgctgctgctgcttcatctgatgtgaagggaggagaatctgctagtacaagcaagcgtagagattctacagacccttgctttaacacccaatctgctgctgcaagaccatctgtaacccgtgtccgcacccctcataaagtggcttcatctgcttggaagccccttacccagcctattgttatgagtgaagacctgaagcgggcaagcgttccttcaaccaatccttctgccaagcgctccagagttgcttcgtctcaagctgctgaagatagcccaactgttcacagaggcaaaaagagaaatgaagaaagcgcgagcaaaggtgatcagttggatggggcagtcatcccatctccatcaaagaagctgcaaacgggcaagagcccttctgatgtacttccaaaaaggaaaccaactatcagaaataaggacggtaaattagctgctccactgtctatggttaagttggagactgaaagcggagagagttctgtcattgcttcctcaaaaattggtcctgctactacaaatgacaattgtcagtcagctgaacttgcacagcagctgcagcttgatacaaaaaataattccaatgatatcattacagaagctattgcctatggaacaaaccaagctgatctgcttgttgctccagtcactactgatgctattgccagcggatcaagccaagtcaatctgtcggcttttccagtcactgcagaagctatacccaacagaactcaccaagtcaaccactcagctggtccattaaatataaaagctatgatcaacagaacaagccttgttaataaaccagttgctccagtcaatgccaaagctattgccaacagagcacagcaagttgctgcacacaataagttgccttctccggtcattgcagctcccagacaaaacttgcaagatgatcttcaaaggaagcttgctaagttactcattgctaggaaacagcccagtggccaggctggtgcaactgctccattggtctcaccgaaactagagatcgggaaagctaagggctcgtcatccaatgttctctcagatcctgcttacgcgaacgtgaaggcattgttgatcaagcagcaagaacagctgctgcagcaatttaaatcggcaaattcacaaccgcaggtccacatcaaaggaccagctctgacggacaaggatgaggcgccaccagttgagccattggggacaaggtgccagctgtgcaagctcgatatagcattcaggcctcaaggtgacgatgctcgcgacaatgctcctccagtcgcggccgtcctgggctgccaccatgcattccatagcagctgcattgaggccatttacggcctcgctgagccttcccagtgtattggctgccttgattctgccaaggcctgacgttgcactgatcaacgatcagtagcagcagcatcgatttgtaccggatgaaccatgatataggttacaggttttcgttttaggatacaatgtaggttgggaggttgaggtctcaacaataatctgttggtagaaattttctgggtcaattatggctcaagtcggagttggatagtccctttttctttacctgactgctttagatgatgtaattagcaatctctgggtcttgatagtgagatggatcgtttg

SEQ ID NO: 23562 - DNA, 1651 bp, Oryza sativa
  ref <308>: DATABASE ACCESSION NUMBER: AK073662
  ref <309>: DATABASE ENTRY DATE: 2001-12-06
gatccatcgaaaccccactttattagcaccaaccccgtctccttcctccattcctccgctgctagaaccttctagaagctctcctcctcctcccatggcggcgacgatcgtgtccgtcaaggcgcgccagatcttcgacagcaggggcaaccccaccgtcgaggtcgatgtgtgctgctcagatggaacctttgcaagggctgcagttcccagtggtgcatcaactggtgtctatgaagctctcgaattgagggacggtggatctgattacttgggaaagggtgtttccaaggctgtcgacaatgtgaactcggttattgccccagctctgattggcaaggaccctacgtcacaggctgagcttgataacttcatggttcagcagcttgatggaaccaaaaatgagtgggggtggtgcaagcagaagcttggtgctaatgcaatcctggctgtgtcactggccatttgcaaagctggagctatcatcaagaagattcctctgtaccagcacattgccaaccttgctggaaacaagcaactggttttgcccgtacctgcattcaacgtcattaacggtggatcacatgctggaaacaagcttgccatgcaggagttcatgatccttcctactggggccgcttcattcaaggaggccatgaagatgggtgttgaagtgtaccacaacctgaagtctgttatcaagaagaagtatggtcaggatgccaccaatgttggtgatgaaggtggttttgctcctaacattcaggaaaacaaggagggtcttgagctcttgaagactgcaattgaaaaggctggatacactggcaaggttgtcattggaatggatgttgctgcttcggaattctacaatgacaaggacaaaacctatgaccttaacttcaaggaggagaacaatgatggttcacaaaagatatctggtgatagcctgaagaatgtatacaagtcatttgtcagtgaataccccattgtctcgattgaggatccgtttgaccaggatgactgggaacactatgctaagatgaccgctgaaattggagagcaagtgcagattgtcggtgatgacctccttgtcaccaacccaacaagggtggcaaaggcaatccaggagaagtcatgcaatgctcttctgctgaaggttaaccaaattggatctgtcactgagagtattgaggccgtgaagatgtcaaagcgtgctggctggggtgtgatgaccagccacaggagtggtgagactgaggataccttcattgctgatttggctgttggtttggccacgggtcagatcaagactggagcaccctgccgatcagagcgccttgccaaatacaaccagcttcttaggattgaggaggagcttggtgcggctgctgtctacgctggtgccaagttccgcgcacccgtggagccctactaaacttgatggtgaagacaggatgctcatttctatccgtaattgacttcccggtcgaactctagttaaaaagctcgtagaatcgagaaataaatcctccactgtatgagcggatatgtacccccaaacttgctccaattttggtgatgtgtagttctgagcttgcgtgttctctgaacctgttggatctttaatacagagagtatggcttttgttatt

SEQ ID NO: 23563 - DNA, 1582 bp, Oryza sativa
  ref <308>: DATABASE ACCESSION NUMBER: AK073663
  ref <309>: DATABASE ENTRY DATE: 2001-12-06
gagctccaagcctatccaagtggaacgcaacagaggcgtcgtctcctcctctcctcgacctctcgcggttggaggtctcgcgcgcgcgtgaggcaacaagtgcccgttcgatcgaccggcaaggatggcgacggcagcgagagcggcgtcgtgcacccccgccgcttgcgctgtgttggtcatccccatcctagtcctgatcatggcagggcaagtgcgagtcgcggaggcgctgtccatcggcgtgaactacgggcagatcgcgaacaacatcccgtcgccgtcgcgggtgtcgtggctgctccggtcgctcaagatcagcaaggtgaagctgttcgacgccgacccgcacgtcctgcgcgcgttcctcggcacgggcgtggagttcgtggtcggcatcggcaacgaggccgtcccggcgatggccagccccgcggcggcggagtcgtggctgcagctgcacgtggtgccgcacctccgcgccggcgcgcgcatcacctgcatcaccgtcggcaacgaggtgttcaagggcaacgacaccgccctccaggccagcctcctcccggcgttgcggtccgtgcaccaggcgctcggcgcgctcggcctccagggccgcgtcaacgtcaccaccgcgcactcgctggacatcatgggcgtgtcctacccgccgtccgccggtgcgttccacccctccgccgcgccgcacctgcagccgttcctggccttcctgtcggcggcgagggcgccgttcctcatcaactgctacccgtacttcgcctacaaggacgacccggcgcgcgtgccgctggagtacgtgctgttccagcccaacgccggcgtcgtcgacccgcgcacgaggctcgtctacgacaacatgctgtacgcgcaggtggacgccgtgtacgcggcgatccaggcgatggggcacacggacatcgacgtgaaggtgtcggagaccgggtggccgtcccgcggcgaccccgacgaggccggcgcgacgcccgagaacgccgggacgtacatcgggaacctcctccggaggatcgagatgaagcagggcacgccgctgcggccgcaggcgcccatcgacgtctacgtcttcgcgctcttcaacgagaacctcaagcccggcccggcgtcggagcggaactacggcctcttctaccccgacggcacgccggtctacaacgtcggcctccgcggctacctcccgcccatggcatcacacgaggcagcgacccaggtgatccattggttcctacttatcgccaccgcatcggtcgttttcgccttatcgtgacagtatcagccactgtacttagtgagtcgtgacaactgcagttaacgggggtgccattcagaagctgaaaatggcttcgcagtgatattagattagaggatagatctaacagaaatttggaaagtattaacccaccaggcttgcactgcctttcgtcttacagtgttacagaggaagagtcatacagaagaattgtcattggtcgataatacatagcaaatcatcagttgtaagcgtatcacattcttttgggatttataaatgatcttgttctattctggc

SEQ ID NO: 23564 - DNA, 2311 bp, Oryza sativa
  ref <308>: DATABASE ACCESSION NUMBER: AK073664
  ref <309>: DATABASE ENTRY DATE: 2001-12-06
gagtgaaaaaggcgagagcgggagcgcggccgcgcccaccctccctccctccctccgcctccacccccattcgattcccccccttcccttctcttcttccctccccaaccgccactctcccccccaaatcccccacctctcctcgagaatggcggagtcgcaggtggaggggatgaggaaggcgtacgcggagatcatgctgaacatggcgcaggagtcggcggcgcgggtgctggcggcggagcggcgggcggcggcgctcgcggggggtttggcggcggcgagggaggacggcgtcgccgcgctcgtcaggctcaaggccatcatggaggccaggataaaagaagcagagtcacaatctttggcaaacattaataagattaaggaactacaagagcaattacatggtgctcaagatacagtggcctcccttcaaattgaactgcagagatcaaatactgaactggagcaagcaaggagcactttggctgaggaaagaagaaataaccttcgctcctgcaataagatcaattctaataaaaatagcagctcttcttctagaaagcatctacaaggcagagtatcctcaaagagtaaaaatacggcaaaggaaagtggagctgttgaaaacttggagacactgtaccgttgtgattctgatctgggttcattcatggctagaactaagaatcctgagctgtatcgcaatgggtgtacacaacgtatccgtgcaatcaagcagcgaagtccaaattcggatacatccctggtagaaaacagcaagcaaactagtgcactgaatagccgttctaagactggaaaaactgataccaacagaaacccacagagcacaaggtccatcatggaacagatacttcaaacaaaatttctggccaactgcaagagaaagagaggtaggcgaagcaggccaagttacatgcatgataattctggtgagcatgggcaaacagagtacaagtcgtctgatacatctgatggaaatgggtgtttgctgctacttcaggctcttgaacaagatctttcacctctaaaggcgtcttctggaagtgttggtgagggattagctgaccagaaggatgaattgctcaaggatgaaaaggatgctgacttgaatcttcaccctgcttcccctggaccaaatgatgtactttcagtaaacaacatgcagatgaaaaggaggaaaaggtctaagactatgagagtctttgaatctgattttgaggcaaaagctgcccctgaatttgggaacaccctgccaaaatcaagtaataataatagcatgctaaatagtgaacagagctctgatccacctgctggaaacaatggtcctgttttgcaatgtactgctgaaaacttgatgcacgtgactgatgctgcgaatgctgatcaattaaagtctgagaacagctccccgctagtccctcagtcaacagagagtgaaattggagatgaaggtaactcgcgagtggatcacaaagagtgtagaacaccagataataatgcaatagtcttggaagaagtgaatgtggataaaagctgcattattttagcttcagatggagctgattcttcgatagtcagctccctggacaaagaagaaaatgcaaaagaagcaacttctggagttgccgtgcaagctgaaggtgccagatatatcaaatacacattcaatcgcaggaaacgcaaggccgcgcctttagacagcactcctcaaggggctgtccctgagaaaagcagtagtgtggtttgcccatctgagaatcatgagcctcatgcaaagcctgagacgcaagatctcgtcatagagtcacctccaggtgacaatcaactaatccatgttgcccagcagctcatattgctgtcagcgcaaaaatgatgaaaattttgtgatacatcaaagcggaaagagggattggttcgaaagaataatgcttaagggacggctccaataagtggatcatggatcgtttgataatatgctaaatgcagttgagttcttcaacggagggggagagacttgtggtggtagcggcagagaaatcaagaaagctagcttcatagtgtagttatacctctacctaagaggtgttattatagtagtgtataaattaggcaggagttactatttattttgtagatgataaattttgaactattggtttaagaaggttataaattttgaagtggtactcagttattaagtcggttcaaattcagaggtgaaacatctgctcatgtaaagcaacttacttttctctagttttggggaaaattttggtcatttgatggg

SEQ ID NO: 23565 - DNA, 882 bp, Oryza sativa
  ref <308>: DATABASE ACCESSION NUMBER: AK073665
  ref <309>: DATABASE ENTRY DATE: 2001-12-06
ggatctctccgcaccccccaaaaaccctaacccgccatggcaaccgccgccgcctcctcctcagctcctcctcctcctccccaacccgcggaacccgccgccgatccaccggccaaggaagagccccagaacaccacggcggatgcggcggcgcccgtcagcgacgcgggggcggcggtggcggcggaggagggggagacggtgatcctggacgccgccgccggggagggggatgcggagggggaggaggaaggggagtgcgggttctgcctcttcatgaagggcggcgggtgcagggaggagtttgtcgggtgggagaagtgcgtggaggacgcggagaaggccggcgacgacgtcgtcgagcgctgctacgaggtcaccgccgcgctccacaagtgcatggaggcccacgccgagtactaccaccccatcctcagcgccgagcgcgccatggccgccgacctcgaggccgccaaggcagaccaggccgccgaggcctcctccgacgccgccgcctcctcctcgcagcagcagcagccgccgccaacggaggaagaagctgccggcgagaagaagcaggcggaggaggaagcggtggtcccggagaagcaagatgtcgcggcctgattggtcaaaacggtggggatcttgagaagaaattttttttgagggatcgatctgaggcgtttcagattgtgaattcttttctctttttttttcaaggattaattagttaaactttgatccatgagacggatggagagggggatggatctctccaagaaaatgtcaaattcatttttgggtggaaactatacacgagttctgaattatacggagatctcatgctctaataatgtgatgttttgattagattaaccg

SEQ ID NO: 23566 - DNA, 2467 bp, Oryza sativa
  ref <308>: DATABASE ACCESSION NUMBER: AK073666
  ref <309>: DATABASE ENTRY DATE: 2001-12-06
gggaacagatcattggccaagacggcgaacggcggcggcagcgacctggaggcctgttagctccttgttgatcttttttctacctcccttctctactagtctagaaacttctagaatcttttagcctttgtatccttccatcttccacctcaaaagcctccaatattgcaatagaatcaattgctccttgtactggattggtactattatttttgaaactgctattgtttcaagtgagtgaagtgggtctctaacaatctggtatcagagccaccaatccctactgagttcaccaagcaagttgccatggcaagtgaacataagttggatatgattttgaggcgaatggaggagttcgaacggaggcgggtggaggcagagcagacaaggagagctgatttccaatctctcaaggtagcgttagcatcatggattccccatttagaatagcactgaagactcacattttttagttgggaacaagccgtacaagatgacgcccaccatgtgttcgacaaaatgcttcagccccgatgtcgagcccaatctcactgttgatgtggttgttacatgtgccaccactgctatgacctttgttgatctggtagctgctgaggacgcaatcggtgcaacctacatctacaatcctatacagcccatggtaacgcccgccaagtgtttgacaaattgctccaaccccaatgacatcccagacctcatcgtggtagcagtggttacgtgcacctccacttctctggcctccatggacctagaagttggtgaggacgtcgcctgcaccactgaaattgatggccctgactgtcacaaggagacgcacaccaaatgttcgatgttaggccttgatgtcaagggtggcgcagaccacgtcggggacgtgttcctgacaatgacgggtgtggccaaggctgttccaatatctatcgagtcaattgacatcttctcggcaaggttagtcagcgacctcaagtaggacataccaatgcccaccgggtgtttgttgagaatccctcgatatgacagcaagacacagttcagtaaaaagctaaggctggaggggattgaattgaagccatggccacctccaacctacagtggagtgattagtggactgagttccggccaacgccttggccagcattcatctattgttggcttgaagaacatctacttgatccttggccaccatcaactgaatgggctaagttgaaaccgtggcccccaccacatgagaatgacatcctgcccttattgatcaatggcttcacccatatcctggtggatcgaaaagcaatttcaaaattctggaaagcgatttggagtgagtcaggtgaagaaggatcattgtttgttcctaagctatatgagctgcacttgagtggtctccttcagcattcagtaagcatgatatgacaacagcttatgtcaaggagaatatggtccactaaggctaaaatgaagatgttgaatggttgggattctaaacagtacctgagcattatgcggcctattccaggattgtttgttaaacttatccaagatatatctccaaagagccatcatcaagcttatgtagaagctcaagttgttaaaaattcttggaaaactttggtgaaaataaggtacactttttggctcaatcaattgctgtacctgagactcaccttggacaaagctgtattggctgctgttggttgtatggcccaaatgcaattagcacattccatttactaatagccatgctgcatattgtgagaccacttcccatgtagcaaagaaatgggctacagacttgaaaggccaaaccaagttggaagatgccaagtttgattggaatacactgggtacattggttcaagaggtcaattacatttaattgatctgtgacagggtttcttatggttgtagtgttcagaagtgctatcctcagtctattctattcatgcacaatggttggtgttttggtggattgcttgattggaactctaaacaatacaggaacagtatgctaactgtgaacccattggaactcatgcaagttatgttagtgccattagtgtgggatccagatgcgttgaaatgggtcagattggcagctatgctttacaaccagaaaattgtcaattaactacctgcatgagagcacattgcattaagccaagtgattatgagatcatcactgcctattgatgtaatggaggatgaaggcaatacagtttggacttcagaattttcagtcagtggagtggtacagaagaagcgattgaaacgtgatctttggtcgtgtgcatttgctgttaacaaggacatgaaggttgttatgttgctgcagcaatatggttctgcaaacttagtaattgtcaatttattgagtgttccatgggatccaggcggctctcatttggcattagctattaaacaaggaactaggctttcactgtgggctatt

SEQ ID NO: 23567 - DNA, 1255 bp, Oryza sativa
  ref <308>: DATABASE ACCESSION NUMBER: AK073667
  ref <309>: DATABASE ENTRY DATE: 2001-12-06
gacccaacaacccaccaccctcattccctcaagtcccaagatcgaacacctcgtgtccatggcggcggcgaagcggcgagtgcgcgacgcggaggcggacctgaacctcccgccgggcttccgcttccaccccaccgacgaggagctggtggcgcactacctctgcccgcgcgccgcgggccgcgccgccccggtccccatcatcgccgagctcgacctctaccgccacgacccatgggacctcccccaccgcgccctcttcggccgccgcgagtggtacttcttcaccccgcgcgaccgcaagtaccccaacggctcccgccccaaccgcgccgccgcctcgggctactggaaggccaccggcgccgacaagcccgtgctgcacaacggcaggacggccgggatcaagaaggcgctcgtgttctaccacggcaagcccccccgcggcgtcaagacggagtggatcatgcacgagtaccgcctcgccaagaagggcggcgccgccgccgccgcgggcgcgggcgcgctcaggctggatgactgggtgctgtgccggctgtacaacaagaagaacgagtgggagaagatgcagagcaggaaggaggaggaggaggccatggcggcggcgcagtcgtggggggagacgcggacgccggagtcggaggtcgtcgacagcgacgcgttcccggagatggactactcgctgccggcggcgtcgttcgacgacgccctgctgcccaaggaggaggcgcgcgacgacgactggctcatggggatgagcctcgacgacctccagggcctcggctcgctgctgcaggccgacgacctctccatgctcgcgccgccgccggcggcgaagacggagccgctcggcgcgccattcttctgagctctctctctctctctctctctctctctctctgtgactgcaccactgtatataaattcagagttttcagacatgttcagtattcagagttctcaggcaagttcagaattcagagatggttaaggattagtggcttatgagcagtatgatatgcaggttagtttctagtttagcagtgttactccagattggagatttgattaatgatttgattctaattaatgtagtatactgagtgttactcatcatcacagattcatcagagctgtgtcaagtgacaattctttttttttttatttcctggatcaagttcaccatgttgtgctcaagatttgtggataaatgcacatccatccttgaattggc

SEQ ID NO: 23568 - DNA, 891 bp, Oryza sativa
  ref <308>: DATABASE ACCESSION NUMBER: AK073668
  ref <309>: DATABASE ENTRY DATE: 2001-12-06
gatccagctctcgtctcgaaatcaaaagcacacccaagagagagtagtggtagttccagagcggtctgcttgcgaagttgcgatgcctgccatggccaagcccgcctcccgcgctgccaagcccgcgtcggcgccgaagaagcagaaggcaaagccctccgccgccgccggtggctcctcccacccgccttatttcgagatgatcaaggaggcgatcacggtgcttaaggagaggaccggctcgagcgcgcacgccatcgccaagtacatggaggagaagcacggggcgtcgctgccggccaactacaagaagatgctctccatccagctgcgcgggttcgcttccaagggcaagctcgtcaaggttaaggcctcctacaagctctccgacgccgccaaggactcgcccaaggccaagcctgccgcccccgcccccaaggcagcagcgccgaagccagcgaaggacgccgccaaacccaagaaggacgccgccgctgccaaacccaagaaggcccccgccgctggcaccaagcgcaaggcgccggagaagaaggtggtcgccaagcccaagaagtctccggcggcgaaggcgaaggccaagcccaagaccgtccggtcgccggccgcgaagaagacccgcaaggcacctgcagcttgagttgggagtttggttgatagctatgtaggtcccctcttggttgaaatggttggtgtttaggatctgtacaaaggctgcctcggctatgtctccctatttagatagttctcttgagtaggcgaagttctatgtatcccttgatggtgtagtataagaaatggttaggtctctggagatgtgaggcgcttccatctaactcatgaaatgaactttgccgttttctttgttgttct

SEQ ID NO: 23569 - DNA, 1334 bp, Oryza sativa
  ref <308>: DATABASE ACCESSION NUMBER: AK073669
  ref <309>: DATABASE ENTRY DATE: 2001-12-06
gagcaagagaagaacatccaagcgaagaaggtggggaagagaagaaacaatggcggcgcagcagctgctgctcctcctcccactcccgctaccttccagaaccttctcgaagcccctcccctcccttcccattcccctccccgccctccgcctctcctcctccgcctacgccgcccgccgccgcgacctgctccgctcgctccgctgcgggatgaggcgctcagacttggtggcggacctggagcttgccaaggacaagcagtggcaggggaggcgtcccaatggcattttctggatcttgctgctcaatgttggaatctatgtcgctgaccacttgttccagattgaacatataaaggcaatgtacttgtaccatgctttccctagttggtttcagtttgtgacatcaacattttgccatgcgaactggaatcatctttcaagcaatctattctttgtatacatttttggaaagctagttgaggaggaagaaggtagttttgcattgtggatgtcttacattttgactggtgctggatcaaacttaatttcatggttggttcttccaacatcttccgtgtcacttggagcatctggtgctgtttttggccttttcacaatcagtgtcctagtgaagatgtcatgggactggagaaagattcttgaggtccttatccttggtcaatttgttgttgacaaggtcatggaagccgcacgggcaactactgttacagggcactcgctgcaagtaaacaatattgcccatctatctggtgctttgatcggtgctgcattagtgttcctgataaatcgtatcccttttccatctgatggtgatagttcaaaatcttcaaaggataccagagaaaaaagaagctaatttattctccattgtccaaattaaaacggccactctaacaaaattaacccaatgcattttactttccttgatagttctttgtgtgcaaagtcagcttagttctggtttctatttgaaaagaagtcctatggaagcttaagttccacttacgatacctcggaatcatttcaagggctaagtgtactgctgttcccaaaaggaataaaagaaataaagattatcactttcttgtgtccgagaaattatgtagtgaggcttccagccgttatcagacaggacattttgatttggcattgtgtccagtgaatctcatagctggagagaatcacatccctttgcatggactactgttctgtatatgtcttggtttgcagtccagaattatgatctgtataagattaagaatattagctcttgctgtacttcttctcaaggaaataaaagagcaaatttc

SEQ ID NO: 23570 - DNA, 933 bp, Oryza sativa
  ref <308>: DATABASE ACCESSION NUMBER: AK073670
  ref <309>: DATABASE ENTRY DATE: 2001-12-06
gtttcccccaacgccgcctctttggagcgacctcctgtcgacgccgcgtcggcctcgcccccatccccatagccataccaggcctcaatcttcctctccaatctccttgtggctagttcggacagcagcagcagcgtgggtggtgccgctgcgattccggaggagggggcggtagttcggaggcggcgcgatgaggttggagaagtgctggttctgctcgtccaccgtctaccccggccacggcatccagttcgtccggaacgacgccaagatctttcgcttttgccggtcaaaatgtcataaaaatttcaagatgaagaggaatcctcgtaaggttaaatggacaaaagcgtacaggtgcttgcatgggaaggacatgacacaggactccacctttgagtttgagaggaaaaggaacaggccagagcgctatgaccggaatgtcactgagcaaacacttaaggctatctctcttattacaaagattagacatgaacggcagaagaaacatattacagagaggcaaaaacagggtaagacaaagcaacgggagagggatgctaaggagttggaacaggatattcaaatgcttccaaagaaggttaccctatcaacacaaaaaacaaaagtcgtggttaaagtttcccagcagcagacagaagagaatcttatggaagagtaatgaaatggaatcaagttttgcatgttgttatgtaggactgtgtttcatcaaatcgttactatgaacggtgtatttgactgggtaccagcaaagttttgcaccgaccgtctggtttgtgacttccagctatcttatagtatcaatagtattgatggctttgtgaactgttaaaaggatgtctatttttaagattaaattgcatattgcacaaccttaatcgtaatttattctacgaatgctagatttttgcc

SEQ ID NO: 23571 - DNA, 842 bp, Oryza sativa
  ref <308>: DATABASE ACCESSION NUMBER: AK073671
  ref <309>: DATABASE ENTRY DATE: 2001-12-06
gaaaagcgagaaaagaagccagcaatcgaaagcccaagcttccaaaaatccgcttccaattcgcgaaactacactagtcgtaagcgccaaatccaaccgacgatgtcgctgatccgccgcagcaacgtgttcgaccccttctccctcgacctctgggaccccttcgacggcttccccttcggctccggcggcagcagcagcggcagcatcttcccgtccttcccgcgcggcgcctcctccgagaccgcggccttcgccggcgcgcggatcgactggaaggagacgcccgaggcgcacgtgttcaaggcggacgtgccggggctgaagaaggaggaggtcaaggtggaggtggacgacggcaacatcctgcagatcagcggcgagcgcaacaaggagcaggaggagaagacggaccagtggcaccgcgtggagcgcagcagcggcaagttcctccgcaggttccgcctccccgacaacgccaagccggagcagatcaaggcgtccatggagaacggcgtgctcaccgtcacggttcccaaggaggaggccaagaagcccgacgtcaagtccatccagatctccggctaggcatcgccggcgtgccgcgtgcgcgacggagaggagcacggcggggttttcgctttggcctggtttgtctgtcgtgaaggagaaaataaaatcgggtccggttgagtccagtgtgtgtccgtgtctgtcttgaacagtcgtgtgtcgcgtcgtgtcactgggtcagtgtgttgttccagtgcgccgttcatcagccgatcagcgtctgtaccggtcttttgcaactagttaagtgatgaatactataatctgtt

SEQ ID NO: 23572 - DNA, 690 bp, Oryza sativa
  ref <308>: DATABASE ACCESSION NUMBER: AK073672
  ref <309>: DATABASE ENTRY DATE: 2001-12-06
gtatctcctccacacagcaatggcgaagccgaggctgctcgccctcctcctcctcgccgccctcctcctcgccctctccttctcgcacggggaagcgaaggacgtgcagctggtgaagccggcgcgccgctacgggcggtggcgctcggccctccaggccggcgatgggatggtgtcgacggtggcggactactccgatcccaagcccaacaccaacccccgcggcggcgtgctccccccgaccgaccccaactcgccgccggcgcactgaccgccgccgaccaccgtcgatctacggtctccttccaccccggtcagccggcgacgtatctgcgtataaatacactatatatactgtactaccgtataaatacctagtagtagtaaatacggcgtataaattcggaatacatgtgcgtaattaagtagtagaggaagaggaaggatcggaataagctgacggcgttcttctccttgggcatatacggtgcagtgaccgtatacatgtacgcgtacatacgtatacatgtacgcgtatacgtatgcgcggcgtacacactagccaattattgaagtagacctagctagacttgtgcttgactgtctgtcatgtgtgtgtgtgattattgcgtgtctgatgttgatcgtcgttgattgattattatgagattctgaacaatgttttgtttg

SEQ ID NO: 23573 - DNA, 1320 bp, Oryza sativa
  ref <308>: DATABASE ACCESSION NUMBER: AK073673
  ref <309>: DATABASE ENTRY DATE: 2001-12-06
gaatcgaacaaacaatttcaaacgcctccccgcggggggcctcccctcccctccatgaccaaaccctagccccccgatcgccccgaccttcgcccgcgaccgcgatggaggagctcttcatgcaggtcttcgagcgccgggactgggtgaaggcgcaggtgcaggagcaggtggtgtcctactccgagtccctcgcctgcgccatcctcgccgccggccgccgcccgccgccgtggctcctcccggcactcgactccgtccccgcgcgcggaaataatacaaaaatgtcatctatagatcttgctcatatgagaaatgaaaacagtctgcatcatgctcagtctcaaacctatcaacgggtcaagccaaaaacacatgaatttggtggttgcaaaccaggtggcttgcatattgtaaattatgccggagaaattgatcagtcacagatatgtgtgtctgagtctgttgtccaggagtttaacatcgcacattcactaaatgaaggacttccttctaccagtcctgttgaagtaccgcactctgtcatgagttcgctgcttcaagaggatacatcgcaacctgttgaatctaatttacaaggaatacctcattctgtctccagtccattgcctgaacagataacaatgggtgtttccgaaactgactctcttacagggatgacttgtatggctagccaacttcctgaaaatgtttccttgctgtctcttaaatctattgctcttgaaggacctgattctgtgttcactccactgtctcaaaaggaaatagcggatgcgggtgatactgtttctcttatggagccgattgctaaaacagaatctgttgcagggctgatttctatggctagcccacagtttgacaatgatcgattgcaaactaatttgctggaaggacctgattcagtgccaacttcactgtctcaagcagatgcaagacatactgctgaaactgattctgttgaaatcctggaccaagaagaagatactgatacacctagagaatacagttttcctgataagagagttgatgaaaacttgaagattcttgaacatcagagctcagaatgtcatgtgcggtctcctccatgtgatggatcttctcttcgacctgattatctggccaatgctatttgtgaagctccaaaaatgttgtcaacgccacaggagaatatgctgggtgacgaacagcagggctcagaatgtcatgtgctgtctcctccatgtgatggatcttctctgcaacctgattatctggccagtactgtttgtgaagctccaaaaatgttgtcaacgctacagg

SEQ ID NO: 23574 - DNA, 3901 bp, Oryza sativa
  ref <308>: DATABASE ACCESSION NUMBER: AK073674
  ref <309>: DATABASE ENTRY DATE: 2001-12-06
gtccgccgcatcgaggccaaccgcctcgccgccctcgagaggcgcaagcgcttcgcggaggccgccgccgccgatgcctcggtggggtggaggctcgccaagtgcccaagattcgctccgcctcctcctcagccgacgctgcctcctcctcctccgcggacattgcctcctcctcctcctcccgccgccgcagccgccggtggggttcaaagtggtgctggaggtgtgcggccccgaggatttctcggtggcggtggggcccgccgagggcttcgcctaccccggcgaggccgagtgcctccgcgccgtccaagattgcatctcttcggctgcaccattctctacaacacaaagtcaaagtggccatattttctccgtatttaagctcatggactatgagcccgtgttaaaatgcctgaagaagttgcctggagttgctgtgcaagatataccttacaaaacaaggaatgttatcaagaatctccctaagttctttgccgaaagctgcgcttctgataaagaagttgacgggcttctcatgaagttgccacaacacttacgagatgcactcctaccctttcaacttgaaggtgtgaagtttgggcttcgaaggcatgggcgctgccttattgcagatgagatggggcttggtaagactctccaggcaattgcaatagcttgttgctacaaggatgagggcccagtgttaatagtgtgtccagctgttttgcgttatacatgggcagaggaattggaacgatgggatccttcatttctgccaaaagatattcatcttgtgtttggtcaccaagacagtcttgaacgtttaggagcttgcccaaaggcagtggtcatttcatatcagatgctaagccgtcttcgcaaaagcatgatgaataggagatgggcactgatgattatcgatgaatcacacaacatacgctgcacaaagaaaaaacacgaaaaaaatgagacacaggctgtactggaactagcgccaaatgtcagtcgcattgtgctgctctctgggacaccctctttgtcaagaccttttgacatctatcatcagataaatatgctatggccccatttgcttggcagcaataaatttgactttgcgaacaaatattgcttgctacatactgttcaaggctgcaatgggagaacttaccaggatttttcaaagggtgctcggttgacagagttaaatgttttgctcagtcagactctcatgattaggcgcttgaaggagcatttgttgaatgaactacctcccaaacgtcgacagattatttggttgaagctgaatgcatcagatatcaagacagctatatcttgtatcaaaggggtgaacactagtgatgagattcctacaattgcctcgccagacaatagcaatgactctgaggaggtgaacatggaagaagctgatggttgcaagaaatctccaaggaatctcactacacaagaaattggtattgtgaaaatacctgggttcagcgagtggttcttaaatcatttcatcatgaaagaaccagctgataatggtagtctggactctcagtctaattgccagaaaacaataattttcgcccatcatttaaaggtcctagatggagttcaggtgtttgtcacagagcagaggatcaagtatgtccgcattgacggaagcacatctcctagggaaaggaaagatgctgtcgattctttccgtttaaatccagaggtaatggttgcaattattggaattactgctggcggtgttggtttagatttctcatctgctcagaatgttgttttcgtggagctcccaaagtcagcttcagagctgcttcaggctgaggatagagctcataggcgaggtcaaacaaatgctgtcaacatatatatattctgtgcaaggaacacattagatgagtcacattggcttcatttgaaccagagtctgttccgtgtctcatcattgatgaatggaaagaaagatgctataagagagattgaggttgatcaagtttaccaccttgaggaaagcagtaaatctgagggaaaatcacagcttggatttcttcctttggagaatcataatgctgattgtgggcatggaccaggagagaatgtagaaagtgatgatatgtccattgagaattttcctggcctcaacgatatgaattttgagtcagatttcttcagtattaggacaattcctcttcactttgaggatgatagccttcatacggtaatgcaaaattgtccatctgcaacagcacatgaagagatagcttttgatagttcttctatctctcaagcttcagttatttgcccttcaatgtcaagcgctaaatcagtaaaggctcgtcggaggctttctgaaatttttcagactttaggccttccagcaactacagactgcaatattgaagagaagtttctgcgatttgaggttagccagcacacaggccgaattcatttgtacatatgtgttccagggcatgattcaagacccagaccactttttgaaaacttcctgccagaagaagtagagtcacctttatgttctgataataccatgaaaacaagtaatcgtctcttgaagagggatcctgcattttgcaatacgttcaaagcgttcgtgaaggaatggttggcgcttagaccaattgagcagaagagactactgggaaagcccttacagcttcccttgagccttgagttgtgctacctgaaagataccaacaaccacagcacaaaagggttgcttaaaggaggaagtaagaggcgtgtaacaccatggtgtgatattagtaatcctttgccagaaaatgctgaatggagaaaggtggttttgcataatggtacaagtagagagagagagtacactcaaggctggactgttcacgatgaacctctctgcaaattatgtcaaggaccttgcaatggaaggcttgcaaagtcacctgaatattttgaagacctgttctgtggtctgccttgcttcgaggtgttcagatcgagaactagtggcaggtttgcacggcaggcactatttgaaattgaacatggtatatgctccaagtgtaaacttgactgtcacgagcttgtcaagaatatcagaccattatgcaagaaaaagagagaagaatacattaggaatgttgctccaaatattgcaagtagattgaaattgctagataagcttgtacatgagccaaatgagggtaatgcttggcacgcagatcatatagtgcctgtatataaaggaggaggggaatgcacacttgagaatttgagaactctttgtgtggcttgtcattctgaggtcacctgtgcacagcaaaaggagcgaaaagatttaacaaagaaagctaaagagcttctgaaaaacaccgtcaataatcagcagaaggatgaagcaagtgaagcagcagaagaagatgataagtcgttgcttgtcgttgtccctggtagtgcctactcctgagttgggtagcgtggttctggctagagcatatgtatgtagattacagttggacattcttccaaagggcaccaatattttgtgcatatatttgttgcgtgtggccaagattgcaattgcactcatgcattatgattgcgatctgcaaccgtcttctgtttagtcggggcggcattttgggctgtgtaaggaatggttgtgaaagaagaaaggaaatgtcaattttgttttcagtttttacccacacgaaacattggagaactgccacatgtttgtttgggaacttttttatttttaattttattaatagacttttacaaaaaaaacatttccaaggttcagatttggaaatgcttgttgggatgatctattaataaaaaaaaataaaaaagtctaaaaaataaaaaaaaaactttgtttggaggt

SEQ ID NO: 23575 - DNA, 1559 bp, Oryza sativa
  ref <308>: DATABASE ACCESSION NUMBER: AK073675
  ref <309>: DATABASE ENTRY DATE: 2001-12-06
gatctggtagcttcttctcgcggctgcgcgatggagagctgggtccgcgcggtggtggaggctatccactcatctcgcgcccaggccgtcatctacctcgccggcggcgcctcgcaggcgctcgggtggctgctgtccgtgcccggcgcgtccggcaccgtcctcgaggtcgtcgtgccctactccatggcctccatggcgcagctgctcggcaagatgcccttgcagttcaccagcaagcaggccgcagaggacatggcattggccgcgttcaaccgcgccctcaagctttctggaccaggtctacaagtaatgggtgttggcttcactgggtcactggctagctcacgtccaaaacatgggtttacggagcagagaggaagaagataaagtttcaagctactttctgctcaaggcaattgcagacggctgcaaagttcctgcaaccattcagtcagatgttcaagaacctgaacttccaaaagaaagcgtggaacaatttgatgaagaccaagaactccagcaagttattgatgggcaagtctgcatgaaagtgtatcacttttctgattcaatggataaaaacttcaacaggaaaataattctacctggttcattcaatcccctgcatgatggacaccttaggctattagaagttgcatcaagcatgtgtgatgatggtcttccatgctttgagatatcagcaatcaatgccgacaaacctccactatctatcgcagaaatcaagcgccgggttgagcaatttagaaaagtagggaagaatgtgataatatctaaccaaccatacttttacaagaaagcggagctatttccaggcagtgcatttgtaatcggtgcagacactgcagctaggcttgttaatcctaagtattatggaggtgattacaatagaatgctagagatacttctcgaatgtaaaaacacaggtacaacatttcttgttggtggtcgaaatattgaaggagttttcaaggtccttgaagatttggacattccagtcgagttaagggaaatgtttatctctataccagaggagaagtttcgcatggatatttcatctacagatataagaaaaaaacaagggccttgatgtatcaaacatgctgttcttcttatatactccccccgtcaccccgtcctaaaatatagcaacatgtctaatcgattactaagttgctatattttggaacagggggaatagtagattcaaaataaaaaaattggtggttcaaattattggatgaacttcgtgaaccgtcatggcagtgtgtcatgccataggttttggccctacgaataacaacttcttttctgtatcttagtaaaacaacagtggttggagatgtaaaaaacctacttccctgtttatctttctcttttcttggatgattaggcaattatgcccagttgtcctttatactattctttttttgtttggatgcttttcacatgtacctgtacaggctccacaatgtcacattatcagttgaaaaaaggacaccgctgaattcttgatagtgacatactcacatgctttg

SEQ ID NO: 23576 - DNA, 717 bp, Oryza sativa
  ref <308>: DATABASE ACCESSION NUMBER: AK073676
  ref <309>: DATABASE ENTRY DATE: 2001-12-06
tggtgtgtgtgtgtccgtgtgatccagagcgggagggaggaggaagcggagggggatggtggggggaagaggaggaggaggagggggaggaggatggggaggggcggggcggaagcaggagaggcgggcgctgatggtggcgttcgcggtggcgctgctgatgggcaccgccgtctacttccgcatctgggcgcgccagtccaccgacccctccttcaccgtcgacgaccgcgaggagctccggaggcaatttgagcgtgccaacctagaagcaatggatgaatctgctgaatggagaatgaaatatgacacagagtttgcgaaaaacaaacagatgcaagatgaacttttaaaggctaaggcctcactctctgcttcaactaagagatttagcctattgaaaaaggataatgaggtgttgaagaggcagattcagatcatgaaacagcaatgcgattgcactgttacatcgaaccttacacaagaataatgacattactacatacttcttttgtagtttagcattcatcttccttaaaatttgacatatgaactagcgggaggcctagtagagtggtgaagtatgaagtaggagaaatagctactgtagcaagaatattactttgcttgcaattgttagtgagttttacacatgccattttgaagtggttgctcctgactagcaaactaccagtgcaaatagaagatttttggttc

SEQ ID NO: 23577 - DNA, 1699 bp, Oryza sativa
  ref <308>: DATABASE ACCESSION NUMBER: AK073677
  ref <309>: DATABASE ENTRY DATE: 2001-12-06
ggggtcagaccgaatgccaacccttggcttgagagacttgagaggcagcactcccctaccaatccacacgacatgagcgcggcggcggaggcggaggcggcggcggtggagtcgttaccggacgacgtggtcgccgagatcctcctctgcctcccgcctcacccttccttcgtctccggcgcctccctcgtctgcaagcgctggctccacctcatccgcagccccagcttcctccgccgcgtgtgcgcattccatcgaacaccccccgtgctcggcttcttccacaactaccgggacctccccagcttcgtcgccgccgagggcgtccccggccgcaaccgcatggacggagtcgacgacggcggcgacgcgcggatgttcatcgactgccgccacggccgcgccctcctccgccgatacgactgggccgacctggtcgtgtgggaccccatgaccggggagcgccgccgcatcgccggccccaaccagaagatgcagggcggcggcgccggcacctcccgccgcagcgccgcgttgttctgcagctgcgatgtttccggaggcggcggcgaccaagactgccactctagccccttccatgtcgtcgtcgtgttcaccggtggctgccgcgcgttcgcctgcgtgtactcttcgctgaccgacgcgtggggcgacctgatctcaacgccggcgccattgccatgtgagctctgtgacacgccccctgccctggttggggaagcctcgtattggctttcttatgggggactcatacttgagttccaatttggcagccaaagtttaactctgatgaaacggccattggagatgcttgccgatgtacgtcttgtgaggttggaagaagatgggcttggtcttgccttcatcaaggattccaccttgcacttgtgggcgcgggaggttgccgatgatggtgcgccgaaatggaaatggataccgcgcagggccattgagcttgacaagttcctgccgatgccaagggtgctcaccggaaaatggtgtggtgaaatgtttgtttcgattagtgggttctctgaggatggaaatgtggtgtttatacggacccttgccggcgttttccttgtttggcttgaagcattgaagttcaagaagatgtctgaccccttatacatgatgactgttcacccatattcaagcttttatgtcccaaatgctaatgtcacagaataatgactggaagttccattgaagcccatgagatccaatgtgttgacagaggcaaggaaatactgacgttttcaagcaggatacgccacgggtatctgacatcaggtctgtgatctcatgatgtgcatgagttgcagttgcacgtagctcaaatcgtttgctcgactggccccgaaacccaagctgatattttgtaaagaattggtttaaatccacccctgtgtcagtcttcaatccctcctgttagctaccaggaaaaatgtattacatctgtaataggcatgctgcggtagtagattagatatattggtctctgcattttatttgtcttagctaggaagattggatgttttcttcgaaataataatacaaagtaggagagttatgctgatggtagatgaaaaacaaaattgaatgctcaggatgaatattggatatatttatgtccctatttcaatactatttctatgtgaagttcaaaaatattgct

SEQ ID NO: 23578 - DNA, 1498 bp, Oryza sativa
  ref <308>: DATABASE ACCESSION NUMBER: AK073678
  ref <309>: DATABASE ENTRY DATE: 2001-12-06
ggctccctcttggctgccatcacaaggccccaagagcccccgagctcgtcctcccctctcagccactcctcctcccttctacacatttcatcgaacaccttgtgggcgtgctgcatcttcttctctactccacggccgcgacatcgaacttcgtcgttcctccacccctcgtcgtgaggcaacgtctgcaacttccaggaggtgaaggttaatcaagattatatcgagaatagggattatcctgagcaggagagtgttgaagagaagcccttgtcgatacgcttgcgtatccaacaagatgatcggagtgcggtcttgttctaggtctcgttccccagtcgactgcctgtggcatgttaaccgggcccttatattattttgtcttccgctgttgttctctgatagttgttggcctacctggccctaacataaacacagaagatttccgatttccaaaatcgggggtctacacgccaacgaagccatcccctcggctactgctgccgccgtgtccctatggccagatcggggagagggaggggaggggagggagggcgtcaccggtctccaaccatcgcgccactggatccgtcccccgtcaccatcaccgccgccgccttgaggctggaggaagccactgtcgcctagaggggaggagaaggcaatcgcacctagatctgagagagggaggggagggagggcagggtcaccgcggccctccgacggctagatccaccgctcgcgcccctcccgctgccggatccgccgcctgcggccctgcgacggtcagatccaccgtgcctgcacccgcacccgtgcccctcccggccgaggatcacggcacccctcctggcccctcctggtagccgtcgtcactatcgctagtccgccgtgttttccaacactgaggaaaggctggagaagaagaggaggagatggaatgggagaggaggggataaggaatgggaagggataaaattagtggagattttaatatagagaatattttttcgtagtcggtgctcgttagctaccaccagcaaaaaaataatttttcgctggcggttgtttaagtgggccgctagcaaaaatagctatattttctctggaggtctacgtaacccaaccgccagtaaaaattgattttcgctggcggtttttagccccttacccctcgttacaatttcacaggcgggatacacaaaaaaccgccagcgaagaaaatatggtaccgccatgaaaaatctattttgcagtagtctgctgatcttgaagactgtcacgcctctggagaagaagaaactggttgctagaatcataccaagaacaaaaatattttcactgaaacatttgaggtaaataaaaaattaatggcctttgattttttactgctctttctttagcagggtgcgtgaggtgtgttttggttgtgtgcactttgttgtgcggagcccatgagtgttctcagaattttgagattagtaaagcttccattacc

SEQ ID NO: 23579 - DNA, 947 bp, Oryza sativa
  ref <308>: DATABASE ACCESSION NUMBER: AK073679
  ref <309>: DATABASE ENTRY DATE: 2001-12-06
ggtcgtcgtcgtcgtcgtctcctcgatcgggttaccacggctgcgggctacggcgactagcttccttctctcgccgaagcgagacctcgcctcccccgaggaacctgtgtgcaataatttgttgttacctctggcatccataagatggaggtcctgagttggagaacggtgtgcctcttggttctctgcaccgtggcgttgctgcgcccggctgcggctatccgctttgtgattgacagggaagagtgtttctcgcataacgtggagtatgagggggatactgttcatgtatcgttcgtggtgatcaaggctgacaccccatggcattatagcgaggacggagtggatcttgtggttaaggatcctaatggtgctcaagtccgtgattctcgtgacaagactagtgataagtttgagttcatagttcagaagagaggcgtacatcgcttctgcttcaccaataaatccccataccatgaaactgtagattttgatgtgcatgttggccatttttcgtactttgatcagcatgcgaaagatgaacattttgctcctttgtttgaacaaatagcaaaattagatgaagcgctttacaacattcagttcgagcagcactggctagaggcccaaactgaccgacaagctatattgaacgaaaacatgagcaggagggctgtccacaaggctctattggagtcagcagcgctgattgcagctagcgtcattcaagtctatctattgcgccgcctctttgagcgcaagttggggacatccagggtctaaatactccaaaagtagcagctcctcctaatttacactctcgtcatcccaactaaagctgtagttccgaactgtattggttgctagatctgctgtttacatgctgtgggttgctgtcacatagacctttaattattatgattccattagatgttttccttgaaacc

SEQ ID NO: 23580 - DNA, 1208 bp, Oryza sativa; identical to SEQ ID NO: 23541
  ref <308>: DATABASE ACCESSION NUMBER: AK099371
  ref <309>: DATABASE ENTRY DATE: 2002-08-28

SEQ ID NO: 23581 - DNA, 1232 bp, Oryza sativa
  misc_feature (706)..(706): "n"=any one base of a, t, c, or g
  ref <308>: DATABASE ACCESSION NUMBER: AK073680
  ref <309>: DATABASE ENTRY DATE: 2001-12-06
gagtagtataaaatagtagtcgtccccttcttggcgcgccgccgcagcaacagctggcgcgcgaggctgctcggatctatccgcggccgtggaaccgatggagctcgacgacgcgtctcgccactggattcggcaggatgggatttggatgcaagcactacaggaggaggtgcacgatccgggcgccgtgctgcaacgacgtcttccactgccgccattgccacaacgagtccacgaaagacggccacgagctcgatcggcacgcggttgaatcggttatctgtctcgtctgtgacaccgaacagccggttgcgcaagtgtgctacaactgcggtgtttgcatgggcgagtacttatgcagcgcgtgcaaattcttcgaccacgacgttgacagggaacatcttcactgccaagattgcggcatctgcatagttggagggaaggataacttcttccactgcgaaaaatgtggatcatgctactcggtcagcctgcgcgatagcactggtgcatcgagaactccatgaagaacaactgccccatcagctacgagtatctgtttgactctctaaggagacgtccgtgctcagatgtgggcacacgatgcacctgcaatgctccacgagatgctgaagcacgacaagtaatcgcccatgctgtgctgatctgtttccatgtggctctttctttcttagtttgtgtctcnactttgtgtgctagattagtcatctctctcgtgtgatcttgttcttcttggacgcctgataattgtaggttctcttgtcccatatgctcgatgcctatctttgacatggacaagttcttgagggctttggacgctgagattgaagcaaatatgctgcacatagattacatgggaaagggatggatcgtgtgcaacgactgcagggacacgacgcaggtgtacgcgagggtggcagggcacaagtactgccattgccagtctctcaacacatgcagggtggctgccccggtgctccctgcttaattacattgagtaaatttcatataaaattcacgctgcaaatgcatgtcaagcaccggcagcgatcaatattattgatttatacttagtattcagtagtacccgctgggttaatttaagtagccaattaagtgtattttcagtccaacatgaactgcatgggtcacatcttgtatgcgagattatacacgattttatgtaacaaagcaaggtgaatttgaaaggc

SEQ ID NO: 23582 - DNA, 1411 bp, Oryza sativa
  ref <308>: DATABASE ACCESSION NUMBER: AK073681
  ref <309>: DATABASE ENTRY DATE: 2001-12-06
gagtggtgcgccatgacgcgtgacggcgcgctgccggcgagcggcggcggcggggcggcggaggggccgaggcggtgctcgcagtgcgggcaccacgggcacaacgcgcggacgtgcacggcgaggggccccgtgaagctgttcggcgtgcggatcggcgacaagccgccgaccgcggccgcgggcggaggaggagggatgaggaagagcgccagtatggggagcctcgcgcagctggcggaggggggcggcggcggcggcgggagggaggaggggtacggctccgatgggaacgacgacaaacggcggaagcgaggtgaggcatggtcagaagaggagcacaaaaagtttctacttgggcttagtaagttaggaaaaggtgattggcgcggcatatcacgcaattatgttggttcaaggacgcctactcaagttgctagccatgctcaaaagtacttcattcgccaaacaaatgtgcacaggagaaaaagaagatcaagccttttcgatatggttatagatgattctgatgaccaaccactgtcccgtacatcttcacaagaagtagaagtagaagagaatctagaagatggacatcctgttactgcaccagtgatcccacctgctcctgtgcctatgctatcatcctctttggttccgccaccagtaccagcaatggcaccagttgctccaggtcctgtgttaacatctgcttcggccacactaccagtgtcagcagtggcaccccaaaccgatgaaaaggaacaagttgcctcaggttcaaatacaacagagacaggggctgcaattccagaagtcatgcccccatatggttatccaatgatgcttcctccatactacccaccggcatttgttccaatgccctactatggttatgtgcctgttttctatgcaccaccaggagcagtgcaagcacaacatgaggttgtcaagcctgtggccgtgcactcaaaacctccagtgcacatcgatgaactctacagcatgtccgaactcagcctgaagggcgaggctggtgtgaaaaacggcactcctaattctctgttgcctccaagaccaattggtagaccagacaggcaatctgcttttcatggaaaaggaccttctgatggctcttcaaatggactgattcctgcaaagtgattctgcagtaaaacatccattcatgtgtatctaatgcttagaagatagtaaatcataaaccccatgctgctgaaatggtgctgttgtacatgcaaaatgcttttactggtcattttagtttcatgtttggaggaagccatgtatgtcctgcgagtaaattgacttttagtttgacaaaaatgtagcatttctttgtcgttgtttctcaggcttcctcaaattgatttgaaaatctgaaggtttttct

SEQ ID NO: 23583 - DNA, 1778 bp, Oryza sativa
  ref <308>: DATABASE ACCESSION NUMBER: AK073682
  ref <309>: DATABASE ENTRY DATE: 2001-12-06
ggtgtcggatgaagcgccgagaggggcaaaaccctagctcccagatccttctctcccgatccccttcctctccggcgatgagcaagcggaacgacggcaaaggcggtccagcgagctggtggcgcgtgcggtgacgaccatcgagcggctcctgcttcgccagccggggggcacacccgagggcggcgccaagccgtgccatgacattagcggtccgcgggcgtgcaaacggcgccgagcggcccggacctcgtcgccgggggaggggaggggggcacgccaagctgtcggtggaggggtgctccaggatagcgcgcgcatggcgaatgcgacgtgactggcatgcagccatgccatggagcaaagaacagcgccgcatacgcacatctgcctcatactctcatcatcttctccatgtggcgcggacgtagcgtcgtagcgagaggagtggtacaccgtcggcagctgcggcatcgtgtactacttcttgcacgcgagcacgcttctggtggccacgcgtcgacggcgaacatccacgagttccgcgaggtgatctggaagaacaccaaccacgccggattccttggggtgaccgagcgcgagcaccagaacgcgccgcggcatcatggattcatggtcttccggtatatatgtgtcatgtggtcccagatctggttgatgcgcaccccgtgggcgtggcggatcgaccaaatcaacttctcccccgcgtcagaactgcagcgtccacatgctgatcatgatcatcgatggcgcgccggcggcgtcgtcgtggatctgcacgaacgtcagctcaccgtcgctcacgttcacgcaccggtacttggcttggggggttcgcatcgctggagtacgcggtagcttgcatccctcagggagcggcacgaagcgcatgtcaggctggagctcggccaccaaacggatccggtgtttgccatccgctgcagtcctggggatcatgccgacgttcccggcgcagaggagccggtagtcgtcggagcagggcgggtagaggaaggccgtgcggagccaagcgtcgcagaggatgtagccgccatcgttggcgcagctcggtgcagggtcgaagccgagcgcgacgccgccggggccgaaatcgtgggcgctgcggagcaggagtcggccggcggagacgcggagtcgacggagacgacaaggggtgatcgtcgcggtcgaggcagaagtcctgaggcgcgggggagacagagatctaaaggagggaggcgcccgccgcccggcggatcgcgccactcgaaggcgggcgaggtggtcgccggcctagaagttgaagtcgtcgtcggaagaggacacgctcgggacgcatgccaggatcacccacgtggtcgccggcggcggcggcggcaaggacgaggagagaaacgtacccacagggtcctcgcggtcaccgatcgtacatagaggatcaaacgagttggcatcgccttgcttgaaattgatctccggaacagcgagggtggccatgctcgttcaccgccggcaacgcgtgtgcatattagtccatggcggcggcggcggcggcggcggtggagcgggtggcgaactggcgacgtgcagtgcgggcgaggcgaattggaaatggtgcgctgcgctcccatctcaatttgccggcttatgtagagggagaaaaggaggagctactagtcgtgtactcgtgtcttgtgcttgtcttgcaggacaagctgggtaattagttagttaggcttatccaattctaatctctc

SEQ ID NO: 23584 - DNA, 558 bp, Oryza sativa
  ref <308>: DATABASE ACCESSION NUMBER: AK073683
  ref <309>: DATABASE ENTRY DATE: 2001-12-06
gacccaatcatccatccatccatccacccatccacatagcaacgacctctcacaattcacgaatcaccactgcacactacactagcggcagcaaggatgaagcttattggcagcggcagcggcagcggcgggcagaggagagggatcgcgagggcactcaaggagcacaaggcgaggctctacatcatccgccgatgcgtcgtcatgctcctccgctgctgatgatcgagctgaggatggcgtgcacacgccttaatttcttctcggtggaatatctttcgcagtttttctctcaccaattcaccatggatcggtgggggcgaatgtttgtcccttgtttgggtagatctgtttggatctgtctctcttaaatttgtacatactgatgagctagtgtagaccatatcaatataggatgcagatggaagtagtattagttagtatgagaggtaaattagttagttggggctgaagaattgggggttgtcctctacccaggaccaattttgccttgtatgatgatcagaagtgggaatgcaagagaaatctacatgattt

SEQ ID NO: 23585 - DNA, 1772 bp, Oryza sativa
  ref <308>: DATABASE ACCESSION NUMBER: AK073684
  ref <309>: DATABASE ENTRY DATE: 2001-12-06
gacgagtagcgagtagggcttcctccttcttgctgctttcggctgctgcttccgcgccatccatcctagtgaccacatcctccgccaccgccgatccccatccatcgcgcgagcatggtcgccgtcgctcgtcctgctgcttccgccgcatccaatgaaatggtttgtgggatatgtggcagcggtcatgaccaagatagaatggcaaaatgtattcggtgcaatgtctatcaacattgttattgcttcccagtggtgacatatgatgttcctgatgaatggtgttgttgtgagtgccaaaacaagtccaattgggaccaaactcctagtcaaggtgggcaaactatcaggaatagagtccatcaagatagcctgaaaattccaaacaagtttgaaaatgccaaagtgaaatacatttcttatgaagaggtgtcattattgaataataatgagagaccaccaaattgtaggtcaaattttcatgtgcgacgtacaaatagtcatgtccgtcctgcatctcctccaaatgcgaaacagtcatctagtaggagtgacaatcgtgcttatagccagttccatcggaaatttccaaatgggcagcagtccccctgtaggagtgacactcaagggccttttctgaaacgaggtgatggtgcaagtcagaaccagacagagattgctggtataaacatgaaacagaaagcacaatcaggtgagatgcttcgtccatgtcatagaagcagagcaattagaggaaaaattgactttcaggttcaaaatgagcagagggaaaagaaggtagttagtgcagataaagtaacaatgaacccccagagtcgggatgatcctagagaaaagagtggatccaatgttacaggtactgatattggacgtggatctgaaatgagtccggacaatgatataggcatgctggtggtcattaattcaagtgtggaatatgcaagacaacctccaccagaaatttgttggacgggatgctttcttgtctccaatggatcaaactgtaatcctgctgattttaaagcttactgcccatcaaaagtgtcgtctaaagttctcaatgtcatcaagagcatgcctagtataatagagttggatatattgcctcgaatggatgaatggccaaaatcttttgagataaatccaccagtttatgaagacattggcctgttcttcttctccactgaacttgaccggaatggaaagagtcaatctcatgtcatggagacgagctgcaattttgttatgagggcatatatcaacaatataaagttgctgatatattcctcagaagtgcttccacctgattcccagtggattgatggagagagctacttatggggtgtctttgtggatcccaagaggaggcataagtctatgccatttggttccatttctgcatgacctcttgctttccttgggcatagtgaaaggtgtggctgactccatggataactgagaggacgcgtttgatctatttgatcacatggctgaagggaggaatcttgaattgatgatttgggaggattccggcttataggacaataaataatcgttgtttggttcagaaattgaaccaccgatctgtaaaactgcatgttagtctcacagattgttggaattacaaccaactatgcactgtttgttatgttgtagaacagatcagccctagtacttttatatacaaataaaatgacataatggatactgaaatttgcaggtagcaaacccatctaaaaaagcatatcgct

SEQ ID NO: 23586 - DNA, 1518 bp, Oryza sativa
  ref <308>: DATABASE ACCESSION NUMBER: AK073685
  ref <309>: DATABASE ENTRY DATE: 2001-12-06
gcggagaaagggaaaaaccccgcgctgtgtagggttttaggcgggtcgaggtggaggggggaggatggccggcggctcgtcgccggcgatacggccgatcggcaagtcggcggtgcaccggatctgctccggccaggtcatcttcgacctctcctccgccgtcaaggagctcgtcgagaacagcctcgacgccggcgccaccaccgtcgaggtcaccctccgctcctacggcgaggactccttcaccgtcgccgacaacggcaccggcatctcccccaccaatttccaggcgctcgctctgaagcaccacacctccaagatctcggacttcggcgacctcgcctccgtcgccaccttcgggttccgcggggaggcgctcagctcgctctgcgcgctggggaagctgacggtcgagacgaggaccaaggacgagcccgtcgggacgcgcctggagttcgcgcactcgggcgtggtgaccggcgagaggaagatggcgcggccggtcgggaccgccgtgaccgtcgagaagctgttctccacgctgccggtccggagcaaggagttcagcaggaacattcggaaggagtacgggaaagtgatctccttgctgaatgcctatgcgttgattgccaaaggggtcagattagtttgcacaaatactgttggcaagaattctaaatcggcggtgcttaggactcaagggagcagttcactgaaagataatatcattaccgtatttggtctgaacactttcaagtgcctgcagcccttcaatgtgacaatctcagaaggctgccaagttgatggctttctttccaaacctggacctggtagtggtcgcaattcaggggatagacagttcttctatgttaatggcagacctgtggatatgccaaaggtttccaaacttgtcaatgagctgtacagaagctcaaatgccaagcaataccctgtggctgtattgaatttctgtattccaaccacatcttatgatgtgaatgttgcgcctgataagagaaaaattttcttctcatctgagcatgccattttgctatctttacgggaaggtattgagaatctgtactgccctcaacaatgcagtttctccatcaacagcgttgaagatcctgggaaggaaatggacccagccatcgatgggtctgatgaagacatgtgtttaacagaaaaggagaatgtttcagctcctgaaaatgacgatgacatggatgaaacagatagtgatgatgaggttacaccagagaatcggaaagtgccttcttcagtgacaacaagggtagccactggatctacacccaaagatgtgagccccttgtcaagaggcccacctgctcagcttgatagatctactttgctttcagcctaccggtatgaacaacgagaaaagacgcctacacgagtaaaaagttatccagcacaagcaaatcatgttagaacagggcttgctgcaaagtcttctccttcaagtgctgttcaaccttctattatgaaatttctatc

SEQ ID NO: 23587 - DNA, 1297 bp, Oryza sativa
  ref <308>: DATABASE ACCESSION NUMBER: AK073686
  ref <309>: DATABASE ENTRY DATE: 2001-12-06
ggttaatccctcacgcggcttctcaaattcgcacgcgacgggataaaaagaaaaaagaagaggaataattcgaagggaagaggaggaggaggatctcaatatctcatcctgctgccactgctcgactcctcctaccctcccccaaatccgcgagcctctagggttcgtgggatcccccggaaatggatccgaaccctagacttctcatcctactcgtcctcctcgcgttctccgccaccgtggcggtcgccgaggacggcgaatcgacggggggatcgaaggtctcgctggggcgccgtgcaggggggttcttgcacgggctgaagaaggaagcagtggtggagggagaccatggggtggccctcgatgaggtcggccccgggctgttcgatgcgctcttcgcgagtctctcgatgatcttagtcagcgagattggagatgaaacctttattattgcggcgctaatggcaatgcggcaccccaagtcaatcgttctgtctggtgcgctatcggcgctctacgtgatgacggtactatcaactggacttggtaggatagtccccaacttgatatcaaggaagcacactaacagtgctgctacagttttgtacttgttctttggactacgtttgttatacattgcttggaagtctgacccaaagggatctcagaagaaggaaatggaagaagtggaagagaagcttgagtcaggtcaaggaaaatcaacccttcgccggttctttggaagattttgtacaccgatctttttggaggcttttatcttaaccttcttagctgaatggggcgaccgaagccaaatagcaactattgcgcttgcaacccacaagaatgcaatcggagtagcagttggagcatcattgggccacactgtctgcacatcacttgcagtcataggtgggagcatgttggcatccaagatttcacaacggacagttgcaacaatcggaggtgttctcttcttggggttctccgtgtcatcgtacttctatcccccactatgattaacagcattaacagctccttactctttcttgataccctttggtcaccctgctccctgtgttgagcaaatgagtagaggaattaaattgattctttgggcacctctacgctacgattcgcaattcatgtatagcccttgcaaatgaaattgttcctgaccatgctacttcacttcagtctatagcagaagccgtctcgatgatgaaatcatgtctgattttttgcttggttgtacctgacatctaacttatacaatatatatacactatgttgt

SEQ ID NO: 23588 - DNA, 1694 bp, Oryza sativa
  ref <308>: DATABASE ACCESSION NUMBER: AK073687
  ref <309>: DATABASE ENTRY DATE: 2001-12-06
gaggagcagcctctcgtcgccgacgtggactcacccgacgccgcgagccgagagcgcgagagcgcgagaggcgagagcagcaaccaccgccgatgtggcgggcgaggcggtggccgtggccgtggcggtcgcagcggcgcgcggcgaggatgctctcgtcgggtgagccagcggcggggcggcggagggtggcggcgctgtgggggaacggggactacgggcggctggggatgggggcgctggagtcgcggtggagccccacggcgtgccccttcttcctcaccggccgccccggcgacgacgacgacgacccgcccgcctccctcgcctgcggcggcgcccacaccctcttcctcaccgagagcgggcgcgtgttcgccgcgggtctcaacgacttcgggcagctcgggataggctcctccgtgactcattccctggagcctattgaagtttctggctttgatgagaaagttgtggaagtttcagctggcaaccatcattcttgtgcagtaactgcggatggcaagctcttcgcttggggcagaaattcaagtggccagcttggtcttggcaaaagggcaggaaaagtagtttctaccccaagaaaggtggactgcttggctgacgctagagtgaaaatggttgctttggggtcggagcattcaattgctactaccgaggagggtgaagtcttgagctggggagctgctggtgctggcaggcttggacatggacataaaactagcatactgggattctctataactacaagtgaatatactccaaggttgatcaagaatcttgatggtgtcaagattaaaaggatagctgcgggaatgctgcactcagcttgtatcgatgaaaaaggtacattgttcatattcgggcagaagactgagaagggatttggaagatcaggtgatgaacttagaccaactgttgttgaggaggtaccattttctgaagaggttgcttgcggaggttatcatacttgtgttgtgacagatagtggagatttgtactcttggggttcaaatgaaaatggctgccttggtcttggtggtacagacatggttcgctctccggaggttctgaagagttctttatttaagtttcctgtatctaaggtatcatgtggttggaagcacaccgctgtaatttcaggtggagatatttacacgtggggctggggaggtgctaacggtacttttttcgaagagggccattcttctggtggacagttaggacacggaaacgatgttgattactttgaacctatgatggtggaattcggcaagaatgcaagggccgtccatgtgtcatgtggtttcaatcatactggtgcaatatttgaatacagcgagaactgaatttttacatcacagcaggaccccatccaaagcatgcttattaccaagttataagtgcacatacaagagaaaggaagataggataaagttttgctctttaattcgagtgtataaaaagaaaaataaattaaactgattacacccctcgcatagggtgggggtggggggtctaaattaagataaacagaacaagaggcaatctggatgcatttgttgtatgtatcagaattacaggttagtagaactgtatattgttctttcattatttttcttttaatccatatgtataatcttcacgaccaataataacaactctgatgctcc

SEQ ID NO: 23589 - DNA, 1821 bp, Oryza sativa
  ref <308>: DATABASE ACCESSION NUMBER: AK073688
  ref <309>: DATABASE ENTRY DATE: 2001-12-06
gactccgatccaacgctccggattcaccccaccctgacccgcgcgcccctccccaccccgatggccggatggcccgacctgcgcctcctcccccaaccctaatccctcctcttcccctctcacgcgccgccgccgataatccgccatcgccgcccatgctgataatcgccatcgctgcccacgctgcacctcgcccttcgcctccccggcggcaccaccctcggcaccgtcgattaatccctctatccccctcacgcgccgccgccgatcttcaccgtcgcgccgccgacgcccttcacctctccgccgacaccgcccactcctccgccccgacgcagcccgcgcctccgcgcatcgcccttcgcctcgccatcaccgccgccgtcgattgcctccaccctctttgacgccctatccccgccacacgcagctgcctcgccggggatgacctcgcgtcggtgacagtggtccagtgcccaatctgcttctcggtctgtgttgacactactgaggtctacggcgaggctactcccctcagccagcttgacaagcaaaaatttctcagtagcctcaattggcaatatcaccacacttctaggaggaggaaaggctgctccgcgggcttcgtagggatcccggcgagctcgcccccgtgactcctgcttcctctgtcacttgaatcaggacctagcatacatattcagacaggaggtctacggcgaggcagtggtgcggtcacaagttccaccactgaacgggctaactgagaccatggaatgatcatgtcattttgaaggatcggcaatggttgtaagcatcggcagattcgattcaccgagaagttcttcctcggtgacactgttgtccacaagtttctggttttgagaagacaacaagttctcagcttttttctgaagttctgatggatggcacagttagtactatggcattgcaatgggattattgaagcactgtaatgagctgggagtgcaacaattccctgtaaccaaaagtatgaagtggacacagtacagttcaagaacaggttcttctccacgaaaataaattggcaaggctaccttagagttggaaaaaaatctgggattgcaagagcattgcaagggagaacttctgaaaaggaattgtgagtacaaagaagagctcacaacgagtacagacttcttgcattgcattaacatatgatttttttaaaaaaaatcctgcaaaaggctccagttttcctcatatttgttgtattctatagttcagactttttgtgaccacgttttgaggatgggttaagttcccaagcacctcaatctgatgttgtacaacccttgacacaacataagcaccagctgtctatttctttggacaacactgtgtcaagcgagtggagatatggtaatcacggtgtgtgcatgaaagcctcttaggttatcgttatctttagtgcccatattatttggcttgggcaactataagaaactaatcaggaaaggtaagcagcttattctgcacggtcttaacgaggttatcccgaggtgggcttgcaacaggagagaggatggaaagtgaagccgttaggttaattaaacgaagattgttgtaccttggccctgaaacaattgaagagggctctctacttgtgttgaaagtttcaccgcattcagtaagcaaagaggatcattttgagcctcacactactgttggtaacttttttttttggcaagaagacaatcacgatcgcagtcaccaaccacatgttgatgaaaaaaaatacactggcctagaagatctgcttaactcttgtgcatattc

SEQ ID NO: 23590 - DNA, 2059 bp, Oryza sativa
  ref <308>: DATABASE ACCESSION NUMBER: AK073689
  ref <309>: DATABASE ENTRY DATE: 2001-12-06
tgggagaaaagagaggagagagagaggcaaacccgcaccaaaatctctctctctcccccagatttgcgccacattttcctcgccgaatcagcctcgccgccgtgggtgcagctgccgcgggatcccggcgagcgagcgccatttgagccggctgccggcgggtttgcgttctggaagctccttgctgtaaactattgaggggtaaagcctgctatttagtcaaggttgagggtgctgtataaatgacgcgggcgtccacaattgatttcgggcggaagacacataatgatgtcctctggtcagggccattgcgtcctgcaaacttcatcagaaataaattccctacatacaagaagagtttgaatgggatagttatcaaattgacagatgatcaagaaatgccatctctgaaagaggctgttgccaaggaaacagcagacctacttcatcggagtcagcgcctttcagtccgtgagcttgctatgaaatttgagaagggtcttaacactgccacattgttgtctaatgaggttaaatggagacaagctgctttattggagcgagacatccttctgaaaaatctaaagagtgtattagaatcgctgagaagtcgagttgcagggaaacataaggatgaaattgaggagtccctttctatggtggatgttttaacagttcagctgtctaaaagagaagacgagttgctgcagcaaaaggcagaggttgccaaaattgcaacctcattgaaactggcttctgaagatgccaggagaattgttgaagaagaaagatctaacgctcgcatagagatagataatgctagagctgctgtacaaaaagttgaacaattagttaaagagcaagaaattgatcctcaaataaatgggaaacaggatgaggatgaacttaaggaaaaggctcaagaagcacggagagtgaaaatgctgcattgtcccagcaaggcaatggacattgaaaatgagattgaagtcctacgtgaacaattagctgagaagtcctcaaattgtgttcatcttttgaaagagttacacctgcatcaaagctatgaggaaaacgatgtgtcctcgtatgagctggagggccttgaaagcttaggctcaatgttgcgcatagtttcccagagtgatggatatgttgatttatcaagaagtacaatacagtggttccgtgtgcagcctgaaggaaacaagaaagagataatttcaggtgccataaagcaagcatatgctccagaaccacatgatgttgggcggtatttgcaagctgagatcaaccattgcggtgaaatctctgtcgtgaagactgctggccctgtggatcctgctgcaggattggtcgattacgtagagactcttctaaggaatcctgaaactgaatataatgttgttgttcttcaagtgaatggaatcaaacagcctaccgattcaattcatgttctttccatcgggaaactgcggatgagactcgcaaaagggaagacagtaattgcaaaagaattctactcctcaacgatgcagctatgtggtatgagaggcggtggagatgctgcaccccaagcgatgtactggcaaccgaggagagacctgagcctggtgctgggcttcgagacggccagagaacgcaactctgcaatcatgctcgctcgcagatttgccatcgattgcaatatcatacttgctggtcctggggataaaactcactggtgattgatgaagacgaactgtaccagctaacctcttgtacgagctcagaccctgtgtttggaatcattgtacatctgtgtcgttgtagttagatactctaatacatatctgatctgtgaggtgtattgtagtgaggggtagtttagtagtagtaggttcgccaaggcatcgtttttactgccttgcgggtcagtctagtttagttggtacattatatttctcatttctgagagagagacacccacgcatgttgtagctgtgtcagtactctagtgtatgtaactttgttcatgaaactgtttaccaaacataatggactatccccctttctgctc

SEQ ID NO: 23591 - DNA, 2067 bp, Oryza sativa
  ref <308>: DATABASE ACCESSION NUMBER: AK073690
  ref <309>: DATABASE ENTRY DATE: 2001-12-06
ggtcgtttcggggttgccacaatgaagctagcgcgatgagtcctcgggtcagaatgtcggtggcgcggtggctgccaagcagcccagcgcacggcaagaccaagagccggcgctcgtcgtcggccgtgcgcccgacgctgctggtgatcgcggtgaccgtgattgccgtgctgctcgtcgccgtcgtcttcggcggcgccggccggtggacgctctccggcggcggggacaccagctgggtctccgccggagcccgcgtcgtcatcaacgccgtgtccggccaacaacgcgacggcgacgatcccgtcgcggcggcggtggagccgcggaacgacaggctcctgggtggcctcctctcgccggacttcgacgacagctcctgcctcagccgctaccgcgccgggctctaccgccggcagtccccccacgctgtctcgccgcacctggtcgcctcactccgacgctacgagtccatccaccgccgctgcggccccggcacctccgcctacgagcgcgccgtggagcgcctccgctccccgccgccgtcgaacacctccgacgccgagtgcaggtacctcgtgtggacgccgctcgaggggctcggcaaccgcatgctcacgctcacgtcggctttcctctatgcgctcctcaccgaccgcgtcctcctcttccaccaccccgccggcgaaggcctcagggacctcttctgcgagccgttcccgggctccacgtggacgctcccggagggggacttcccgttctccggcatgcagggcttcaacgcgcgcacccgcgagagcctcgggaacgcgctgcggcgcggcgagggcgccgccaaggaccacccgccgccgccgccgccgtggatgtacgtgcacctgcggcacgactacaaccgcaacgccaacgacccgcgcttcttctgcgacgacgggcaggacgcgctgcggcgcgtcggctgggtggtgctcctctccgacaactacttcgtgcccgggctgttcctggtcccgcggttcgagcgcgcgctgtcgcggatgctgccgcgccgcgacgccgcgttccaccacctcggccgctacctgctccacccgagcaacacggtgtgggggatggtggcgcggtaccacgcctcgtacatggcctgcgccaacgagcgcgtcggcatccaggtgcgctccttctactgggcgcgcatctccaccgacgagctctacggccagatcatgtcgtgcgcgcacggcgagaacatcctcccccgcgtgacgcagcaggggcccaacttcaccgccgccggagaccagccgcagccggcggcgcggccggggaggcgcaaggcggtgctcgtggtgtcgctgcacggcgcctactccgagaggatcaaggacctgtactacgagcacggcgcggcgggcggggagtccgtgagcgtgttccagccgacgcacctggaccggcagcgctccggcgagcagctgcacaaccagaaggcgctcgccgagatgatgctgctgagcttctccgacgtggtggtcacgtccgccgcctcgacgttcgggtacgttggccacgggctcgccgggctgaggccgtgggtgctcatgagccccctcgacaagaaggtgcctgacccgccgtgccggctggccgccaccatcgagccgtgcttccataacccaccaaactacgactgccggacgagggccaaaggcgacaccggcaagattgtccggcacatccggcactgcgaggacttcgagaatggcgttcagttagtggactgagctttgttccattttcttgcctagttgcctggatgttctcatggttcatttctgctgagtgtttacatcttacagcagtaagaaaactgaaaactataaactgctgttattatagcgtataaaggtcgataacatttactgaactgtaataagtagttgccaaatgccaaccgtgcgttgcactacaatttcattattaatgttgtaaaagaggttgttttttttaagttgcccttttttcccttatcacattgagaagtatgaaaagtattttcatccttag

SEQ ID NO: 23592 - DNA, 1062 bp, Oryza sativa
  ref <308>: DATABASE ACCESSION NUMBER: AK073691
  ref <309>: DATABASE ENTRY DATE: 2001-12-06
ggattggattccccttcgctggcatccgctcgtccagaccaccgccgccgtccgccggccgcttccccttcgccgccgggagcaagatcaggcggcgggggctcgtcgggatctgcccccatccatggactcgcttggcgccgcttctgattgctccgcctcgcgttgatgcgctgcgcgcggcatcgagccacaaggttttcctcatattaatcaataatcatggcgcttagcaaggttgaagtgaacttgttaaggttgcttgaggcagctcctcggcagcagaaccaggctaaacttgtccattatgtaaccacagccagggaattgttggagcagctaggagcagaaactactccagaagggatatcaagtgtatcaaaagctaagataagtgagtattcagaaaagattgaagcattggctgcccggcttgctgttccagagccagaaaatgaagtgccagttgatgagaatagagaggtagaaagctcttatgaaggagaaaagccaggaagtccaatatcattatcatcaggattacgtaggagaccaatagctcacaccgatgttggacctagcagtcatgcgagaaaggatagagacattggagcacctattaaattggatgcagaagcgcaggctcacattgagaagcataggaagctacaagaagatctgactgacgaaatggttgagttagcacgccaactgaaagagagcagtctcaccatgcaccaatctgttcaagaaacagagaagatccttgattccaccgagagagctgttgagcatagcttggcgagcactgggcgtgcagccacgcgagcagcagaggtgtactcgttggcttccaagacgacatgcttccagtggctgctcatcttcatgatgacatgcatgttcattatggtggttttgctcatccgggtcacctgagttatagctgcgtccgccgaaatattgaactagtatctgatgattctgtttgacattgagttttgtattcagttctgacatgaacatgaacggaaacaaagaaaagaaaacaaaaacgtttgg

SEQ ID NO: 23593 - DNA, 963 bp, Oryza sativa
  ref <308>: DATABASE ACCESSION NUMBER: AK073692
  ref <309>: DATABASE ENTRY DATE: 2001-12-06
ggtggccactttcctcggcccatcgtgccatccgtctctctcaccgtctccgtgctcctccgccgcccaagggtgtctccggcgactcgcccggcgccgcacgcgaagcccggagatccggctgcggcggaggcgagaaggaagagggagatgagggccgtggtgcagcgtgtcctctcggcaagcgtcgaggtggaggggcgggtggtgtcggcgattggccccggcctcctcgtccttgtcggcgtccacgaggccgacaccgacgccgacgctgactacatttgtcggaaggttctgaacatgaggctatttcctaatgagaagactgaaaaggcatgggatcaaagtgttttgcagcggaaatttgaagttctattagtcagtcaatttaccttatatggaatcctgaagggtaacaagccagattttcatgtggctatgccacctgctaaagcaaagccattctatgcttctttagtcgagaagttccagaaatcatactcagctgatgcagtgaaagatggcatttttggagcaatgatgaaggtttctttagtgaacgatggccctgtaacaatgcaagttgactcatcctcattgcaaaatcctgctcagtcaagcaatggtgatgttggctcagttggggacaatgaagcacaagtacctaaagagacttcttaatctctgtaactggtcttctacccttcctgcacgatttgaacatggttatcgctgtcccacatcaagccatgcagaattttgagtttgtttttgaggtttgagcaggaagaagccctccagtgagctcgtgccatgggtgctacaagtcgtgttttcatttctccacttaaatattgattactggggaaatatattagtattcatttcgtcttcaaagacatgaattttattactgatctgtcattcatacacgaatatcaaattgattcagttggcctg

SEQ ID NO: 23594 - DNA, 1518 bp, Oryza sativa
  ref <308>: DATABASE ACCESSION NUMBER: AK073693
  ref <309>: DATABASE ENTRY DATE: 2001-12-06
gcttcttcccccagaccggcggcgacaatgtccctctctgccgccgtcgctcctcaaatccctccggcgagtggcgtgctcgcggctccgtatcctgtcctggcttccgccaccacccccgcagcgctgcgagcttgctcctcccggcccgtgcctggcaactctgggggaagggtgggccgcttccctgtgtatcggcgcgctctcagggtgttcggcgaaatgctcgagtgtcttgccacgggcggcgggtgaccgtggccgtagaagagctcgtgcggttgagaatgtcgatcagggattggttggtgctgcgtgagttcgtgctgctccttcgagatgtgcctatactgtccagacaagtgacaacttccatgatagttggcctcttcaaaggattacagtcaacacacttgcaagcagtttcgagcacctttagcatttgctcttcgcaccctgtgcctcgaagtgttggatccaacacctcaatctgctttccctctgatctcatcttatgtacccatgggacaagttcctctgatgtagacaagattggaacagggcgcctccccgtgagaagctctagcaggaccactccgaaactatacatatcacctctcattgtagcaacccatgattgcccatattcaggggggatgtaacccagagtgccaactagttcagttgtgacatgggttatgttgggaaggaccaaccttgacagcccaaaatctgcaatatacgatttgaattctttgtcaagtaatatattactggacttgatatcacggtggacgatatgaggcttgcagacatcatggatgtaatgaaggccctgacttgctccctgtgcaatcttcagcctggttggccagtcgagaaatgagctggcatcatcatcccaattgtgaagccaatcgtctaaactaccattctccattaaggagtatatgaggagcctcagattgccctggatgcagtaaccccagaagggcacgagattggcatgctgtgccatggatagtgcatcaacctctgcactgaattccctttctgttagacacatttcactattgagcttcttgatagcgatcttggaaccatctggtaactcagctttgtagactagcccatagcctccacacccaatgatatgcgccttgtcgaagttatttgtagctttcacaatgtcagcaaatgtgaggttgatttcttctccctttcctcgtgtaatctttatcaatgaatgctctgaatcagagttgaatgaagctgcttctaaatcaccatcgttgtcactactatttttggttatgaagcgtttgctcctttctgagacaaagaaacaccctagcaacaaaagaatgcaaatccctccaaagaagacaccaaatgatattgcgagaacgatttttttattctgttcttttctggacactgaacttgcttctgctgaactgcagtggtgattgaacctagagtcacaaagctttgggtttccttcgaagcttgagtttg

SEQ ID NO: 23595 - DNA, 811 bp, Oryza sativa
  ref <308>: DATABASE ACCESSION NUMBER: AK099372
  ref <309>: DATABASE ENTRY DATE: 2002-08-28
gatccactctcatttctttccctctgcattccccacacccgcggcggcggcggcggcggcatctcgcttccgcggccggtagccctgatcggcgtcggcacctctctaggcgtcggcggcaggcttccccaccccgaaagcagccgcgacgcgctccatatggtggtgcagcgcttgatccggagcagctccgatgctggacacgatggccaggagcaactcagcccatttcgacattttccccaattctcctccccatctaaccctaatcacctaatacccaaaccctagacacgggagccgagcaagaggaggcgtacgggtgcggcggcggcgagccgccgagccggcgactgcggcgctggcgcggccgcacgactcgtcggcgcagggctgcagggtcccccaggagcaggtccgcggttgggccggagagcgtggctgcgtggcgtttgacggcgacggcccgtacacgggcgtgtcggacgggagggtgctcaagtggattcccctggagtgccgatgggtcgagcactcatccgccagccacaacagttgctaggctcctccccatcaccctcggacaggtgtttcagaggatcgatgttgttagcaaggacttcggcaacatcgtcgatgtcgagctcggcgggccatggctgctgctgccagtggaggtgatggcaacactggctcacaagtttgggatcatcggtgaagttggtttctgtgttcaatgttaatgttgatgttggggctatttgtaatgaagttggtatctgtgttcaatgtttatgttggtcctatttgt

SEQ ID NO: 23596 - DNA, 826 bp, Oryza sativa
  ref <308>: DATABASE ACCESSION NUMBER: AK073694
  ref <309>: DATABASE ENTRY DATE: 2001-12-06
ccaccaccactgcaatctcgccccgccgcacgcactccactagctaccatcttgaattcttgattgctcggccggcacagctatgtcgcgcgccgtagttgtggtggtggtggtggccgtgctggcgctggcgtgcggcgcggcgtcgcagtcgccggcgccggcgccggcggcggggccggcgtcggactgcgggtcgtcgatcacggcgctggcggggtgcctgacgtacatcacgccggggagccccgaggcgaggccggccaaggactgctgcgccggcgtgaagagcgcgctgggcagcccggccgccgtcgcctgcctctgcggcgcgctcggccaggacttcggcatcaagatcaactacacccgcgccgccgccctccccgccgcctgcggcggcgactcctccgccctgagcaagtgcaacaagaaatttcccggtgcctctcctactggagcacccgcaccatcttcttccggttctgggtcaggatcaacaccggccaccggcacgccatcttcaccgaagtcggcggcggcccaatctccggtctcggcgatgctcattgtagccacggttgctgcacctctgctttcttactattacctctgaagatttttaccacatatgatctagtttctgaaacgctgtgatttgtatgcgcattgcgctgtgatttatcagtgactcttttagggagagatctgctaatgttgacttctatagccgtgcccgtggtgccatttctcactgtttcctggattgctattagtttgtacaatattgggatggttcattcagaataaagtagaaaaatgaagc

SEQ ID NO: 23597 - DNA, 1190 bp, Oryza sativa
  ref <308>: DATABASE ACCESSION NUMBER: AK073695
  ref <309>: DATABASE ENTRY DATE: 2001-12-06
ggtctctgtctctctttcttctagctctctctctctctctctctctctcatggtcatcgcttcccttttaacctaaagaaagagatctttcttggcatctcgatcgtcttcgatctctctctagctagctatacctcaccggcaatccaagctgcatgatctcttgtagagcatactactagtagctagttaattagttgctgcatgtatgcgtgcatggaagggagccagttggagacggcttgcctccctgccgcgctctacgcgccgctctgcccgtacacgccgccttcccctccttcctttcttgcgccattgccgagcctgcagcacaagcttccccagctgccgcagctggtccacgaccacgccgccgccaccgggacgaaccatggcgtgatgttctcgtcggaccatggctgcctgtacccgctgctcccggggatcccgttctgcctcgactccggctgcggcgccgccgcctgcgacgacgacaagcccgccggtttcgcgcacttgggctccgccgaggcggacacatcggcggcggcggcgagagtggatagcgagattgctgcagctgccaccgcaaccacttgccatgggcctaattcatggtggaaggggacggagaaggggaagatgaaggtgaggaggaagatgagggagccgaggttctgcttccagaccaggagcgatgtggatgtgctggacgacggctacaagtggaggaagtatggccagaaggttgtcaagaacagcctccacccaaggagctactacaggtgcacccacaacaactgccgcgtgaagaagcgggtggagcggctgtcggaggattgccgcatggtgatcaccacctacgagggccgccacacccacaccccctgcagcgacgacgccaccaccggcgccgccggcgaccacaccgccagctgcgccttcacctccttctgacgaacgcatgcttatgtacatggatcggtgatggattattgttctctgatctgatggtggcaattgggaaatcgaagaagcagggatcgatgtaaaatgaaaatgtactaggaaagcttttagaactcttatggatgctatttaatttcctggtcaatcagctagccgatcgatcaacacgttgcatgatattcagtctaattatgaatgaaaatgtagtaggaagcttaatt

SEQ ID NO: 23598 - DNA, 1236 bp, Oryza sativa
  ref <308>: DATABASE ACCESSION NUMBER: AK073696
  ref <309>: DATABASE ENTRY DATE: 2001-12-06
gatccgactatgctgttctgcactggcgcacggcaccaaataaaagcctcggctcgcctcgagctgtccccccatcccccaactggagagtagtagatcgattcgatccaccctccgattcctttaccgaaccgtgggggaaatccgcgccggggatgtcgtcgtcggtcggaggcggagggggaggtggcgcgggcggcggcggcggtggcggaggagcggacattgcgagcctgctggataaggccaaggagctggaccagctgcgcaaggagcaggacgaggtggtcaccgagatcaacaagatgcacaagaagatcctctcctctccagagatggttgataaacaggttgatgctacgttgattcggcttcgtgctttatatacacgtgccaaagaactttgtgagagtgaagtcagtgcatcgtctgctttggttggactattggatggtttgttgcaatctggaacttcagctgcacaacgaaaaaagatagaagttggtgagcagaaaaagaagaggatgaagtctgatacagatactacacgattctcctctgcatctatgaggagccaacttgaccaagctacaaacctgaaaggagaacaggttgcagctaaggtcaaatcagacgaagaaaaagatgaatggtttgtggtgaaggtgatacatttcgataaggaaacaaaagaatatgaggtacttgatgaggagccaggtgacgatgaagagagtgcccaaaagaagtacaagttgcctatgtcagatattattccatttccaaagagaggggatccttccagtgccccagattttgggcagggtcgacaagtcttagctgtttatcctagcacaacagcactatatagagctactgttgcctctaatcgtaagaggaaatctgacgattatctactcttgtttgatgatgacgaggaggatggaaatctaccacaaagagctgtgccgttctatagagtggttcctctcccggagggccaccggcagtgaaaatctcagttggatccgtctttaccccggccagtgtagtgtgtgaagataggagtgtgagagtgtctgcctgacaatgtagtaattttgttttatctgcaccttgtccgcagcatgcagattgtactaccaaagtgacttctaagatgtccaaggttcagcgatcatgtaaataggttgattcagtgttgctctataacaaaaataagtgatttccccttcg

SEQ ID NO: 23599 - DNA, 2012 bp, Oryza sativa
  ref <308>: DATABASE ACCESSION NUMBER: AK073697
  ref <309>: DATABASE ENTRY DATE: 2001-12-06
gtttggtggatggaaagcgggtgtgagtgaggaagatccccctataaatcgcacccggaaaagatcaccatccattgcccaattcgccgtcgtcgtcttcttcttccacctcgggaagtcaaatctcgtcgccactgctggttttgtctccaaaggaagagaccatacagttcatcatgtcaggaggatctggtgattcttccccttcatcagggcgggctagcttcagttctttgtcaggtttgaaggacctagaactgtcttcagagtctggttgcttgtccattgtggtcctaggtgcttctggagaccttgctaagaagaaaacattcccagcgctgtttcacctctttcagcagggatttctacaatctggagaagtccatatatttgggtatgcaagatcaaatatttcggatgatggattaagagaacgcattcgtggatacctcaaaggagcttcagatgaacatatttcacaatttttgcaattaattaaatatgttagtggttcctacaatagcggggaaggatttgcatcattaaataacgccatttcagagaatgaaacttcgaagaacaacaaaccaggaagctcacgtagactattttatttggcattgcctccatcagtctacccctcagtatgcaaaatgataagatcatactgcatgaatccatcttctcattctggctggacaagggttattgttgaaaagccctttgggaaggacttggagtctgcagaggaactcagtgcccagcttggagagctgcttaatgaacaacagctgtacagaattgaccactatttaggaaaagaattggtccaaaatctgcttgtgcttcgctttgcaaaccgtttgttcctacctctttggaatcgtgataacattgctaatgtacagattgtattcagagaggactttgggactgaaggacgtggagggtactttgatcaatatggcatcattcgtgatatcattcagaaccatttgttgcaggtcttctgtttggtggctatggaaaagcctgtctctcttaagcctgagcacataagagatgaaaaagtcaaggttcttcagtcagtgacacctataaagcatgatgaggtggtccttgggcaatatgatggctacaaggatgactctacggtaccagatgactccaacacacctacttttgcatctcttgtattgagggtaaacaatgaaagatgggaaggagttcctttcattctcaaggctggcaaagcactgaacaataggaaggcagaggtacgtgtgcagttcaaggatgctcctggtgacatttttaaatgcaagaagcaaggaaggaatgaattcgttatacggttgcagccatcggaagccatgtatatgaaattaactgtcaagaaacccggactagaaatggcaaccgaacaaagcgagctggatctgtcatatgggctacgctaccaagacgtgaagatcccagaagcgtatgaacgcctcatcctggatacgataagaggggatcagcagcactttgttcgccgagacgaactgaaggctgcgtgggagatcttcactccgctgctgcacgacatcgacgacggcaaggtgaaggccctgccgtacaagccgggaacccggggacccccagaggccgacgagctgagcaagaggatgggctacgtgcagacccatggctacgtttggatacctccaaccctttcaaaattctagccgctatgtaccaatgcaggctctgtctagatgccggtttatcaggagctttgtaatattttttttaaaagaactcctactacttcgcctgtctagaacactgtaatgttggtgatcttggaataaaaagaagactatatatgctgcaagtaagcaagttacacatgttatggttagagttggacctgttatgagtttgccacaagcaactatattataggggctactataccatggatcttgttcagacaggatgatatctataaagtatcagactctggt

SEQ ID NO: 23600 - DNA, 1303 bp, Oryza sativa
  ref <308>: DATABASE ACCESSION NUMBER: AK073698
  ref <309>: DATABASE ENTRY DATE: 2001-12-06
ggttcgcgacacacacacgcacacctgagccgaagcacgcacgaatccaacgccgagatgaggccgtcgctgctgagatacgccgcgcaggcgctccgccgccgcgactactcctccgccgccgcggccgctgagcggaaggtggccatcctcggggcggcgggcgggatcggccagccgctcgcgctcctcatgaagctcaacccgctcgtctcgtccctctccctctacgatatcgccggaacccccggcgtcgccgccgatgtctcccacatcaactcgccggcgctggtgaaaggcttcgtcggggaggagcagctcggggaggcgttggagggttcggacgtcgtaatcatcccggccggtgtgccgaggaagcccggcatgaccagggacgacctcttcaacatcaacgccggcattgttaagggcctctgcactgccatctccaagtactgccccaacgctcttgtcaatatgatcagcagccctgtcaactcgactgtccccatcgcagcggaggtgttcaagaaggctggtacttacgatgagaagaaactgtttggtgtgaccacgcttgatgttgtgcgcgctaaaactttctatgctggaaaggctaatgtgccagttactgaagtgaatgtccctgtggttggtggccatgctggtattactatcctgccactgttctcgcaggcaacccctgcaagtaatgcattgtcgcatgaggacattaaggctctgaccaagaggacacaagatggtgggacggaagttgttgaagcaaaggctggaaagggttctgcaacattgtctatggcatatgctggtgcggtatttgcagatgcgtgcttgaaggggcttaatggagttcctgatgttgtagagtgctcttttgtgcaatcaacagtaacagagctgccattcttcgcctcaaaggtaaggcttggcaagaacggagtggaggaagtacttgggctgggccagctttccgagtttgagaaggagggtctggagaacctgaagggtgagctcaagtcttcgattgagaagggcatcaagtttgctcacgcgaactaggcaacctatgcagattctaacaattcaaatgtgaactagagggggggtccctcgaatttttggtttgactgttgttctgccccgatctgctggggcaccgagatgttgtgctccagaataaaatcttgcggcttgatgccaacctgaactcaaaacttgtacctgaaacagcgactccggtgctatttttcaccttgtacctgaaactgcgtacagtgaaccc

SEQ ID NO: 23601 - DNA, 1218 bp, Oryza sativa
  ref <308>: DATABASE ACCESSION NUMBER: AK073699
  ref <309>: DATABASE ENTRY DATE: 2001-12-06
gggagaagccaatccacctcctccctcccctccacctcgccgccgccgccgccgccgcatctgccgaaggcgggagccgtgaggggaaggacctgtggcacgaggtggtggcggcatggagttcctgcaggggcagagcacggagaccgccgtggccgtggcggtggccgtcgtcgccgtggccgccggcgccgccttcctcctcctcctcctccgcagcagcaagaagcccaagggctgcttggaccctgagaacttcaaggagtttaagcttgtggagaagaggcagatcagtcataatgtggccaagttcagatttgctctaccaacccctgcttctgtgctggggcttccaattggccaacatatcagttgcagagggcaggatgctactggcgaggaagtaatcaagccttatactccaactacgctggattctgatcttggacggtttgagcttgttattaagatgtatccccaaggaagaatgtctcatcattttcatgagatgaaagttggtgactatttatctgtgagaggacctaagggtcgcttcaaataccaacctgggcaagtaagagcatttggaatgttagctggaggatcaggcattaccccaatgttccaagtcacaagagcaattcttgaaaacccaagtgacaatacgaaagtgcacttaatctatgccaatgtcacatatgatgacattcttctaaaggaagaattggatagtatggttgaaacctatcccgatcgcttcaagatatactatgtattaaatcagcctccagaaatctggaatggtggtgttgggtttgtgtcaatggaaatgatccaaacccattgcccggcacctgctgctgacattcagatattgagatgcggacctcctcccatgaacaaagccatggctgaacacctggagaatcttggctacacgaaggaaatgcagttccaattctaagcctccacagtggaacaataccgaaataacagcgatggacaacattttcgttcaccttcagtagaaattgtctgaccctagtgccatttaatcaagatataggcgaactttaaacccgataaaagtagaatgtcaggtcagcatattttgagtgaaagcaaaaaacaacacctacttgagttggggtcagaagttcctgtagcccatcatttttgtgccaatgctgttcaattccagacagacagaatgaaact

SEQ ID NO: 23602 - DNA, 2717 bp, Oryza sativa
  ref <308>: DATABASE ACCESSION NUMBER: AK073700
  ref <309>: DATABASE ENTRY DATE: 2001-12-06
gacggcggcagccggcgcggcgaccagtcgtcgccgccggccccctttcctctccggcgcaggcgaggggggagcagatcgggtaggcggaaagctgtcgtcattcccccgccgcatcgcggcgaacggcgcgggcgtggcagccttggggttcgcgggacgacgcgcccccgacgcgcgcctgctttgagattgatgccactcgtgggctcgtggctcgactgcatcggtggtgcctgcgcacacggcgcaccccgtgaaggcttcgcgccttcgatccgctgctgagtttgaagaattctgaagcagcttcaatagcaccatccatgactgattgactgatcccatgacttataacctgcaaaatggcagaattagtagagacttgggtgcacaagtaagctttctttgttcccttactgcctgctagttagtgatgatgtaggaaaagaatgctttggtacttatcttatgaagtagcaacttaatcaggaaaaatagcatttgaatggtccttctctatatgcacaaattgcacttttatatacatggtccgttcttgtcattactgaaaggtttataaaacaccccagtgatagtgctggcagccttgatatgtccacatggacggaaaaagaaaaaaaaattgcagtggtttagaacccaaagctaaaatatcgattaggtgtagagtcagtttcagacttgtgaacttgaaatgttaaccaatcttgtaaaaagtagatgatcatatagaggttttacatatgtcttttttaacctagaaagagatactttggcatatcttttcaaattttgtgaatactaatttacagttcatcattgaaatatttattgttacaaagaactaaggtctcaattcaaagtatcaagtcattcattgcattgcaatgatacggtactttgcatatgtcatgtatttgtgtaccttcggtttggcaagctaatcaagtctagcatgctcacagcacaaggtttgcttccgcttcatcatttgtgggtttccacataacaaactgataaagtttagttgttttttttccttatctagtttttcccattttcatgaaagagctgtttagcccatacatagagttggtgcagtgaattgtactatatgtacagttttcctagacttgcacagatcaaactctccattttggtgggagcaaaaataggatgcagctcatcaaacatgtagttcagtagatacagactgcccatatcaccacttccagaaaaaggaggcgcataccatattcttcaccgttagcgaacaatattatgctgccattgctacctgcaggatttcaaagaagggtcccgatctgatagctcctagggttcaattacttgctctttgatttggagttttctgccagatagaaatgtggctgggacacaaggataagcttccttggttgactaccccataccattctagcacatgtcaaaatggcgtcaacgtaaactgtcttcagtgtttggacataggaaaagacaagtctagagagtaagaacatgacaaaaaggctgtgtcactacgttgcgttaaaggaaatttacctggaagtatcccagatcacggcatgctttggcgatatcgttgaccacccgggaccgcaccgtgggatcatcaagactgaggtggccaaggttgatcactggcattggcggcgggtggagctcctgtgatggcagctgctcttgagggatacccttcgacgtgtcagacattgttgatcagcgaagaagccacacgcagctcagctgcaggttggtgcaaaaaaaaaccgccgttcttctctgttgtctgtgcagaagcagaacgcatacatgtgcataatacacctgatggatcctcctcacctggacagggggctccaaaggagaagtcaagttaggcgacgcatttccatccattcatgcactttgcagcgtctcgaaatggactacatggatcctgtatctggtccaggagaggagaagccgctgggcataggcagcgtacctacctacgtacgctgggagcgcgtggtgtgcgatgttgcaccgcatctgcatcatgcacaagtagcaatactatatgaatcttgagtatgatgatgaattgatgatgctgagctacaggccaagctgcgcgacgcgtgcaactgggcgctggattttcttaagacccaaggaaattaagacgagcaagcggataatatttgtggggaggcaagttggtttgatttggccatacatactgtgttttttggctgtccaggaggggctccccccgggtcatgaaacctgaaccgctcgaaggtttcggcacttaaatgtcgcagtggcagcatcccaaaaaaggccgtttttggcagctctcgtaggtctgcaattgtgaaaattctgtggacagccacccaggtttcggttttgtctcctgtctagtcttggtggtatcgcggtgcagctgttcctgcaaaagagatggacggtcaggatcaagcgtggacttctccgtttttgttctctctgtgtgcgtttgttccttttctgcctacgtgtttgtatgtttcgttgtttagttgtttagtttggttctctgctagagcagtgtgatgagatatgaaatccttgtgtagaagtctagaagatactggagtaccctctccgtcccacaatataagagattttgagtttttgattgc

SEQ ID NO: 23603 - DNA, 743 bp, Oryza sativa
  ref <308>: DATABASE ACCESSION NUMBER: AK073701
  ref <309>: DATABASE ENTRY DATE: 2001-12-06
gggtttccggctttccgccggctcaagagggtgcgctggtgcaggagcgcaggacacggctcggggatgtcaacgagggtggcggcagatggcgaggattatggtcaggctggaggagcgtgcgtgctgaaccggaaaagataaccaccgtcgccacctcgtagtttgataggggcaagggccgcacgcgcgtgcgcatgccggagacggatcgtagccgtgctgctgcatacgccgcgccgctgtgatctcagatatgtgtcgcggtgcggtgcggctggtcccaatccaaggaaagaagggtgcaaactccacgtgagaatatgtggtctttttccaaaggcaagatgcaacggtttccgcaagtgaatgatgcacttccatccccagatgctggtgctggttgcaaatgctggcaatctgttgcttggtaaggggtcttttgctctttaaaaatgctgaacaactcttgattgtgcatgctatggtaaaaattccttcagggtgatgatgtttctttctttctctctctctctaacagaaatacattcttcatttttaaaattttggggagccagaagagagacgagtacatagttgaatagtaatcagagaaaaacagtagcctggggagggagagcctctcccgcagttcatagagggtttccaaatctaaattgctagaaaaggaacctggtatgaaagtttaatgaaaacgagataagaaacatctctgtttgatc

SEQ ID NO: 23604 - DNA, 1204 bp, Oryza sativa
  ref <308>: DATABASE ACCESSION NUMBER: AK073702
  ref <309>: DATABASE ENTRY DATE: 2001-12-06
gaacatctggaagacaagaatctcaggcaaatcctattggaatcagaaacatctgcctactatgcccagtttgatgctgattcttcttctcgaaaaggtggcacctcgacgaagtgacaacctagggctaaccacatatgatcaagtttcgcttgactcaacctggattaggagaccctcatagatgaacgaaaaaggtgtttgtattttacatattagatgcatgttcatgctgttgcatcgcgctgcagttcagcagctgagatgtaagcttttccaagatcatattgaactcaaacctacaactttgttgtaccctgaaatttgcagcagtttctcttcctgaatctgggagaacagcttcagctatatgtaaacttaaaaaatattctccaacccaccaattttgtgctgcatcgatgcaaattttcaatacctcctatatgccatcttccaaagtcctttgagcatagttctggtagcgtgacagtgacttgcagtcttggaggctcttgtgttgtccgaatcagatgccttgactttgttgtctattatgatggattcattcaacaaagcttattgtttgtcacataggcctgatcctctctgatgtggtggcaaacaagcagtgaaagctaccagtctaccactcactcagggaagcttcgtagcaaagcaaagcatcagccttcaccttgtccagagcccagagaaaagggatccccttcaagctgctgttcttcatggccaagaaaggcaagaacaactctaccagaagagcctctgcttcttcttcttcttcctctgccgcagccgatggcgatggatcgccatggctgcggctgacggccttcgccgtgctcaccctccactcggctttctctgcatatctggctagagatgacgcgaggctggtcgccctcgtcgtcgtcggctacctcctgatgctggtgctgctgttctatggcctggccgtgcctgtccaacagaagagagactaaggtgaggcttcagcaatcagtcctcaagcatgaacctgccttgtttttttttcctttttgctggtttggttttcttgcatggtttgatcttggtattgaactatggatgttatgtacaaccctgtacatgctgatcaaatgtgtatctgtatgtttaattattgatgttaccaaagaatcacatgtataatataagtaattcg

SEQ ID NO: 23605 - DNA, 3538 bp, Oryza sativa
  ref <308>: DATABASE ACCESSION NUMBER: AK073703
  ref <309>: DATABASE ENTRY DATE: 2001-12-06
gtaggtggaagagacggacagaggccactacccgtgcaccacgccccctctcccacaatctcgcaaaaaagttgattttctttttcagcttcctcctcccctcctccgcttctcatcaatccactagcatatcagatcagattcctgtacacttccctttcctcgcatccaatcccgactatcaaatcatcaccatccttttgcaaaaccaaaaaaaaaaaaagtagataaaagaagaaggttcttgcatccaagagaggaggacactgtccgtcgtgcagcgtttcttgcttggttgaatcgggtggttttgggggggatggcggggaaggtggagaagatggcgtcgatcgacgcgcagctgcggatgctggcgccggcgaagctgtcggaggacgacaagctggtggagtacgacgccctcctcctcgaccgcttcctcgacatcctccaggacctccacggcgacgacctccgcgagctggtccaagaatgctatgagatcgctgctgagtatgaagggaagcatgactcccaaaagctcgatgaacttggcaacatgttgacaagcttggatcctggtgactccattgtgatggccaaagctttctcccacatgcttaatttggctaacttggccgaggaggtccagattgcatacaggaggagaatcaagctcaagaagggtgactttgctgatgagaactcggcactgacagaatctgacattgaagaaacttttaagaggcttgttgttgacctgaagaaatcaccagcagaggtctttgatgcccttaagagtcagactgttgacctggttttgactgcacatccaacacagtcagtgaggaggtcactgcttcaaaaacactcaaggataaggaattgtttggttcaactatactcaaaggatatcacaccagatgataaacaggagcttgatgaggctctccagagggagattcaagcagcctttagaactgatgagatccgaagaacccagccaactcctcaagatgaaatgagggctggtatgagttactttcatgagacaatctggaaaggtgttccgaagttcttacgccgtctggacactgccttgaagaacatcggaattgatgagcgtgttccttataatgcacctctcattcagttctcttcttggatgggaggagaccgtgatggaaatccaagagtgacaccagaagtcacaagggatgtatgcttgcttgctagaatgatggcttcaaatttatactgctcgcaaattgaggatctcatgtttgagctgtctatgtggcgatgcaatgatgagcttcgggcacgagcagatgagctgcatctctcctcaaagaaagatgcaaagcactatatagaattctggaagaaggttccgcccagtgagccataccgagttgttctaggtgatgtgagagacaagctgtacaacacacgtgaacgagcacgccagttattatccagcggatattctgacattcctgaagaaaccactctcaccagtgttgaacagttcttagagcctctggagctatgttacaggtcactctgcgattgcggtgaccgtgtaattgctgatgggacccttctggacttcttgcgccaggtgtctacctttgggctgtgccttgtgaggcttgacattaggcaagaatctgacaggcacaccgatgtcctcgatgccatcaccacatacctgggaataggatcataccgtgagtggtccgaggaacgccgtcaggactggctcttgtctgaactcaatgggaagcgcccattgtttggcccagaccttcccaagaccgatgagattgctgacgttctagacacgttccgcgtgatagctgagcttcccgctgacaattttggggcctatatcatttccatggcgacagctccgtcagacgtgcttgctgttgagctcctccaacgtgaatgccatgtgaagacaccacttagagttgtcccactgtttgagaagttggctgatcttgaatctgccccagcagcagtggccagactgttctccatagattggtacagagaaaggataaatggcaaacaggaggtcatgattggctattcggactcgggtaaggacgccggtcgtctctcggcagcttggcagctgtacaagtctcaggaggagctcatcaacgttgccaaggagtttggggtgaagttgacaatgttccatgggcgcggtgggactgtcggaagaggcggaggtcccactcatcttgccatcttgtctcagccaccagacacaatccatggatctctccgggtcactgtccagggtgaagtcattgagcagtcctttggtgaggagcacctttgcttcaggacactgcagcgtttcacggctgccactctggagcatggcatgcatccaccaattgcgccgaaaccagaatggcgtgctctgcttgatgagatggctgtggtggctacaaaggaataccggtccatcgtcttccaggaaccacgctttgtcgagtatttccgccttgcaacaccagagatggagtatggaaggatgaatataggaagcaggccatccaagagaaagccgagtggtggcatcgagtcactccgtgccatcccatggatcttcgcgtggacgcaaactcgcttccaccttcctgtctggcttggcttcggttctgccttcaagcacatcctggagaaggacatcaggaacctccacatgctccaggagatgtacaatgagtggccgttcttcagagtcacgatcgatctggttgagatggttttcgccaagggtgaccctggcatcgccgcattgtacgacaagctccttgtctccgaggagctatggcctctgggagagaaactgagggccaactgtgaagaaaccaaacagcttctccttcaggttgctggacacaaggatcttctcgaaggtgatctctacctgaagcagcgccttcgcctccgcaatgcctacatcaccaccctgaatgtctgccaggcttacacgatgaagcgaatccgcgacccggactaccatgtcacgctgcgcccccacatgtccaaggagatcatggactggtctaagccggctgcggagctggtgaagctgaacccgaccagtgagtatgcgccggggctggaggacaccctcatcctgaccatgaagggaattgctgctggaatgcagaacaccggctaagcgaactatcaactatgaagtgcctgaattcacaccgttttatatggactcttatcttgatttcggtcatttgctctcggccatttaattttgccgatgcagaggctcgtgcagtttctaatttctttcggaagatattttcaataatggagttgtacaagaacatcaattaatcaaaataaagtggatattatgttcattatcgtttagagcaacctggtaaagccatttttttgtgtagaccacatagtgagtgtgttgaaattccatttgcttaatgaaactgccattatctaagtaaagtcaaagggctcctttatattg

SEQ ID NO: 23606 - DNA, 1417 bp, Oryza sativa
  ref <308>: DATABASE ACCESSION NUMBER: AK073704
  ref <309>: DATABASE ENTRY DATE: 2001-12-06
ggtccctttcccgttcgttccaccttcccccgccgccgccgccgccgccgtcgccgtcgacgccagcatgtccgcctccgccgccgtctcctccacctgcgccgcggcctcctcgacgacctcccgccgctcgtcgtcgtctccggcgtccagggttcaggcgacaccccgtcggtctctaccctcccggctcgtagcatcccggacctccccacgctctcccgtcgtgccgccggtctacgccacggcctcaccgggcggcgccggtgggacgacggcggcggcggcgaggaagaagctgctcatattcgatgccgaggagtacctcgcggagtctctggccaagtacacggcgcggctctccggggaggccgtcgcggagaggggcgcgttcaccgtcgcgctctccggtggctcgctcatcaaggccctcaggaagttgacggagtcgccgtacctggaggcggtggaatggagcaaatggcatgtgttctgggtggacgagagggtggtgcccaaggaccacgcagatagcaactacaaactcgccatggatgggttgctttctaaggtgccaattcctgcaagccaaatctatgccataaacgacacactatcagctgaaggggctgcagatgaatatgaaacttgtctaaagcaactagttaatgatggtgtggttgcaatatcagaagtaactggattccccaagcttgatcttatgcttctggggatgggccctgatgggcatgttgcctctcttttccccggtcatccggttgtcaatgaaaacctaaagtgggtcagctacatcaaggattcacccaagccaccaccagagcgaataacatttactttccccttagtcaattcgtcggcacatatcgcacttgtggtcactggtgctgggaaagctggggcagtgcataaggcattctcagataagcaaagctcttcagacttgctgcctgttgagatggtttcacagcaagagggagtgctcacttggttcactgacaaaccagcagtgtcaatgctgtccagcatctgaagcccactgtgttatataagtttgaaactttgatccgaagtataaaaagttcaggggattttcattttattctctgttgcattagtcctctgtggaaatcttgtgctcttttcgtagtattatgcagcataagtgtctgagactccagtttcagtcaattgattaccactttatggggtatttgtcatgcgcttggaaatatctagatcagtacctgtacaatttgatgttacctatttgtttcctttgtacaaagacacttttgttcagcatttgctagtttttttttttgcggttttctctgttgctttacatgtcattgcagatactacaaagtagcatcaggtggaatattgttttccgtcc

SEQ ID NO: 23607 - DNA, 2221 bp, Oryza sativa
  ref <308>: DATABASE ACCESSION NUMBER: AK073705
  ref <309>: DATABASE ENTRY DATE: 2001-12-06
gcgggtggggcccacacggcagcgagagacgcttcgatggacgcctcctcctccgcctccgccggcggcgaggccgacgcgatggcgctcgtgcaggggtacaacgccgacgagctcgccatcgccggggagttcctcaccacgtggctccccttcctctccgcgggcctctgcgcctcctgcgccgactccctccgcagccgcgtctcctccctgctgcccccgcaagccgaggaatccccgtcgtcgccgccgccgcggatcgatcagattgagccctcggggtgggagtccgatccggctacggctcacccgcagcatctgccgttcgagccgagcggatgggattcggatccgccgcagctgccaccggagcaggagcagcagaagcagaagccgcagccggcggagaagccgcggaagtcgtgggcagacatggctcaggaggacgagctcgccgccgcggcagaggaggacgcggcggcagccgcggctgatgacggcgaggaagggagcgaggctggtaggccgggtgtgcagctgacgagggagcagcgggagctgaggcggttccggaacgtggtgcggaggaaggatttcatctgttttgagagggtcaatggtcggctcgtcaatatcctcgctggcctggaacttcattgcggtgtgtttagcgcggccgaacagaagcgtattgtcgactacgtatacgatcttcaggagatgggcaagcacggggagcttggagatcgtacgtatacggaaccccaaaggtggatgcgtggtaaagggcgagtaacaatccaatttggatgctgttataattatgccacggacaagaatggaaacccaccaggcattattcgaactattgcttctgatccgatgcctagcttatttaagatcatgatcaagagattggtacggtggcatgttctaccaaagacttgcataccagacagttgtattgtcaatatatatgaccctggagattgcatcccaccacatattgatagtcatgattttgttcggccattctgtactgtttcattcctcagtgagtgcaacattctttttggatctactctgaaaattgctgggccctggagagttcactggttcacttccaattcctctgcctgttgggtcggtgcttatcctaaatggcaatggtgctgatgtagcaaagcattgtgttcctgcagttccgaccaaaaggatatccattaccttcagaaagatggatccagcgaagcgtccgttcaatttccgagatgatccagaattgcttaacataattcctctagaaacagctgtacaagaaactggcagatcatcagatgaaggtaagggcaagcagcctgacatacagatcagaaatccgagcaaagcacacaggaacaagaaatctaaagtaagaacatctcctggaaagggtggacggggcggcattctcggagatggacctcctcaatatgcacaagctcaagtcactggcatttcgtcacagcaaaacttccatggccagcctaccatctctggttcaagtgctgagagagaaagacgccctgttggtccattgagagagtcaagatatcagcaggatgcacctggcatgcaatctaacatggatggtatcagagagcgggcaaattggttggctcaagagaggatgcatggtaacagcatgaattcgattgacgatggcacggaatctcaggaaaggaggcagcgaatggagcacagacagatattgatgatcaaccgcacgatcaacgatgatatggattccctttcaatcgggagccatgaatctgaccagactcgtgtaagcgtacgaacactatacaacaagccaaggaggaccagggtaaacctggatgagtaagcaagcaagccaagcctgtactcaaatctgtgaacttgcttttgctaaaaaagaaaaaaaaaactgtgaacttgctgttgggaatgttgatacctgaaagcatacttgcgctgtatatttcaggaggtgtgaccagaacaccagcagatataacttactaaaacacttagtattgatttgatgaaatttgtcagctgatagtcaggcccctattctgtagataagagtattttttgggaatgctgtaattgtgacttaatatggatgcatttctcgttgatgaatgaggacctctcaataatttgattccactgtgaccacaacatttcttcc

SEQ ID NO: 23608 - DNA, 666 bp, Oryza sativa
  ref <308>: DATABASE ACCESSION NUMBER: AK099373
  ref <309>: DATABASE ENTRY DATE: 2002-08-28
gtccctcccgtctcctcgcgccgccgccgccgccgccgagcagcgccgatccccacccaccccggcgggcaagcggcgccggcgtcgtcctgctccccacacccagccgccggtgggcacacgcacagagagatcctagcaactatggtgatccctccaccggaaagggcggctaggatcacgcgctttctgaagccctaccttctgaggatgcatttctcgaacaagtatgtatccgctcaggtggttcacaccccaacggcgacggtcgcctgttccgcgagctcgcaggagaagctgctgaggccgaacatggagtccactcgcgatgtcgctgccgctgccaagatcggtaagctgctcggcgagcggctgctgcagaagggcatacccgctgtgtgcatccacatgaagagagagcagaagtaccatgggaaggtcagggctgtcattgactctgttagagaagctggagtcaagctgttgtagtctctaaaacagtagaatcttttattaaaatttctgcaagcttgttcctctgaatctcaggcaaaatctgaaagatgtcggatcagacaggaaattttcatttcggtattgagggctagatggcctatgtggagatgttcctggtgaataaaggattttgtactattgactactggg

SEQ ID NO: 23609 - DNA, 789 bp, Oryza sativa
  ref <308>: DATABASE ACCESSION NUMBER: AK073706
  ref <309>: DATABASE ENTRY DATE: 2001-12-06
gatttcaattttcaaatttcctcctcctcctcctcaaacccccaccacccagcccagccatccccaaaccctaaatccgccgcccgccgccgccctcgccgttgcgccattccggctgcgatggggttcgtggatccggcggcgccgctgctggccacgtgcggcggcgacaccgtcaagctgttcgacgtcacggtcgagtccggcgacccctgcgtcctcgcctacacccccgcgccggcacaccccgtcaacgccgtccgctggaaccacaccagtgagtacccccagcctcgcctcgccggctccaccgcgtgcccgctcgtcccgcctccggctctcctttcccctcccccctccccttcccagatctcccgagttgggtttacttttggcgtcgttcgcgcgaggatctctcggtgggcagccggagcctcccggccatggggatccgtactgtccgggcgattcgagctgagggtgtccgcgctcccctgtctaattgagcgatgcccctgccgcgttgttatgagatagtggcacgagaggatttatttccagcattgtgatctactgggtattgtggagtgggcttggcgcggatagactgcaggctgagagtgttgaactgtcccagtggctcgtcattcttcccgagctctgaaattctgcattgcatcttcagttagataccgcgcttatgttttctgatcctacaatgtagagccagaatttaactatttgtatgtagcgatacacagaatgcaatcaatcgagatatctttttct

SEQ ID NO: 23610 - DNA, 881 bp, Oryza sativa
  ref <308>: DATABASE ACCESSION NUMBER: AK073707
  ref <309>: DATABASE ENTRY DATE: 2001-12-06
gctctctctctcgctctcgtccccgccgcggcgccgccctgctctccccctaggtgccgctgcgatttcggagggccggtagtccggcggcaaggaaggaggcggggcgcgatgaggttggagaagtgctggttctgctcctccaccatctaccccggccacggcatccagttcgtccgcaacgacgccaagatcttccgcttttgccggtcaaaatgccataaaaattttaagatgaagaggaatcctcgtaaggttaaatggacaaaagcatacagatgcttgcatgggaaggacatgacgcaggactccacctttgagtttgagaggaagaggaacagaccggagcgctatgaccggaatgtcactgcacaaactcttaggctatccctcttattacaaagattagacatgaacgccataaaaaacatattacagagaggcaaaaacagggtaagacaaagcaaagggagagagatgctaaggagttggaacaggatattcaaatgctcccgaagaaggataccatgctgtcaacacaaaagacaaaggtcgtggtcaaagtttctcagcagcagaccgaagaaaatcttatggaagagtaatgaaatggaatcatgttgcatgcgctctcattttgtcatctttatgcaacacttgtgtttctaattgttactttgcaagttgtatttgactgattaccagcaagttttgcacgtactgtgtgcctgtgtgctttgtgacttccatctatatttgagccttgggcctagtaatggtgtctgtgcggacttgcgctaagcccaaggtggtgtgcaccctagggctaaccctaggatatctctaatcatatttattttatttagtagccattattgttt

SEQ ID NO: 23611 - DNA, 2189 bp, Oryza sativa
  ref <308>: DATABASE ACCESSION NUMBER: AK073708
  ref <309>: DATABASE ENTRY DATE: 2001-12-06
gggggttggagacgcggactcggagggctcgtgggtggcggcggactccggcgactggtggcttgaggatcagcgccgtcagcgcctgcatccaggtaggcaactcaatacgccggtggccgtggttgttccgcccccgcggcggcggggccttcgatccgtactgacgtctactcgccggcggcggattgaggcggaatgtttgggtggccgcaggcggagattgtctccgcaaaggaggaagggagcccatggtggttctacagcgaggaggtcccttgatccttgtggttgtggaggcccaaactggcattctcccttgctgaaatctcactgttcactgtttcttcagactggaagtctggaactggttcagattccattctctttggatcacttctatattagaatcaacagagatgattatgcttgtgcatagattgctaattatcactagtttagctgtagaataagtatacagatagcatatagtagttctatgtgattatgtgaaggatgaagcaaaaggttcagtagtaagcaccttctccccaagttacagaaaccaaaagaaagaggaaaagaagataaatgagacatacatactcctggcacgtacatacacattctaggaattctgatcacaccaacaagcaatctacactactgaagtactgatctcatattagtaacttttttttttttggacaagtcacatattaccacttgcctgctttcttgtcgttctacgatttacatccatagcctgcttccccgttgtgcttctatgatcatctttccctcctttggcctggggatatcgtagttctgagggtagctcatctgttccatctcccatttcatctttgacacgactttctcgtgctggggagagtactcctgcaagacagatactggttttagacttttagtccttttctgccgacattttagtctaccattgtttcagttgataggtctcaggtccacaatgtgcatttattagtgcaataacgttttagtgctacactagaaacggaatttgtactttgattgctcttgcagtaatgaggaccttgacactggaccaagagcatatgcataattgtgatataatcctcattgacagttttacttaattaaaactttggccttgcagctaactctcacatttttttcgcagtgtccaggtgtttaacgacaaaattggtgctgattgatcaacaagttaagcagaccaactctggtgacatatactcaccaggcaatgctataaaggcatcagactgcctggccatctcagccttcctctggtgcatatcggacactgctttcacctcccccactgtctcacctgatatctgcatgtacatacaccatcacacgcgcaagaaacacacattatatattagcagaggagccagctttttgcttaaccaaaagaggaccaactttcttcagatggagaaataaaggtatgggggacaagagaaaatgtgatgggctttttctttgttaaatctagccagcatccctgcttgagagattgcagtcaagatcagtgagatatcatctatcatgggggaacaagatttcagtgagcatttctcctgatccttcatcataagttctctttcttctttcccgctagcaaaaaagacaaaggaacaagatctacaaacattatcatatttctatcgttacaatgcttaagtgcagtaatagtatactatatctggagataaacatgatgagatgaccatgcacttaaagattagcattaggatatattcgaacaaatataattttagttaaaaaaaactggtcatatataggtgaaaatttgactagtgatatatcctcctagtggcattcctagttcctttgtaactatatcactttacatttgactagttagatggaaatagtaatggtatattcaagggaaccatggcatggcgaacactgagagagggctattggagagtagaaagaacatggtacctctctaggcatgagagtcttgggaatgaccctgcatagggacatgacaaaacaaacgttttagaacatgatgaggaagacacaaattcatcacttttgacatgaagctatttcatcagtttctaagatagttcttcagtttcatgtattacttttcaactcttgctaatggaagtgtgctaagg

SEQ ID NO: 23612 - DNA, 1116 bp, Oryza sativa
  ref <308>: DATABASE ACCESSION NUMBER: AK073709
  ref <309>: DATABASE ENTRY DATE: 2001-12-06
tgaccaccaccattccctcttcttctcctcctccttgcttctcccgccccttaacccctactgctccctcccagtagccggtgctaaccctagcttgctagctagattgctctctctggtagtagtagatccgtggagtggagatctgcccgcggatcgagcggcggcggcagagcaccagccgtgtctgcggcgcggtgtgcgcgggtgttgcggagcggcggctgagcggaggtgtgggaggagggggagtgctgcggcttccggggtgttagatccgccgatcctggcgccggagatggattcctcgtcggtcgagaaggggagtgggtcgatagatccggacgagcgcacggcctccggcgagcccaaggcgtgcaccgactgccacaccaccaagactccgctctggcgcggcggcccctccggccccaagtcgctgtgcaacgcgtgcgggatccggtaccggaagaagagacgggaggcgctggggctcgacgccggcgagggcggcgcggagcggcaggagaagaagaagagcaagagggagagaggggaggaggtgaccatggagctccgcatggtggggttcgggaaggaggtggtcctgaagcagcggcggcggatgcggcggaggagacgcctcggcgaggaggagaaggcggccatcctcctcatggccctctcctccggagtcatctacgcctgaaccaccaccctacctacctacccacctagcaacagcaagagagagagaagcagaggaaaggaggcagccatgggaaagagtgatttgcttgcttaacatgcatgatctcaaccgggagagactagacagatctctaccctttttttttcttctcccctgcttagtttttccagctaattagttcgatcaaagtggaagccaagttaataatgatgatgatgatgtagtagctgctgttcttcctgttactgttacttgttcttgcctagctgtaatgttactagtagtgtttttagtagagcgtgtaacgttgcaatgtaagaaagagcttatgatccatcttctttctcttgttctttgcaagagattagctcctggatctgcaccaagtaatgcagtttttcagc

SEQ ID NO: 23613 - DNA, 806 bp, Oryza sativa
  ref <308>: DATABASE ACCESSION NUMBER: AK099374
  ref <309>: DATABASE ENTRY DATE: 2002-08-28
gccctttctgttaggctgcatgacagacatacctaaaagcagggtcagacagttagttatgcagccgttaaactgtgtaatcttcctgcttgggctggccatcctatcggtaacatttggaccctttgtcaccattgcacatagagaactgatgatggcaacttacagtgagaaaggcccagaaaacaagctggatcatggtgtaggtgaaaccagaacatatgaggagatcaaaagcaaaatatttgcaggacggaagatggcttttggagttgcagtcatggagaaccacccaaaggatgctagaagcaaaccaagctcaggagagattagcaactactcatccaactcacgtgtaccttcaagcttaaaggatagtagcagctcgacgatgaaggcaagaccatccgtggacaacataaaactagaaggaagcacatctgagcagacactgaacataccaaatccccaacatatcataatactgccattcaagccttattacaggcatctgagtttgggctccaaaaaagaacaaaaaggttcgagtatttgctgcaactcatatagaactaatgaagactggaaggagaaaatgctggagtccagagatgaagttctcagattgcttaacaaggattaccatgccaacccccataggaggccaccagttcataactaagaaagggcaaggcactcaagcctgagtcatgtattatggcccaaactaatgtctggtggtgtctcactataactgtatgatgttttgctttgtaatgtatcataaggaataaaacaattgggcc

SEQ ID NO: 23614 - DNA, 1526 bp, Oryza sativa
  ref <308>: DATABASE ACCESSION NUMBER: AK073710
  ref <309>: DATABASE ENTRY DATE: 2001-12-06
gattccccccattggagtggttcttcgtttgtttggaggagtggttggattagttggtggccggccgaaaggagagggccgtgaattggtgagcctgcttcttctctgctctgtggttcttggaagaggcagagagagagagagagagagctcttttcgatggcgtccatggtttgagcttctggagcggtggttgggggcttgcgcggttgcggttggggtgttcttgcgtgccatctcctacttaggcggcggcggcggaatcgtttgaggttcagagagatttctgcccgggatggcgtcgtcggtgaagctgggatcaaagcctgatgctttcagaaggcaagggcaggcatggtaaagctctcgccttcttcttcttcttttttaatttactcacttcttttatttttcatccttagttttctctgtgttttgatgtgttgtcatgaaagactcgcccttgtctgcgttctttgttgttgtttcgctatctgggacctgagaggggagacaaattgtgtgaaaatttggccaaaaaaaggttcctttttggctgcggattcatgatatttttgggggtatggatgggtagagagctaagtatttctgaaagtgtgactcttcagaagtcaactcgtactttgtctgtgctgcacgcctgcactctatgcgcgctcttttcgtgatgcatttcttgcatttgtttcgttttttgcgtactcagttctcttcttcagtccattgcaattacaagatgctgtattagcacttggcaaagctggtccaactaatagtattccacttgttgggagaaagtaaagttttgggctgaaacctgaattagttgttcataggtgaggttttgcaaaaagtttgaatttcaaataatcaaattatgtagtttttcccccttaaatcaggttgtacttttcagtataccctatataacactagagttgaatcttgcatatttctccgtagtccgtagagaaataagtgagaattcatctttatcacccatttggtgcattattgcccacacactaaatgaattatggacattgaagctggtgggttaatcattcttattcaatccacaaatattccagtaaattgcagttgactgcttgtgcaattagtttatggggagggtgtcgtgaagcttttcgtggatccacatcacattagttggcagtgagatgctgttgttcctcataacagaggagttgtaaccatcatgtaattatttagatgggagcaggtttggatttgttttcagtggaccaatcaaatattgtaattttcaaactcaatcagcctccttccagcctgttgaatctaagtattaaatactctgatgtgtctgttctaagagagataagacagtcatgatgtattgatgttatatgttgtcttgtggacaataaatactaaatgatgtcccgcgctttgctgcgggatatatgttagatattggagaaatgatgaaatgatttggattgaaatattatgaaaatgattcg

SEQ ID NO: 23615 - DNA, 1306 bp, Oryza sativa
  ref <308>: DATABASE ACCESSION NUMBER: AK073711
  ref <309>: DATABASE ENTRY DATE: 2001-12-06
tgcctgtcgcctcgactcccggacgtctcctcggcgagttcgcccgccgcctcgcctgcgtcgatctccatcgccgccggcgtctgctgcttccgccgcatcctcgctcgctggttacgagcctgggagaagttgaggcaaagacctgcagcaaaatgttttatgcaggatatggctaccatgggagtaactttgagcaaacataccgttgttatccagcatctttctttgacaagccacacctggaaggtggcgacaaagtaattatgccaccatctgctcttgatcggcttgcttctctgcacattgaatatcctatgctgtttgagttgcataatgatgcaactcagcggatttcacactgtggtgtgctggaatttgtggcagaagaaggcatgatcatcatgccctactggatgatgcaaaacatgcttcttcaagagggtgacactgtccgtgtaaaaaatacaacccttcccaagggtacatatgtcaagttgcagcctcacacaactgactttttggacatctcaaatccgaaggccatcctggagaaaacactaagaaacttctcttgtttaaccaccggcgatagtatcatggtagcttacaacaacaaacaatactacattgacattgttgaaacaaaacctgcttccgcagttagtattattgagacggactgtgaagtggactttgcacctcctcttgattacaaagaacctgaaaatccgcagcaaccatcagttcctgcaagtgaggcaactgctgaagatgaaaatgctaaagttgaagatgaactgaaattcaagccgtttactggttctggaaagtggctggatggtaaagcctcaaagctacaagcaacagaggtcccttctgcctcacgttcttccccttcagactcaaacaaaagggtgaatcaggaaacgttagcaccagcatcttcaggagctagcaactccacacgccagaaatcaggaaagcttgttttcggttcaagtgcaaacaacaacaaagaaccgcaaaaggcttccgttaaggatgatgagtctccaaagaaggacgagcccaagttccaagcatttagtgggaagagctactccttgaaacgttagctggattttgtagccttaacttttggaatgagccatcctaattcacttggtgaatgtgtggggccgtctggctactctagcgtagacaaatgcgtatattcacttttcatactatgaaacactagcatgtatatccaaattaaactatataaatgctttagcgtgatggaaatattgcatttacagtt

SEQ ID NO: 23616 - DNA, 2236 bp, Oryza sativa
  ref <308>: DATABASE ACCESSION NUMBER: AK073712
  ref <309>: DATABASE ENTRY DATE: 2001-12-06
ggcctgtctgcctcctcccatcattcgatcactcctcctcctccctcctctctccctccctccgcgacccaacaaggaagacgacgaagaggaggagagagaagaggaggaggaggaggaaaagctctctctctctctctctctctctctctagattcgattcctttcgtccggcgcggccaacccgaaaggctgcggccgtcgcagtccaatcgattccccccctgcgctgcgctgcgctttcccacccctcgaagccgaatccgatggttcctccacccgttgaccgcctccgccatcggaggccgcgccgcgccctcgaaccccgcgccgcctgctgctgcctccgccgcctccgcctcctatagataccgccccggctcaccgcggcccggccctcccgaatggcggtcggcggcgacgacgacatggagagggacttcgccgccaggctccgcctcgcgccctcccccgcctccccgaacgccgccgccggaggtggcggtggcgggatcgccttccgcgcgccgcaggagcagttcaccgtcggcgacttcgagcttggcaagatctacggcgtcggctcctactccaaggtggtgagggccaagaagaaggatacggggaatgtgtacgcgctcaagatcatggacaagaagttcatcaccaaggagaacaagatctcctacgtcaagatggagcgcatcgtgctcgatcagctggatcacccgggcgtcatcaggctcttcttcaccttccaggacacctactccctctatatggcgcttgagtcgtgtgaaggtggggagctgtttgaccaaattgttcggaaaggtcgcctgtctgaggatgaggcccggttttatgctgctgaaattgttgatattctggagtatttgcatagtttaggcctaattcatcgggatgttaagccagaaaatttactgcttacttctgatgggcacatcaagattgccgattctggtagtgtgaagcctacaaaggacaccccgatcaaagtccttccaaattccactaacgagagggcctgtacatttgttgggacagctgcatatgtaccacctgaggtcctgaactctgccccaccaacctttgggaatgacttatgggcattggggtgtactctatatcaattgctttctggctcttcaccatttaaagatgccagtgagtggttaattttccagagaattatagcacgcgatctcagaattcctgagtacttctcagatgatgcaagggatctcattgacaagctgctggatgtcgacccaagcaaacgtccaggtgcaggacctgatggttatgtgtcattgaagaaacatcctttttttagaggcattgattggaaaaatataaggagcacacgggcaccgaagcttgcaatggaggcaaatgcaaatgaggatgaagatagtcaggattcaagttggttgtcacacatgggaagtgctccagtcaaccaacatgtcagtcctgttgggaatgatggtgcctcatcatcttctgaagtacgctcccatatatctagattagcttccatcgactccttcgactctagatggcaggacttcctggagcctggcgaatctgtcgttctaatatcaaaactgaagaagataaacaagctaacgaacaagaaggttcagttgatcctcaccgacaaaccacagctgatctgtgtagatcctggaaaaatggtgactaaagggaacatcatgtggtctgatgacccaagtgaactcaatgtgcaagtatcaaactcttcgcatttcaggatatgcacgccaaagaaggtgtcatcgtttgaggatgcaaaacagcgcgcctggcaatggaagaaggcgatcgaagacctacaacgctgccagaagaactgaccatgaccaactcaagacgtcaaaatggtgatattaagcattgtgtatacaccatagccatccttttcgcctggaggaacatgggggagactattgttcctggtctcctgcatctgtgcccgattgcaacgaagtctcaacagttggcacatcgatggatgttcctacatttttttgttttcttttccggccctgctaaattctcttatagcaaacaattttgctcgtttgttttgtaatttggtgcagcagatagcatcaggaattcaggatgattgaaaacgtttgcacttgaaacatttaacacaggaaactacatgagattgccagtttgt

SEQ ID NO: 23617 - DNA, 1145 bp, Oryza sativa
  ref <308>: DATABASE ACCESSION NUMBER: AK073713
  ref <309>: DATABASE ENTRY DATE: 2001-12-06
ggctcgcttttcgcggagagccggccctcgcccctgcgaggagacccgctgcgaactcccgtctcctcaccgctccccccaaatccccttcctaccctcgccccctcgcctctctcccacggcggcgcccactcgtcgatccgctccaccggccgccatcgaccggcgggcggggaggtccgcgacggcagggaggagctcggcggccttgaagaggaggagggcgagccagtcgtcggcgaggcggcgctgggcggaggtgccgggggcggcagagtcgagggcggagtcgatgtgggagaagagggtgtgggagatggcgatgtggatgaggaagaggagggagagcgggaggacgaaggtggcggcgatgcgggcgaagagagggcggtcggcgacgatgatgatgagcttcgtcggcgacggctggagggagagaggggagcgggaggagggcgaccggcgctgacctcgccggcgagccgccgccgtcgctgcccgaggccagatccggcaagcccaggccggatctggccacctcgccgccactccgacgacgacgaccctgcggtgttctaccttcgcggccggtcggcgcggctcaacttccccgaggagatctccttgctggcttcgccgtcagagggtggcggcgcaggcgagccccgcgagcccgacggcggcacgctgtccgcggcctcgatccggaagaaggccatcgaggtcggctcccatgtcgacgcgctccagaccggcatgatggtcgcgccgacccaccaccgcgagcagcagaagcaccaccaccacccgcacctgcaaccgcacggcgaggagcaacaccaccacgaggattggattagttctaagtatgaagacattcatacttaaaaatctcttgttgatctcttcctctcgcccctgtcttggttggattagttgccatattagagtaagcactaatccatccatacttcttgctcgatcttgatttcgcgtggttaagtaagtcgtattagcctttcaggttaaggaggttgttaaggtttttaagtaagaacctcctgtagcttacttactagtttgtgatgcttgctgtattttcttctagttcttggcttggtcttaaggagtttttgtttgattgt

SEQ ID NO: 23618 - DNA, 2413 bp, Oryza sativa
  ref <308>: DATABASE ACCESSION NUMBER: AK073714
  ref <309>: DATABASE ENTRY DATE: 2001-12-06
gggtgaccgagagcgctggcggcgagcggcggcgccgccgccgcagccgccgcgcgcatggcggcacggggaggtaggaggcggagcatggagggggaagctagctgcgccccggcgcgacggagatgaggaggcgcaagcacaagcgcacccaccgactaccgccgcggcgagcgctcgagaaaacagaacaatgcagcaaggaggagaccaagtcatttttttgtgtctgttggtgggtctgtgtggaggtgggcatgccaagccaacataaggtgccaaatagaacaatttcaatgcatatggaagacagttcattttataattgatgctgatggaccctttcgcaaaggaagaagacttgcaatcctgtgaaacagagtgtggcaggcaatttcaccggtctgaacatatattactcaaaagttggttcagttacagaatatctggagaaataccagagctggacgcacatttatggtcttcaggcttgcagtgcaatctgtttacatcattattttcaactagtttggtgagttattgtctgctgggtactcttcggtgaacctgtgtgaccacaaattgcttcctattgattcaactcagaagggagggaacatgggagaggtagtcagttctgccgttgttcatgagacagtgaacaaaatcatatctggcttgattgacaagtatgagcaaaattcaagtgcggaggagcagatggagaggttggagatggcgcacatcaagttggagactgcacttgagacatccagtaagtggcagatcactggtgggcccttgcaacgttggcagaagaagctgaagcgtgctgctgaagagtgtgatgatacactgcgcaaatgtaggcagcgcgtccaagaagaagaacaggctgaacaacaagtaaggaattcctccttacctacgcgagttgcccatgccaccaagtcactgatatcatccatctttcacggcaatatcgacgagccgattagatctgctgttcgaagatttgaatggtttgctgatggagctaatgactttctgagatccgtggagtttggagggacaccacgtcgttacttgttctttgaccctcttatcgggcgccttcttgcaggcgaaacacttgagtacaaattagtgcaaggaaacaatcagcatttgttttggatacggccaaataacaccgcagagcgaggagtagaagctaagttgatctttgtttacaatgatgaaagtgtgcctgtgaataacttttttctaggtatgatgctacaactttcagagtgcacaaacatagttggtactgcaattaagtgcttgcagttgtttgcccctcatttcaagtctacaactgaaactgttaggaaggaacttagtcaactacctacacaggacttctcatgggtgccacgttctcattcataccattgggacagtattcacagtacagttactgaatggttccgcccaaacccaatgtgttgcaagcatcgtagtcagaaggtatgtagtagtggcaacatggagaagacatatttaccagacatttctctagaatcagttattgacgtgagtttgcagtgccaagtttcactgcctgggttaaaagatcaggtcacagttgttgagagcaaaccttctctcaaagaatttccgcatctgaaagttcaccttgtctatacgccccatggctcttcagaagacctattcccagcagtcgagagttctgtgatagagatggttaatggtgttgaccaacattgcttgcacacaaacattgccttggaacaaatggaagggatcatgctgccaagggctgtagattgttttcgtcagaatgcaggaacaacagtgtatcagatggtttggaagtccaaacatggtggtgcatatcttcaggctgtgaaggtatccaagaacatgctgaggcagagaaccattcgaggagccaagaaagcgaagctattgcgacgacatgatcattggacacagagtcgcatagatgtgatctctgatttcttaaatctttgggctgcgcatgcgcctgtccagctgcagggctcaatcctcgattggactcagaaagaaaaggaagcacagttagcacctcatctactacatctgaaattttagatcatgtaatagggacttgtcagggaaatagggatacttcaaagaatgaaaatgtactaccccgtcacaaaatataagcacttttagctaagaatatggataaaaatgcttatattttgggacaaagggagtaatattctagcaggggaagtgacttagggagttatctccaagttattaggagtgtattgatctgaaatgtgtgctccatatatttgctgctgctgtttgcgcagcgcagaacttagtaaatggtgataacttgatgttc

SEQ ID NO: 23619 - DNA, 2002 bp, Oryza sativa
  ref <308>: DATABASE ACCESSION NUMBER: AK073715
  ref <309>: DATABASE ENTRY DATE: 2001-12-06
ggcgaaatgctgtcgctgttcctgcctacgagcgagagagagaatctcatctcgatgctgaacaagtaattttcccggttctgaatccgttcaatcatccaggaaaaatgtccggaattccagggagggcagctgtggctctttatataaccctgcatcacttcttctggctaactggtgtcctttggagctgagctacatagcacatccgtggagtctcttgtgctaagcaatttaccgttccagtgctctactttgtaggccatccatattagacggaagaactttatcagtattattattggaggagaccaattcaagaatgatataatggagctttaccctggctatcttgaagaccattttaacatccacaagcttagtatcagcagcgcctctcctccggagtacatgacctcggcgtcgacgcagttcgcggcaccggtcagaatgggggcgtacgaccggcctccgccagttggcatgtggagtcacgagcagttcaaggttgacaacggccaggccacgagtgcatccacgatcatggaggcagagatgaaatttgagaataggctagaagaaattccccaagtagttctggaggaagggagaaatgttgatcaggaggcaagcaagccgccagacaaggtcctcagaagacttgcacaaaacagagaggctgcacggaaaagccgcctgcggaaaaaggcttatatccaacagctggagacaagccggttgaaactagcgcagttagagcaagagcttcaacgggccaggcagcaggctgtgtatgcaaatgggagccttcgagaaccaaatcttggatttacaggaccgatcgatccaggtgccttaggttttgagattaagtacagccattgggtggacgagcagaatcgcaacactggtgagctgaggaatgcgctgctgcagggacagacgacggaccaggacctggagctcaagttgctcgtcgaggctgggctcgacaactacaaccgcctcttcgagatgaaagaggaagccgccaactccgacgtgttctacatcatgtcgggcatgtggaagacccccaccgagcggttcttcctgtggatcggtgggttccggccatcggaggttctcaagaatttgagaccgcagctggagcctctgacggacaagcaggtcgtggaagtgggcggcctgcagcaaacctcgatgcaggtcgaggacgccctctcgcagggcatggacaagctgaagcagacgatcgcggactccctgacggcggccgacccgttcgactcccccgaggcttacatggtgcacatggccaacgccgtggagcagctcagatccctcgtccagttcgttacccaggcagatcatctccggcagcagacgctgcaggagatgcacaggatcctgacgacgcggcaggcggcgagggggctcctcgcgctgggggactacttccagcgcttccgagcgctgagctcgctatgggcagctcgcccgcgcgattcagggataagctaaacaccgtaatatggtcacggtagaagctacagatatcagtagcaattcgtcgtgttagttcgctacttcagtgtcaggtcaatggccagtgaaggatgaagagatctttctacctgtgcttcgtcgaagaagaacaactcgtgatcgactttctgcagcgccgctgcaactgcaatccaaggaatggtgtatgttcgcctgctgagatgaagaaataaccaaaattaactttggtctttctgatgtgggcacaagagaagatgtaatataatatgtaaatatatacatgttttgggtatcattgccagaggcctctacagctggttttatagacatgtgatgtaattatctgtaactagtgttgctcggttcctcctccctagtacggcagacataggtgacatactgccattgtattgtatgggagaacaaattagttcacttgagaactagaaaaacatgcagtgatgttttgctg

SEQ ID NO: 23620 - DNA, 737 bp, Oryza sativa
  ref <308>: DATABASE ACCESSION NUMBER: AK073716
  ref <309>: DATABASE ENTRY DATE: 2001-12-06
gctttttccccttcctccactgatggcgccagcgggtgcagaggctggacggacggcaacggcgcggtgggtgcagaggccggtgaggcgctgcggccggccgttggcgtcgtggccgggtgacggagaggaggaggccgtgtggcggctccgtgcgatttggaggccgggacggcgtggtggggctggctgcggcctcggatggaggaggcggtggcgacagctgcggccgctcgcgcgcgcggatcatgcagcggcggcttaggcgcgtggatccggtggcggcggctgctcgggcgcgcggatccgggtattcccccacacggatcctgagtcggcggcggcagcgtagtctcacctccccacggtggcggcgtgccctctcactccctctccttcccgtccctttcccctctcttctctatcgccggcaactcccacaggccggatccggcgtaggcgtcggtggcccggttgcggtgccttcccctccaccagatccggcggcgagaggggaggcggtggctgcccggtggcgggatgattatttagatgttcttgtgtgatgttttagtgaaaaatttctgtgatgtttttcaatgtttcctatgatgttttttggtttgggattgggattgattgatgcggggtggataaggtcgatgcatcagctcgattaggagaggggaatctgttgttcttgaggatttttattcaatgtgatttctttatctact

SEQ ID NO: 23621 - DNA, 1609 bp, Oryza sativa
  ref <308>: DATABASE ACCESSION NUMBER: AK073717
  ref <309>: DATABASE ENTRY DATE: 2001-12-06
gagagaccccgaccttcggtgcggcggctcaacgaggcgatggacggcggcggcggaggccggcggcctcgtgccgtgttcatggccttcggcacccgcggcgacgtcttccccatagctgcacttgctgcagcttttgcgcaggaccaacgacagtatggtgtagtgttcatcacacattcagcacatcagagcttgtcgacacatctagcagactgtaatgttagatatatgcctgtgtcaagcccacctgtccttgctgccgaacagctcgagagcatctcataggaaaaagaccattcaagtggagcacaggagagagtgcttgtctgccgtcgaaaatgtttttggaaatgacatgagcactcatggtgatttcattgtgatcaacttctttgcgttggaaggttggcatcttgcagaattgttccaagttaagtgcatcattgctgctccctattttgttccatacagtgcacctgcatcatttgaacgccaatttaaacaaagtcttcctcttctatacaagtactttcaagaagctcccctgaacatggtttgctggacagacattacccactggatgtgggcattgttcatggaaagttggggatcatggagaaatgatagtctaaatcttagcccaattccttttacagatccagtaacaaatcttcctctgtggtatatgcgagaagaatccccattgttgctgtatggtttcagcaaggaaattgttgagtgcccagcatgggttttcttagaaatccaaaagcatttctgatggtgcttaaagctgtcatagagaaaacagattacagatttatccttttctcatctggataccagccattagattctgcaatacaatattttgctccttcagtagcagaatcaagtgagtatcaggcatctgctcttcattgtgacagcaatctcctttttaatggtcgactcttttgcttttctggatcaataccatacagttggctgtttcctaaatgtgcagttgctattcaccatgctggcagtggatctacagctgcagcactttttgccggcatccctcagatttcatgtcctttcctgctggatcagttttactgggcagaaaggctacactggctaggagtggcacctgagcccctaggaagacaacatctaattccggatactgacaatgcctcaagcatcaacagtgctgcagatatgctgattggagctatcaaatcggcattatcacctgaaattaaagctcaggcaaccagaatcgctaacaaactttcttctgaggacgggattggagaagccctcaggatcttgaaagagagttttgccccaaattgaaagttaagtgataagaagcaggggatacgacgaaccaattgcacgtaaaatagttatgtgctttgaagtttgaattagcatttgtcactccaattgatttattatgcgccgtatgaactggaaaacagccttggtcactagtatttttcttgtttggaatggaatggaatggcaaaacggcaatatgatgaacttatgcagagacttgtgttgtagatagagtaatcatgaataaagaaaaccaaaaccatgatatatgatt

SEQ ID NO: 23622 - DNA, 2044 bp, Oryza sativa
  ref <308>: DATABASE ACCESSION NUMBER: AK073718
  ref <309>: DATABASE ENTRY DATE: 2001-12-06
gacgcccaatcctgccgccgtttcagcagctctagtttgaacgagggatcgtagagaggagggtttggtgagggagggaggaagatggcgacgtgcgcggcggacctggcgccgctgctggggccggtggcggcgaacgcgacggactacctgtgcaaccggttcgccgacacgacgtcggcggtggacgcgacgtacctgctcttctcggcgtacctcgtgttcgccatgcagctcgggttcgcgatgctctgcgccgggtcggtgcgggccaagaacacgatgaacatcatgctcaccaacgtgctcgacgccgcggccggggcgctcttctactacctcttcggcttcgccttcgccttcggcacgccgtccaacggcttcatcgggaagcagttcttcggcctcaagcacatgccgcagaccgggttcgactacgacttcttcctcttccagtgggccttcgccatcgccgccgccgggatcacgtcgggctccatcgccgagaggacgcagttcgtcgcctacctcatctactccgccttcctcaccgggttcgtctacccggtggtgtcccactggatctggtccgccgatgggtgggcctctgcctcccgcacgtccggacctctgctgttcggctccggtgtcatcgacttcgccggctccggcgtcgtccacatggtcggcggtgtcgccgggctctggggcgcgctcatcgagggcccccgcatcgggaggttcgaccacgccggccgatcggtggcgctcaagggccacagcgcgtcgctcgtcgtgcttggcaccttcctgctgtggttcggctggtacggattcaaccccgggtcgttcaccaccatcctcaagacgtacggcccggccggcggcatcaacgggcagtggtccggagtcggccgcaccgccgtgacgacgaccctggccggcagcgtggcggcgctcaccacgctgttcgggaagcggctccagacggggcactggaacgtggtcgacgtctgcaacggcctcctcggcgggttcgccgccatcaccgccgggtgcagcgtcgtcgacccgtgggccgcgatcatctgcgggttcgtctcggcgtgggtgctcatcggcctcaacgcgctcgccgcgcgcctcaagttcgacgacccgctcgaggccgcccagctccacggcgggtgcggcgcgtgggggatcctcttcaccgcgctcttcgcgaggcagaagtacgtcgaggagatctacggcgccggccggccgtacggcctgttcatgggcggcggcggcaagctgctcgccgcgcacgtcatccagatcctggtcatcttcgggtgggtcagctgcaccatgggacctctcttctacgggctcaagaagctcggcctgctccgcatctccgccgaggacgagacgtccggcatggacctgacacggcacggcgggttcgcgtacgtctaccacgacgaggacgagcacgacaagtctggggttggtgggttcatgctccggtccgcgcagacccgcgtcgagccggcggcggcggctgcctccaacagcaacaaccaagtgtaaccaatccagaacgaacgacgtcacagcgaaggaagaaatcacgggtttctctccctctccgatctcgatcgtcacgtcataaatttgatccccatatttgattgccagtttctgtttgggccaaatgcttttgccgctctctctggtgttgcaagactgtaaaaacactgtaggatggacgagtgtctttcacttttgctgggcttctcttgtgtacaggcatgcgtacgtgtcttagaatgtgtggtgtgaaggtgggaagaatcagaggttagggtttaattttcttttgcacaatggttactgctattattgttttattttgtggtcgaattttatcgtcataagggtgtggtggaatggtggtcaagataggtggctgtgcagggctcaaagactttgcgtgggtccttttgtcctgcagtgctctacctctctatcaaaactttggcttatttcctgg

SEQ ID NO: 23623 - DNA, 1263 bp, Oryza sativa
  ref <308>: DATABASE ACCESSION NUMBER: AK073719
  ref <309>: DATABASE ENTRY DATE: 2001-12-06
ggtcgtcagaaacagaccgcacaacccgacggcgcagacgccacgccggggggcgccgccgccgccgccgccgccgccaacgcgacgaaccgcgggtacaagaaggcagggaagccgagacgaggggctccaatggcgctccgccgcgtgctcctcttcgtcaagcccttcgacgtctaccctccccgcccgctcgccgccgccgcctcctcgcctccgcccccgccgccgccgctgcgtgtatccaatcccaaggtcttgaattatctggatgataggtgcagagttcacaaggaaacaatcaatctctgcaaaagcgtactgcagcgtaaatccattgactggatttcagtgcagcgaaatgatatgtctaatccaatacatgatgtggatcttgtgatttctgttggtggtgatggcactcttctacgggctagccattttttgaatagctcaattcccgttttaggtgttaattcagaccctacttgtcctgatgaggttgatgaattaactgatgaatttgatgcaaggagaagcacaggacatctttgtgcagctacggctgcaaactttgagcagatacttgatgcaacccttgatggtagtaggcaaccttcagagttgtcaaggatctcagtgaaactaaatggacttcagctaccaacttatgctctgaatgatatattggtctcacacccctgtccagcaagtgtatcacgattctcatttaggaagagaagcaacactggagagagctcgcatttaattaattgcaggtcaagtggtctcagggttgcaacgcctgctggatcaactgctgctatgctatcggcaggaggattcgtgatgccaatatcaagccatgagcttcagtatatgataagggagcccatttctccaagggatgctgacaagccactgctgcatgggttagttaagcaaggtcaacacatacttgtcgtttggtacaatgaggaaggcgctgtttattttgatggttcacatgtaatgcattcaattcagcatggagatacactggagatctcctctgatgctccaatcttgaaagttattttgccagaaaatctgttaaagcagggatcttagtaatgcaataacattatcatcgttattgtgcttgttaatatggtatgatgtttgacacttgagtttctgagaactgtctgatatagatgcgtatttatgtaatgacagagttaacttatgctatgaaataaaatagtggatgctaatttttgt

SEQ ID NO: 23624 - DNA, 1537 bp, Oryza sativa
  ref <308>: DATABASE ACCESSION NUMBER: AK073720
  ref <309>: DATABASE ENTRY DATE: 2001-12-06
tatggatgggttattggcagcatgggagttgcacttgctttgattgctattgctctccttgcacttgttctgtgcaagctctcccaatacaatccccaagctccaaataaccagggaaagagcccagaccagtctatatcacacaagtttcaacttcttaagagtggtagtttttgttatggttctggaagatacttatgttgccaatttggaaatgtgaaacaatcaagaacggatggcagtgatcatcatatgaataccccaaaaggtgttgtagtggacgtgtttgatagggagaagcccattgtgtttacctatcaagaaatacttgcatcaaccgattcattttctgatgcaaatcttctgggtcatggtacatatggctctgtttattatggtgttcttcgagaccaggaggtcgctataaagagaatgacagcaactaaaactaaagagtttatagtggagatgaaagttctttgtaaggtccatcatgccagtctggtagagttgattggctatgcagcaagcaaggatgaactataccttatttacgagtactctcaaaaaggttcactcaagaatcaccttcatgatcctcaaagcaaaggttacacatcattgtcttggatctacagggtccaaattgctcttgatgcggctagaggacttgaatacattcatgagcatacaaaggatcattatgttcacagggacatcaaatcgagtaacatcttgctcgatgaatccttcagagcaaagatttcagattttggtcttgcaaaactggtagtgaagtcaactgatgcagaggcttctgtcacaaaagttgtgggtacatttggttacttggcccctgaatacttgcgcgatggcctggcaactacgaaaaatgatgtttatgcttttggagtagtactttttgagttaatatctggaaaggaggcaattacaaggactgatggattgaacgaaggatcaaactcagaaaggcgttccttggcatcagttatgttgagtgcactaaagaattgtcgtaactcaatgtatatggggagcctgaaagactgcattgaccctaatctaatggacctgtatccacatgactgtgtatacaagatggccatgctagcgaaacagtgcgtggaggaagatcctgttcttcggccagacatgaagcaggcagtaatcgcgctatcgcaaatactgctgtcgtcgatcgagtgggaagcgacgctagctgggaacagccaagtgttcagtggtcttgtggctgggaggtgatcctgtaagattggcctggttgctacggtgctatcccatgcgctcttcggtgatctccttccctgctccactagaggcgttttcccctgtaaccttctcctgcattttgctggtttcttgcccagttgagcagttttctgcatcttcttttcaaagtatctaccacagtgcaatatatttcttggtgggtgatatgtaaccatgtatgtataccaaatgtgccttgcaagttctaatgcaatgatcttgcacc

SEQ ID NO: 23625 - DNA, 1522 bp, Oryza sativa
  ref <308>: DATABASE ACCESSION NUMBER: AK073721
  ref <309>: DATABASE ENTRY DATE: 2001-12-06
ggccgacgccaatcgccgccgcctgtcgccgccgccgccgccgcctccatattctagctctcggtgatctctgatggagcccgaaggcggcgtcaggctgccaaccctagatcgcgtcaggcgcggcgtcagaagtagctgtgataccgagagctgggaatgctttcaatgcggttcgataaacctccctgttgagaaactactgtttgatctaccagcattccattgtcgtggatgcgaagctccgtttcttggtgaaatgaacttctgctatgacctcgtcaaggcaaacaagcgttctctgattggtgggctcgacaatatcaagaatcaatacgataatcctgaatgtatcgcctattctatagcctcttgccttgagatagcagacaggattaagacggttcttcagggaaaaaatcccgactccgtaaaagagatagacccaactgccattgttgacatgtttgatggtaagtgcttggccaactgttctgatggcacatcgggaatcggaaaacttgttacaatggcgcttgctgtccaaactgatggcatacaatctgccgatcattcaaggctttacactgctgtagcagtggaaacaattgataagtatgactttgaagggatatgtgccacacttgctgatggcattccgcttgttggtgcgttttactgcggcagcagattggaaaagcttgagtattgccaaatttacagagtgcccaaactatccaaattcctggatagaaatctgattcctactggccatgctgctgttatcattggggctggaatgcgctgcgggatacaatatttgtattttctaaattcgtggggtaacttcttttgcccacgctatgacaaagatggtaatcttgtgaaagctggagttggaaagttgaggttttatgatttgctctgcaatccgattatgttcataacagattctgccaagcgtgttgggttgaataggcagctactgcctatgggcactgggaagctgtcagatcacaacaagagcatgctgatgggccgaaaacaaactgatgttatacctgaagacctatctattggcgtaacctccgagtttgttgggaatcaaccacaaatttcttcaaaaagaaaaatggctaatgccactttggatggtgatggtcaaactcaaaagagaaacaagtgtagaactttcggccgaagttctgtcgatctcaatgaagccaacaacaaacggaatgcaaaggaagatgagatgtgaggtcatggggatgaagaaccctgcagacatacttttgctttgtgaaaaagggcctgatgttttttgctctgagagttggtagggtttgtgagccacctcaccaagcatcaatgatgcatatttttcattatgctacacttggatgtctcaatttaatctactgagactctttttcgttgatgatcactggctcactgctcatgtaaatcctggagagtatttattgttgaaacgaagacatgatcttctgtgtgtttgagc

SEQ ID NO: 23626 - DNA, 2498 bp, Oryza sativa
  ref <308>: DATABASE ACCESSION NUMBER: AK073722
  ref <309>: DATABASE ENTRY DATE: 2001-12-06
gaaaggcccaaaacacccacacgcacgacttcttcgtcggcgtcgccgcgccgccgcgccgccgccgccgcctccggccggccggccgcacctccaccaccgcacagcacctctcagctctcacccgcggggagaagggaggaacacggagaaggctcagactcgccaatttcatggagattgcatctcggctgtgttgatgcgtcgcccatgcacccactcaccctctcctccaccgccctcctccgcctcatcaagtcgctctcgccggcggtgcgtagggcccacctgtcggcgtcctctatccactgcctcctcctcaaggccggcctcctccacgtcggcgcgcacctcccgacggcgctcctctccgcgtatgccgccctcggcagcccggatcacgcgcgcaggctgttcgacgaaatgcccgagcaaggccttgtcccgcgaaccgccatggcccgggcgcacgtcgcgtctgggcaggcggctcaagcgatcgccgtattcggggacatggtggcggatggtgtcttcccggacaatgtcgccctggcagtcgcgcttggggcatgccatggcgctggctcttggacggctaggaggaatccaggcaagaagatccatgctctcatcgtgaccagcggcattgagccagatgtgtttgtctccaccgagctgataagggtctacggtgagtgtggcaagctggcggtttctaggagggtgttcgatgacatgccgtcgaggagtaccattacatggaacgccatgttgcatcagtatgccaggcacgggaaagttgacacggcttatgagctgttcctcgcaatgccgaggagagatgttgtgtcctggaacacagtgatggccgggtactgtgttgctggccggtgcagggaggcacttggcttgttccgtcagatggtgtcgccgtcatcgtgtgcggtgcatcctaatgtgcctacgatgagcactatcctcggtgcttgtgccggcgcgggttgtttggagaccgggatttgggtccatgcatatattgagaggaacaggatgaatgatgatggctatctggatcggtgcctgatagacatgtactgcaaatgcggaagcatcgataatgccctacaggtgtttgagaaggcacctaggaagagggacctgttctcatggacaaccgtgatctgtgggctggcaatgcacggccgcgccactgatgctttgagaatgtttgacatgatgcaggataatggcatatgcccggatgatgtcacgcttgttggggtcctaaatgcttgtgcacatggaggtttggtagacgaaggtcttggctacttctactccatggaggcaaaatttagaatcacacccaagattgaacactatggttgcatgattgatcttcttggccgcgttgggcgactgcaggaagcatatagcatgataagaacaatgccaatggatcccaacacggttatttggggtgcattcttgagcgcgtgcaaagttcatggcaatatggaactcggcaagattgcggcagaagagctcaccaggttggatccagatgacccttgggggagagtgttgctgtccagcatgtacgcgaaagcacaggattggattggtcttgcccgggagaggagggagatgaacagcatgcaggtgaagaagactcctgggtgcagctcgatcgagctcaaaggcgaggtgcatgagtttgttgctggtggcagtcagcatcctcagtatgctgagatttgcagtgtactgcaagatgttgaagctcaaacaaatgtaggttgagacacacagccttctgttgagcttcttgtgctgccaggatttcagcacaggtgcaatttcctctgagccttcacgagaacgctccttgctttgcacgtcggcatgtggagaaccgaagagaagattagctaattagtcagttaaaatgcgaagaactgacaattttgctctgaatccaatataaacttcaatatgctgattttatgagctagggttcagagtttacacggcctagagggtggtgtcagcttgattggcataagaggagacaatctagtcggataaagacctttgagggagatggaatagattaatacatcttcatcgcttgattgctagtaatggatacatgacacccttttatagggcatggctttgactggacagctgatacatggaataataatctctgctcaacagctgatgaaatttcttttaacttcgtcaatttgaagcgacgaaagaatgttgaagctagtttacacatgcattcaaccttttcccgtgaaggcatactgagcattgcactcaggaacctctttcagatttttttagtgtattatttacccttttatgtgctttccgtgccttaatgtttgtcagagtgttgatggcatgggcacaagcacattctttatttgttttgttttcaagggttaatttgatccatgccactgcaaatgtggcaaatc

SEQ ID NO: 23627 - DNA, 1322 bp, Oryza sativa
  ref <308>: DATABASE ACCESSION NUMBER: AK073723
  ref <309>: DATABASE ENTRY DATE: 2001-12-06
ggccgaaaaactgaaccgccgcagccgcactcctctcccgcgctcatccgttcgtctgtcgtctgttccggttgctttggcgggcagctagggtttaggcgcggggccctcccgaatccccgatgtacggcgtcggcgtcggcggcggcggcggcgggaactacgatggcgggggagggaacgccagctccctcttcggcggcggcggattcatgccctcgcaggcgaccaacgccgcggaggggaccagcggcggcggcggcggcttccccaagagtcggaacgcccaggcgctgctcccgctcaccgtgaagcagatcatggacgcgtcccagaccaacgacgacaagtcgaattttgctgtcaatggcatggaggtgtccacggttaggcttgtaggacgcatgttaaataagcttgatcgggttacggatgtatcattcactcttgatgatggtacaggcagggtacctgtgaatcgctgggaaaacgatagcactgatactaaggagatggctgacattcagaatggtgactatgttattgtcaatggtggtctaaaaggttttcaagggaagcgtcaggtggttgcttactctgtgaggcgtataaccaacttcaatgatgtaacacatcactttcttcactgcgttcatgtgcacttggagcttaccaggccgaagtcccaagtaaatgctaatacagcaacaggaactcctaaccaaactatgcctagggatagcatggcgtataaccaaagtccacttactaatcaggcctcaacattttctgcaccacaaaatactggtactggaacaaatatgatcgacttggtcttgaatgtttttcatgacccagcagttatgaatgatgaccatggagtaggcgtagattatgtgagccgtcgtcttaatctaccagaggaaacagtcgggaaaatcattatagaccaagttgatctgggacatttgtatgccactatcgatgaccaccattacaagtccacaatgaatggttgatcgtattcaatattatacgtatgcttcacagcttcaaggtcgcatggagccaagaaatgtgtgcactccgcgagagtagttactgcagagtgcctcgcgtgatttttctacaggagatcaccaggcaatcagcttaactgttcaattaagttgtttatctaaataactactcccttggcagtcaggcgagtagcttgatagcatgttagatctttaggagcttcttttgtgtttcaaacaactatgaacgtgtttgcaattgaagcatcttattttcttatgacagtacaggcaaagttactc

SEQ ID NO: 23628 - DNA, 524 bp, Oryza sativa
  ref <308>: DATABASE ACCESSION NUMBER: AK073724
  ref <309>: DATABASE ENTRY DATE: 2001-12-06
gcttcccccttcaaacgccgccgccgccgccgctctcttcggtctcgcttcccttctccgggagattcagtcgctgttgtggtgtttgcttcatccaccgccaccatgcagaacgaggagggtcagatggtggacctctacgtccccaggaagtgctcggccacgaacaggatcatcaccgccaaggaccacgcctcggtccagatcaacattgggcatgtggatgagaatgggctgtacgatggccgcttcaccacctttgctctctctgggttcatccgtgctcagggagatgctgacagtgctctggataggctgtggcagaagaggaaggctgaggtcaagcagcagtagatcttgctactagttttacctggaagaactcgtttcaatttcatgtctctctagctacttcatgcaatgcctgtgttatcagttcgtactccgaaaaaattcgtgtgacttgatcggtttatcctgataatgttttatccatgttgaagctttattacatctgtttctcg

SEQ ID NO: 23629 - DNA, 2055 bp, Oryza sativa
  ref <308>: DATABASE ACCESSION NUMBER: AK073725
  ref <309>: DATABASE ENTRY DATE: 2001-12-06
gaggtctcatctcatggtcgcctagccaagccaagccaagccaacctcctcgccgaggagagagaagagaggagaggagacgagaggagagagaagccgaggaggaggagagagagagagaggaggccgctccatttgcccccccccccatggccacgctgccgggcgggccccaccccaccggaggcggcgccgcggcggacccgatgcaggtcgaccagccgcgctccgccgcggccgccgcagcggtcgcccccgccggtgaaaagcacggtgcttctcttatggaagggagtgatcctgtcaccggccacataatctccacaacgattggagggaagaatggagaacctaaaaggacgattagctacatggcagaacgagttgtgggaactggatcatttggaatcgtctttcaggcaaaatgtttggagactggtgagactgtcgccattaagaaggttttacaggacaagcgttacaagaacagggagttgcagattatgcgatcaatggatcattgcaatgttgtttctttgaagtattgcttcttctctacaacaagcagagatgaacttttccttaacctggtcatggaatttgttcctgagtcactgtatcgtgtgttgaagcattatagcaacatgaaccaaaggatgccacttatatatgtcaaattgtatgtttaccagatattccgtggtttggcttacattcatactgtacctggagtttgccacagggatgtgaagcctcagaatcttttggtcgatcctcttactcaccaagtcaaaatatgtgattttgggagcgcaaaaatgttggttaaaggtgaagcaaacatatcgtatatatgttcacgttattaccgtgctccagaactgatatttggggcaaccgagtacacgacatcaattgatatatggtcagctgggtgtgttcttgctgagttgctccttggccagcctctctttcctggtgaaagtgcagtggatcagcttgtcgagattataaaggttcttggtactccaacacgtgaggaaatccgctgcatgaatcccaactacacagaattcagatttcctcagattaaagctcacccatggcacaagattttccacaagcggatgcctccagaagcaattgaccttgcatcacgtcttctccagtatgcaccaaatctacgatgcactgccctcgaagcatgtgcacattcattctttgatgaattgcgagaaccccacgcaaggttgccaaatggacgtccattccccccactgttcaactttaagcaagaactagcgaatttatcgccagagctcatcaacaggttgataccagagcatgctcggtgacattgtgggttcaatttcttgcctgctgccggaccataggacagctggatggtatttttactttgcgaagccgatgcttgtttgtgccaaagggcaacttgcatgttctcacatttaaggtgtagaatctgaccattattgggaagctgaacatgagctggcgccaatgtgttatatgaggtgggtgtgctaggcacagccaacccatgttaatttaatgcttctcctccattattaggaggccatggtggtcaggattagccaagtactgtggggatagctggagggaatggggatggtgtattgttaagctattgaaagggatcagatcccaagtactgtactactttctcccacgattaatgttgtagtgcccctgtaagtgtttctcatgccctattgtcgatgtaattgtgtaaatgttcctaatggaaaaatctcttgttatgataccccatgcccaaacttgtttacccccccccccctactggtttcctctaccatatggttcagagaactttcctcatctgttggctgcaaagatgaatgttgtgattatcattgtcactggaatactaggataaaattgttgataaatgagtaatatatttgaggtctgcatttgtgagttgtgtaaggatttaaggcaggtgtctgcaccaatcctatattgagagaataaaagcaacagttgagaacc

SEQ ID NO: 23630 - DNA, 1802 bp, Oryza sativa
  ref <308>: DATABASE ACCESSION NUMBER: AK073726
  ref <309>: DATABASE ENTRY DATE: 2001-12-06
gtcagaaaaccaaaaccatttcccccatttcctcccctcccctaccctaccatggacttctccggcggcagcggcggcggcggcgtcgcgtcggggagggtgcaggcggagcggtggctggagatcgccgggaagctcctcgcggcgcgggacctcgtcgggtgcaagcggttcgcggagcgcgcggtggaggcggacccgctcctccccggcgccgacgagctcctcgccgtcaccgacgtcctcctcgcctcccagtcggtcctcccctcgggccaggccgacccgctcgccgtcctccagctccccccgtccaccaacccggccgaccacgccgccgtctcccgcgcctaccgccgcctcgccctcctcctcaggcaggacaccaacccgcacccgggcgccgacgtcgccctcagcctcgtccacgacgcctacgccatcctctccgatcccaaccgccgcccccagccgcccgtcgccgtcgccgtcccccacgcccatccaggcgccgcgtcccacccagccgcgcccgccgccgccgaatcccccgagttctggacggcttgcccgttctgctcctacgtccaccagtaccagcgcgagctcgtggggcgcgcgctcaagtgccccaacgagtcttgccgcaaggggttcgtggctattgagatctccaccccgcccaccatcgtgccgggcaccgagatgtaccactgcgcctgggggttcttccccctcggctaccccacctccgccgacctcaatggcaactggaagccattctacaagatgttcccctggaacaatgcgcccgctggtggcgccggctcgggtggtagggggggctatggtggccgtggtggaggcagcgctggtcggcagccgcagaatgggagcgcgcggggcgggtcatccagaggtagggtgaagaagacgaccgctcgcaagaaggtcggtgccgggctcaagaggcgatcattcggcggcgtggagagcggcattgagccgatggatgggcaggatggatggggtgagggtgaggagggtggtgatggacaggcagaggaggtgagggggattaacatcaatgaagaggcacagtctacagatggtgctaccaggggacatgttcacgcaagggggaatgtcagcggtggggttgtggacatgggcaccttccatctggatgtcgatccatcggaagatattttagggaatttgcagaacttgcccttcttgagggttgacaatcttgggcggatgctgtaatgggctatggcatttgttgtgctggagaaatgctgtatgtttagctgggtcaaaacagatgtttcagggaccgacccttaccgctcttgttgtcgttattgttcttgtggcattatctcttgttgtagtagtagtttaccttgtgtttctagttacttagctggcggtggagtcccatagaagtcctatatgtgagtttgtggtatctccaaattagctgggatatgtattctgtcttaagcaaacaaacttgtggagttctctcaggatgaatttagtgattcatggatgggcgatcacttcggtttcttctagggcaatggcgagacaagtcactgagagaaagtaagtgaagctgtgagctgtctgtctttctgaatatacaaagcttcttttgttacagccatgcatttagctatttgataagattgacttggttttaattcaatattctattgtgaagttaatgctgtaacggtttttggtatgcctgcttatgatccagtgttaattaagaatctctattcgatagc

SEQ ID NO: 23631 - DNA, 1064 bp, Oryza sativa
  ref <308>: DATABASE ACCESSION NUMBER: AK073727
  ref <309>: DATABASE ENTRY DATE: 2001-12-06
gagcgaggcatccaccaccatcagccaaagtgccaaacgatcgatcgatctctgcagtctgcagattagcccaccacctccagcatcgggtccacgaatgcacaccctgtcaactccactccacccgcttttctttccctctccccgccaccttcacatctcaacctttcctctccctctctctctctctctctgatctcgtcgttcccatggcctccaaacccgcggacgttacggctacaggtggcggcggcgtcgccgtcgtccgtgacaacaacaacaacgccggcggcggcgaggcggaggtgtaccgctccgagctgacgccgctgcagaagcacgtcgccttcttcgaccgcaacaaggacggcatcatctacccctccgagacctaccaagggttccgcgcaatcggggcaggagtcgtgctgtccgccgtcggcgccgtgttcatcaatggcggacttgggcccaagacgataccggagaacaccaagactggtctcaagttacccatatacgtcaagaacatccacaaaggcaagcatggaagcgattcaggcgtgtatgatgcgaatggaaggtttgtcccagaaaagttcgaggaaatattcaagaagcatgctcacaccaggcctgatgccctaacagacaaagagctgaaggagttgctccaatcaaacagggagcctaaagatttcaaaggatggttgggtggcttcacagagtggaaagtattgtactacctctgcaaagacaaggatggatttcttcacaaggatactgtcagggcagtctatgatggaagcctatttgcaaagatggagcaagagaagcagtctgctaagaagaaatgataagaccatactgggtgctgtaattatctgttattgttgcaggtgattgtaaattacggtgtgggtgtgaatccaaaattattgctgtagtttgattgcgcgtgtttgttgacccgttcctgtaacaagaagctatttgtgaagttattggaagtgtttgtaaacatggtggtatcctctgatttattcacttcatttttttctttt

SEQ ID NO: 23632 - DNA, 2002 bp, Oryza sativa
  ref <308>: DATABASE ACCESSION NUMBER: AK073728
  ref <309>: DATABASE ENTRY DATE: 2001-12-06
gttactccacaccgcacagacaaatactctacgagagagagagagagagagaattttaattttaggagaaaactgtggccgcgtgcgtcgcgtctcctcctatcttctccccgaagcttccgtatcgcgggcgcctccttcctttccccctctatctatctactcccttggaaatttattcggtcgcgtggggtttggatcggtggatcgatcgatcgatcgagcgagcgaacgacgacttgtgagcaggttaaggacaggcatactggactgactgttttatggctagacaccatggaaaccattccctactgccagagatggttcaacccaataatgagcaactcaaccaacctctgcctttaggtcagaagttatttgtgcatgctggaaatgatgcagcccttaaaattggcccttcataccatgggaatgtggcaattagatcgaatgatcttccatcttcaagtcgagtggcacaatattcaggtcatagagttaaaaacacaggaaccttacataactcctatgttcactatcctgctggaagctctggtggccatgtatcctacaatcctcaaactgaacctgttataacttatccacatagatctgagggagaatttgctcgagggagttcccaaatcgacaacagaactgctgcagtgaaacgaaaaaatcctgtcatttatccagagtatagcatcaatggtgatggttattgtgccggtagctcatcaagtacccagttctctaattatccacagccagctccattttctgagtccttgcatcgtcaaatgcctccaagtgttggcccaattaattggaatgaccagagcttggtaaatcaagaaggaagtcagagaaatgtgagggcacgtcataattttaataatatttcattggaacctagaccagtccattctacttcgaatgtttcccaaagtacatcaatgaaaaggaatggaccatccttttctacgcgaatgagaactatgccttcaggtgcctctggaatgcactctggagaaatgccttacactatgggaagcagcaactcatctgttcctgtcccaactttacaaggctcttcaagcagtgcaatatttgccagtggtgtctttgcacctaggcatgttcatggtgacactgttcctagctacattcatctgccttctgtagcatcctctagctctacagcgattccccatgaggtgatcattccgagctaccaacctgctacctctgcaactacctcaacacccatgagggccagtcagccattacctgtcagagctgttgcatcttctagacatgcaaggaatgtactcatagggcatgctaacagcggaaggaacagaagggcgagaagctcatactatggtattcagcctttgatgattgatgcacagcaattgataatgatgcaacaatttgctctccgcgaatcaagagaagcacaagacccccacagggccatgagactggacattgacaatatgagttatgaggacctgctggctttgggagaatctattggtaatgtctgcacaggcttggtggacgagaaaatctcaggttgtgtgagagaagtgatctattgcagttctgatgaacagcaaaatgatcaagatgatgggaaatgtgcaatttgtctggaggaatacaaagacaacagtttgctgggaatactgaaatgcaatcacgacttccacaccgactgcgtcaagaagtggttgaaggagaagaactcatgcccaatttgcaagtcggctgctgcataggacacgcgaggacaaacaacaatatggtcctcaaatttgttagtatttagacccaattaagttgtttcattctttgtgcgcctcagccatgtaaataagtaagtttgctaacattaaattattttgtgtgttaccatagctgatatccttttatatgtattaactattaaaatgccaatttttaattcatttaatcatatgaagtggtttacatt

SEQ ID NO: 23633 - DNA, 597 bp, Oryza sativa
  ref <308>: DATABASE ACCESSION NUMBER: AK099375
  ref <309>: DATABASE ENTRY DATE: 2002-08-28
gagtgacgcagacgcagccgaatccgaggagaagagagagaaagcgcgtggccggcggcgagaggagcggcggcgatgggcggcggcgggcacggcggcggcacgacgtacaaggggtacaccatcccccacaacaagcgctggcacaccgtcgccggcaagggcctctgcgccgtcatgtggttttgggttttctacagggctaagcaggacggtgctgttctcttgggcatgcgtcatccttgggatggtcatgatgatcactcacatggtcatgggcatgagcatgagggatcatcatcaacatcgtcgtctcactaaatcaactgcttcttggcggctgagggagactcgctgctttggttgtcgcgatgaaatcctcgaagataataaagtttcacactattaattttattaagatgggttcatgttgttggcaactgtttaaggcaaactggttatgtattttgcttttgagatagcctccctcgatggaaaacccatgtatgttgttgcttattaggctgtgtacatccttttggatgtagaggctgggtttttaatccattatctaaaaaaatgttgttgcttcttgtg

SEQ ID NO: 23634 - DNA, 853 bp, Oryza sativa
  ref <308>: DATABASE ACCESSION NUMBER: AK073729
  ref <309>: DATABASE ENTRY DATE: 2001-12-06
gctcctcctccgacttcgcctgccttccccccccccccccccccccccctcccctcgtcaatccccaaaccctcctcctcctctccggcgatccacccatcgatcggcgatgacgctggggagctccggcgccggatcgagcgtcgtcgttccgcgaaacttcaggttgctagaagagcttgaacgtggtgaaaagggcattggagatggaaccgtgagctatggaatggatgatgcagatgacatctacatgcggtcttggactggcaccatcattggtccacataatagtgtccatgaaggtcgcatctaccagctgaagctgttctgtgacaaggactacccagagaagccaccatctgtccggtttcattcaagaatcaatatgtcgtgtgttaatcatgagactggagcggttgactcgaggaagtttggtgttctagcaaactggcagcgcgagtacaccatggagactatccttacccagctcaagaaggagatggcaaccccgcagaatcgcaagttggtgcaacctccagaagggacgttcttctagaggagtatttacctcctggctcatctccagaattcagattcaacatcatcaacttgtatttatctggctcccgcgcttaattgttttctagttcaatttgatatatgccctgctttctgtgtaccaacaaccgagtccaactttgcgcctcgtgattcgtcgggtggctgttgattaaggagatgagtcggatgaaaagggtgatctggtttggcaaaattggcagtatgagggatgtaaaattggaaacagatgctgtgtcaagaaatgtgtaactgcaggtcctttatattgcct

SEQ ID NO: 23635 - DNA, 1123 bp, Oryza sativa
  ref <308>: DATABASE ACCESSION NUMBER: AK073730
  ref <309>: DATABASE ENTRY DATE: 2001-12-06
gggactctccactcctctgctgctcagctctccctgtccctgtccatcatggcgtcggaatccgaatgcgtcgccgttgctgagccgccgcacgtgcacgtgcacctgcaccccgacggcacggagccactggcccacatcgccgtcgactactgccccgaggcctgccaccacgcctccgaggacggcgagatccacgtcacctacgacgaccgcggcggcgcgcgctggcggtcccgctgccgcttcctcccaggcggcgccgtcgccgccaccatccgcgcgccggccggggacaccgccggcctcaactacaacctctacctctcctccctcgagggctcccgcgacatggacgagatcgacttcgagttcctcggccacgacaagtgcgccgtgcagaccaacttccacgtcgccggcggcggcgggagggagcagatccacgtcctcccgttcgactcctccgacggattccaccactacgccatcgcctggggcgccgacgccatcgagtggcgcatcgacggcgagctgatccggagggaggagcgcgtcgccggcgagccgtggccggagaaacccatgttcctgtacgcgtccgtgtgggacgccagccacatcaacgacgggaagtggaccggcacctaccacggccgcgacgcgccatacgtctgcagctacagggatatcagggtgccccttgcgctctcgttggaagacgaggaagatccatacaagtgtgcatgtgtaggagatgcgtctgctgccatcgccgccgccgatgctgcggaacaggtggatgctggagatgcgcctgctgccgccgccgccgctgatgctgcggaagaggtggatgccggggatgcgcctgctgccaccgcggccgccgatgttgcggaacaggtggatgccggagatgtgcctgcttccgccgccgccgctgatgctgtgaaagaggtggacgccggagctggtaaagattagatgattagatctttgcgcctgtactgttgttcgtttctgtcgttgatttgtgggggaaacgtgtttgaaggtttgattgtaacaataacatgaaatcttgtataagttggttcaataaaatgtctgaattttctgc

SEQ ID NO: 23636 - DNA, 1707 bp, Oryza sativa
  ref <308>: DATABASE ACCESSION NUMBER: AK073731
  ref <309>: DATABASE ENTRY DATE: 2001-12-06
gctgtgctgctctcactatcgatcgacctctgctgctgcctcgctgtcctctgctacgtgagctcggccggctcgggtgtcgaggacgatcgaggatggggtcgctggggcggcggccgtgggttggtgggttgacggcggcgatgatttttgctgttgctgtgtgcggtttctgcttcagtggggcgtcggcggcggcggcagcgccgacgttcggcgacaacttcgagatcaccggagccgaggatcacgtcaagacctccgccgacggccagacgtggtacctctacctcgacaacaagactggcgtcgggttccagacgaaggagaggtatctcttcgggtggttcagcatgaacctcaagctcgccggcaacgactccgccggcgtcgtcaccgcctactacgtacgtacgatgaactagctagctcgtcttctttgtgtcaactccgaactgaaactgaaaccgagctcctcgacgacggcgtaatctgcagatgtgctccgacgtggacgcggcgccgcagcgcgacgagctggacttcgagttcctggggaaccggacgggtgagccctacatcatccagaccaacgtgtaccgcagcggcgtcggcggccgggagatgcgccactcgctgtggttcgaccccaccgccgacttccactcctactccatcctctggaaccccaagcagatcgtgtaagtgatcaaccgaacaatagtaatcaagcttctagttgtttcaatcgtactccgtggccatccgggctcgccggagatagcatccgccgccgccgccgtcaacgacgacgacgactacgagttgaatgcgcccacctacctacctaccccttgaaatgggtcgctccgatggcgattaattgaacctgcagatattgccaaaccctgccgcttgtacgagcactccaggttgctgctacttggccacattctgtttagaaccaagcaatggctgccaatgccatgccaccaccttcgtcttccccgtgccgtgcccacccaaatccattttctgtcaattaatctcgatttctgatgttctttgcaatggtggtggtgattgatcatcaggttcttcgtggacaaggtgccgatccgcgagtaccggaactcggacaagcccaacaccttcttcccgatcatgaagccgatgtacgtgttctccagcatctggaacgccgacgactgggcgacgcgcggcgggctggagaagacggactggaccaaggcgccgttcatctcctcctaccgcgacttcaccgccgacgcgtgctcctggggcacggcggcggcgagcccgcccagctgcgcggcgtccaccggcaacagctggtgggaccagccgccggcgtgggcgctcgacgccggccagcgcgaggactccgcctgggtggcgaggaacctcgtcatctacgactactgcgacgaccgcaagcggttcccctccccgccggaggaatgcttgctccggacgaccagctcgtgaggccatcgccggcgccgccgccgacgtacatggccgtacgatgtgcggccaggatcggatcgtccttcgatcgtgcggctcagattcactgtaactactacagtactactatttttggattgggccacgtagagtggctgtcacgttggaaaccatattctttttggatgatgaaatggataaaattattatttttcc

SEQ ID NO: 23637 - DNA, 925 bp, Oryza sativa
  ref <308>: DATABASE ACCESSION NUMBER: AK073732
  ref <309>: DATABASE ENTRY DATE: 2001-12-06
gggcttgcatctgtcaccctcccgagctccccactcgtctccacctccccgcgatcccctcctccactcccccccgcgcgctcccatcaagaggagagagagtgagaggaggtagctctgccaccggagcggctgcggggagcggcggcagtgctcctccttccggggagatcggggtcgctggttggatccaagaaacggggagggggatttgctggcggggaggagccgagtagggagatgagccgggggcggtcgccggagccgctggatttcttcatctggacagtcgaggatgttgggttatggcttgaagagataaaccttggcagctacaggcaagtttttgaggaaaacggtgtcaatggagagtatcttgaaagcctgtcgatgtttactacagaacagattctgcggtttatcaggaggtgccatatgaaatggggagatttcattacattgtgcaaagagttgaggcgcatcaaagtggcctgcctgaaaggggagcaagaagtccgcaggccatggtgggcgccgtcatgcctatcggtggtgttcgtgagggcggccaagcggaaccggcagtcccgagtcgtctccctgaagctggagccctagtacccatccaccgcctcaaatctttgcgcattcgccgttctaccccgccttccagctcctcttggtggaggcggcactgcaaccgcacaccgttggtgtgctagttcccagtgatatgaaaggtcttttgctgtgaagagcagaagtatgctgctctactatgttcaaccggtcctcttatccttttttttcttgatctgttttaatcatgatatatagggtttggaatagtaaccttggtgtagacaaacaagatacatatattgtgcagatggttccccttaaaagtttctgctgcttgcaagtc

SEQ ID NO: 23638 - DNA, 2240 bp, Oryza sativa
  ref <308>: DATABASE ACCESSION NUMBER: AK073733
  ref <309>: DATABASE ENTRY DATE: 2001-12-06
ggcggtgcggtttacctctcactttctctcaccttccctcgcccacctcaatctcctcctccttaagcaacgacgccgcagcagcggaggaccaccaccaccaccacccagccctagctccaccaaccggatcgccccccccccccccagcaatggcgtccaaggaggcggaggcggcggctgcctggcgccgggatgcgtcgtggtgagatcgcgccgcatggggaaggaggccgtcggcgaggggcagcaccagcagcagcgcccgccggatggggcagggggcggaggaggcggaagaggaggaagaggaggaggaggaggaaggggaggtagcgggcgactggggtggtggtggtgctgctgctgcggtgtcggtggggtggtgcggctgaaatgcgtggcggcgctcgtgctcggcgtcgccgtgctgctgtcggcggtgttctggctcccgccgttcgcgcggcgcgggaggggatcggagggcccggatccgggcgccggcttcgatgctgatatagtggcaagctttaggctgcacaagatggttcctgagctgaatggaaatgcatcaaagcttgaattggacatttatgaggaaatcggcattcctaactccactgtggtagtaaattcactacaattagttggatcaaactggacaaatgttatcttcagcattgtgccttatccaaagaatttgactttatcgtcaacagggctgagcattcttaggtcttattttatgtcctttgtcgtgcggcagtcgacactccagttaaccgagtccttatttggaaattcatcgtcctttgaagtgcttaaattcccaggaggaattacaatcattccgccacaaactgctttccttcctcagaaacctcatgcaacttttaacttcactcttaatttcccaatctacaaagtgcaagacagaatcgatgagctaaaggatcaaatgaaaactgggttactgctcaattcctatgagaatctgtatatcaagttggcgaatttgaatggttcaacggttgaccctccaactattgttgagacctccatttttcttgaagttgggaatcaccagccatctgtaccaaggatgaagcagttggcacaaacaattactaattcatcttcaggaaacctgggtctgaaccataccgtatttggcagggtgaagcagataagcctttcatcctatcttagacattctttacatagtgggggtggttctgaagcacctagtccagcacccatgcaccatcatggtcaccatcaccatcatcaccatcaccatggtcatgaagacagcaggcattcggctccggctcaggctccagtacattaccctgtgcatgaacccagatatggagctccacctccatctcggtgtccatatggtactgacaagccaaagaataaagctcatgtaatgccagctcctgagcctacagccaatggccatcattttgcttcaccagttgctttgccacctcactcactgtcaccacggaatcccaatgtgcacagtaggtcccctattccatcccctccagttcttccagaaccacctttgcccactgtttcttttgctcatgctcatcctccaagtgaacatacatcaagaagagatcctgctggattgtcggctctggcccctgcacctcattcatcaaacgctactcggagcctgtggcgttccattcattgggccaacattgtgcctcttgtgtgtattctaatgagcctactatgacgaagaaacacgcggctagacagatgtaaattagggaggtttcaagaggtgatgaggcaccacctgttcttcttgtctggctgtagccggccgatcagctcccgggccggcgggcaagcacaatacagcgtcccacacggcctcggcgtgctgttatacttcttgttagtgcatgtaaatatggatggggggggggggggtggggtataaggcaaatgggcagcagctgtgcctaggtcaaagccacggtggtggcaggcccttgtctagcacttgttgcccgggttttgctatgtactactgctgttgagaagaggatcttcaagtgtaaaaaccacttcttttttctttttaatatgagaggggcatagaatctacatccaattttcagaggtctattttgggactatgctctggagcatctgtcttgttgaacctatagtttctcataattttttgagggctttcctcttgaacc

SEQ ID NO: 23639 - DNA, 876 bp, Oryza sativa
  ref <308>: DATABASE ACCESSION NUMBER: AK073734
  ref <309>: DATABASE ENTRY DATE: 2001-12-06
ggctcacccttcctctctctcctcctcctccccaccccaacgccatggctgccgcggtcgcctcccatcggttcctctccgtcgccgaggcgggcgccgccttccgctggaccccgtcccagctcgaccccaagatgttgtcattgcaaaacgaaatcttcattacatctggtggagaccgggatttgattaataggattctcagcaaaagcaaaactgaaacggttcctgagaacaaggatgatggtgagtctgatgatgataacgatgaggagggagatgacgaggatgctgaaaatcaaggcgacgatgatgctggtgatgaagatgcctcggaagaggaagggaatgatgaggacgaggacggggaccctgaagccaatggtgaaggagggagtgatgacgacgatggtggagaagatgacgatgacgaggatgaggacggggacgatgatgagggtgagggcgagggcgaggatgacgatgaggatgaggaggaagaagaggaagaggatgacgacgatgacgtcccgcaaccacctgccaaaaagaggaaatgatcaatgagtaacagccctaccttacaagcaagaacgtggctctgttcatcctgtgcttagtggttcactggttactggttagcaggtaggggttttagctcggtcgtcagccatagcctagtttgagaacaggaaaaaagaacacttagttgtgcatgtactatttaaaagattcttttttatcatgtctctcttctgatttgctaccgatttgtgtttgcttagccctttttacattgttgttgtaccctccagacattagacatgaatggatgtacgtaataatgcagcaatgcaagtaagacagcctcgttct

SEQ ID NO: 23640 - DNA, 2129 bp, Oryza sativa
  ref <308>: DATABASE ACCESSION NUMBER: AK073735
  ref <309>: DATABASE ENTRY DATE: 2001-12-06
aacttttcaaggagaaaaacgaagagaaaaaggaaggcaccacaccaaacaagaaagaggaggacgacaaaggacacaggaccatggatgatgaaaatttctttcgtaggcttttcaaggataagaatgaagagaaaaagggagctgctcatgacaggaatgatgatgataagtgtgaggaaggtgataaggaaaatttcttccgcaaattgtttaaagacaagcatgaggagaggagaagcgatgggctggataaacatgatgatgatggtaaggggactagtggtattgatgacgaggaaaattcagagtttttgtcgttccgcaggttgtttagggtgcaccctgaagatgctaagagtgggcatattgaaagttgtcagcctaacggtatttctgagggtagcccaggatcagagagctttttcaagcgactattccgagacagagatcgctcacttgaagactctgagctttttggttcaaagttattgaaagagaaaaactctgttcccactggaaacggtgataagcaaagtggcaaaccacctttaccaaacaacgcaatagcagagcttcggaaaggatgttactatgcttcattggagcttgtgcaatctttgtgtgatacatcttatggccttgtagacatatttcctatggaagatcgtaagattgcccttcgagagtctcttacagagatcaattcacagattgcttctactgagaaaaatggaggagtatgctttccgatgggaaagggcatatatcgagtggttcatatacctgaagatgaagctgttcttcttaactccagggaaaaagctccttatcttatatgtgttgaagttttgaaagcagaagcaccaagtcactccaaagggtcatcagatgttaacaaattgtcaaaaggtgggatacccttggctaatggagatgtgcagttgccaaagccacctccatgggcatatcctttgtggagtcggcatgaaacacaaaattatgaaacagacagaatgctgaagtctacctctcaggttattgaccaagctatggctcaattgtgggaggccaaagtaaaatttgtaaacgttagtttctcggttgagaaacttggtcgttcaaggagtgttgcaatttctgattcgggacataggtcacgacaatctacagcagattcaaatgagccttcaggagattcccaaccaattgctgatcagcctattgagtgggtaaaggttactttatctgcggttccaggagttaacatggatgatgttgatgacaatgaaccaacgcggaagaaggaccatcgccgcgttccaagtacaattgccatagaggaagtcaaggtgcagctgatttatgagttgatttttaagtgaagttaattaggagctgaaaatttttagattccttctccaaggcttttctttttgcaattttcaatcttgctaaagagtattcttttttaaactatcgaatatcctagatgtttagctaaccaacaccaggaattagtagtcatcaaataagacaaggtggtttattgcattatcatccaatttacagttcgatacctcttgtacaactatttgctgaattgttttccttgactaggctgcagcattaaaaggagaagctccacctggtcttccactgaaaggagttggccagaatgctcaaaatatagaatctaaggcaactgatggtggagatcctaaaccaactgatgctttggctggtgaaatctgggctgtcaagagagagagaatacgacggtcttctgttcatggaaaattacctggctgggatctgcgttctgttattgtcaagagtggagatgattgccgacaagaacacctagctgtacagcttgttgcacacttatatgatatatatcaagaagctggtttaccactttggttgcgaccctatgaagttatcgtcacatctgcatatacagcgctaattgagactattcctgatacggcgtcaattcattccatcaagagtcggttccccgatatcacaagtctccgtgactactatgtagccaagtatgaagaaaattctccgaacttcaaacttgcccagagaaactttgtggaaagcatggctggatactc

SEQ ID NO: 23641 - DNA, 2556 bp, Oryza sativa
  ref <308>: DATABASE ACCESSION NUMBER: AK073736
  ref <309>: DATABASE ENTRY DATE: 2001-12-06
tggtgtcggtgttgactgaggagggagaagctgggagcggcatcggcagaggcgacaccagcgtgcctccacatcggcttcgtctccggcgccggcccccgcccctgccactcccccacctcgtcctcccccagtcagcgccgccgcccccatccgcctccgccaccgcccccatccgccgccacccccacccctatccgccgcccccatccaccgctgcccctcggtcagctcctcccgccctccactccctcctcccctccctcaatgtgtggttagggtttggctccatggatgactccacctggctacagattgttgggaggtgacaaagtttactaatcatcacacgtgtacatctagcggtagaaggaagactaccacaccaaccagcgcctgggttgcttccaaggccatccatatccttgggacagattcaggtatgggccctaaagaactgcaaaaaggttgcaagaggatcagaaatgcaaaatcaattatgatactgtggctaagggtaggagtttggctatgatccaattgcatggtagttgggaagagaatttccatatgttgtataggtggagggctgcagtcatggagaggtccccaggtagtgttattgagattgacactgttgaggttgatgggaaggtttattttaacagattcttttgtgcatttagtccatgcattactggatttctaactggatgtaggccataccttagtgtagactcaactgccctaaatggtttgtggaaaggacatttagcatctgccatagctatagatggaaacaactggatgtaccctcttgcttttggtttctttgatgctgagactactgataattggacctggtttatgattcaattgcttaaggccataggaaaagtatctcctcttgcaatttgtactgatgcatgcaaaggactagagattgcagtgcaccgagttttcccttgggctgaacatagagaatgttttaaccaccttatgcaaaatctaatcaagaaatatggtggatctgtcttccaagagatgtatcctgcagctagatcatatagggcacaagtgcacgaggagtgtatggatacaattaagaaagcatgcactgatgtggctctctggcttgacacttgccataaattgatatggtacaggagtggcttcaatgctgaaattaaatgtgattatgtcactaacaatcttgcagagtgctttaacaattggatcagagatataaaggccttacctatttgtgagcttgctgacacatgtagggagatgataatgaccctgtggaataggaggagaaggattggaaataaattcacaggtacaattctacctgctaatttgcaccagttgagagctaggactcgagggttaggccacttgtcagttgtgcatgctgacataaccactgctgaggtttgggacaatagtagcagccatgctaggcatgttgtgaggacacatgagcagtcttgtacatgtcaggagtggcaacacactggcaagccttgccgacatgccttggcagtgattacctcctagcaaattagggatgtaaagttggagaagtacattaatccctactactctgtggccctattctggaatgcatacaactcaattattgagccactccctgacaaatcacaatggcctaaggtggatttaccttttgttcttggtgcaccccttgcaaaaaggaacctaggaaggtacaggaaactaaggatcaagggttgcttgaaaggtggtggtagcaagcctaaagacaatgccaaagagaaggcaacgattagaggaaaaaggtgtaaaaaatgtggtgagttgggtcatggacaaactagctacaagtgtaagctcaatggtacaaagaagaagccgaaacgaaaggcaagatggaacacaacgaggtatgggccggctcctgctcctaatgctcctgatgtggtttatgcccctgctcctgatgcttatgctgctcctgctgctcatgctgctcctataccatataccccaactaggcctactgtagaaaccattattcaagaaagcccaacaattgtgacaagacgccggcttgcaatgttaatggaacaaggagggacaagctcacaaccggcacttgcttcacaagtgacatgtaaaaggagggtgaatattgctgaatcaagctcacagccggctccatcaaagaggacatgtacaaagaagctcacacccaagaaaatgaagcctacttgaatagctcctcctgtatcacaactaatattgtgtgctgtgcatgtgaggcacaattataggaggtattttgtgaaccatggtgcatgtgaaccatgttggtgtatgtgaaccacctttgttgttggtgcatgtgaggcactgttatgtgaggtcttttgtgagccatggtgcatatgaaccactactatgttgtgaaccatggtgcatgtgaaccactgttatgttgtgaaccattgttatgtgaggtattttgtgaaccacatgctattcaatattatgtcatacatgctgtcc

SEQ ID NO: 23642 - DNA, 2333 bp, Oryza sativa
  ref <308>: DATABASE ACCESSION NUMBER: AK073737
  ref <309>: DATABASE ENTRY DATE: 2001-12-06
gagtgtgcttgctctctctcccatcgctttcccctcccctcgcttgccgccgcatccatccaccacctctccccctcgcggatgcgattccctcccgccgccgccgccgccgccgccgccgccgcgactagctagctagctcggaggtcggaggggaggggtggtacgactacaatggcgagcgcgtcggaggacgacgccggctcggagcggtgctgcgggagctacagcccgagcgcggacgtcagcgagtcggagacatccagcgactgctccgcgccgacgaccaccaccaccacccgccgcttcgcctcctccccctcccgcggcgtcgcctcctcctcctcctcctcgctcctcccgacccctcccccttcctccgccgccgccttcttcctctccgccaagcccgccgccgacctctccgaggtggacatgatgaaggagcgcttcgccaagctgctgctcggcgaggacatgtccgggagcggcaagggcgtctgcaccgcgctcgccatctccaacgccatcaccaacctctccgccactgtgttcggcgagctgtggaggctggagccgatggcttcggcgaggaaggcgatgtggacgagggagatggactggctgctctccgtggccgactccatcgtcgagctcaccccgtcaatccaggagctccccgacggcgggggacagttcgaggtcatggtgccgcgcccccgcagcgacctctacatgaacctcccggcgctcaagaagctcgatgcgatgctcctcgccatgattgacgggttcaaggagaccgagttctggtatgtggatagggggatcgtggttgatgacagcggcgggccgttctcgtcgtcgtcatcctcctgcgggcggccgtcggtgcggcaggaggagaaatggtggctgccatgcccgcgggtgccgcccaaggggttgtcagaggatgcgaggaggaagctgcaacaggacagggattgtgcgaaccagatactgaaggcggccatggcgattaacagcgatgtgctcgcggagatggagatcccggaagtgtacttggagtcactgccaaagagtggtaaatcttgcttgggtgagataatttaccgatatataacagctgaacaattctcaccggagtgcctcctcgattgcttggatctgtcatcagaacaccacacacttgaagtagctaacagaatagaggctgccatccatgtgtagaggttgaagggccaaaagaaatccacgcctcaagcaaaatcaaagaaatcttggggtggaaaagtgaagggacttgttggagatacagaaaagagtcatgttttgtcccaaagagctgatgggttgttgcaaagcttaagattgcgataccctggtttgccacaaacctctctcgacatgaacaagatccagtataacaaggacgttgggcagtccatactagagagttactcaagggttctggagagcttggcatttaacataattgccaggattgatgatgtaatttatgtagatgatgcaacaaagaagtctgccgctgctgactctgtttccatcttcaatcgtggcattggcgtaccagttcagaagaggatctccccaagcccgttctcaattcagcatacaccatatgcctctccatttgctacacccactttctgctcctccactccagttacaggcagccctggaagagtacagcctccattgaacaaagacaacttaccgacaaaacaagaggttaaagttgagaagctgttttctggtgatatcgagaaggtctggacgtatgccgggaaccttagcgcaaggaaagacgcaggagatgcccctgaaagagactgaaaggcagtgaagaaagttcttcagatctttagacgtgtctcagcaaggtcaacaggtttcaacacatcctgttctggtctctagctagattttccctgtacagaagcaacatgattcatttttttgtgctttcttagcgagccaagggtcgtctagccctacttacaacaagtaagggaatgactctttgagtcttgatcgcatctgaacaagtcatagtttcacgtagctgcctctgtcggacatgtactcttcttgttcatgtttatactagctggtttagttagcagcaagtgattgaacttcagatgctgcagttctttttttttttttttttgtccctggaggcatcggttccctaacaatcaactgcacttgcagtgcaatgtatcatgattttctgatgctgttgtatatggcacctaatggacagatctgacgctcttcagtgactctgaagactttcttatatc

SEQ ID NO: 23643 - DNA, 1285 bp, Oryza sativa
  ref <308>: DATABASE ACCESSION NUMBER: AK073738
  ref <309>: DATABASE ENTRY DATE: 2001-12-06
ggcagtccgtccaagagagggggacactctgcctccagccatgagcgacggcggcgcaggcgccaagggcgcgggcttcggcatgccgcgcgtcggcatgggcacggcggtgcaggggccgaggccggagcccatccggcgcgccgtgctcaaggccatcgaggccgggtaccgccacttcgacaccgcggcgcactacgagaccgaggcgcccatcggcgaggccgccgccgaggccgtgcggtccggcgccatcgcctcccgcgctgaccccttcatcacgtccaagctctggtgcagcgacgcgcaccgcgacagggtgctccccgcgctcaggcagacgctatggaaccttcagatggagtacgtggacttgtacctggtgcactggcctgtgtccatgaagccgggccggtacaaggcccccttcaccgccgacgacttcgtgccgttcgacatgcgggccgtctgggaggccatggaggagtgccaccgcctgggcctcgccaaggccatcggcgtctgcaacttctcctgcaaaaagctcgacaccctgctctccttcgccaccatccctcccgccgtcaaccaggtggaggtgaacccggtgtggcagcagaggaagctgagggagctgtgcagggagaagggcgtccagatctgcgcctactcgccgctgggcgccagcggcacgcactggggcagcgactccgtcatggcctccgccgtgctccgcgacatcgcccaatccaagggcaagaccgtagcccaggtgtgcctgaggtgggtgtacgagcaaggggactgcctgatcgtgaagagcttcgacgaggcgcggatgcgggagaacctggacatcgtcggatgggagctgacggaggaggagaggcagaggatcgccggcatcccgcagcggaagatcaaccgtgccctccgcttcgtctccgaccacgggccctacaagtcgctcgacgacctctgggacggcgagatatgagcactcgccggcgaccgcttcgtgtttccaggcgccggccgacgtgcgtgctgctctgaggaacgtaacaacaaaaactgcggctcttgacgatcgtgttgaataaagcaaagtgtgacgatttcatcggctctgattgcataattccggagtgcacacgctagcacgtgcgagagagagagatataggtacatcgagcgtgtcaaatcgatcaaaattgttatagacgaggccgagccgagccaaggaaaagcttccattagagcatttacagtgcttcttactcgc

SEQ ID NO: 23644 - DNA, 950 bp, Oryza sativa
  ref <308>: DATABASE ACCESSION NUMBER: AK073739
  ref <309>: DATABASE ENTRY DATE: 2001-12-06
ggtgctacatgaacttaagaagaaaaattcttcccaacaaatgcagcaatttgctggagaagagaaaaacgagctgctgtattacttgagatcgctgtcacctgagaaggttgttgaactctcggagtcttcctgccctggtgtggaagaagctgtttactccgtggtacatggtctgctagcaactctctcccccaaaatgcatacgaatcgctctccgacctcagagaacatggcgggtggagctgtaaattttgggatggaggaggacgatgaattcactgagctcgtggaggacgtgtccctcccatttcagcccctgatatctattcctcgcgaccgtcttgcccgtctattattctggtgcatgatgctgggccattacatccgaggtcaggagtgccggcttgagctgatgcacctcctggcagtctccagtgatgcacattcatgatctcccctagtctggtagcaacagcaaatgctctgcaaagcttctgtcagctgaacgaactacttctgcatgacaaagacggaaacaggaaactctcaagcatcatgcgaatcgatccaatttggatgctgcaacattagtatggggatacataggagagggagaagaggagcaaacccatggatggccaaggtagaggtcaggtcatggtccctgcagtagctcgaaccaggttgggttgctcagtagcgtcagatttccatataggattaaccatttcatcatggttagatgtgcttttcaccttcttgttagtttgtgttgtgctatgtgtacaaatcctggagttagtatacagtatttcctcaccgatgtactggtattttggttgtagcaacgttggtgttgcatcctgtatatataacattatactagtagtatgtatgtaaaactcttatatttccttgtgtaaaaagatctcttaatttttccattc

SEQ ID NO: 23645 - DNA, 2299 bp, Oryza sativa
  ref <308>: DATABASE ACCESSION NUMBER: AK099376
  ref <309>: DATABASE ENTRY DATE: 2002-08-28
gagttccccttcttcctccctgtgcttttcccctttcctttctctgatttctctcaaatgaattactgttaccagttggtgtgattctccagccgaaacttcaccaaccaagcaggaatggcgctcctgctgccggagttcgacccggcggacgtccgcgccggccgcgacctcatccaccgcctcaccgccgacgccgccggcatccagcggggcgtcctccgcgagatcctctcccggaactccggcaccgagtacctccgccgcttcctgggcggcgccgccggcgacgacgacgacgtgcgagacgcattcaagaggcgcgtccccgtgtccggctacgaggatgtcaagccgtacgtcgaccgcgtcgcgtccggcggcgagccctcctctgccctcctctgctccgaccccatcacctgcctcagcaggagctccggcacgtccggcgggcagcagaagctgttgccgtccaccgcggaggagctcgacaggaaggtattcttctatgctgtccaggcgctcgtgaggaacatgagcttgcacaccgatcatggtgaagacgacgacggcggtggtggcgagggaatgtacctcatgttcgccttccacggtgaccggacattgtctggcctgcccatccagtctgctctaactacctactaccacagcagacagtttcaggaatgcgacattggcgggtttgataagtgcacaagccccctggaggcaatcctctgcccctatggcgagcagagcatgtactgccagttgctctgtggcctacttcaccgatgcagagtggaccgtgttggtgccagctttgccgctgggttggttcgggggatcaagttcttggaaaatcactgggaggagatgtgcttcaacatccggagcgggcagctcagcgactggatcacgcatactcctctgcgtgatgcggtcactggacagtatcttcaaggatctaacccagctttagccgatgagattgcatccgagtgtgcgaggaaaccttgggatgggatagtcaggaggctatggcctagggcacggtatatccggaccattgtgactggttcaatgtcacagtacattccaattcttgaggtttatggtggcgggctaccgttggtctcaccaatctatgcatctacagaatgcgctgccgggataaatctgaggccacttgatccaccatcccatgtgtcatatgcattgcttccaaacattgcttactttgagttcttggaggtcatggatgaaaatggtgaaaaggtacaaggaactaccaggcttgatgacaatttgggtgaggtaaaagttgttgaccttgtggatgtcaaagttggtcgatgctatgagttgattgtcactacctttgcaggtctttacaggtaccgggtgggtgacctgtttactgtgagtggcttctacaatgcgacgccattgtttcacttctcaggacggcatgatgtcatcctaagcatagattacgagaagataagtgaggaggaccttctcaatgccattgcagaaacagataagttccacctcaggcctcttggctacatgcttgttggtagcactgcatatgcagacatatccactttgcctggccactatatccttttctgggagctgaccaatacctgtgatagcaatgttgccattgacatcgaccaaactgccatggagaagtgttgcttggcagtggaagaccacttcgatgaaatgtaccgcaaaattaggcaccgtggctcaatcagtgcgctcgagataaggattcttagccatggtgcgtttgatgctctgatggacttctttgtgtctagagggacatcagcgagtcaatacaaaactccgacagccattcggtcgaaagaggcgatgatggtattggaggaaagggttgtaggaaggtttttcagccaagcaactcccagctgtcgttcagccgaatttgagaggagataataattgtactgcctgttcggttggcgtctcggtgacaggagagggcatgttccttatgaaaagttcagtcctgatcacgaataagtggcgcagcattgcaattcgtgcactggagaaggatgatccactcatctccatcttggcacgtcctttttcagtctggaatttggtctcaggagtatcatttcgtgttttcttgtaaattcagaaagaacttctgtactgctccttccacatagcctttgggcgtaactgtagacacaacccttgctccgaggtttataagttacctccgaatttactgattgactgtgttctc

SEQ ID NO: 23646 - DNA, 1238 bp, Oryza sativa
  ref <308>: DATABASE ACCESSION NUMBER: AK073740
  ref <309>: DATABASE ENTRY DATE: 2001-12-06
ggtgcagcaactaacaaggcagtggattccggaggcgagcgagagagggagagaggaggggtgggagcgggggcggcgcggcggcggcggtggatggcgatggcgggcggcggggggctcaaccggtcgtcgtcgagggggcagctgccgccgcaggagcttctcgacgatctctgcagccgcttcgtgctcaacgtgcccaaggaggatttggagtcgttcgagcggatcctgttcttgctggagcaggcgcactggttctacgaggacaactccgtcgagcacaacccctccctcaagtcgctctccttcaaggacttcactacgctcatgttcaatagctgtgctgcgctcaggccataccacgcgcaccttgatgacatttacaaggatttcactcactataagttccgtgtccctgtctgcggcgccatcatcctcgatgacacctacgagaagtgcttgcttgtgaagggatggaagtctagcgccagctggagttttcctcgtggaaagaggagtaaagatgaagaagatcatacatgtgctgttagagaagttctagaggaaactgggtgtgatgtttcgaagcttttaaaattggaagattatattgaagtttcaatgtggcagcaaagagtccgcctttatattataactggtgttaagggggatactgtttttgcgcctcaaactaagaaggagatcagtgagatctcatggcacaacatcgatgaactccttcctgctggtgatgacgcaatatctcgtggagtgaatgggatgaagctctatatggtcgcaccatttttgcagggtctaaaagcctggatagccacacatcgtcacccacagtatcagaaatcagacacgtctgctagaggtactgtgtggaaagcgaagaattcctcaactggagcggcgcctgttgagaaccccgttattactagaacaggatctgacccacaaactcttgacagccgcccaggtaaaagcttccgaaacttcaggttcgacacagcgagtatcctgcagtccatggaagcttccttcctacgtacctaggagcctgacaaagcatcaccccatgtgtgtatgcttgatgtgtatagactatgtaagccaagggcgtgtcttctgttgttaactcagctttttcttcacttttctagttgtatctgtaatcctgaatgcaacagatgcttctaccattgtgataatatccctacatttcgtgc

SEQ ID NO: 23647 - DNA, 1444 bp, Oryza sativa
  ref <308>: DATABASE ACCESSION NUMBER: AK073741
  ref <309>: DATABASE ENTRY DATE: 2001-12-06
gcggaattcctcccgagtccagtccactccgcgaccgcgccaacatgggcctcgcccaccggcgcctcctcctcctcctcctccacctgctgctgctcgtcgccgcggcggcggaggcggccgccgccggagcagggaggaaggagaagggtatcggcggcggtggggggctgcggttccggggcgggagcgggacgttcaaggtggtgcaggtggcggacatgcactacgcggacgggcggcggacggggtgcctcgacgtgctcccctccgaggccgccggctgctccgacctcaacaccaccgccttcctctaccgcctcttccgcgacgaggaccccgacctcgtcgtcttcaccggtgataatatctatggctttgatgcaaccgatgcggccaagtctatggatgcagcaatcgccccagccattaacatgaaccttccttgggctgcggtgatcggaaaccatgaccaagaaggtacgctgtcacgcgagggtgtgatgcgtcaccttgtgggcatgaagaacaccctttctcgcttcaacccagaaggaatagaaattgatggttacggaaattacaatttggaagttggtggggttgaaggaacattgctggctaacaaatcagtgctcaacctctattttcttgacagtggtgactattctacggtgccttccatcggtggatatggttggatcaaagcttcacagcaattctggttccagcaaacctcttcgaatctccagacaaaatacatgaaggaggaaccgaagcagaaggcggcagcgcctggtcttgtgtacttccacatcccattgccagagttcagcagcttcacatcatccaatttcacaggagtgaagcaggagggtatcagctcgccatcgatcaactctgggttcttcgccagcatggtggaggctggggatgtgaaggccgccttcatagggcatgatcatgtgaacgacttccgtggaaagctcaatggcattcagctgtgctatgctggtggatttgggtaccatgcgtatgggaaggccgggtggtcgaggagagcgagggtggtgtccgtgcagcttgagaagtcggacggcggcgagtggcgaggtgtgaagtccatcaagacatggaagaggcttgatgatccacatctcaccacaattgactcagaagtcctctggaacagaggctccaatggaaggcgcaagaagaatcctgatggaaagatgagatagtgatatagatgggaagacggggatagtgaaatgttgcaacgtactacacgttatgatgtgctgtttgccaatttgttttacaaaattttcgatttatgtaaatgaacaaaaacatggtacacgacacggcatgcacccttttcgcggttgtaattctcaccgagaaaacagtgaattttagtaaaaacagttactgtagtttt

SEQ ID NO: 23648 - DNA, 1640 bp, Oryza sativa
  ref <308>: DATABASE ACCESSION NUMBER: AK073742
  ref <309>: DATABASE ENTRY DATE: 2001-12-06
ggctgctgctgaaagcctgatgaaattgggtgattaggtgcttaacataatcccaatcctagaaaaatacattcggagtggttgctgctgagctcaaccaatcaagcttgttggggaggcaagcagtcacaatgatgagcttcaacaagagccaagaaggatttgggcaggttgctgctgtggccaccctggcctccaatggaggaggctctctaccatggctgctgtacggcgagccactggggcaggggaagccggccatgtcgccggagggcgtggtgccgagagcacagactcctctggatcctcctcaggttccagccatggacaggggtgtccctgaaattctgaacttctccatggttccaggtaaaggagaaaaatgttctgagcactcaactactattgctctgcagtcaccatttgcagaatataatggctgttttgagctgggccttggtcaatctgtggttccctctaattatccttatgctgaccagcactatggcctactttctccttatggagtgagaccaacgcctagcgggcgaattcttattccaccaaatatgccagctgatgcaccaatttatgtgaatgcaaaacagtgttcagccatcattcgacgtcgccatgctcgtgccaaggcagagagggagaataggctggtcaaagctagaaaaccatatcttcacgaatcacgccatcttcatgcaatgcgtcgtgcaagaggctctggtgggcgcttcctcaacacgaagaaagagaccaatgggaaaaccactggtggaggcaggaaggtgatggacatcatcatcccgcctctgtgccccgccgcatctcccagctcggagcagtgcaacccaagcagcgtttccagcctgtccgggtcagaggtgtcgagcatatatgaacacgaagacatggaccacttccatagctttgatcatctccggacacacttcttcaccccgctcccgagcctcatggatgtcgagcacggggctggtaaccccttcaagtggacagcagcctctgatggctgctgtgacctcctcaaagcatgactagaggggggatacaccgggcagccgaagctggcaaacatcagcagtttctgctggatacattgcccagctccaggtcagggattgtccctgctggtattggctgtctgtaggcaactcattcttggctgatcggttccgctcatcgcctacttgtcccggaaactccagcaccggtttctgggatcctgcggtgatcagaacaacccatcgcgtgtaaaaaaaaaaaaaaatcatctatgctatgctgttactgcttgctaccattatctgaactgctactactaggtagcaagcttaatctggcaaggtaaataaagtctggaactttgaactggttccagtggtgatgattgtggtgtgcttgtatcctgataactattgtgagtttgagacctggctttgttgatctactgaactactactgtagcactatgcttgaagtttgtgtgggcttggtttgcagtttgtattgttaaaaaaaactcaaatctagtgatgtattaagaccttgtttgtgtgtatcttgttaatgtggtatatctgcaagaaggtataatctgtttgggagtg

SEQ ID NO: 23649 - DNA, 1275 bp, Oryza sativa
  ref <308>: DATABASE ACCESSION NUMBER: AK073743
  ref <309>: DATABASE ENTRY DATE: 2001-12-06
gcgttcgctccgccgcatcgctaaaccccccatttttagggtttctcgccgcgacgcggtgcgacgcctcctcttcttctccaacccagagttccacacgctccaaatccttattcgaatcccctccacgccgcctccccccagccgaggcacgcgccgggacgcatccgtcgagcagcgaccatgtcgtcgttttggggcgcggaggtgaagcccgggaagccctacacccacacccacatcccgcgcctcggccgcctgcgcctcacccaggcgacgcttggaggggaggctgggaaggtggagaagggcggcggtgggaagaagaacgtggtgcagttacagtgcactgtgaagaacaaggatcccgtgttcctgtgtgccctggtgccggggcagtcggagacttgccacctggagctcgagttcgaggagaagcacgtcacgttctcggtgctcgggccgaggagcgtccacctcgctggatactacattggtgatgtgtatggggaggagatagatgacagtgatactggtagtgactctctgcaaggctcagatgatgatgcttttctggatactgatgatgatgacagtggcgctgatgatggcactgttctcatcccattatctcctggaaactcagatggtgaagatgatgattcagagtatgactcagaggatgatgactcagagatgatatacaatcagcgtagaggcaaaagttcagttgttattgaggaaattcaagaggatgacaagcctgctgctggtggagcacaaaagggatcaaacaagaagcaaaccagcgaaaatggtgatgattctaaactgcagcttgttgttaggactccacctgctgaatctttggaaagcgaagatgaagatggctttcctgtatcattttctgaatcaaagaaaagaactgatggtagttctaagaaaaaaggcaacctaaacaacaagatgagcactgaagataggaaaaggaaaagcagtgctgttggcgaccatcatgacccttcaggggaagtaaaggatgaaaatgatggagtgtcaaagaaaaataaaaaggccaaggccaaaaagactgctgtgggcggtgtggaaaaggagatcaaacaggaagattctccagctgatcttgttgatgcaaaacaaaagaaaaacaagaacaaaaatacctcagaagcagaagctggtgctcatcagaataccgataagacaaaacatatccacactgatgctgaggaagacactgcacaggaggctagc

SEQ ID NO: 23650 - DNA, 2191 bp, Oryza sativa
  ref <308>: DATABASE ACCESSION NUMBER: AK073744
  ref <309>: DATABASE ENTRY DATE: 2001-12-06
ggttgcattgcttctttcaatcctgtctcgattcgagttcgaccaaatccacacaggccaaagccaaaccctgtccctccctccctaccctccactccgatctcctcctcctccgccgctgcagctcagccatgccgccggtggatccccactcgtacaccgacggcgaccacccggtcaccgccaaggccgccctcgccttctacctcgacttcgcaccctccaccatccacgcctccgcgctgctcaccctctccgccccgcactccggcgacctcctcctcgacacccgcgccctcgccgtccactccgcctccaccgcctccggcccgccctcccccatccccttctccctcgccgacgccgccgaccccgtcctcggctccgccctcacgctcaccctgccccccgacaccacctccttcctcctcaccttctccacctccccctccgcctccgcgctgcagtggctctcgccgccgcagaccgcctcctcgctccccttcgtcttctcccagtgccagtccatccacgcccgctccgtcttcccctgccacgacacccccgccgcgcgcatcaccttcgacctcctcctcaacgtccccacccagctctccgcggtcgccgccgcgcgccacgtctcccgccgcgaccccctgccctccgaccaccggggcgcctgcgacgacgcgctgtggtgcgcgccgggccgcatcgtggaggagttccagatggagcagtccgtgccgccctacctcttcgcgttcgccgcaggcgggatcgggttcagggacctcggcccgaggacgcgggtgtatgccgagggaggggacaaggttctcgacgaggcggcgagggagttcgccggcgtcgaggagatggtcaaggttggggagtcgctgtttgggccgtatgagtgggagaggtttgatctgctggtgttgccgcccagtttcccctacggtggcatggagaaccctagaatggtgttcctcacgcccacggtgatcaagggggacgctgctggggcgcaagtggtggcgcatgagctcgcgcacagctggactggcaacctgatcactaacaagaccaatgaagatttctggctaaatgagggtttcacaacatatgcggagcggaggattgttgaggtggtgcaaggggaggagcgggcagccttaaacatgggaattggatggcggggtttgaacagaatgatggagaggtttaaagataacatggagtatactaagctgaagccaaagatggcagggattgaccctgatgatgtgtactcagaagttccctatgagaaaggcttccaattcctttggcgcattgagcgtcagattggtcgacctgcatttgatgaattcctgaagaattacatatccacatttaagttcaagtcgatagacacagagacattccttgaattcctgaaaaccaatgtacctggaatagaaaaccaaattgaccttcaactgtggatcgaggggactggtatccctccggatgccatggaaccagagtcagctatttataaaaagatttgctccctagctgcagagtttaagtctggaaaacttccaagtgaagatgaggtagcagactggagtggacaggaatgggaactttacttggaaaacttacccacagatgttgaagcttcacaggtcactgctctcgatgagcggtacaagctatcagaaagctgtgactacgaggtcaaagtcgcgtttctccagcttgcaattcccaccggctgcagatgctacttcaacgaggttgagaaatgcttgaagcaagtggggaggatgaagtaccttcgcccgctctacagctcgctggctcgatgctccggggaggagaagatgcttgcccataggatcttctcagaggcgcatgaattctatcatcccatcgctcgtagcgtcgcagagagcatcctctcgaagcatggctaagccgaaacctatccttttatatatcctatatattgctgaacctaaagtaggaagaacatttgatgtttatcgacttgttgctcactagtagtttcataaattatcgctctctggagtaaccctgggaaaaactgggagctcaaaactgtgtcctgacggtatacaattgtgaattgtgactgcgcatcaaaatttcctggtcctatgagttgttgtgccttccc

SEQ ID NO: 23651 - DNA, 2554 bp, Oryza sativa
  ref <308>: DATABASE ACCESSION NUMBER: AK073745
  ref <309>: DATABASE ENTRY DATE: 2001-12-06
gggtgtttcggcgcatcgcccctgggacggactacctcgccatccccgccggcgcggacgaccggccccggtggtccgtggtcgtcgggctcactgccgtcgacgtgccgcgccacaatctgcgcctgcacaggttccgcgtggccgcgtccggccgcatcctaagcggcagcgacgacgtcctcgagaccttccgccacgtcgcgccggacgatgttgctgccgaggccttcagcaccgcctccgcctatctgagcaacgacggcggccaccagatgcacctcatctgccgagccgtccccctcaacgccgacggccgctggacctgcaacaagacaaacttgaacaagtgttacagatcgttctccatggatctgggcggcggcggcggcggcggcgcggtgaccccgctcggcgatctccccaccgtgctggtgcccgggggccacttcgccatccaagccggcggcgagaactgggtgctctccgtcgagcggccgtatccctggctcgacgagaggagcacaacccgcctcctgatgcggcggcaggaagggcagcgatgggtcctcgccggtgggccccacgagttcctgcacaccggcttcgagcgcagcgagagcctctatggcagcatattccaaggccgtgccgtcatcggcaacgacaagatcctcgtctccttggcggacgcagccttcttcgtcttcgactgcacccattgcgtctggacgccactctccctcacgcataagaagctcaattacattcccctgtctaacaggtcagtatacgtggaggatcacaacgcagtatacttccttcgtttcgatactctcttcgcatacaaattctcgccggggaagaacaccatcgagcctccaatcaggttagatgttatgtgtcccttcggcaccaatgggtatggctctcttgtgcacttggctggccaggtgatgtgtgttgtctggatcagcacgcgctccatatgcacctgcaccacacagcacgtgatgatcacaacacttatcatcaatggtgactgcattaatggtggcttcgttccaaaagatgtgggagtcttgcattctacctgccgcagtctagttgttggcgatggccgtgagacaacatcccgctgcaatattttttgtttctcactgtcgtatgtggaggatgttgatcgagtggaaccattctcaatacctccggtactaggggaggctacatattcagagattgaagactcacccaacatgctggagtgctgcaggatgttcttggaagatcaatggaacgaagatgatgttgtacttgagaaatgtacaacgaaaaccaagatgaatctacttcatatctcagtccggttgtcaatcgctaacatatcaaatcagtatttcaaatgggaagttggtatgccgtgataaaatgctggagccaacatgctgtgcagaaacatttgtatctgaggatgctctatatggttcttcttcttctcctacatggcgctatatatatatgggaagaaagcgactatattgcattccatcattaccagagagtcagatgcaagtgatttatctgcgggggaagtttaatcgtccctttaagacagatcggcctaaggtgtgtttttcagcagtttttccagttggcaatcagttggttggtttaactgataccctgcagtctgtgtatttactaaaacgcggcagttcagtatggactcattgcaagacaacttcaagagatgcagatctgactgagaaaattaatatatctgggtttgttgtgcttaagagatgttttatggtatcagatgctgggagttttgactgcttcttgcttgacttggatagtttggaatggactattgtgaagtcattccaatcgtatcgtcgtggcacgttattgggaaggtctatatacattggtggcttcatatacacgctatttacaggaggtattcttgcttttgaattgatcaagaataatggttcatactaccttgatgttcctgttttcttgaggacatggagtaagcttatcagggacaagaacacgatttgctttacttcagttagcgagggcaagagttctagcggcattgtgttctgccttgctcatggatacccctgctatggcctgcctaagattaagaatctgcataatgtgaagatcaccatgatgcaagtcacgactcgtgaaacagtgagaggaactagagaacctgtgaagccgcctcggtatgtggatgtgtgcactaactcttttgtgctacgaggatggatgcttgctatgtttttgctgtatgaacagtttggatgtgatcattgttgatcagggatggatgcatacacactcagaatgtttctgctacatgagccgttgagtctgttggtgtttgaaggaagtagtagcactcctagttgttgggggcttaactcttggtgcatttttctatgaacaatatgttatatctggaggatggtaggggatctttacggttttaggccattctgtatggaaattaattattttaaaaggtgttgtg

SEQ ID NO: 23652 - DNA, 955 bp, Oryza sativa
  ref <308>: DATABASE ACCESSION NUMBER: AK073746
  ref <309>: DATABASE ENTRY DATE: 2001-12-06
gggttcgccttgcttcccaatcgtcccagcggcgtgtgcccctcacaccctcgtccagccaaggcggcggcgcacagccaggagaagccgtcgagcggcggcgcaccgcgcaccgcgcacggagcacccctcccccccctgttaccgtcccctcccgctgcagaaggcgccggcgcacggcgtcgtcccatccctaattccggccccccctctggttcactccccacgtttgaagtcagcttggttctgactccagggatctcaactatcctgtccaggatcaagaccaaacccgtcagccatcatgcaggctagcgacaggttcaacataaattctcaacttgagcatcttcaagcgaaatatgtgggcacagggcatgctgacttgaatcgatttgaatgggcagtaaacatccaaagggatagctatgcatcctatattgggcactatccaatgctggcatatttttccattgctgagaatgaatcaattggaagagagcgttacaattttatgcagaaaatgctacttccgtgtggtctgcctcctgagagagacgaagattgaggtggccttcgggtctggcgttcagtgttactgcaactactggaacctagggttcagtatcagtttgatatccaaagcaagatcaaactaatctttgcctagccacctactactactatgtaagactctgtccatcttgaacatctgaagcactctgtgtacccttttcgaacatgttcatcagtaatgttcggcgcatgtgtgtaacggatcttttagttaaggtgaatgttgagggacaaaatgtttctggagcgatcattcatatgtttgcataagctccttgccgctgcaaatatggcatattagaaaaatatcactactatttgctatatcggctacgtgccactgaaatttggggaaattggaaccatgccactcccgtcc

SEQ ID NO: 23653 - DNA, 1961 bp, Oryza sativa
  ref <308>: DATABASE ACCESSION NUMBER: AK073747
  ref <309>: DATABASE ENTRY DATE: 2001-12-06
ggctgcagcgtttgcagtcgttgtgcgcatttcgtcgaacaggtcggcgatggaccacggcggtcaggtctctcccgtgccggcgacggcgacggcgccgcggaaggtcaggagagaacacatgaggctgggggtgtaccacgacgtgctgcagcggctcagggacgccggcgcgcccgaggccctcgcgccggacttcgccgagaagctctggacgcacttccaccgcttcaacgccagttatgccatggatgtcaatgttgagagggcagaagacgttctgatgcacatgaagctgcttgagaaggctatccatcctgaaaatcagcctgccttctcagtgagaattgttcaggttcctctagatattgatgcgagtgaagccgattcacagtcaaacatcactgaagatgacaactgtcctacgccaagaacaccagctgaacaccctgcacctatttttggctctaccacagcccttaaggctcttgttcgtcaagcaagcagcaagaacctcctggatgacaaccaagacatagatgctattctcagacccatgcatgagatcacctttgcatctgatgacaaaccaaagggccttactcaactgtcttcacttctaggcaatctcaatcttgatatcaaagaagtacatgcactttcaacaaatgatggttacttcttagatattttcatcgtaatcggatgggatcacaaggaaacccaacttctcgaagaagcgttggagaaggaaattcacaattacgaaccacagatgccctcaaaatcttcttgctggcctcctgaattagcaggcaagcagtctttgattaactcgcaagtcaaccatgttcagatacctaaagataacacagatgaatgggaaattaacttcgacgtattggatattcaagagaaagtggcatctggaacgtatggtgatctctatcgcggtacatattttggtgaagatgtcgcaattaaggtgctcaagtcagatcgtcttaatgagaacatgcaggaggaatttaacgaagaagtattcatcatgaggaagattcgtcataagaacattgttcgatttcttggggcatgcaccaaatccccaaccttatgtattgtcacagagtttatgaaaaatggaagtgtttacgactaccttcataagcgtaaaggttccttcaaacttcccagtctgcttaaagctgcagttgatatatcaaaagggatgaactatttacaccaaaataaaattattcatcgagacttgaagacagcaaaccttcttatggatgagcacgagcttatcaaggttgctgattttggtgttgcacgtgtaaaagctgaatcagggattatgactgccgaaactggtacatatcgttggatggctcctgaggttattgagcataagccatatgattcaaaggctgatgtctttagctttggtgttgttttgtgggagctacttacgggaaagattcctcacgagtttctaacaccactccaagcagccataggtgttgttcaagagggtttaagaccagttattcccaaggccacagatcctaaactcgcgctgttacttgagagttgctggcagcaaaatgctgtcaacagaccagactttgtacaaattttgcaaaagcttgatgaaattgctggggagcatggcattgatcttacccatccccataaagagaaggagaaaggaggcttctttacttttgggaaggtccattgatgaaattcttgtatcatatctaaagttgcacattgtttttctgcagctactttctcgatagatttctctgaaagatactgtgtattcaggggtttattattgtacagtgtggtagctgactggcagatcacttagccgccatttgtcttttccaccaaatgtaaagcaagtacccgtgtaattttcaattgctgtatagtgtatactacggaaagcg

SEQ ID NO: 23654 - DNA, 3317 bp, Oryza sativa
  ref <308>: DATABASE ACCESSION NUMBER: AK073748
  ref <309>: DATABASE ENTRY DATE: 2001-12-06
gggcggcgtctctctccctttctctccccctcccttcccttcccatcaccgccgcggaacgcgccgccgccagaaaccctaaccctagatcgcgaggggtggtgggtggccgggccggcggggggtggggggatggcaagcaagttcgggctcgccgggggcatcccggagaggcgggtgcggccgatctgggacgccgtcgactcgcgccagtacaaggctgcgctcaagctctgcaccgcgctcctcgccaagcacccgacctccccttacgtcctcgctctcaagggtcttattttggaaaggatgggaaagcctgatgaagcactcagtgtgtgtttgaatgccaaggagcagttgtattctgacaacatctttcattttgatgatctcactcttagcaccctgcagatagtatttcaaaggcttgagcgattggatcttgctacttcatgctatgagtatgcttgtacaaagtaccccaataacttggagttaatgatgggcctttttaattgctatgtcagagagtactcatatgtgaagcagcaacatacagcaataaaaatgtacaaaaccgttggagaagaaaggtttttgctctgggctatttgcagtattcaactgcaggtacactttagcattggaggtgagaagttattaccactggctgaagcgttgcttaaaaaacacataacttctcatagtttacatgagccagaagcactggcactctatatttcaattctggaacagcagtcaaaatatgatgctgctttggaagttctttctggagacttggggtctcttatgggaagggaggaggacaagcttcgtctgcagggacggcttcttgctcaagcatgcaactacactgctgcttccgagatatatcaaaagatccttgaatcttgtcctgatgactgggagtcctttctccattatttaggctgcttgctggagcatgatgtgaacttgcctaaatcaaggacaagtgaacacccttcttcattacctgtagattctgctctggcccttaagacttctttaagcgacgagctggtagagtctcgccttgcaagtgcattgtcattcgtgcaaaagctacaggttaatgacaccagcgactgtgtcagaggacctcatttagccagtattgaaattgaacggcaacggtgccgaagtggaaacccaactgatagaaaattcattgaagctttgataaattactttcacagatttggtcatttgtcttgtgcagcatcagatgttgagatatacctccacatgctatcaagtgatgaaacaactgaattgttagatacaatctccagatcttttgatgcatcatcactttcagtaaaaggactgggtttggcaataaccacttttaaggttcaagaactcctgggaacctttttctcaaaatcaactacagaactccagcacattgcaaaaggaatggttgaggcattttataaaaacttgcctctctcaagagaccttgatcctcaagaaagcatgcatggtgaagaattgctatgtatggccagcagtattcttgtgcagctattctggcgtacaaggaacttaggatacttaattgaagcaattctggtgctagagtttggattgactgttcgcaagtatgtctggcaatacaaagttatgctggtgcatctctactcttacctaggagcacttccattagcacatcgatggtatgtaaccctggaggtgaaaaacattcttcttgaatctgcgtcgcatcacatcctgccacagatgttgaattcacctttactgcagcaaactgctgatcttgttaaggactatctaaaatttatggatgatcatttgaaagaatctgctgatcttacctgtcttgcatatagacaccgtacttactcaaaggtaattgaatttgttcagttcaaagaacgcctgcaacactccatgcagtatctttctgtaagatctgattccataatattgagtctgaagcagaaggctgagtctcttgatgaagtggagtctattcttgaaaatgtgaaccatggggcaaggttggttgaactatcaaacgaagacaacgtgaaacgctttacttttaacgaagatcttcaggcacgcccttggtggacaccaacaacaagtgttaattttctgtcagaaccatttgatgaaggttctacacctgcatgctttagagccaaagcgtgtgaacacaaatctactgagaaggatgactcaaagataaaatatgctgagagaaaagctcttcttcctcgtcttgtttatctttcgatgcatggttgtgcatcttccctcagggagactcaactcaatggatctggtttggatactgatgccacagagatgaaaccattacttttgaaatatgctaggagtattggatattccattgatgatgcccttagtgtgattctgggtatgtcatctggcaagaagtctgtcaaggattttacccctgatatagtcagttggatgagctttgctgtatttatcaatgcatggaacttgtggtctaatgaatcggtagtccccagagctgatgagagcagcccaagttcctggcaaattgtggatagcttggtaaaaatttgcgtagaggagcagctgattgatgccaaccgaatcctaacttctcctggcaataacataccagtcctagtgcagatgattacagaacccatttcttggcatctcgtggttattcagtcttgtgtgaggtcgatggctccacagggaaagaagaaaaagaagggtggtccatcggagcgaccaaatgtacctcggttgcaggcgattcaaagatctgtgcagtgcatgatcgacacactccgcagtgttcaatcctggttatctgaccagatgaggccggaggagcaagctttggatattttgttgtcatatttgcaaggaggtaatgaggatgggccaggacagatatcctgtatcttggaggagaattcagcaagacataaccctgaactcggcgaacggattgctcaatctttggaaacatggagttctgctggtgtggtcagaagaatcgttggagcagagaaggagctgttagttgagttaaagaaaatatgcgactcaaaactaaagctgcttgcttcagtatcggcttctctatcatcggccttacattgaaattgaaaaattttgctcgtgaattttgttccattgttgtgacatatgttgtgagtgtaactgtttggctttgcgccgtccattctttactttgtttctatgagattttgctggagtgatccctgcttctcccc

SEQ ID NO: 23655 - DNA, 3250 bp, Oryza sativa
  ref <308>: DATABASE ACCESSION NUMBER: AK073749
  ref <309>: DATABASE ENTRY DATE: 2001-12-06
ggaccccgacgcgtacccgacccattcactctctctcctctctctctctcctctcgcccgcatcggccgccatgcgcgaggaggtgcggagctcgtcggcggcgccgcccgacccgccgccgcgctcggcctcgccgcccgccacccccgtcgccagttcggctggtgcatcatcaccacctgcacaaacaaatgcagctagcatagattggttaggtggtgagccaatatccaaagtggaatcatcatcccagattgctccacatgctcctcggccttctcttagtactaatgctgctggagctgccgtggatttctctcaaccatcttgtagaccatgggaacgaggagacttgcttcggcgactggccacattcaagtcttcaacatgggcttctaagccaaaggctgctagttcactggcttgtgctcgaagaggctgggtgaacattgaaatggacaaaattgcatgcgagtcatgtggagcacatcttatatttacggcattgacatcttggtccccagctgaagttgctaatgctggggaagcctttgcggaacaacttgatgcatcgcacctgggtgattgtccctggagaggaaatagctgtgctgatagcctagtccaattccaccttaccccatcagctcttgttggtggtttcaaagatcgctgtgatggacttttgcagtttatatctcttcctgttattgccaaatctgcaatagagagtatgaagctcacaaggagtcctcagattgaccgtgtcttatcccaagcaatcactattttatctggagagctgggttacaaaacagacagcacaacaggaattgatatcaatcatcaagatgagtcctgtagctactctcaagcacagaaacttataagcctttgtggatgggaacctagatggcttccaaatgtacaggactgggaagaaaattcaacccgttctgccaaacatacagcctcagctgatccagatcagatccattcccgtttacccgagcataagcaaaattcgtactctgcatcagttaagaaagataagggcaaaggaaaaattcatgtaaaagactctggatgcagcatgaggtcacctttgcttgattgcagcttatgtggagcaacagtgagaatatgggatttcagatcggtgcctcgtccttctcatcttagtatcaataatattgacgcacctgatatgcggaagggggtgctgacacgtggaattagtgctacaagtggcatcaatggatgggttgctgaaggaacagaaagagagaatgttgaaggacgtggtgaggcaggtaccgatgagggaaaatcactgtcaaatgctcaggttgacctaaatcttacaatggcaggtggtttgccatctacgcattctgtgatgccctctatgcatgatcatttcaatgatggagggatgggaagagatctgatgattgggcagcctactggaagtgagctaggtggctttgcagcctcatttgagtctaggggtcctagttcaagaaagcgcaatctggaggaaggtgggagcacagctgataagccgctaaataggcttcatcctgctgacagcatagaaggaactgttattgaccgtgacggtgatgaagttgatgatggcgcacaagattcagatattcggagcaacaaaaggcctcgtggtttcaatctcttcgatgtgaatcaaccatcttcttctggagctggtcccagcagaaatttaagttttgacctggatatagatgtcaataaatttgatacatataaagctgaaggtccatctgcccttcataacccctctgcgtcgatgagggcatcttctgttattgcgatggacacagtccacagtgcagaggaaaattcaacagagagtgttgaataccatccatgtgatgttgatgacgttcacaagccgtctagtgctgtcaggagtggtggaatgagtgaggcattggatcttaactatagcaaccaagcaccgcaaagcagttttgtacagcctgctgctgaaagtaatgcaagggagataggaggtagtagtatgaatggaggggaggaagtcctcaatgcagaaactgctcctgcttttgctagggaccaactaagcctgggagttagtggagggagtgttggtatgggtgctagtcatgaagccgaaattcatggagttgatgtttctgagcataaaactgatagtgttgttggagatgtggaaccagctcccgagcttactgaaaatatgggcaatactggtgagtcagcccctggacctggaatgatggatgagtttgtccctgaagaggttggccgagaagaacctcagagtgatagccaagatgtggcatctcggttagtgggtagagctgacagtggctcaaagatttgtggttcaactaaagctgattctgttgagagtggagagaagatgagccatggcataggtcatgagagtaacctacagcattccctttctcgcaatgctagagtttattctggcattgatctgtctaaagatgaggtgacacagattgctaaattgccagcaaatgacgactatgatccaggagatgatcttgcagcaaacgggggaaatgactatgaagcaggtcttccagaatttgacccaattagtcatcacaacaattattgcccatgggtaaatggacatgttgctgcggcttgctgtatcaatactggttccagcactagtaccggactttccggctggcagcttacagtagatgcactggaaactatccagtctcttgctcaagcccaaaatcaaattatgccgtctgactctgcggcatcactgtataaggatgaccatgtggcgcctagccgcaagctgttgaaaagggctagccacagcaaatgttaattgaagctcctcctatacagacatacatttggttctggccactgacagtccagaagagctttgaagctatccatgatcaggtggtggaagatgaataaattaagcttcaacttagttattgtagagtgtagatgagtctgcctggccttttgccgagttgtgccccctttggttgtatttttgtatttcgaacctctttgtatctattcaagttacagacagattatctagttagtgaggctagaactttgaacaaccttgtcctttttcgtcaaagacctaactgtgcaaatgtgcaacattttgtccaattaagtattagtttccgttgtattttgattgctatc

SEQ ID NO: 23656 - DNA, 1295 bp, Oryza sativa
  ref <308>: DATABASE ACCESSION NUMBER: AK073750
  ref <309>: DATABASE ENTRY DATE: 2001-12-06
gtaaggctgtgtttagtttcacgctaaaatttctctccgtctcgtctcctactccctcttctcttctcccccaacctcactcttctcctctacaatccctaggccgccgctgccggtggacggcggcggagagctgactagccgagccgagcagatcagcagagagcgacgccgctcgccgcgcctgcggtggcctatgcatcatcatgcatggcatggcatggatcgatggatcgaacctgggaccttctgtttgtggggaaggtggcgatgaggacggatgcggcggcggcggtatcggcaccccccgatccaccggtgctacccccttcctccgtgcggcgacgctgcggcttgggatgctccccccccttggtggtggagcagccgccgcggcgagctcggtggtggggggttttgggatccgttgggtcgtggggtggggtggggtgcggtgcggcgaccgcgccgagcccacgctgagatctgagccaccaccgcggcgatggatggatgattcgtaagtttgtttcagttgcgcttttgatttggtgtgctcgccatcaccatatttctgatttgtttcagtctctcctctcctctgctctcctctcctgaacccatttttgacaatggcaccatgccaagatttctccacacaagaacaggcaagggggaattttaactatttgccactatttggcagatctctctctctctctctctctcattgtcaaatctctctctcttacacacacacaaaacatcctctctgaacaaagtggcaactcacttgtgttcaagggatcttcttcggggccgcctccacccacgctcgcgcgtggctgcttggatgctcatccatggctatgcgggtggtgccgggggcagggaaccgtagattagagcaagtataatagtacagcaggctatcagccaaatctggcgagaaaattgcatatctactcgctagaatggcatcacttttaactggcattcgatgtaatgccattcgccgccgccgccgccttcttctcctccttccaatctctcctctgatcttctcttcactgtgtacgcttgcgtgtatcagtttgacgctctacaaactgagctataagggcaagcagaaattatggggaaatttaactatttgccattggatccatgccattgtaactggagtatttgctactcttcgacacttcggggccgcctccaccatgcggctggttgcctggatgctcatccatggccgtgcggcggcgttgggggccgggaaccgtaggttcacg

SEQ ID NO: 23657 - DNA, 2655 bp, Oryza sativa
  ref <308>: DATABASE ACCESSION NUMBER: AK073751
  ref <309>: DATABASE ENTRY DATE: 2001-12-06
gatctaaacccccaccagatttatcgagcaggcgcgccggctttgcctccgccgccggcgaccatgtctgaccaaccacctccctacacccccctccccctcctctcctcctttcccccgaacccctaccccgaccaaacccccgatcccgcgtccacccccacccttgtcctccccaaccccgccttccccaacaagcgcaagcgcaccggcttccgccgcaagctcccctccggctcccccgccgcgcccgtcgccgtcgctgcgtctccttccgcccagccgccgccccgcgcctccgccgccgacgacatcatcgtgatcaaccgggagccgacagcggagccggtcaccgcactcaccgcgggcttcccggcggactccctcaccgacgaggagatcgaggcgggcgtggtctccgacgtgggcggcatcgagcaggtgaactacatcctcatccgcaaccacctcctcaccaggtggcgcgagaccttcaactcgtggctcgccaaggagtccttcgcgacgctcatcccgccacactgcgaccacctcctcaacgccgcctactccttcctcgtctcccatggccacatcaacttcggcgtggcgcccgccatcaaggagcgcatccccaaggagcccacgaggcacaacaccgtcatcgttgtcggcgccggccttgctgggctcgccgcggcacggcagctggtggcgttcggatttaaagtggtggtgttggagggccgcaagcggtgcggtggccgtgtgtacaccaagaagatggaaggaggtggacgctcagctgctggtgaccttggcggcagtgtgcttaccggcacattcgggaacccgctgggcattgtggcgaaacagctcggcttgccgatgcacaagatcagggacaagtgcccactttacaggcctgatgggtcaccagttgatccagaggtagataagaaagtggagggtacatttaacaagcttcttgataagtctagtcttctacgggcatcaatgggggatgtggcgatggatgtctcgcttggcgctgcacttgagacgttacggcagacggatggcgatctctctactgaccaggagatgaacttgttcaattggcacttagcaaatctggagtatgctaatgcagggttgctgtcaaagctgagccttgcattctgggaccaggacgatccgtatgacatgggcggggatcactgtttcttgcctggcggcaatggtaggcttgtgcaggccctggcagagaatgtgccgattgtttacgagaggacagtgcacactatacgttatggaggggatggggttcaggtggttgtcaatggtgggcaggtgtatgaaggcgacatggcgctgtgcactgttccacttggggttctgaaaaatggtggcgtcaagtttgtacctgagctgccacagagaaaacttgatagtattaaaagactaggctttgggttgttgaacaaggttgcaatgttgtttcctcatgttttctggagcactgaccttgatacctttggacacctgactgaagacccaagtcatcgtggagagttctttctgttctatagttatgcaacagtggccggtggtccattgctgatggcactggttgctggtgaagctgcccacaactttgaaaccacaccccctactgatgctgtcagttctgttctcaagatactgagaggtatctatgaacctcaaggtattgaggtcccagatcctctgcagagtgtttgtactagatggggcacagactccttcagtctaggttcgtattctcatgttgctgttggagcatctggagatgactatgacatactagctgaaagtgttggagatgggcggttgtttttcgctggagaggccaccacgagacgttatccagcaacaatgcatggtgctttcatcagtggtctgcgggaggctgcaaatatcactctccatgccaatgcccgagcagcaaagagcaaagttgaaaaaggtccatcaacaaatacacaggcctgtgctgctctactcatggacttgtttaggcaaccagatttggaatttggcagcttctctgtcatttttggtggacaagcttctgatccaaagtccccagccattctgaaggtggaactaggtggccctagaaagaaaggtgcaactgaagggggaaaggcggaccagcaccactcaaataaattgttgtttcagcaactccaatcacatttcaaccagcaacaacaactttatgtctacacattactatcacgacagcaggctatggagctaagagaggttagaggaggtgatgaaatgaggctgcattacctctgtgaaaagcttggtgtgaaattagttggcaggaaaggtcttggtccgggggctgatgctgtgattgcatccattaaggcagagcggaacagcagtagaactaaaactaggccctcaaaattaaaaattggaatccctaaatctaaatcttgagttcctgaattagctgcattatgatctagagttactgatactttgatttagaagcttgaccgcatgatttttctttatcctgtcaatcgtgtttctacctggtaatcatgctgtttgttcgcatgaagcttctactgagcgctggctttgtcccag

SEQ ID NO: 23658 - DNA, 2337 bp, Oryza sativa
  ref <308>: DATABASE ACCESSION NUMBER: AK073752
  ref <309>: DATABASE ENTRY DATE: 2001-12-06
ggggtggtcaacagggcagaccaaaccagacaaacaagagaaagagaaactctgaattctgaaactgaagagagaaaaagaaaaaagaggtgtactacaagactacaagtctacacaacacacaccagcaaaagagacagcatttcccaagaaaccgccctaaagcttttccaaagatttctcatttgtttttcttttcctcctgcgaatttttctgctccagatgagcaagagaagttaatggttttggcgagatttgcgtgggaaatgactaggagtaggtgttaggaccactcataaattctgcctgttctttttcagatctgcgctccgtgcttttgcttcgccaaacgaaaagaaaattctgtccacccaggacactgtcttctctctctctctctctctctctctctgcttcgagttcgtcgattcggttcaaatcactcgtctcgtagtcatagatagatggctcgtctcctcaatccaatcttgccgctctccgggctcacagtttcttgatttccccattcttttttcgtttccaaagtttttttcttcttttttgttgttctttgtgttgatttcttcctctgcgagtccactcccagtccagggtcagaagcttgctgttgaattccacactgttgaagcacaactcgagtttttctcatcaaatttcatcttttcttctgttcttttccctctctctctttttgttttggcttaaatcttactagagttcatcacagcttcccacactcgttttcccgtctcgatttcatcagctgaggtcggcacttgctcatctttgccgatttgtttcttctcgagagcctacaaaaattctccctctcttgatttccacaagcttgtttgatatttgctcgtcccaaaatggggaacgcgttccggtgcatgtcgcgcaaggagcaccgcggcggcggcggcgcggcggtgtcgcggagcaagcggatggggagcgcgcggtcggggcgcggcggtggcggcgggaagctgacgcccgcggaggaggagctcctgcaccggcaggcgctggccatggccatccaccagcacctcgacgccggcggctccatgtcgcgccgcatcgacgccggcggctccatgtcccgccgcatcggccctggctccaccagctcacgccgccgcggcgacctcccggactccgtcaccggtgccaagcccgtccaaatcgttttagagaacttagaaaccaagaaaattgttcttgttcatggagaagggtttggtgcttggtgttggtacaagaccatttctctcttggaggaagctggtcttgatcctattgccttagatctcacaggttctggtatagacaatgctgacacaaacagcatagctacattagcagattactccaagcccttaatcgactacctcaataaacttcctgagaatgagaaggttattttggtcggccatagttgtggaggtgcaagtgtgtcatatgcgttagaacaatgccccaaaaagatatcaaaggctatatttcttaccgctacaatggtaaaagatggccagaggccctttgacgtgttctctgaggaactcgcatctgcagatgttttcttgcaagaatcacagcttttaatttacggaaatggtaaggacaagcctcctactgggctcatgtttgacaaacagcagatcaaggggctatatttcaacaccagtccttccaaggataccgtgctggctgcagtgtccatgaggcccatccctctagccccaatcatggagaagctctccctcaccccagaaaactatggcaccgtcccacgctacttcatccagacgctcgatgatcgaatgctctcgcctgatgtccaggagaagctggtcagggagaacccgcccgacgggatcttcaagataaagggtggcgaccattgccccttcttctcgaagccgcaatccctcaacaagatcttgcttgagatcgctcagattcaagctccgacggcgctgctcccaggcaaggcgaagacggaggcgatagaggcaacagaggctaagacagaagaagagaaaactgagaaattatcatgactttgtattgtgtatgtacatgtaagggtagtagcacataggttgcaaacaggaggaaataccaggatcaattgaaaccagtcggctgccagaataataatgtaccagtaggaagacgaaaaaatgttgttcttttttcttcttttgtgatcaagtatagagaatgagcctatgagagatcttcagtcagatatatgtttaaccttgtgaattacaggttcttcagtctgaacattttcatcttgc

SEQ ID NO: 23659 - DNA, 991 bp, Oryza sativa
  ref <308>: DATABASE ACCESSION NUMBER: AK073753
  ref <309>: DATABASE ENTRY DATE: 2001-12-06
gtcctttcgatcggctctcccctctcttctccttccccccttcccctcctgcaagtaaaacaagcgagagactccccccctcaatggcgtcccggatcgcgaggctgctacagcaccagaaccgccgcctcctctccaccgccgcggaggcctcctcccgccgtccgccgcgcgctcccctcagcggcgccatccccaagcatgaagttgcaaaggctgaagcctcatctttaaaaaaatcaaggtggtacatgatcaagtcaaacccttcaagtcctctcacaacacagcgtgaaagccacaaagtatctactcatttagttaggccttctgcatcctactccacacaagcttcagagcagaacccaaaagagggtacaaaagacctgaaaactgttgaagatccatttgattcccctacctacaacatacctgagaagccagtgacatttgctgaaggggcttcctacagtcttgtaatagttgcgggacttggaattgcagcagtggctggatatgctgttttcaaagaacttatatttgaaccaaaagagtacaagatttttggaaaagcgctagcaagagtacagaatgacagtcaggttacagcaaaaattgggtatcctgctactggatatggcaatgaaagtagaaatcgtgcagctcggcagcgcattcctaacaaggtttggacagatgaggacggtgttgaacatgtggaggtaaacttctatatccgaggaccacatggagctggaaaggtgtattcagagatgttcaaagataacaatgacaggagttggaagttcacataccttattgttgagattgtgtctccgcatcgtgtacaactaatgttagaatcttacgtaccagcataaggatgcaagaaacaagcagttagcagtggcagaattgttgtaaggttcatgcctccacacttacctatccaatgtgtacatctctcatatttagaaatcatcctttgatt

SEQ ID NO: 23660 - DNA, 1757 bp, Oryza sativa
  ref <308>: DATABASE ACCESSION NUMBER: AK073754
  ref <309>: DATABASE ENTRY DATE: 2001-12-06
ttggggccggcacaccgtgcgctgtgctccactccaccatcgctcgcgacccgcgcccacgcccgcgcaccaccacaccacaccataccacaccacggccatctcgtcagtcagtgtgacccatccggccatcccaccgcgccctccccctcccatcgctgtcgtccacggcaccgcgtcgcgtttggggtctcccaccgttctctcccgcacgcgcgcggtcccgcctcccgcctatctctatccgcagatccacaaccatccatctccattcgccatttccgcccactgccacgccaacgccactgctgctaagctccgcctcgtcttccgcccacgctgctctgctcgtcgtcgctctcgctcgcagtgccccgcgcgcgcgaacgaggcgtggtgggggggtaatggcgcctcctccgtacgcagccgcggtggtggtggcgaccgtcgccgtgctggtgctggtgtcgcaggtctcagtggccgccggcgcggactgccgcttcccggccgtgttcaacttcggcgactccaactccgacacgggcgggctgtcggccaccttcggcgccgcgccgccgcccaacggcaggaccttcttcggcatgcccgtcggccgctactgcgacggccgcctcgtcatcgacttcatcgctgaaagcctgggactgccttacctcagtgcgtacctcaactcgataggaagtaacttcacacaaggtgctaactttgcaacggccgggtcgtcaatcagaaggcagaacacatctttgttcctctctggtttcagccccatttccttggacgtgcagtcctgggagtttgaacagttcatcaacagaagccagttcgtctataacaacaaaggtggaatctacagggagctcctacccaaggctgaatacttctctcaggcgctctacacattcgatatcggccagaatgacattaccacaggcttcttcataaacatgacctctgaacaagtcatagcttacatccctgatctaatggaaaggctcacgaacataatccagaatgtgtacggtctcggaggaaggtacttctggattcacaacacggggccgatcggctgcctgccttacgccatggtgcaccgccccgacctcgccgtcgtcaaggacgggtccggctgctccgtcgcctacaacgaggtcgcccagctcttcaaccagaggctgaaggaaaccgtgggccacctccggaagacccacgccgacgccgcgttcacctacgtcgacgtctactccgccaagtacaagctgatcagcgacgccaagaagctcgggatggatgacccgatgctgacgtgctgcggctacggcggcgggaggtacaacttcgacgacagggtcgggtgcggcgggaaggtgaaggtgaacgggacgtgggtggtggcggggaagtcgtgcgacgacccgctgaagcgggtgagctgggacggcgtgcacttcaccgaggcggcgaacaagttcgtgttcgaccagatcgccggcggcaagctctccgacccgccggtgcctctcaggcaggcctgccagatcagcagagggcagtgaatcgtcgccgccggtgcgggtgcatcgagccgtcgtcaggttggctgtgccgtactgccatttctgctgctgctgctgcctctggctttgtaagtgtgcaatattgcagaggcatatggttgatataaagtacatatactgcttcctttgtgcaataaagggagaatgagattc

SEQ ID NO: 23661 - DNA, 2344 bp, Oryza sativa
  ref <308>: DATABASE ACCESSION NUMBER: AK073755
  ref <309>: DATABASE ENTRY DATE: 2001-12-06
gaccaaatccagctcgatcgctgctcacctcgcacgcatccttttcttctcatccatggcaacctcctcaacccagcattaattccagcacaaatcctctcatggatatgtgctaaccaaccttgcacaaacaaggcagatcgagctagctcatccctgcagcttagcttagctagctaacctttaccttgccatggattgatcgatcattaattcttcttcttcttgctcgatcgtcgccatgagagccagctccttctcctccttgatgctgccttgctcgcatggccatggcggcggcagggccaccgcctcgacgtgcgccgcggcggcggcggcgtgccttgcgcttgtggccttggtgatcttggtggtttcaatggatccgagggcacaagcttcttcttggttcttcctttcttcttcttcttcgtcttcgtcttcgtcttcgtctaccttggttcgtcctgcagctagctctcacgctgcctccttgcgtaagccgagttcttggggcggcggcaatggcggcggcggcggcggcgagcacctcctggtcacctctagtagctttggtagtggtggtggcgctcgtggaagctggagccggaacagcacgagcaaggaggtgctgtttcagggaggaggcggcggcggcggtgatgagatgacgtcgacggcggcggcgccaacgccggcgttgatcatcggttctagctccggcgatggcgtgtcgccgtctcgcgtggccgtcacggcggcggcagctgaacctacaccggcactggctccggctcctgctccggaatggggtgttggtgatgctgctagtggagatgatattattcaagtaatgccgcaagcgcaaaggcgaagggatgtgaaattggagctattagaactcggtcttgctaaagctcgggcgacgataagggaagccatccaaaacaaggataacaagcccccattgacagacaaagattatgtgccagttgggccagtgtacagaaatgcctatgcatttcacaggagctacttggaaatggagaaggttttcaaggtcttcgtctacgaagaaggcgagccaccggtgttccacgatgggccgtgtcgcagcatatactcgacggaaggcaggttcatatatgccatggagatggagaaccggatgcgcacgagagacccggaccaggcccatgtcttcttccttccattcagcgtcgtcaagatggtgaagatgatctacgagccgaactcgcacgacatggatccgttgcggcggaccatctcggactacatcaacgtggtgtcgaccaagtatccacactggaaccggagccttggggctgaccacttcatgctctcatgccatgattgggggccgtatgtctcctcggcgaacggtcatctcttttccaactccatcagggtgctctgcaatgccaacacatcggaggggttcgacccgtcaagagacgtgtccctgccggagatcaacctgcggagcgatgtcgtggaccgccaggtgggcgggccatcggcatcgcaccgtcccatcctggccttctttgctggtggtgaccatggccccgtccgccccctgctattacaacactgggggaaagggcaggacgccgacatacaggttagtgagtacctgcctcgccgccacggcatgtcgtacaccgacatgatgcggcggagcaggttctgcctgtgcccaagcgggtacgaggtggcaagcccccgggtggtggaggccatctacctggagtgtgtccccgtggtgatcggcgacgactacacgctaccgttcgctgacgtgctcaactgggcggcgttctcggtgcgcgtggcggtgggcgacatcccgcggctgaaggagatcctcgccgccgtgtcgccgcggcagtacatacggatgcagcggcgggtacgcgccgtgcgccgccacttcatggtgagcgacggcgcgccgcggcggttcgacgtgttccacatgatcctccactccatctggctcaggaggctcaacgtcagggtcattgcacgggaggactgaaccaaatattctgtgatcggtcggttgcttgcttctagtttctctcaacttgtgtgagagctcgttcgaatgtttgatgtgtgtatattttggttaaactctgaaattgcatttttgtaaagaggatgttcatggagcgacgttgtgcagtttgtgcaccgtgtacaaatgttttaaagaaagtgccactgtgccaggaattatctatgctggtgaattcgggcagtaacccactgggagtaactctctgcacaaagcaccaaatggggttccgttggatcc

SEQ ID NO: 23662 - DNA, 3715 bp, Oryza sativa
  ref <308>: DATABASE ACCESSION NUMBER: AK073756
  ref <309>: DATABASE ENTRY DATE: 2001-12-06
gtccctcgcttccagctccgaaagcgccttccccccaagcccagcggcgtcgctgcctccctcctcggcgatcgccgcctccatttctcgcgctcgaggtccgcctcctttgcgccggcggcttgctggctggttgcttccccgccgcgtgcctcggaggggaccggccgtttcttgttgccctccttgcttgcttgcttgcttcctccccctcgtcgccgctcactccgcagcgggggtccccgccatatgtaagcagcatctcgacgatcttgtgtcgcgtagcctctaaacctgtgtgatttacaaggattagggcgtcgaattagacttccccgtgtaggtgtgcatcagagctgttcgacgtaatgcccgtgccgcatggcgatgactgccgcatctgtttttggatctggtggatgtttggaattactaacgtcgagtaaagccatgcgaggaaagctttggacaagacttgcccctttcatatccaagcgtcatgcttcaacctctcagacctcattatcttcatcttcttcgtcatgctccgtgataaatccatggctctttgttggtctcggcaaccctggtgagaagtatcaatgcaccagacacaatgttgggtttgatatgatagacatgtttgcacagtctcagggtatatctctaaccaggcatcccttcaaggcactatttggggaaggaatggtcgaaggtgtacctgttttgcttgctaagcctcaaacatatatgaatctcagtggtgaatctgttgggccacttgctgcctattataaattaccacttaatcgcgtccttgtggcatttgatgacatggacctgccctgtggagttcttcgtttacaacctaaaggaggatatgggcgccataatgggtctgttgattttataatcatgtgttttaatgaagtaatttgttgaaattaatttgtcatttaaaagactgacctgataagcaactttctgacaacctcatcaggaagagacaacatattgttcccttctaatatttttacttaataaatttttctcgtttgtagtggcaatttctgcatgcacctttccattttccccatatggacatgttctttttttttcccttttacatagcctgagacagccatagttctcttgaaaggtctaccagatataatgacactcttattagtgttctcttattttactcatttattttactattagctatatgatcctattttctgtttgtaaataagttttttttttacattgacaaaatatttacctttctagcttatcagggtgaagagcttgatataccattttcgtaagaaccgagaatttggtcgattaaggattggaattggacggccacctggccaaatggaccccaaagcttttgtgctccagaagtttaataagaccggtcgagaacgggtaaatatctatatggctagtacttgttagcgtcatgcccttttctgagtttttgtacagtaaccattggatgatttactttcataattctcaccggatgatcgtgctcatttgctgggatatatccatatgaccaaaaccatggctatattctgcatggaagtgagccgcacctagatttattctacttcagttaaatctgaataaattttgttgtgctatacgcaaatgagagatgatttataggcttgcaacatgtctatgtttagaagattaccttctggtcaacttccatgtggtgtgccaagccaatcctgtgaagtttacagcccttgagatctcttaaatctcaaattgttttaggtaataatgtcaccatgtcctcaaaattgaactgctggggttcctgaaggtacttggaggacttgttatgacaatctctgtcactcattagcgtttttttccatggaatcattctggtacatcatatttctggaagcaccatatttgacataattatttcactgtcacagtttttattattctgtatgtagcgaccctgaagaattgtgctgtgacaggtagtcttacgctttgcatgttttgttttatcctagattgattcagccatagaagagggtgttgagattcttaagttggttgttaccaagggtttgacagaggctgcaagatcatcaaatgtggatcagaagtataagcatctgacaacacacgacatgcaactgtaaagatgatgacagacgctgcttgtccgagagcgatccactattacctgttgaatgcctgatgggagaacctggtaacatctaaactgcttgattcattgatttgccaaacttattacaagggctgtcagccgtctcctttgcattggatttgtaagttttgatgctctcaatcttttttttttatacttttgaacaactgattcaataaataaaaacttgacggttctgtcagcttcaagattctatctaccatgcgctttaaagataaagctgatcatttttctttaaaagaagatggatatccattttacgcccgtattcagacctattacttatacaaggtgctaaaactcttcagcttctaccccatggactgaatggacggagccgaagaaacagcaaaagtacacggaagaggatcctctaacttacttccctctgactttgagtcattgacatgtgtacccgataggtaaagagcccacatatcaatgacacaagttagaggaaaataagttagaggattttaatccaaagcacacaagagtaagtagtactttccgtaataccatacgttctctgaacaagctggtaatattaggaaaaccacatgagcactgagcacacatatacatgcgccaagcagccctagattattaactaattttatttgctcttcagtccaaactcagcgtcgaaaattgcaatttgatgaacagtgatgtattcaacgaaatgacacttactgtgaaaacagagatgaacacagttttttgtgctgcctcaacaagcgcatcttttctgatccatttgaactgaaatatagggagaattacacaagtcatggcaaacagtttgccacgcacgacaacaaaacaccccagcaaactgcaagcacaaacactttttttttcttttttcttttttgcgaggacacaaacacctaattatatgcgtgcacacaattattcaacactcacaaagaattaaagacgttgcatgatgacaagatcatctaggcatctcatgtttactataggaattcactgctggcacatggagtgtagtataatatctagattatggggataggcttgacgaacagctgcttgatgatattcatgctgagcttgttgaaggtgtaggcgtcttcgctgccttggtagaagaacattatgctcatcgctaagttggcgactcggttcacagccggcacaagcgaggaacgctcaaagcgtgcttgattgatagttttccatgcgtcttcgaccagattacttatcacagccgtggcttcctcaccagtgacattgtgctccttcatgtaggactcaacagaggtggccatttctagtttgcccttcccgtgctgtgaccaacaaacacttaattagttactccctccatttgaactgactaataatgtcaaataaaaaaaaacgaaggtactcagttcaaatggagtagtattttatagaggattatattatatcccatgcacatgtcaaaataacataaaagattttgct

SEQ ID NO: 23663 - DNA, 1281 bp, Oryza sativa
  ref <308>: DATABASE ACCESSION NUMBER: AK073757
  ref <309>: DATABASE ENTRY DATE: 2001-12-06
gaatctcatcaccatcgaatcatcagcatacacacgatggcgtcccaacgccggcgatcatctgccaccgccgtcctcctctccttgctactgctcctccagttggccgccgcctatcctcaaggaaagaggcagaacgtcgccgtcttctggggccgcaacaaggccgagggctcgctccggcaaacctgcgacaccggcgactacaacatcgtcatcatctccttcctcagcgtcttcggccacggcaaatactggctcgacctctccggccacgaccttcgcgacgtcggcgccgacatccgccactgccagtccaagggcgtctacatgctcctctccatcggcggcgacggctaccaatactccctcccttcctccaagtccgccgccgacgtcgccgaaaacctctactactccgtcctcggcggcgaccgccccggcgccttccaccccttcggcgacgacaccatcgtcaacggcgtcgacttcttcatcgacaacggcccagccgaccactacgacgacctcgccaaccgcatcaacgactacaaccagaacatccgcgaccccatcggcatcatgctcacggcgacggtgaggtgctcctaccctgacccgaggatgaaggcggcgctggacaccaagctgttccggcgcatccacgttcgcttctacgacgacccgagctgctcctataaccacgccgggctcgccggcgtcatggcgcagtggaacaagtggtcggcgacgtaccccgacgggcagatcttcctgggggtcgtcgcggccaacttgacggggaagaacgacatggtcgccgtcggcgagctccgcgacaagctgctgccggcggtgcagaacacggatacgtacggaggagtgatgctctggaacagctactacgactcgctcactcactacggccgatacgtcaaggacttggcttgatataattaattaaactcaaatcaaccaataattacttgagcccgtgcatgcatgcatgcagctcaatcactatctcagtaattacggcgtcatgtgtttgatataggaaagtaatccctacgtaggccattctcaacccaatgactaagatggtgtctatagcattaaataaggtgccacctagaatgaaaaatgatgtgacaagtaaataaatgaggaaagagaaggaaatcatgtcttgcatgagacatggtttctacacaacatccaagacatcatgtgagataatgagtattaaatttaagtatggaatagtagtgtttgcattgg

SEQ ID NO: 23664 - DNA, 1622 bp, Oryza sativa
  ref <308>: DATABASE ACCESSION NUMBER: AK073758
  ref <309>: DATABASE ENTRY DATE: 2001-12-06
gctctaaggaaagactgcaaagaaaaggcctgtgtcaaggagagggtagtagcaccttgctctcctttgccttcagagaaaccggaagcaatggcgtctgctactctcctcaagtcatctttccttcccaagaagtctgaatggggtgccacccgccaggctgccgcccccaagccggtgactgtctccatggttgtccgcgctggtgcctacgacgatgagcttgtcaagaccgcgaaaaccattgcatcaccaggaaggggtatccttgccatggatgagtcgaacgcgacctgcggtaagaggcttgcgtcaattggccttgagaacaccgaggccaaccgccaggcttaccggaccctccttgtcaccgcaccgggcttgggacagtacatctccggtgctatcctcttcgaggagactctgtaccagtcaactgtagatggcaagaagattgtcgacatcctcactgagcagaaaatcgttccaggtatcaaggtcgacaagggtcttgtgccccttgctggctccaacaacgagtcatggtgccaaggtctcgacggccttgcctcgcgcgaggcggcatactaccagcagggcgctcgcttcgccaagtggcgcactgttgtcagcatccccaacggcccatctgaactcgccgtgaaggaggctgcctggggccttgcccgctacgccgccatttctcaggacaacgggctggtgccgattgtcgagcctgagatcctcctcgacggtgagcatggcatcgacaggaccttcgaggtggcgcagaaggtgtgggcggagaccttcttctacatggccgagaacaatgtgatgttcgagggcatcctcctcaagccaagcatggtgacacccggtgccgagtgcaaggacagggccacccctgagcaagtatctgactgcaccctcaagctcctccacagaaggatcccccctgccgtccccggcatcatgttcttgtcgggtgggcagtcggaggtggaggcgacgcagaacctgaacgcgatgaaccaggggcccaacccgtggcacgtgtcgttctcgtacgcgagggcgctgcagaacacgtgcctcaagacgtggggcgggcagccggagaacgtgaaggcggcgcaggacgcgctgctcctccgcgccaaggccaactcgctggcgcagctcggcaagtacaccagcgacggcgaggccgccgaggccaaggagggcatgttcgtcaagaactacgtctactaatccgatccaatccaatcaagacagtgaacctgctgctgctgctgctacgtactacagctactgctatactgctagtacctcgagggcactgtagccagtgtgtcgtcacagttacaggttgagatcgatggacaaagttaaaactatactgcattaattaattttaccttgagaacatacgtggttcatcatgtatttcatcacatgaatcttttctagagcgtttgatatacatacctcgtgttttgcctctgcaataaccttgtgtgtagacgaatctgtatactacctgtatgtgtggcctgtgaatcgatttggttactgcaaagttttgcgtatatatacatgcttgtgattctggaatt

SEQ ID NO: 23665 - DNA, 3778 bp, Oryza sativa
  ref <308>: DATABASE ACCESSION NUMBER: AK073759
  ref <309>: DATABASE ENTRY DATE: 2001-12-06
ggtaggccgctgaggcctccgcccaaaacttctagctagctgctgcgctgctctcctctctgtccctttcgacggcggctgcccaagcctgttcccccgttggcttctgttccatgggtgccccgtgcccatgcccggccatccctccagttttactttcgtcttgagatctcttagagcttctgaagaatccttgccatgttagccagccaccagttgatgtgtctgctgccaagatcttccgtgctttgccaaggccaaggaaactctcagctggggttcagtgcttgatctcaacgtaccgtgtgtgtgtcactcacactctccactccagtgcttgcaagagctgaaagttgcagtgaattattatacagaaaacaagatagacgatggagttggcggtaggtgcttcggaagccaccatgagatctctcctgggcaagctgggcaaccttcttgcccaggagtattctctggtcagcggcgtccgtggtgacatccagtacatcaatgacgagcttgccagcatgcaggccttcctccgtgaccttagcgttgtgacggagggtcacaaccatgacaaccggaggaaggactggatgaagcagatccgagacgtcgcctatgacgttgaggactgcatcgatgactttgcgcaccggctcccccaggattcaatcagcgatgccaaatgctccttcatactcacaaaaatgtatgaactcttgacatggtggcctcgtcgcgatattgcttcgagaattgctgaactcaaggtacgggcgcaacagatcgcggatcggcgcaacagatatggagtgaacaacccagaacactgtgacagcagcaacagtcccagacccagagcccatgctgcggctcaagacattgctgagtatcaggacacaaaacctcagatcgtcagtataaaggagcctgtggggatgaagactgtcatggaaaaccttgagaagtggctaaccgaacctcaacctgataaggggcgagctgttctgtccattgtcggtttcggtggtgtggggaagaccaccattgccatggcattgtacagaaaagtcagtggtaaatttgactgccaggcgtcagtcgctgtgtctcagaactatgatgaagacgaagtcctcaggagtattctgaatcaagtcagcaaacaggaggaggccggtggcagcacagaaagtagtagtagagatgagaacaccagggaaccccagggcagcagtagcacatcaagtagagaggagaacactgccgagtcaggcactaaaaggatgttgaacaagttgaagaaagccctaccactgtcactactcggagggaatgatgataagacatcggtcaggcagcaggaaacaatgggctctcttcagctccgcgaagaactgaaacggcgcctggccgaaaagagatatatcctcttgattgatgatatttggtctgccaagacatggaacagtatcatcataccgtttctgccttctgaaaatgataaagacagcagaataatagtgactacaagatttcatgctgttggttccacatgctcccctagacataaaaatgatgaggccacatcctcccctggacatggaaaggatcttttgcataaagttgattttctcacaggtgacaagcccctagatttatttaatgcaagcattcctgacccaatgaaaagaacagatagagacaagaagttatcaaagatatgtgggggattgcctttggccattgtcaccatggctggtcttgtagcctgcaacccaaacaaagccaactccgattggagtaaactttgcgaatcattatttccatatccagtaactactcttaacctggatggggttacgaggatactggattgttgttacaatgatttgcctgcagatctcaagacctgcttattgtacttgagtatatttccaaagggttggaaaattagtaggaagcggttggcccgacgatggattgctgaaggttttgctactgagaagcaagggctaaccgaagaggaagttgcagaggcatactttaatcagctcgcaagaaggaacttaatacgccctgtggagcatggcagcaatgggaaggtaaaagcctttcaagttcatgacatggttcttgaatacatcatgtcgaagtcaatcgaagagaattttattactgtggttggtggacactggcagatgactgcgccaagcaataaagtccgtcgactatcgttgcaaagcagtggatccaagcatggaaattctacaaaaggcctgaacttggctcaagtgcgatcactgacggtgtttgggaacctgaaccatgttccattccattcattcaactatgggataatacaggtgctggatcttgagggttggaagggtttgaaagagagacatgtgacggagatatgtcaaatgcttgtactcaagtatttgagcatccggcggacagaaattgccaaaattccctcaaagattgagaaacttgagtatttggaaactcttgacataagggagacatatgtcgaggagctgcctaagtctgtaggccagctaaaacggatcagtagcatacttggggggaacaaaaatacacggaaggggctgaggttgcctcaagaaaaaagaaataaggcaatgaaaaacccgtcacctcaaggtaaaacaaaggagcctgcagagaaaggattcttgtcccaagaaaaagctaaaggcacaatgaagtcactccgtgtactgtcagggattgagatcgttgatgaatcagcagcagtagctgcaagccttcatcagttgacaggactaaggaagcttgccatatacaagctcaaaataagcgaggaaaatgatacattcaaagaattactctcctctattgagtaccttggcagctgcggcctgcagactctggccatcaatgatgagaattctaaatttatcaactcactatacaacatgtctgcacctccaagatatctagtctcccttgagctgtccggcaagttgaaatggctacctgagtggatcaccagcattactactctcaacaagttaaccatatctataacagttcttacgactgaaactttggagatcctccgcaatttaccttcattgttttccctcacctttgccttttcacttagtgcagcgaagcaagatcaggacacagtaaagggcatccttgaggacaataaattggccactgacggggaaatcgtcattccagctaaagaattcaagagtcttaagctgcttcgcttctttgcacctttcgtgccaaagctcagctttccggacaagagtgcaatgccagcactcgaaatcattgaaatgcggtttcaagaatttgagggtctattcggcatcgaaatccttgaaaatctccgtgaggtgcatctcaaagttagcgatggggcagaagcaataaccaagttcctagtaagtgatttgaaggataatactgagaaaccaaaagtatttgttgatggcatcgtcactgcatgagaagttaaattgttgcaaataggagaacttgccaatcatctgatgctgcccctctatcattactctcttctaatatatttctgttttttttttgaaaggataatatatttctgttattactctcctggctaaataaaataggatggcatggaatatatgttacctcttaccatggtcccgtagtagtttgatttcacttgtcgttatagtgtctgttcatctctgttttctcttaataaaggggagatcccagc

SEQ ID NO: 23666 - DNA, 1072 bp, Oryza sativa
  ref <308>: DATABASE ACCESSION NUMBER: AK073760
  ref <309>: DATABASE ENTRY DATE: 2001-12-06
ggcgacggggcgagacaccggcggccatagctcgagagctcgaggtcaacccgaaagccacgcacgcgccgcgcaatgggttccgacgccagcagcgccgccgacgcgatgggagtgctccgggcggcggtgcccctgcaggcggacgccgacctcgtcctggctaccggcggcggcggcgagcgggggcaggtggtggggctcgtcctcgtcgacgtctccaacgggttctgcaccgtcggcgccgggaacctcgcccccgtcacgccaaacaaacagatagagaagatggtggatgaggccgctaggctcgccaaggtgttctgcgagaggaactggccagtctttgcgtttcttgacacccactaccctgataagcccgagccgcctttcccgccacactgtataattggttctggcgaggaaaattttgtcccagctctggagtggctggaaaaggatccaaatgtaacgatcaggaggaaggattgtattgatggttatcttggtgcatttgagaaagatggctcaaatgttttttcagattgggttgcgaagtttcagatcaaaaccgtattggttttaggaatatgcacagacttttgtgttttggattttgcaagttcagctttggctgccaggaacattggccgagtgcctccgctggaagatgttgtcatttattcagagggttgtgctacgtataacctcccagttgaagtagccaggagtatgcaaggaaccttggctcatcctcaggatctaatgcaccacatgggactttacatggcaaaaagcaggggtgcaaaggttgttgacagaatcattatttaagattagaggtgtaaaactaacacaagactgtaatagtgacctggatcgattatctagtttggtttttattgctgggacgatgatcctagtgttctctttacttcttccttttatctcttcaatgtacaacaatctgacatatatttctttacttcttccttttatctcttcaatgtacaacaatctgatatatatttgcggttggacagaatactgatattttgctaatgtttcgtgc

SEQ ID NO: 23667 - DNA, 2303 bp, Oryza sativa
  ref <308>: DATABASE ACCESSION NUMBER: AK073761
  ref <309>: DATABASE ENTRY DATE: 2001-12-06
gagtctgccagccgccgccgccgccgccgatccccatccatcctgcgaggcgcgagcgagcagggcgccgtcgttcgtcatgctgcttccgccgcatcctgatatttatactcattgacgcttgattgcccaagtttggtggtaaacctgaaatctgtttacgatgaaagtggaggagaaaaaaagatctataacagttgcccccttcgagtgtgcttgggatgaggagtttcggttcagggagactggtcgcgggtgcatcacctttgaggcatctgcacacaatgatgttaccctggtgttccgcgaacaacctgggagccagcattatcactacaaaatggataacagtcgtcactacattgtgatcttgggcagccataggaacaaaagattgaaaattgaagtagatggaaagactgttgttgatgttgctggcattggcctatgttgctcctcgtcttttcagagctactggatcagcatctatgatggactgataagcatcgggcaaggaagacatccaaataacaacatcctgttccaatggcttgaccctgatcccaaccgaaatgttcagtatgtgggactatccagctgggacaagcatgttggatacagaaatataagtcttatgccatcagctcctcaaaacagcatcctttggagccaaattgagtgtgcatatgttgagccggatggtgctggagggcatacaagaaaacaagaatcaaaagatggcttagaccaaagggcacttgcaaactttctagagaactgggatttctcagattctatatttgtggttggcagcgaaagaaaggttgtcccagctcacaaagttgtcttgggttcttgtggtgatttcccttttaacctgatgatgagtcgaccagctattgagcttccatctgtctcctacccagttctgcactcccttcttgagtacatctacacaggttctacgcagatttcggaatggcaactggtttcactgctggagttgagttcacaatttaaagttaaaccattggtaatgtattgtgaagaaattattggctgtttgaagatgagtgatgcagtttctgagtctagcaaaaaaatacagttatcaagtggtggttctcaagctcatcaattttattatttacctttcaaagctccattaaatacacagaaaattgaacagttccttgtaaatggtgagcacagtgatgtaaatatctatgtaaatggacatggtcttgttactcatgctcacaaactcatccttagcttgtggagcatgacatttgacaagatgttcacaaatggaatgaaagaaagcagtgcttcaaatgtatttttcgaagatgttcccgtcgaagcattctttctcctcatccaatttatgtacagtggggaacttaaggtggatatcgaggaaatcacaccagtgttggttgagctgctcctattgtcagaccagtttgggatcacggctcttcagtttgaatgctgtaaaagaattatggaattcctctcaaaggattcgtgtcctacaggaagaagctcatccaccagggctaatttctagtttttttatgggataattggatatggcttctgcaaatttggtgaatttgctagctggttcagtgtagacttacccctgaaagtttcttgcaggacacagtatgttcagttctacgagcagtttcgtcaattccatcttgtaaactgcttgaagaaatgtgcaagaggaattttgcagaacactttgattattgcacaactgcttgcacagactttgtgttgttggatgaggcaacatttaaggatattcttcagcatgggcatatgactgtaacatcagaagagagggttctggatgccatattaacatggtgcatggaggcttgtgactgttttaactggacctctgtgcacgagctcttaagcacttcaagaccagagaaactctttggagggaggctcactgccatcaatactttgctaccatttgtgcggttccctttagtgcaaccatctgtccttcacctggaattgagcagggtgtatggggagattacagagcctatttaccactatgttgttgatttgttccctcgtgttattatactatggagcacttgccaccgtaagtttttttttctttttttttgcttctaaaattacccattacttcgctgcagatggagaaaagtaatctagcaaaaaacataggagcgttcagacagttggttgcagaagccattgagttctctaatgcgggactacggatggcaacaaatacatgtgag

SEQ ID NO: 23668 - DNA, 1111 bp, Oryza sativa
  ref <308>: DATABASE ACCESSION NUMBER: AK073762
  ref <309>: DATABASE ENTRY DATE: 2001-12-06
gggctgctgctgctgctgctgctctctccgcgctgcgcttccgctgctctagggtttatctcctgctgccgctcggatttcgcggcgagcaatccaccggagatggcgcccgtgcagttctccgccgctggagttggcgcggtggccttcgctacgaaggggatggcctcccgcgacgcgctccgcctcccgccgccggcggccgtccgggtgctccgccaggcgccgcggccgtcacgcggcctcgtcgtcagggccgccgccgccagcgtcgccccgaagtatacaacgctcaagcccttggctgatagagtgcttgtaaagattaagtctgctgagcagaagacaactggtgggattttgcttccttcggctgctcagtctaaaccccaagggggtgaggtagttgccattggggagggacgaactgttggggataacaaagtggaagttagcattcaggttggatcccaagtcgtatattcaaaatatgctggaacagaggtggagttgaatgattccaaccatctgattcttaaagaggatgacatcattggtattctggagactgatgatgcaaaggacatgaagcctcttagcgatcgtgttcttatcaaggtcgctgaagctgaagataaaactcctggtggcctattgcttactgaaacaacaaaggagaagccgtctattggaacggtcgtggctgttggccctggtcctctggatgaggaaggcaagaggattccattgtcggtctctgcaggcagcactgttctatattccaaatatgctggcagcgagttcaagggctctgatggcacgagctacatagtgttgcgggtgtcagatctaatggctgtcctctcctgaattaccaggtgcgctcagctgagccatccatcgtactatgccctttcagcaaccatcttttttggaaaatattgctcctggagataacattaaagccactcgaatccccttttgttacaccaaaattggggtggtggtatatcatactgataaattataatgaatgccaactttttttggttgttttcagctttgtaatgatttatagaaaaatgggagaataactcctaacctttgcacc

SEQ ID NO: 23669 - DNA, 3775 bp, Oryza sativa
  ref <308>: DATABASE ACCESSION NUMBER: AK073763
  ref <309>: DATABASE ENTRY DATE: 2001-12-06
gaattccccgccgcgaaatccctaaaccctagccgccgccgccgcccccgccccggcatcggcgacgactccgacctccagaaggacctggacgagccgcgccgctcctgcatcctctccgggaacgaccccgacgccggtcgcgcaggtctccgccagcctcgccgccggcacatcaggggcggggggcggcgaagaatggctttgtccgatgatgacgaggaggaggaggacgatggctttggcgctcgtccgtagcatccgtgagaatctcctcaacaaggcctcttgccctcctcacccgatctgcgtctggccgccctccgacttggaggaggacgacgacaacgacctcgagacgctccgtgcgatacagcacccacttctcgcactaccattccggtacctccagtgggtcagagacaaatacaaaaactgaggaaatctttttcgaaatagacttgatgaagaatttgatgtggataagcaaaataaagaggcaattaccccaattgggtttcctaaagctgcctgctgttagtggatgctcttaagaagaacagagcatgccagaagttcattagaaggtagattacaattcaagcgaaattgaagaaaataagaatcttaatcttaaggatcatgtaaaatgccttttggattatcagttaagccgcagaaaagaatttggcaaaattttgtgccaaaatgaggatcattatgttagattgttttcctctcaaaagccatgtgcacaatcagcgaaggacagtctaggtgagataactcaacctgcacacatatataataatcccaatcatcaacaagcaactctgttgaggcatggaccttcccaatacggatgcaactaggaacaattttcatcagtatgctcaagatccaaatgaccgaaatactggacagatgtaccatggatccaattatcatcagtatgccaaagttttgtttaagagatacttggaaatagtagctgctacccctctaattattttgaagaaaataatggtcctagagaagtaagattacacgactcacagttctataggcaggataatcaagagtattcaactgatgatgatcctttgcctggtattgaggggtttcaaattgttggggagcctagatcatgatttacattaacagcatgtggttaccctaccaatggtactaccctttgtaatttccaggtgctacgatgtatgactacgtggttactgctgatgatgttgacactcttttggctgtagactgcacgcctatggatgataatacctgtcagggtgaattggttacagagtatactaacaatgggagcaagataacttgcggccaagaagaagatggtgaggctgatacagaggatcatctgggacaagagggcaaggagggccaccacgggacgccatcgacgttctcttcagagacaccagcgatgagctcaccgacgagctcatctccgacaccatgatcgacctcatgatacccgccggggactccgtcccggttctcatcacgctcaccgtcaagttcctcagcgagtgccttctcgcccttcaccaactggaagaggagaacatgcagctcaaagaggcgaaaaaccagcatgggtgagaccttgcaatggacagacatgtcattgtcattcacacatgtgataacagagacgctgtggttgggcaacatcatcggtgggatcatgcacaaggcggtgcgcggcgtcgaggtgaatgggtacctcattcccaaggggtggtgtgatcggtccacctcgatgatatgctctacgatgagccctacaagttcaacccatgaaggtcgaaggagaaggacatgagcaatggcagcttcactccatttggtggtgggcagaggctgtgcccaggcctggatctggccaggctggaagcttccatcttttttcaccacttggtcaccagcttcaggttagaacaaggtagcaaggactgaggctaatggtaagaggaggcagaagaggaaatgagctaggactgcggattccaaaaattgattctgtggagtgaccaagttgcagctagagaacaagctccatacctcctcttccattgggtgcctcctcccccttgtctccctcctgtttgctgcctctatggcaatgcctaacggagtagtggctggtggacgagagaaaatggagttgggggcaagtgaggactgtgatggtatgaactattcctcatcatttttcagggttataccatccatctactgggaggtattatcagcaatttgtagacaagctctccattctggatcgcattatttggttaattggatctcgccgcagagaacgcaatgtggctaaagtgtgtcgatccattcattaatcataatatgtggactgctcgggaggagaagacgacttttaccaaccgtccaacaacaaggaatgtttaactggattaacattgcagttgcattgggtactcacaggacacctttccagtgcctcgctcgttatcagcaaagttttaatcattgtatattgagtaaggactgcgctaaagaagaagatcttcaacttaaagctgctgtcaacacctttggtatcaactggtaacttgtatcagctagtatggatggttgcactggcaatcagtgctctaataggtgaaaagtatttttgtgcctttacccttctcttgccgttgacttaattcatgtatcgttttgttctctgttattggttactttctgtggtcatgtcttacattttttttaaaattttttaatgtgctctctcatgcatgggttatagcaatcatgaatatggagttcttttttgcatccgctggaaacctaatggtggtggttgtgttgaatttgccatcccaccactaactcttgatttggtcaccatattttctgaatgaagttacatcatttgtgcaggtaggttgtaataaaactatttttatatgcaggtttagaacttattatatgtttatttgtaatccattacaatgcactgatttttagctagtattcacatgtctttacattgaaactctataggtggaggaaaactttaaaccctgatagctcaagagtgggtagatggtctctcgatgatgataaacgcctcatggttaagttgtttgggtctggaagctgaataaaattgctcagttcattcctggtcacgcacggagtcaatgcaatgaagatctttgggagtggcgacctgaagaagactccaaagtattggcgtcagtcgatgagtttgggccttgttggtccaagattgctggcatgaagattcctcattgtactcacaatatgtgcttgagaagatggagaaagctgtgtcaagataaattgccttcagttaaggcggctcaacaaataaagaaagccatttttcaatccaactttttgatagagaaacagagcgacctgctgaaccctaaaggcctaaatcctatatccagttacttaatgtcacttattcactccgaagttgatggaagtgatgagaacgcttgctcaagtcaggaagccccgaaaacattctagaatatactttttttttgacgagatagaatatactttctgaagatgccgaggcttctctaaacacaactacagcaaattcaaggataaaatcatctagaacttgttttacagaagtagatctagcttcatcttatgacatcaacaacttttctgattgttctagtggagccaggaagagaaagcaatctgttcgttgtgc

SEQ ID NO: 23670 - DNA, 2336 bp, Oryza sativa
  ref <308>: DATABASE ACCESSION NUMBER: AK073764
  ref <309>: DATABASE ENTRY DATE: 2001-12-06
gggtggcttccccctcgccgacggcgaggcgggcgaccccggtgggatcctgtgagccggcgacggcttcccccaactcccgcctcgccgcgcgccgatgttgccgtctccctgcgcgattccgccgccgccgcaatgtatttattcggtgttcgccatttctagtcaatcgtcaaagaaagccggatgcaaaatgtggacaactatctggaccagtgctcaagaaaaaaggttaaagctgagaaagaagtgttcttttttaccaaaattgacgaaggacttcttcatctgatagaaatatatggggtcactaaacttgttatgggtgctgcatcagacagacactacaaaagaaaaatgaaagcaccacaatcacaaacagcaataagtgtgatgcaaagagcacattcatactgcaatatatggtttatttgcaacgggaagctaacatgtgtcggggaggccagttgttgccctgtaaaaaggtcaaaatcagcacgcctaccttcttctgtagacagttgcaaggtggatcttcaaagtttgcttgagcctaatatagaggctaaaagattgggatgcatgtatattaatgaaatggaactaaggaaagagacagaggcaaaactctcacaagaaaaggaagagtcagaatctctcaaacatgccactatggtgctccaaaatgacctggactggctcaaatatcagttgaatgagaaagccaatagattacaagatctaaaccaacagaagcacctccttgaacaccgcatctcagagtcagactcagttgccacttatctagaagagagcatgaaggttacggaatctcgtgtccagtcactgaagttagagtacagtaaaatgaagcgagagcgagatgatgcagttaaagaggcaaggagcatgcgtatagagaaggagctgacgaattcttgtgcctatggagcaataagctctgagttctccttgatggagttggagcaggcaactcagaatttcagcaatgcacttaacatcggtcaaggtggatttggatctgtatacaaaggttctctgcgcaatacgacagtagctataaagatgcttagtactgacagcttgcatggccaatctcagttccatcaagaggttgctatactcagtagagtaaggcatccaaacttagtcacccttattggagcctgcactgaagcttcagcgcttgtttatgagctcttaccaaatggaagcctggaggaccgactcaactgtgttgacaacaccccgccactcacttggcaagtgcgcatccagatcatcacggagatttgctctgcacttatcttccttcacaagcaccggcctcacccagtggtgcatggggacctcaagccaggcaacatccttcttgatgcgaatttgcagagcaaactcagtgattttgggatttcacgcctccttctggagtccagtgtcactggaagcgacgcacactacacctccaggcctatgggaacaccggcatacatggacccagagttcttcgccacaggggagctgacgccacagtctgatacttactcttttggtgttaccatcatgcgtctcttgaccggacgggcacctctacgcctgattaggacagtgcgggaggcgctgaacgactatgacctgcagtcagtgttggaccattctgcaggtgactggccattggtgcatgtggagcagctcgcacacattgcgctgcagtgcacagagctcagcaagcagaggcgccctgatcttgagcatgatgtgtgggaggtgattgaacctatgaagaaggaagctcattcgccattgtcccagtcttttcgatctatctgtagtgccattgaaactgccaccccgtcctacttcctttgcccaatctctcaggtgaccatgagagatcctcagatggcagcggatggcttcacctatgaagctgatgctataagagattggctggataagggacatgacaggtctccagtgactaaccaaacacttgctaactgtgacactatccccaatatcgcactgcgttcggccattcaagaatatctcaagcagaacaacatgaacaagtcatttgcactatatgaacagcagcattagtggcctgtattgagtttcatctgtgcttcgactgtaatagatcgtttctgtgccagtaagaaactaaggaggtagtgttagaatagtgtttttcttttttcagttgagctgtaaacctaagttaaaacttaggaaccaattcttttcattttacctgagtttttgaaaattaagggttgggtcttctttgaactaattcatgtggaaatccc

SEQ ID NO: 23671 - DNA, 2365 bp, Oryza sativa
  ref <308>: DATABASE ACCESSION NUMBER: AK073765
  ref <309>: DATABASE ENTRY DATE: 2001-12-06
gatccctctctctctctctctctcggcggcccggcggtggcccgtcgaggtaggcgtggcggtggctggcaacggcgcgccctcccctccgccggatctagctggaggggaggtggtggaccttggggacggccgggcggtggtccggtggaggcggttgcggcggccgcgccctcccctccgccaaatccggccggagaggaggcagcggacctcggcggaggcggcacagcggctggcggcggacctcggcggaggcggctggcggcggccgtgccctcccctccgctagatctggacggaggggaggtggtggacgtcggggacggtcgggcggcggtccagcgaaggcggtggcgccagcggcgcccgatggatttgttggatgattttatagttcttttagatttttttgtgatttgtggatgattttatttctgaatatgtttcatctgtgatctgtgatatgtgatttgtgattcgtgatttgtgggggtttggggatggagtagtgacgatgattgtgagttccggctcgattcgagtcggctctttttttttttggctcgtgcaaacttataggtgccggttctattttggtataggggtcggttgtttttattggtgccgaccaataggtgccggttggaaaactggcacctatagccggttcccaagcggcacctatgatggtattttactagtgtcaggtgtttggaattttcgaagatatcacttagggtcttttttttttttctgggcatgtggttttgacaagccctatacatatctttgtataattttctcctattatatcaatataggaggcacaacttttgcccactcttaaaaaaagatattaaagaaagttccaaatgcatgcagatgcgaccggaatgcttttgaattggaacagggaccttactggaaaaggtgactcacacggccggacacctctccattttgctgtatcgatagaaccacccacgaagattccatattaccacaagatattgttctccatcatgcgccacatagacatatacactctttgtttggaccggttcctctatcctaggaaaaccaggggagatagcttgactctgactggtatgttgatggatgctgatgaatcctcagcgtatcagcctgacgacaagggttctttccccatccatgtcgctgcagcagagggtaatgatggcacgatcaacatactgctcaataagagccccaattgtgccaccttgcgcaatgcccagggaagaacatttctgcatattgctgttgagaacggaagacacacaatcataatgtttgttcgcaggagaagaaggctggcagctaaaattatgaatttgcaggacaacgatggaaacaccgccctacacttggctatacaagatggggatctgcatgctgttttatgtctattgatgaacccagtagtaaaagttgattgtctgaacaaggagggtctaacacctctagatatatcaaggaagctgataccagaagggcttcttcatggatcgcatcaacgaatttggataaagaggtcactacatcttgcgaatgcacatcatgctaacccttcccttgaccatcgtcaagagaagtgcatttgccgaacggtccgtgaggaaagagattctaaaatagttgaaaaagatgacgatgaacaagaagattcaaagacaattacggagtctacacaagttatggccgtctgctccacactcattgcaactgtggcattcgcagcagcttttacattgcctggaggttatagagcagatgatcacaccaatggcggcacgccgacattcgtcggaagctacggtttcgatgcattcgtcttggccatcacatttgcattcgtctactccttgttggctacatttagcctcgtgtattcaggaatgaccaaagttgactacagcatccgcttggagcaccttaactcggccaatagcttggtctggctatcaatcaggtgcttgctagctgcatttgcattaggtttatacgttgtcctggcaccagttgctcacaagactgccttgcttatctgcctcatgtgttccgttgggttattgcacgggcatacgtcaatgaagacacagatccgcatggccgtgctcttacagggaaggattgggtttaaggtgtggtggattttgggcaggaagatacttcgaaactttctgcactcattttggcccttcctgattatctttggttggccagcttatctgaaatggaggcaccaacagtagttagactcatatatatgaccaccaaatatgtcgtatttgtaccgctgatcaccatagattgtatttcttatagtatcccttttgcc

SEQ ID NO: 23672 - DNA, 4027 bp, Oryza sativa
  ref <308>: DATABASE ACCESSION NUMBER: AK073766
  ref <309>: DATABASE ENTRY DATE: 2001-12-06
ggctgttactctctctccccttctcttctccggttctccctctcctcctcccacctcagccgccgcttaccggcggcgccgcctgctaatctgccggcgtgagcaccggcggagatgtgttactgctacccaacctataacgcagctctcccgcgcagtgcctctgtctctagctagggttttcctcttgggggagacgacctactatggtaaggtggggagctgaagccggcgacctggtgctgtccggaggaagctggagctcgtcgccgtcggatggacgccgatgaggccgcggggagtagcaggaggatggatctgaacctctaccttggcctcccacgcgccccgcgcccgcgccgctccgacctcggctccgacctcgccctcagcaccccgatgccctcctccccgtcctcctccgcagcctccgtcgacgcgccgccgccaccgcccgagctgtcgcatcccccgtactccccctctcacgccgacctttcccctccgctgcaggaggtctactccctgtacaaccccgacgacccgcctgcttccgagacgcacctgccgccgtatgcgccgcctccggctccggtggtctcggagctccctgacgacctcgagtttggcctccaccccccgccgccgctggtgcgtgccagcgaactgctaggttgggaggaccggccgtcttcgtcgacggcatcgtcctctttcctccctgacaccgcagcccgttactggcggcttctcgagcagactggaagcagatggctccgtgcgaggcggtttaggtcggaccttccgccactcagttctgaagcttacccagctgggcgtgatgctgtcgcagtcccagtgctgcagcatgaaccgatgaatgatactgttgaacataataaggtagctgccgatggcgcggaagtaggcgcctccgaggaatcggaggagcagggcaggagcgctgccacatttgagtgtaatatatgcttcgatatggccagcgagccggtggtcacctcttgtggccatctcttctgctggccttgcttgtaccaatggctcaatgtttattccaatcacaaggaatgcccagtctgcaaaggcgaggtgactgaggcgaatattactacgatctatgggagagggaattcatgtttggatgccgagaaggctgtggaaggtgggaaacaaacaggtcctactatcccaccaagaccacatggaaatcggctcgaaagcttcaggcagcagtttcaccatttgcgaccgatctcaagaaggcttggtgaggctcatgggttattgtcatcatggaggcgccttctggaccaacagattatgaatactgcgagtaggtttgaaggtccgcctgaatcagctgtgcaggaaatggttgacactgctcacgctcagcacaccagtcgcctaagtagattggcgtcaaggatgagagcaagacggttgctgagagaagcagacaaccctaaccctcccgatggcggatccacttcccctgacagtggtttgatcagaaacaatgcatcggatccatccagaaatggtccgagctcattattaccagatggaattgactggttgcgtggacttacccttcttgggtatgaagacacggaaagatttgcatctgccatgagtgattttagaaggataactggaccaagccaatatggtgcatcggcttcatcatcgaatcctccaaatctcgagtcaacatttgacagaactcatgttgttgcagcaccttctgcagaccaagcatctaactcaagcactgctgcagtgatacagggggatgctggtatctctgagagtgcaggagaaccaagtaacgcggggtcatcaagatccctgaggaggagagggaggagcagtgccctgggttctttggatgctgatggcgggggcctccaacggaacaagaggcgaaggataaactgaacattctgtgttgtggtgttgatctaaactctgcatgccatgctcgctgattttcaactattgcatttcatttcttcgggtgatgtctcctgtgttgtagtgtaacattttttcttctcttttcattttcccccgtaggttgcactgaaatgtttatctgtttagttctcatgtagcctgtacctgtttaatttatggaaagttattgatcaagacatttttgcattcgaaaggtaatgaatggttcaactgcatttccatgacaataaattggatgctgaaatgtgcatccaacacaatggtattcttgtgcatcaaataataggcataaacattgtgtttttatttgtgtcaataagctccttcagacatatagaaaactaacaggtcaataatgtagtatattgaagttggaaggaatacccagagaatggatccatggacacaattgtcttttgttgcttgggagaaggtacatagcctgatctttagtccttgtttatcctccaatgaaaatactcacgcattgattgtttcaatagacaaggtaaactttgccatcgccgtgaattttatgatccatggaagctgtttcattgagcagtggtgggtgtaactgtgataacctttatattacttgcttgcttttaaggaatagcacactttttgtggggatgggattactcccctttttggaactacatattgaggaacggatttaacatagaaagagcttaatacatttaagtactgattgtgtgcatagaaaggggtttattatttggaacaaaattgcttagctcgtagtaataaggaagttcatagtattgaactttatatgacatgtgagttatatatatcatgtttgtctttggtcacttctattttatgaccatgtaacatttatttcatgtggaacttggcagaagagaatttgaagagatttcttctgattgatttccatttcggacaaaatacaaagctcccagaccagctgtcacaaagaggtctggttgattttccagatttgtatgcctgtctctagccgagagtaacaggtatttttctgcatctatgactggcatggatagtagattggcatatggaaacaaactcggaagggtttgggtggtgcttaggtgctcttggcagggaagggagacaactctgtgtttttgggttttcagtacatctatcctacatatcttccaaaagctcacacataagccagttaattgtttttttttttggcttgcagaattacctcaataacttccatgtaaatattttactcttttgcagtattacatgaacagattcaatgctatttttctgcagaactgccccaagatgtaaaatgaaaatgcattgagtctgttcaattagaaaacacaagatcactgtgtatactgttcaaagaatgtgctaaacatattatagaaccaaacacagttcatctcaacattgttgctttttgtcttagttgtcacaactatttaaacggatgaaacagtggaatctctaagcaaagctgtgaagagcttcagggctacctcctggcgcgaaatgaaggtgctattgcaagctgctgcagctctactgggtgaacaattactcacatgtcaccagaactctagcaatgaagcagcatattggaacctgaaaagatttggatctcaccaatgtggacaacgaggctcatgagttatgactgctatgatgatgatgatgaagatctgcttcagcaagctcatgttatggatgtactactttagtatgctttgctttgttgattgggagctgcatcagatcctgtttgactgctcaatcaattgcaccatcttactctcacctactgttggatgagggtggggctttgctgtatgctcaatgttcttgaactcttgcatatgacagtaatgatgttccgtccttaagaaattgtacttatgtagtgcagcagttgatcatccaggatttaacccaagttctaggtgatacaatataggttgtacatgacctaataaatttctaaatagaaggtaaatccatgttgattttcagg

SEQ ID NO: 23673 - DNA, 1266 bp, Oryza sativa
  ref <308>: DATABASE ACCESSION NUMBER: AK073767
  ref <309>: DATABASE ENTRY DATE: 2001-12-06
gatctcacgccaacaatcacatcatcatctcagagcaaaagcagcaggagctgaaacgagcaatggcagcatcgggcatgaagctcgccgtggcggtggcgtgcgcgctggcgctcgcgtcggcgtgccacggcctgcagctgggctactacaagcagtcgtgcccccgcgtggaggccatcgtgagggacgaggtgaagaagttcgtctacaaggacgccggcatcggcgccggactcatccgcctcgtcttccacgactgcttcgtcgagggatgtgatggctcggtgctcctggacccaactccggcgaacccgaagccggagaagctcagcccgcccaacatgcccagcctccgcggcttcgaggtgatcgacgccgccaaggacgccgtcgagaaggtctgccccggcgtggtctcgtgcgccgacatcgtcgccttcgccgcccgcgacgccgcctacttcctcagcagattcagggtcaagatcaacgtcccaggtggacgcctcgatggccgccgctccctcgactccgacgccctcaacaacctgccgccgcccaacttcaacgtgaaccagctcatcggcgcgttcgccgccaagggcctcgacgccgaggacatggtggtgctctccggcgcccacaccgtcggccgctcccactgctcctccttcgtctcggaccgcgtcgccgcgccctccgacatcaacggcggcttcgccaacttcctcaagcagaggtgcccggccaacccgacctccagcaacgacccgacggtgaaccaggacgccgtcacgcccaacgcgttcgacaaccagtactacaagaacgtggtggcgcacaaggtgctcttcgcgtcggacgcggcgctgctgacgtcgccggcgacggcgaagatggtgtcggacaacgccaacatcccggggtggtgggaggacaagttcgccaaggcgttcgtcaagatggcatccgtcggtgtcaagaccggctaccccggcgagatcaggaggcactgcagggtcgtcaactaatcatcatcgggtcagtccgactaatgcaaacccatcgatctatacgttcattcgtttgttttccaggactttgttcttctgatcgattcgacatgacgtactacatttcttggttcttttggccgttggtacggcttgcattatccctctaaaaccaccatgacaatgaactgtacttgaataaattcatctctcataataattaatacaagcctcatctcttttttattgg

SEQ ID NO: 23674 - DNA, 2016 bp, Oryza sativa
  ref <308>: DATABASE ACCESSION NUMBER: AK073768
  ref <309>: DATABASE ENTRY DATE: 2001-12-06
gacctcgcgcccgccgcctccaccgctcgagccaccgaaccctagaaatcccgccgccgccgcccgcccactacgtcgcgccgatggcggagcacgaggagcagccctacgagggcaacgggaacggcggcgacccggcccccgcctccgcgtacgctgagtaccctgcgcccgaggggtccccgcccgccgccgccgccaagcccaccggcttctccgatggcgccaccgacggcggccgttctcagcacgagacacagccacatgatggcaggtcctcaaagtctagagagagggaaagagaacgggacaaggacaaggaacgcgacagagaccgtgatagagaccgaagggaccgcgaccgtggtgacaaggacagggacagtgatcgccacagggagcaccgcgatagaagcgaaagaagggaacaccacgatcgtgaacgttctgatgaccgtgatcgacgccggggccatgattctgaaaggagaagagaccgtgacagagatggtcaccgcaggcatcgatctcgctcccgctccccttcaaagggtcgtgatcgcagatctagatctcgctcacgctctcgatctagcaagcgcgtgagtggatttgaccagggaccacaagcagccattcctgcgcttgctgctggagcagccccaggtcaggtacctgttgtggcccctgctatttctgggatgcttccgaacatgttcaatttgactcaaaccccgttcactccgcttgttattcagccacaagctatgacacaacaggctactcgacatgctaggcgtgtttatgttggtggacttcctccaactgctaatgagcatactgttgctgtatacttcaatcaagttatggctgctgttggtggaaatacagctggtccaggtgatgctgttcttaatgtctacataaaccatgataagaaatttgcatttgtggagatgaggtctgtggaggaagcaagcaatgcaatggccttggatggtataatgtttgagggagcacctgtgaaggttagaaggccaacagactataatccttccctagcagctgcattgggtccaagccagccaaaccccaacctcaatcttgctgctgttggcttaacacctggctcagctggaggtttagaaggtcctgaccgcatttttgtgggtgggctgccctattacttcacagaagctcaagtcagggagttgctcgaatcctttggacctctgcgtggttttgatcttgtgaaggacagagaaactggaaactcgaagggctatgctttctgtgtataccaggatcttaatgtcacggacattgcctgtgctgctcttaatggtatcaagatgggagacaagaccctcactgttaggcgagctaaccaaggagcttctcaacctaggccagagcaagaaagcatgctcctgcatgtacaacaacaggcgcaaatgcagaaactcatgttccaagttggagggggagcactgcctacaaaggtggtatgcctgacccaagtggtttcaccagatgaactgagggatgatgaggagtatgaggacatcgtgcaagacatgagggaagaagggtgcagatacggtaacctggtgaaagttgtgatcccgcgacctgatcccagcggtgctcctgttgctggagttgggagggtgtttttggaatttgcagatgtagagagctcgaccaaggcgaagaatgggatgcacgggaggaagtttgccaacaaccaggtggtggctgtcttctaccctgaggacaagttcgctgaagggcaatacgacggttgaacatcgaagtcgccctcttattgtttctaacgcctataaggcggaatctatttacgtttaccttagttttgcaatttttacatctagttttttttttctgtgttagttgaaattttattagtagtccagagattggtgcagaatcatgtgtactttgggtatgttcttatggttctgacttgaaaagcaatagtggctggttgtgcct

SEQ ID NO: 23675 - DNA, 3758 bp, Oryza sativa
  ref <308>: DATABASE ACCESSION NUMBER: AK073769
  ref <309>: DATABASE ENTRY DATE: 2001-12-06
gggcggactgcggttttaccccacggagaaaaaggccgcccctcccgccccagccacagcgacgaaccaccgccccggaggccgccggcgtcgagctcccctcgcccacagcgtgctccaccgagttccccccccctcgtctcctccaccagatcggtgatctgatccccgcctccaccatacagccagatccgtcgccccgccgcccccctccgacctacccgtcccgaggcggcggggagtggatggcggcgacggtggaggagcagatggtggtcaaggccatccgggaggagtgcccatgggagtcgctccccaagcgcctccagtccacgctccacaccaaggaggaatggcaccgcaggattgtggattactgcatccgaaaacgattacaatggaatacttgttttgctcgtagagtgtgcagggaaggggagtactatgaggaaatgatgaaatacctccggaggaatcttgcattatacccgtatcatcttgcagactatatctgccgagtttcgaggatctcaccatttagatattattgtgacatcttgtttgaagctatgaagaatgggcaaccatatgacagtattccaaacttcactgctgctgatgccttgaggcttactggcgttggaagaaatgagttcattgatattatgaacaaatgcagatcaaagaaactaatgtggaagctgaataagtcaattgcaaaagaattattgcctacacagcctgttgacttcccaatcgatccttggtggggagtttgtcttgtgaacttcactatagaagagtttaagaaactttcagaggaagagactgcaacaatagacaaaatatgcaaagaagaagccaattcctatgttctatttgacccaaaggtcatagatggcctttataaaagaggtttagtgtattttgatgtgcctgtttaccctgacgaccgctttaaagtttccaggctcgaaggttttgtttctaacaaggatcaatcatatgaagacccaatcgaagagctactttatgctgtatttgttgtgtcaagtgccaatgctactgtagctgaattggctgcaactctactagctgacctttatcagctgcaagcagctgcgtcgtttgcttgtcgactgggctgggctgtaaaacttatggatgctgactctgtacttgaagatgcacccacttttcccagtaacattctgagtgatgatgaagaaggttcaaatgcaagcatcaattcagaaaagtctggccaacagttgctcagtgttgatgctggaccaaggaaaatatctggaactgcccatgtagcgttggttgtggatgcgaatgttacttcgtacttgatgatgggctcattgtcaccaggtttaaaatctcatgctgtcacactatacgaagctggaaaattaggtgattcttgcattgcagaactatgcagtgatctggctagtttggaagggaagaagtttgagggtgtgcttgaggagtttgctaatcatgcattcagtcttcgatgcttcctggagtgtttacaatctggtggagtttctaccaatgtgaatattgataaagctggtgaagcaaagcttacaacaagctccttgcaagataatgttactgcccatttgaccaagataaacattgaggacactgatgaaatgccccagcagaagcactctggtttaaatagtagtgatgggaaaatgttgacttcatcagcgactttattggaaagtggagaaggcatggagggaaatgatgttgagggtagtggcaccactgaactagatggctcaactgacatcaatgtggttaagactaaaaggaagtacagagttgatatcctccgatgtgagagcttagcttcacttccaccagcaacactggaacggttgtttctccgggactatgacatcattgtgtctatggttcctcttccttcttcatcagttcttcctggttcgtcaggcccaattcattttggtccaccctcatactcttccatgacaccttggatgaagctggttttgtatacagcaggggattgtggaccattatctgctgttttcatgaaaggacaacgcattagattgcttcctaaacctttagccggttgtgagaaggcactgatatggtcttgggatagctctgtggtaggtgggctaggagggaagtttgaagggaacttagtcaagggcaacctgttgttgcattgcttgaactcaatgcttaaacaatcagctgttatggtgcaaccacttagtgtaaatgatcttaatgcatcaggaaaccttgtcacagtggatatccctttgcccctgaagagtgatgatcagtcaattgcatctgtgatagctcaaactaatttgccacaagaacaggtcttaaatttggcctctgtattaaaagacctgtccagtaaatttgagttgagtacacttggctaccttcggttattaagacttcataggcttactgaatcggatgaatcacacctagaaaatggaagttaccagtgggtgcctttgagcttggagtttggaatccccttgttcagtccaaaattatgtgagcggatttgcgaaagggtggtcgaatcctgtatacttcaaaaagaggatctcgctgaacattatgatgtgatgcaaactgtaaggcggcggctaagagaactttgcagtgaatatcaggcaactggtccagttgctaagttgttcaacaagcgaggaagctcaaaggatttgccccgtgttttaatcaacaccatcagtggcagatggaatccagttaatgatccttcagcaccaagtgaacatgagaggctgaaacttgctggacggcagagatgccaaacagaagtcgtgggatttgatgggacctttatcaggtcatatgcacttcctcctgagcacgatgaggctggcaccaaatctttatctgaagaacaatcatcagctaacgatggaaaaccagacacagaagatgcagatagcaaggatgtactcttaccaggtgtaaacctcatatttgatggagctgaattgcatccattcgacatcagtgcttgccttcaagcacgtcaacctctctggctcatagctgaggcgtcagctgcttcatcgaccatgatataagagtccatccattctcggttttatgttggtacgtacatatctgtttgctgcaaggcatgcgtcccgaaacgggtgatacgtcagtctgaggactctttgagggaagattttgctgttcaacgggctgctgtttttctatgcactctggccaaatgatgcttttacaggaaatgacaaattgtaacttatcaaccgagtctggcagagcgcattgctgaggctatttacatcattacatgcatcatatgtattttttatttttttggccaaccgattgtggaatttttttccagtcatcttgaacgaagaccttgatgctcaaaggtgcttacgagttctttcttgtgtaagatttgcctgtgatatacatgagtgttgtatagtactacgtagattccctggtctacttgttcgaatgaaaattttagctaggaaggatttgtcgagagtggatgtatttaacatatgggtattttcccaccaatgcgtgcactcatatttcacctccatatctcatttctgtagtcaagagagtcaaagacgtgcaatgtcgatgaaacacacaaatggcgcatatcacagttccatacttatgccttgtttgattcg

SEQ ID NO: 23676 - DNA, 1486 bp, Oryza sativa
  ref <308>: DATABASE ACCESSION NUMBER: AK073770
  ref <309>: DATABASE ENTRY DATE: 2001-12-06
gtgactctcctctttataacccgtctcccttctcatctttttctccacagtcgcctcctcccctgccaaaccagtctcccccaaatctcctttgcgtcctctcgattcctcagcgaccatgtcggcctactgcggcaagtacaaggacgagctcatcaagaatgctgcctacattggcactcctggcaagggtatccttgctgcagatgagtccactggcaccattggcaagcgctttgccagcatcaatgtcgagaacgttgaggagaaccgccgctctctccgcgagctgctcttcaccacccctggtgccctccagcacctaagtggtgtgatcctcttcgaggagaccctgtaccagaagaccaaggacggcaagcccttcgtcgatgtcctcaaggagggtggtgtcctccctggcatcaaggttgacaagggtaccgttgaggttgccggcaccaacaaagagaccaccacccagggccacgatgatcttggcaagcgttgcgccaagtactacgaggccggtgcccgcttcgccaagtggcgtgctgtcctcaagattggccccaacgagccatcgcagctttccattgacctgaatgctcagggtcttgctcgctatgccatcatctgccaggagaacgggctggtgccgattgtcgagcctgagatccttgtcgatggctctcatgacattgagcgctgtgcctatgtcaccgagaaggtcctcgctgcctgctacaaggccctcaacgaacaccatgtcctcctggagggttccctcctgaagcccaacatggtcaccccaggatctgaatccaagaaggtttcccctcagctcatcgccgagtacaccgtccgcgcccctccagaggactgtccctgctgccgtgcctgccattgtcttcctctctggtggacagagcgaggaggaggcgaccgtgaacctcaacgccatgaacaagctcagcaccaagaagccgtgggctctgtccttctccttcggccgtgctctccagcagagcacgctcaaggcctggggcggcaagacggagaacgtggtgaaggcgcagaaggccttcatcaccaggtgcaaggccaactctgaggctacccttggtacataccagggtgatgctgtgctcggcgagggtgcctctgagagccttcacgtcaaggactacaagtactgatctgcttctggtggtggctgaagatccgattggacatcctccgtatgcatatttagggttctgagtgtggtttggctatcaagcgtccaatcttacgggtatcaaaaacttttgtcgcaataatctgaacctgtgctttttaataattaatacctgtcatcggtagtagttttttggtattcctgtaatcaaatgctgcgtatggtaaattggagcagcggctttaattccatgctatctttttattgttattttctgctgtactcctatgttaattaaaccttttacct

SEQ ID NO: 23677 - DNA, 2117 bp, Oryza sativa
  ref <308>: DATABASE ACCESSION NUMBER: AK073771
  ref <309>: DATABASE ENTRY DATE: 2001-12-06
gactgctcccatgccgtcctcccttgctctccctgccgctgcctcctccccctccctcccctgctatgatggctcgcggcccgagcctcgccgcgccgcaactgtccgcccaccgatgcctctcgctggatctggcgagctcatcgggggaagggagaaggagcctggggaaacgccggcggcggccgaaagcagtgcggtggcatgagctagggctggaaatcgatgggacgcactaatctggtcgcagcgcaacacccatttgtgagatcagagcttgaggttgacggcgaggtggttgatcccggctgaggaaattgggcggtccggacggatgtgtagaggtaattctccaaagtaaacctcccctcaagtcccagccacctgattgttcttgctgccatcctcaagagcaatggatctagcgagtggatctgcctggaacctttttgttcttgatggcattctgagagcaatgcatccagcgagtggagctttgcttgcattcatttgtgctttgacgccactctgctggtatttagtgaaaaaaaaagacatgtatactgtcttccttttcccctacctgttatggtttgtgcctgaaatggagcaatcgatctggtcaaaaatgttttaccccccgtaatgatcattctgctgataacactgggtttcagcatggttaggatggatcaatttgttgcagaacagcagatccatcaccaagcagtccattgccatctccaccctgggttacttcattcttagtagcatgttgccatcgtcatcatgggctccttctttcttagtgcatgtagattggaaacccgttgacatgctcgcaacgcagaaaacttagcacctctggctcaaattagaatgggaaaaggtggtggctgctggactatcaattgactggcttgctatatttcttgcagttctgtataacccagtggtaactttaggttgcacaacttgaaactatctagcaatcaaatttagtggctttttacgatttactgtcaagtgatagagactcccattgtctgaccttgtactgaatatatatgtctctttagagctgcaaatagggatagcatttgtttttgctagatgttaatcatagatttgcatggtatgcaaattgtggttaacatcttctcttgaaactaaattgtagctgtggcttttcttccttgccattcgtgttatggattgcacgaatgagtgctgtagattttttttttcgtgccttgccattcatgttaaggattgcatgaatgactgcacggctttttattctttctgttgttgatgcactaaccttagtttccttttggcaatgattggttcattagcttcaaagggtttaggtggtatgacctgctgggaaaaagatgaaatttgtcactagcaaatacctaaggtaaactgtgatgacttctttctataggatgcaaatttgggaggttgtgttcatggatacaaatttttatttttaactaccgatccaggcaaaactaatatggtttgccaccctctatggacaggtattaagttgtggtgcagtcagatttgtagctaatcaggggatgagcgacatttttctgaatcagattcattcattgcaatataagctttaaagggcaatataagcaatttcgtgctagctgatgattagtggatggtagcaatgtagtttaatttcagaaagaaaatgagtgatgcatagggaaggaaaccttttgttcaaaacaaacttatatcattagatttctcaagaccgtgatgttttgtgttttgctattcattgagcattttagcttaaggcctaattttaataacccaattatgaccgactttgcaattttgcattattagttttattgttgcaactatattgggtaagtaatcgccattatgttacacttctgcttggattggttctcatgaccagtggcaaagcagcagcgaagatgcggcaacgagaccaacaggggcgagattggtggtgggcatcgtatattattggacatgcactttatataccgtatatatatatggttgtacacaacaggttctttatgagtagagataatgcaattaattgtcagtgt

SEQ ID NO: 23678 - DNA, 1634 bp, Oryza sativa
  ref <308>: DATABASE ACCESSION NUMBER: AK073772
  ref <309>: DATABASE ENTRY DATE: 2001-12-06
ggctgggaagcagttgacaatctcggcggaaagcggcggcggcggcgatggcggcggctgcgggtccgatggatctggtggaggcggaggcggaggagcagccgccggacgaggacggcgacgaggaggggtacgtcgaggcggaccccgcaggccgcttcatccggtatgatgagatcgtggggtcaggggccgtcaaaacggtctacaaagccttcgataagctggagggtgtcgaggtagcatggagccaatcccggatcgatgactctgtcatggggtcctctaagaagatgaagcaactaaacacagagattcaacttttgaagacactcaagcataagaacattgagaaaatgtttgcttcatgggttgatggggagaagaagactgttaacataatcacagagttgttcacatccgggagcttgacacagtaccgcagaaagcacaagaaagtgaatatgaaggctatgaaacgatgggcaatacagatattaacagggctagaatatctgcacagtcagaagccagcaattatacacagggatttaaaatgtgacaatatattcataaatggaaatcatgggaaagtgaagattggtgattttggtttggcaacattcatgcagcaacagaaaaaaagtataaaaggcaccttagaatttatggcaccagagctgttaactgggcattacaatgaattggttgatatatattcatttgggatgtgcatgcttgaaatggtgacatgcgaatacccatacagtgaatgtcaaggcatggcccatatattcaaaaagattgatgagggtaagaaaccagctgcgttctacaaaattaaagatgcagaagtaagatctttcatagagaactgtttagctccagtagagaacagaatgtctgcaacagagctgttgaaaagctctttcctccaggatgatgatcttatctcagtctctctggtcaagaatatgtctgaagatgggcagcagcctgtcagttgcatgcttcgtaagggcgagtttctgctgacaggaaatgttgatgtagccagccatgttgatttatggctaagatttcctgatcccagcggttgtttcaagagtgttgaattcccattcaatttgactgaagatacaagtctttctgtggctgtggaaatggttgagcaatttggactgacacaagacagcagaccgatcatcgcgcagttgatcgatgcattcttggtcatcctgattcctgaatggacaccgtgtgtcgccatccgtcaggtggtttctgagggtgcaaacggcttgacaattgagaagcgctgaccgagagtgattctgcttccccaaccgctgctactaactaatagtcatagttggcttcgctggttatgtatccttatagtattttcttttagatggagtggaccttatgctttagccacctgtgggcactcatattacaatgccctcgagatgtgctgctgagcatggagttcctccggtggtgatgatgatgaaagttaggtctagttcagataatttatttgctaggaaggagcagcaaaaatgagagtaatcagtcggaaatgttgggttttttttcatctttaatgcaattgctgaattagttgtggc

SEQ ID NO: 23679 - DNA, 2282 bp, Oryza sativa
  ref <308>: DATABASE ACCESSION NUMBER: AK073773
  ref <309>: DATABASE ENTRY DATE: 2001-12-06
ggagctcacaaaaatcgctcgcccccctccacctccacctcgctcccgccgcctccaccacccatctccgccctcgtccgctcgccggcaagccgctgctgctgcagctgcttgctcgtctcgtctccccatccctgggcggggcgcggtgggaggggggcgggggactcgccaccgctctccgttccgtgggtgtctctgcactctgctttgctcctcttcttccccccctctggttccacccccgcgcggcggagcgcgggggaagggatccacagatgctgttctgctgccctgcttctcctccccctccaatccaagcttcttctctcccgccgttccggacgaacagcttgtctccgaccgtacgtggcgggaatgccgcgccacgacgccctctcgcgcggtctttctcggccaagaaccggtccccgcgagcgcggaaccgccacgcggcagcaggtgatggtggtggttatgggtctccggagcaagaggggcgtggggaatcgtccctcccgaacgccgaggcgctcgcgtcctcgctgcgtgattgcggcggcgcggacggcgtccggcgggtgcacgcggttgctgtccggtcgctcgacagcctggggacgttcgtcgccaacaatttgatcagcgcgtatgccaggttcgacgaggtttcggatgccagggaggtgttcgacgaaatgccggagaggagtgttgtgtcgtggacggcgatgatgaatgtgtatctgaaactaggacactacggcgaggttgtgaggctcttctttgatatggtgggaagcggagtgcaaggtaacagcttgacttttgtttgcttgctgaaatcatgcggcgagcgttgcgatgctaagctagggcagcaggtccactgttgtattgtcaaaggtgggtggagcaatgtgatagtggacagtgctattgcacacttctatgctcaatgcggtgatgttgctagtgcttcagccatatttgataagatggcctatcgtgatgtcatctcatggacaacaatgatcacagcttatgtgcagcatgggcatgggggccaagctcttagaatgttttcagaaatggtgtcagaaggatttcgaccaaatgagttcactgtgtgcagtgtcctcaaggcttgtgcagaagagaaagctgtgagatttgggaagcagctgcattgtgctgttttgaagaaaatgtacaaaaatgacatccatatcggcagtgcccttgtcaccatgtatgctagatgcggtgaagtttttgatgctcaggcagtgtttgatatgatgccacgaagaaacactattacatggacttctatgatctctggctatgcacaaagtggccatggagaaaaggctatcttgttgttcagaaagatgaagatgcgccgagtatttgttaacaacctcaccattgttggtctcctaagtgcctgtggctccttacagtcgccttatcttggaaaggaattgcatgctcagataataaagaattctatggaagaaaatcttcaaattgggagtacacttgtttggttctactgtaaatgtggagagtacacatatgctgcaagaattcttgaagcgatgcctgaccgtgatgctatctcatggactgctctgatttccggctacaataatctaggtcataatgttgaagcacttaaatcattagatgatatgctatgggatggtgtaaaaccaaatacatacacttactcctcggctctgaaagcttgtgcaaaattggaggctctgcaatatggaaggaagatccatggttttgttaacaagactcaagatttctccaatgtgtttgtgggaagctcacttatcgatatgtacatgaggtgtggaaaagtcgacgaagcccgaagtgtctttgatgccatgccagaacataaccttgtgacatggaaagtgattattacaggatttgctcagaatggcctctgtgaagaggctttgaagtacatgtacctaatgcaacaagaagggcatgaggttgatgattttgtgctctcaacagttctgacatcatgtggagatcttcaatggaaatccatctccttctctgactcagttgctggttcagtttcagctaggcagtagattagttctcccgtggcaaagaagctagcacttctgtacagttacagagatttgttattgtgcaagatcagaagacatgtagcacaaaaaggtaactcaaggagtgcatacgtgtatatgtacttttaagagtaccactaccttcactaaccg

SEQ ID NO: 23680 - DNA, 2424 bp, Oryza sativa
  ref <308>: DATABASE ACCESSION NUMBER: AK073774
  ref <309>: DATABASE ENTRY DATE: 2001-12-06
gagggaagccgtcggcagagactccagcaaacggacggcgccgcagcctccgccaggcggcagtgggagcaggcagcagctgcaaggtggcggcctcaagcggaggcgagcagtctcagggaaaccaagctcgccgccgtcgtccccattcttccgtcgcagatttcgctgtgactggttccttgtgattgaatccataggaaccgaacccaaatcttggaattgtttttgcagtgcaagtctaatcctcgggaggaaaaaaaaagaaagcgtaataagtcctgcaccaagcaagcaatctccaaagtgcaagctttctcttcttcctgcgtctggatctcgctcaggtttcccctctgcctgccactccccatggctctggattcaggtcgctcttcagcattcactaccgtattcacttcttgaaggccaatttctggttcctcaccattgtatccaataaaggtacttgatgatccgaagatgtcgtcaaactccactctaacagactctcttcatgagagaacaattgtttttggcctgaaactttgggttgtaattgggatatctgttggagcatccctacttggtgttcttctcatccttattgtatgcctcaccatacaaacttggatcaaacggtcacgtaggacattcaaggaaattccaattacccaaataccttctgcatccaaagatatcaaggaagtgagggcagtggaggaatttttgcccaatgatttcgttgtacatgatggacttctactcgccattcagtatgaacctgttgaaccagtggataaagatgtgaatcagtttgctcaagaggacaagacgatacaaggagaagataacagttcttctgttcctcttcattatgtggacaactatgatggaattcaatctgtttccacatgtgaacagtcttcctcgcatgctcccgccgactctgttcccttgccaggcttacctgagttctcttaccttggctggggtcattggttcactctcagggatctggaacttgcaaccaactgtttttcaaaggataatgtaattggtgagggtgggtatggtgttgtctaccgtggcagattatcaaatggcaccccagtggctgtcaaaaaaatccttaacaatctaggacaagctgagagagaattcagagtggaagttgaagcaattggtcatgtccgacacaagaatttggttcgccttttggggtactgtgttgaaggcactcaaaggatgcttgtgtatgagtatgtcaacaatgggaatcttgaaagttggttacatggagagttatcccaatatagttctctcacttggctagcgcgcatgaaaattcttttgggtactgcaaaggcccttgcttacttacatgaggcaattgaaccaaaagttgtgcatcgtgatatcaaggccagtaatatattgattgatgatgagtttaacgccaaaatatctgactttggtttggccaagatgctaggtgctggtaaaagtcatattgctactcgagttatgggtacttttggctatgttgcgcccgagtatgctaacagtggacttttgaatgaaaagagtgatgtctacagttttggggtggttctgctggaagctattacaggtagagatcccattgactatgatcgccctccagatgaggtaaacctagttgactggcttaaaatgatggttgccaacagacgatcagaagaagttgttgatccaaacctggagagaagaccatcgacaaaggagctcaaacgtgcccttttgacagctctgaggtgcatcgatttgaattctgagaagagaccaaggatggaccaggtggtccggatgttggactctaatgaacccattcctcaagaggaaagaagacaacgacagaaccacatctctaataattcagaaaccgagccattaagaggcaagagcagcagcggcaagagtgatgcccctgaaaatgagatgaggccacctcggtataagaatcgatcatttccccccaagtgaaaagtgaaaagcatactagagtggaagttatggagttacctgcgatgctctcaatacataatgaattggtcaattgttttgtttctcttttattatttctcttcacctgatcaatttttttgttccctgggaggctgggggagcggccattgctgttacacatatttgtatatttcttgaaacatgtacagtgctggtgtgtgatacatgtacagtagtttgtgtgtgatagatagttgaaggatgcacatgagagcataaaagctattatttagaagctagtggctggtatggttgctggtgtgaggaagtgcatgaagaaaccaatgaaataactttttcatattttctgtatactctaagagtataaagaggcaaatgaaagaaaaattgactttc

SEQ ID NO: 23681 - DNA, 917 bp, Oryza sativa
  ref <308>: DATABASE ACCESSION NUMBER: AK073775
  ref <309>: DATABASE ENTRY DATE: 2001-12-06
gtgactcgctccctcctcccctccgccatcgcctcgctcgcgcagcaatccgcgacaaatccaccagccaatcgcggcatcgcgcccatcccttcccctatactgcaaatccgcttccccgagatggaatcctgtccttcggtgaagaacattcttgtgctggattccgaagggaagcgcgtggcggtgaagtactacagcgatgactggccctctttgtcctcgaagcaagctttcgagaagtcggtctttgctaaaacccagaaaacgagcgctagaacagaagctgagatagtaatgtttgacagttacttcgttgtatacaagttcatccaagatctacacttttttgtaactggaggtgatgaagagaatgagctcattttagcatctgttcttcagggcttctctgaagctattgattaccttctcagaaacaaagtgcacagaagggctgcgcttgaaaacttggatcttatcttcttatgccttgacgaagttgttgatggagggattgttctggaaacagatgcaaaggcgattcttgaaaaggtatcaggtcatggattggaaggatccgggtctctcactgagcagaagttaagcagtgccctagcaacggcaagagaacactttgcgagatctattttcagctgatggcgtgtcatccttcaggttgacgatgagcaagcctcagatagtgtctctgttagcagatcagtactcccagtttgcaatgtcctttgaacatttgccacgggttagtggtaggtgcagcttaactggcgatcattgtcatcctaagaaggttgtggtcggcacacttgttactcttgtggtttcatgtcgatcttggctgtaatcgagcacagtaaccatgtagcaacatgtttctgctcaaagacgagccagtttcc

SEQ ID NO: 23682 - DNA, 854 bp, Oryza sativa
  ref <308>: DATABASE ACCESSION NUMBER: AK073776
  ref <309>: DATABASE ENTRY DATE: 2001-12-06
gctccacccccacgccaccatcaccaccaccaccaccatcgcactcccaactcccaagccgcagcgctagggtttcccccaaccaccaccaccaccgcccccgctaaaaccccgatccccgcctccgccaccgccgccgatgtcgacccccgccgcgggcgagaagccggcgctgaggaagccggtgttcaccaaggtcgaccagctcaagccggtcaccagcggccacaccctcaccgtcaaggtcgtcagcgccacccccgtcccgggccgcgcgcggccgggcgtcgccgccccgtcccgccccccgcgcatcgcggagtgcctcatcggcgacgagaccggcgccatcgtcttcaccgcccgcaacgagcaagttgacttgttgaagcctggtgctacagtgatcatgcgcaatgccaaaatcgacatgttcaaaggctcaatgaggcttgcggtggacaagtgggggcgtatagaggctacagaacctgccagctttactgttaaggaggacaacaacttgtcactagtagagtatgagttggttaacgtgaccgagtaattgtcgttgattcgccccttcccctgccataacaaggaagcatgatgactgagaatattatgaaccctttgcctaagcatgtttatttggtatggtggtagtagataagatcaaagatcgaactgaatttatccatggtatgcgtctactaagtggtgattcctcttgttacctgttgctgcctgtattgctgctgtgatggaacaagctcagcagggtgacatgttgctagagtaccagttatcaatggagttaattgttgcaaatcctacattggtgaatattgccg

SEQ ID NO: 23683 - DNA, 2038 bp, Oryza sativa
  ref <308>: DATABASE ACCESSION NUMBER: AK073777
  ref <309>: DATABASE ENTRY DATE: 2001-12-06
gatgtgaaagttagcgaatttgcccggcgaaaatggcagcacttggccgcgcgagctcgtcggcgccggtgcttgccgccgccgccgccgtgctcctctcgctctgcctcgccgcgctctcggaagagcaagagcaactggagaacctgcggttcgtgcggcacgcgcaggacgcgccgctggtgtcgagctacaactacatcgtcatcggcggcggcacggcggggtgcccgctggcggcgacgctgtcggagcactcgcgcgtgctgctgctggagcgcggcggcctgccgtacgccaacatgtcgagcgagcagcacttcacggacgcgctggccgacacgtcgccggcgtcgccggcgcagcggttcatctcggaggacggcgtggtgaacgcccgggcgcgggtgctcggcggcgggagctgcctcaacgccgggttctacacgcgggcgagcaacgagtacgtgcgcgcctccgggtgggacgcgcggctggtgaactcgtcgtaccggtgggtggagcgctcgctggtgttccgccccgacgtgccgccgtggcaggcggcgctccgcgacgcgctgctcgaggtcggcgtcacgcccgacaacggcttcaccttcgaccacgtcaccggcagcaagatcggcggcaccatcttcgacaactccggccagcgccacaccgccgccgacttcctccgccacgcccgcccccgcggcctcaccgtcctcctctacgccaccgtctcccgtatcctcttcaaaagccaagacggggtgccgtacccggtggcgtacggggtggtgttctcggacccgctgggggtgcagcaccgggtgtacctccgcgacggcgacaagaacgaggtgatcgtgtcggcggggacgctggggagcccgcagctgctgatgctgagcggcgtcgggccgcaggcgcacctggaggcgcacggcatcgaggtgatcgtggaccaacccatggtcgggcagggcgtcgccgacaacccgatgaactcggtgttcatcccgtcgccggtgccggtggagctctccctggtgcaggtcgtcggcatcacccgctccggcagcttcatcgagggggtgagcgggtcggagttcggcatgccggtgtcggacggcgcgctccggtgggcgcgcagcttcgggatgctgtcgccgcagacggggcagctcggcacgctgccgccgaagcagaggacgccggaggcgctgcagcgggcggcggaggcgatgatgcggctggacaggagggcgttccggggaggcttcatcctggagaagatcctcgggccggtgtcctccggccacgtcgagctgcgaaccaccgacccgagggcgaacccgtcggtgacgttcaactacttccgcgaggcagaggatctggagcggtgcgtccatggcatcgagacgatcgagcgggtgatccagtcgcgggccttctccaacttcacctacgccaacgcctccgtcgagtccatcttcaccgattccgccaacttccccgtcaacctgctgccgcgccatgtcaacgactcgcgctcgccggagcagtactgcatggacaccgtcatgaccatctggcactaccacggcggctgccatgtcggcgccgtcgtcgacgacgattaccgggtgttcggggtgcaggggctcagggtgatcgacagctccaccttcaagtactcccccggcaccaaccctcaggccaccgtcatgatgctcggcaggtatatgggtgtgaagattcagtccgagagatggaagaaatgatgaacaaaagataatttcgtttcaggagcaaaaaaatgcatgtaattcaaggaaaagaaaatgttcaactgtctttagagtttagagtagattttatttgcacccacttaatttttactcttctctagacataggttcagtatctgcttgttgattatgtaaccttgaagaagcattgcaaaaacaaagcggaaacttatgttaccaagggcatgacgaagaaataaatggattagatttcattg

SEQ ID NO: 23684 - DNA, 1535 bp, Oryza sativa
  ref <308>: DATABASE ACCESSION NUMBER: AK099377
  ref <309>: DATABASE ENTRY DATE: 2002-08-28
gtcgtcgccgacgactctccgactcccactccacctccaatcgaaccccacccgccgccgccgccggaggcgtctacccctgctatcctcccccgcgcgccgccgatcgaatccgcaagccgcgatggattcccttcttgccaactacgcctcttccgacgacgaggccgacgaaaccctacccactcctcccgccgccgccgcggcccgaccgaagccgccctccggtggcggcatcttctcgtcgctcccgcagcccaagtcggcgctcctcttctcctccctcccggcgcccaaatccgggcccgtcttctccgccatcccgcctcccaagtcctcctccgggaaccctaagcgggtcgtgcagttccgcccgcctccgatccgccagcccacgggcgagagctccgacgaggaggacgacgacgccgagaagcgccgccctagcgaggccgagccgcgcccgcccgtatccgcgggcacggggcctgtctcttcgttcctcccgccgcccaagcgctccctcgggctcggcggtggcggcgccgccaggaggtcggccatagacaccgctgcgccggagaggtcgaatgttgtcgccgctggtccatcgtcctcggccgtcaacgcaattgcccccgaaaggcctgatactacctctgccgatgatgaagacgatgaatcgaatgggagcagcgatgacgatgagatgcctgtgccggaggagcagcaggagcagctcgctgttgattccgaagctggacagcagcagcagaatcagcagcaaagctatgatgctggagttgggagcagtaatggacaggaaggctacgcatgggatccaaattactacgccaattacggtgcaaactatggctgggatccgagcggcaatgtgaactatgggactgaagcgcagtatgcggcatatggaggagagcacggtggagtgtatggaaatacatacggagtagaacatggtgatggatatgggcattcgacggaaatggcatatggagggggctatgctggtgggtacgaacataatgcggctgcagcgacagcaccgccaatccagcagccaatactgccaccggaggttggtaggattggagggaagagaggtaggagcgatatgccggcagagattttagaggttaaccaggcagagctgatgaagaaccgaccgagggaggataagtccaagctcactgggatggccttcggccctagttaccagcccgccccttcagcaaaaggaaagccctccaagctgcacaaaagaaagcaccagattggttctctattctatgacatgaagcaaaaggagatggagcttgccgagaggcgttccaagggattcctcacaaaagcagagactcaagcaaagtatggatggtgagcatggtacgtcgggcataggatggaattgaacagtgtatttcggttttgttgtctaattattttgttgtaaattgttcttgataatataaactggaatttaaaactagtcgttggaagcaaccttttgcacc

SEQ ID NO: 23685 - DNA, 1313 bp, Oryza sativa
  ref <308>: DATABASE ACCESSION NUMBER: AK073778
  ref <309>: DATABASE ENTRY DATE: 2001-12-06
tggcgtaaacccaccaccaccaccatctccagcctcgccgccgccgcacccgcctccaccatggcggccgtctcgaggggcctcctcgcgcgcctccgccacctctccatcgcgggcccacgcctgcccccttgctgccgccccttctccgccgagcccctcgtctcccaccccgacgacgacgacgccgccgccgggggcggcggcggcggcggcgagggatcgggagggggacggatcatagaggctcgggcgggggtgatgggcccggactcgcggcggaccggcgtgatcggcgtcaagtgcggcatgtcggcgatgtgggacaagtggggcgccaaggtgcccatcaccgtcctctgggtcgacgacaacgtcgtctgccaggtcaagaccgccgagaaggaggggttcttcgcgcttcagcttggagcaggccaaaagaaggaaaaacatctaacaaaacctgaagtgggccacttcagagcacaaggagtccctctaaagagaaaactaagggagtttcctgttactgaagatgcacttattcctcttggaacaacaatcacagttcgccattttgtgcccggacaatttgtggatgttactggaatcacaaagggcaaaggttttgcgggtggtatgaaaagacatggttttagtgggatgcctgcatcacatggtgcatctctatcacatcggagcatcggttctactggtcaaagagatgctcctggaagggtcttcaaaaacagaaagatgcctggacgtatgggtggtgtacagcgcaccgtgaaaaatgtatgggtttatcaaatagaccctgccaggaacttattgtatctgaaaggccaggttcctggtcctcaaggcagctttgtttttgttaaggactcaatatacaagaaacccgacatagctaagctgcctttcccaacatatttctcacaagaaggtgagtcggaggagctcctcgtcgctgatcttggtgacatcgacccattcatggtagcggattaagattagggcctactttggaagggtccttttgttttctgtgcacttcagcttgaccatccgacaaaattgttaaattttgcatggatatatgagtagttgctggattgcgagtcatcccattactggcccgcctctgatcaatgttgttccatgtacactacttggcaaatgtgccagggccctaactcgattagggttttgagctgattgtttgacaaaatggaacttttttgttcaataatttgtgtaatctaagcttcagatagatatataaaatgggaaagattcaccgc

SEQ ID NO: 23686 - DNA, 1817 bp, Oryza sativa
  ref <308>: DATABASE ACCESSION NUMBER: AK073779
  ref <309>: DATABASE ENTRY DATE: 2001-12-06
gggacggtgagggaggcgagtggagtgcgtgtcgacgtgtcctactcatccacgccacgtaaccaattccatctccggccgccgccgatggcctcgcgctcccggtggtcggcgctggcggcgagcgcgctcatccagtgcttcgcggggagctcctactgcttcgccgtctactccccggcgctcaaggcctcccagtcctacgaccagtccgccctcgacaaggtcgccttcttcaaggacgtcggcgccaacgccggcatcctctccggcctcctcgccgcatgggcccccgccggccgccgccgcccctggctcgtcctcctcgccggcgccgccctctgcgccgtcggctacctccccatctggctcgccgtcacgggggtcgccccggcgccgctccctctcctctgcctctacatgctgctcgccgcgcaggcgcagaccttcctcaacaccgccgatgtcgtcaccgccgtcgagaatttccccgatcgacgaggcaccgtcatcggcatcatgaagggctttctgggattaagtggagcaatactggtccaagtataccgcaccatccacattgctcccagcactttcatactgatgttggcgatattgcccactgccatcaccctgctgcttatgtattttgtcgatgtccaccgttctgatcatcaacggtacaacaagaagttcatggatgctttctccctcattgccattactgttgctggttatctaatgatcatcataatctgtgaccaagtattgaagataataagttcagctgtgcagactgtttgctttgtgatactcctactgttggtcctgtctccagtggctattgctgtgaaggcccagaagacagaatcaatgaagcaagaagaagaaaccagggatcaagctgaaagaatcggactactccaagagcaaattagtacaaatgccagctccagtagcgatgagcgatgtcaagaactgtcgacaggcaaagaaaacatgaatctggtgcaggcaatgtgcaagctgaacttctggctgctgttcctagcaatgtcctgtgggatgggatcagggcttgcaacggtgaacaacatcagccagatcggcggctccctcgggtactcgaccaaggagacgagcacactggtgtcactctggagcatctggaacttctcagggaggtttggtgccggctacatatccgaccacttcctccgttcgcggggagtcggtcgccctttcttcatcggcgtcacgctcctggtcatgagcttgggccacgccatcatcgcctccggcatcctggcgtcgctctacgtcgggtcggtgctcgtcggtctttgctatgggtgtcagtgggcactgatgccgagcatcacgtcggagatattcgggctgaaccatttcggcaccatcttcaacgtggtggcggtggcgagccccgtgggatcttacatcctctcggtgagggtggtgggttacatctacgacatggagtcgccgccgggagctcgtgcctgctccggtaaccattgcttcgttttgtcgttcgtcatcatggcgtgtgtctgcgtggttggctctgctgtcgccttcatgctcttcgtcaggacgaggaggttttataaacgggttgtgtacgccaggttgcaatcttttctatagagagagaaacgaaccgattcttttctagcaaatgcttacctatcttttacaagcaacaggatttgatctgtacctgtacgtcagagaatggtagaaagcagaggcacactactttctgctgccatttttttcttgttgaaaagacatcg

SEQ ID NO: 23687 - DNA, 1270 bp, Oryza sativa
  ref <308>: DATABASE ACCESSION NUMBER: AK073780
  ref <309>: DATABASE ENTRY DATE: 2001-12-06
ggccgcctctctccccatcctcctcctcctccgccgccgccgccgtcgggaagtacacctgtgctctggttccggcgacaccgcaagcgaggagaggagaggtgggggtgagggagtgagggtgaggccggggttgggcaccaccagcaagccagccagcccccccgtccccttagatccgggccgggcgttctccggcgatctcacggccatggcgtcccgccgcctcttcgcctccctcctcaggtccaccgcggcgccgcgcaccccgtccacgcccgggtgcctcttcaaccgcgccgccgccgccgcctactcctcgtccgccccctacaacggccagggttttccacttcctcagtctgaaactgcttcacgtctgggtttgttctccagtcccggcgacacacgccaaccttcatacggagaccgtctaatgcagtcacaacagctaagtcaagactaccgtgctaggacacaggccaataatgcgccacgttttggtgacacaatgtccaggatagctggtggcgagaactcttcctactttgggaccccatcacgcatctttgacgaacacaaacaatctttggtgaaaggaaagagagattttgtccatgtcttgctgaagagaaataagacctttgtgaccgtgacagacgttagggggaacaaaaagaccggggcatccgctggttgtttggaggacaggaaagggcgctctcgtctttccaaatatgctgctgaagcaactgcagaacatgtcgggcgtgctgccaggaagatgggtttaaaatctgtggtcatgaaagtgaagggaactacatttttcaataagaagaagaaagtgatcctgagctttagagaaggctttcggggtgaaagagtaagggagcaatctcctgtggtgctcatccacgatgtgacccaacttccacacaacggatgccgactccccaaacaacgccgggtttaggtctcagcgagctggaatcgaacctgagttgagaggagtcgaagcattcaaggtgatctggaagctctatttaagctgtgtgatgttggtctagttgacctaagacagatatgtattgtttctcttggctctgctacttgaattggttttggcatgacttatgttactcagttagttaagttatcatcaatttcgccacttctttttatcaaattgcagataggaactgaaaccccaaccgttgtatggtatgttatgacttatgaggaacatatatatggttgattctccttc

SEQ ID NO: 23688 - DNA, 1203 bp, Oryza sativa
  ref <308>: DATABASE ACCESSION NUMBER: AK073781
  ref <309>: DATABASE ENTRY DATE: 2001-12-06
gcatctcacacgggaagtcgttcgagtcgtcgtcttcgtctccgttccgttgcgccgcctcgtcgtctcctcgcgccgccgccgccgccgccgccgcggggaagagctagccctagaggagaagtgggggtgagttgggagagaggagagggggctagatgttccggtacgagaagggcggggacgtcgaggcggggacctcgggcggggcgagggagctctacccggggatgacggagccgccggagatgcggtgggcgctcatccggaagatctacgtcatcctctccatgcagctcctcctcaccgccgccgtcgccgccgtcgtcgtcaaggtcagcgccatctcccacttcttcgtctcctcccacgccggcctcggcctctacatcttcctcatcatcctccccttcatcgtgctctgcccgctgtactactaccaccagaagcacccggtcaacctgatcctgctcggtctcttcaccgtcgccatcagcttcgcggttgggatgacatgcgccttcaccagtggcaaggtcattctggagtctgcaattcttacaacagttgttgtgtttagcctgactgcctacacattctgggctgcaaagaggggccgtgacttcagcttccttggccctttcctcttcgcctccctcattgtgctgctcgtgtttgcgttcattcagatcctattcccgctgggcaggatctcccagatgatctatggcgggatcgcgtcgctcatcttcagtggctacatcgtctacgacacggacaacatcatcaagcgctacacctacgaccagtacgtctgggccgccgtctccctctacctcgacgtcatcaacctcttcctctccctcatgaccctcttcagggcagccgactgagttcctcgcatcgcgtcacatcgtgttcatatacgttttcatcagtgaatgtgaaaatgctctgcctttatcatgagtcgcgtacccaaaaacaacaattgtatagatgccacaagtaggatggtcttttatcatgctgcgttcaacctagtgatcttatctacgtaggaaatgcgaacaaatttagattctatatggatatggaggtgatgttggatttgggttaatttgcttgatgtatggtggacggatggatcatggatggcttggtttacctttggatgaatggaattgcttctctctttttacc

SEQ ID NO: 23689 - DNA, 1888 bp, Oryza sativa
  ref <308>: DATABASE ACCESSION NUMBER: AK073782
  ref <309>: DATABASE ENTRY DATE: 2001-12-06
ggtggctgcgtgcgtccgctccgctcttgcgttgcgcctccttcctcctcccctccgctcctcgcttcagatccaaaccctcctctaaaaaaaggggaaaaagccaccaaaaccctaaccctaagcatcccaatccccaaatccccccgaaaaccctaaccggatcccccttcccctcccgccgccgccatggcggggtcctccggcggcgccacctcctcctcctcccgcaacagcgtcgaacgattctacctgcctccccattcccgccgccagcagcagcagcggctgcggagccccacgtccccttcactgtccccgtcgccgtccccgcggtcggggaggcacaaggcggccgccgcggcgccaccggcggtggtggctgcggcggcggtgggcgcgggtgtgctgacggacggggatagcagggtggattcggacgactcctcgtcgacgtcgtccaagccttccgtggcatccacagcgactgccacgaccaccgcggctgacgtgaatgtgacggcggtggaggagagtgggaatttggagaggtttctcacctccaccactccctccgtgcccttccaatacctgcccaagacaagcttgaaaatgtggaggactggtgattgtacaaatacatcaccatatttctgccttgaagatctttgggaatctttcagggagtggagtgcttatggagctggcgttcccctgttgctaaatggcagtgactctgtaacacagtattacgtgccatatctgtctgctatccagttgtatgcagatccatcaagatctgtttcaagaaccgggcgccttggggatgaaagtgatggggaatacctggatgctagcagcgagagtagcagtgaaactgatgttgaccgattaagagtctcatccgtggaagctacacatgggatggcaaatggtagtttgcgaactgatgatgctgatggttatgcatctgcaagttctccaatctttcagtatatggagagggatcccccgttttgtagagaacctctgacagacaaggtatcaattcttgctagtagatttccagctctgaaggcattcaaaagctgtgatctgctgccatccagttggatgtctgttgcatgaggatgcctaccagttgcaatgcctaacaacaggcatgcctactgtgctgaaattcagcacgacatacaatctgtgtagaagagcatcactgctaatatggtgttgctatgattctatacattactggtttcatcctcgtgcttcccattgcaggtaccccatatatagaattccaacagggccgacgttggaagaccttgatgcctgtttcttgacattccattgcctagcaacaccttctaaggatagcgatagcactacaccagcatgccctggttttggtggcatcagcccttgcgcaaatgcaactggcaagctatctttgcctgcctttggactggcatcttacaaacttcgcagctccatttgggcatccgatgggacccaaggacagcgtgtcacctcgctgatggaggaggctggcaactggctcagctgcgtacaagtagagcatccagatttccgttttttcgtctcccgttccggtacgtggagatgactgtaaatgtttgttagtgaaacattgccgtctgaattttcagctgccttgagcacatctgcctatggcacatagagtatgatgatatgatgatgaatgccctcttgtacgggggttgtatcagcctacatgctaacttttttcctgtctccaataagttgtctggtgtagcggtgtaggtaaccctttgtgggagagtaaagatggaaaggaaaattggagacttgtagaacttaagagggggaaaaaaagagaaagagc

SEQ ID NO: 23690 - DNA, 2029 bp, Oryza sativa
  ref <308>: DATABASE ACCESSION NUMBER: AK073783
  ref <309>: DATABASE ENTRY DATE: 2001-12-06
gaccacttctcccgccattgctccgctccccaatctccccaacgagagagagagagagcgaggagagggagagggaggatggtggggccgcagtacgacctcgtcgggaaccccctgggggcggtgcgctccaccttcgagagggcggcggcggagtccggtgggcacgagccggtggcggcgttccgggggaaagactggggcgccaccgaggtgttccgctcctttctcttcgagcaaggcgggcttgacaaggttccggtgttggatgaatcaaatcttggattgatcaagccgaatacccttgttcggttccgggggatggttcaggacatgctcgggaacgagttctatgttggtgctttcaaggatggctccacttggaggacaaacaaattctccgattcctcgccgttctcaatgccacacccttgtgattcacatctctgggagcgccatcttttccactgtgtgcctgtgcctggacaaaattcttggacacgcgagtcgtcccctggccctgacttgcgcagaatagcaagctgcttcacatctgaacaaagggagaaaaggaagaggggtgcagataatgacgccatggatgtttcagaaagtggtagtggagagacttcttcatccagcaagaagacgaaggatgatggtgtcaagatctcaaatagttcagtagaaatgtcaatgaatgaagaacatcatgtcccagagatgaatgggggagatcatcatattcctggaagctccttttcctgcctagtgaaggtgtatgatatgcctgaaagtcaggtgaaactgaacgatgtttctgagttcataggtgtatatacatttgaccctgaacttgctgctcctaacgataattcggatgatataatgtttgaccttatggaagatgtaaccgctcagctgcctcccagtaaggttccccgtcttcactgcttggtatggagaaacttatctgctcatgattttctaccaaggcctcctgcggttgagccatcaccaatcctgctaaggggaattcggcaatctttgctctcacatcttactctggtattagggaaagatgaactggcagctcaatgtttactgttgcatcttctatccagacttcgtaataaggtggatgtggttaccgttggtaggctctccttgaatttcactggctttaacagagagagtgtttctatatttggaaaccagctaaataatttgttccagaggctactaccatattcacaagttattcctctgtcaattgagtatctcaacacagccacacttcagcctagaaaggacaaccaatcaggaagattggttacaggagttttacagttacctcagggtactcacctgacctttgatgagactctcttgcagtctggatcattgacatccaaaggtgtcgagaatactatgctgcttaagaacttgatggagtcacagaaggttgagtatgattttgagttctacaagttggaaatggcaactgatgtgcagctactaattctctccgagggaaaatcaaatatcctaccttctgacttgatagtacctttccgcccatcatctgttcctgcggtaaatgcaagctccgaggaacttgaaagttggagatggtatttggccacagttaggtctcttcctcagtcaactgaaactgatacataccagatgattcaagatgaaatggtcaatgccatgcgtgatgataggagcttgggttgttctgaacttagcagatggctaacgatggcacagataatggctgcaagctttggtgagaagagtctctccatggagcactggcagatggtgaaggagctggagaggctcaggaaggagaggctacaatgagatgagatcacagtaaaatgtgcttgtaaaatccacttgtggccgtggcccaatgttatgtgtataccactagggtctaaaatctaaatcaagatgtggatctgcaacatcttctgtgatcctatggaagtatcaatgccatttgataagttatctg

SEQ ID NO: 23691 - DNA, 2029 bp, Oryza sativa; identical to SEQ ID NO: 23690
  ref <308>: DATABASE ACCESSION NUMBER: AK099378
  ref <309>: DATABASE ENTRY DATE: 2002-08-28

SEQ ID NO: 23692 - DNA, 2394 bp, Oryza sativa
  ref <308>: DATABASE ACCESSION NUMBER: AK073784
  ref <309>: DATABASE ENTRY DATE: 2001-12-06
gtcggagcccctgccccctctcgggcggcgcggcggggaccggggctcaccgcggccatgcgctgttcttgctatccctctcgtcagtttgtgccctcaccctgatgatttccgtttcactagccttgcacttcttgtcttcttccactcaacaggttggcgctaggttttgccgattggggatgaactcgtgacgaaattgcaatgtggggctctctctcggtaatggattggagaagtgatgaacggcgagcttaaacttatggcttcctatgtgagcaagcttaagttcatcttgcaaaaagatcagcagcaggagccccatactgcgaaccttctagtcctacttgggagtagcaatcaggacaaaagaaatggcctctcacagggagaaaacagaatggacacttgtaccagaaagaagccaagaagataccaactcctcaccatgcaacaaaaagaaacgcttaatcgtgcatttcaatcatgtccgaaccctgatagaaatgacttgaagaagttggccaaggaactaaacatgactgagacccaaatcaaatattggttccagaactgcaggacaaagatgaagaaattcaagaacaatgaggagcgcaaactactgcagaaggagaatgaggagctaaagaaggagaatgcagagttgagaaataggatgaagaactcaacatgccgcgcttgtgacctccctttgttccatatagattgccgtcattgggagaatccaatgctcaacaagggtaatcatggcgttacaagtaatctcattcctcaggcagtgtcatccttgctccccagctcaagtggttttgtagcttcaggctccaatcttagtagcaatgctgtgctcatgcccgtatctgccatgccatcatcagttttgcagcctgctccagccgtctctggtgccaattttcccatcttgcacaatctatctgccaatgcaaatgatggctatacggaaaaaaacgtacttcttgatctggcgaaccgtgcaatggaagagttctttagtctaatgaaggagaatgagtctcttcttgtcaaaaaaaaggagaatgggcctctctggctcccacacatggatattctgggagtcgaatcacttaactaccaggaataccttgcaaaatccaggacgattggacaaaaacctgttgacttcaaagtggtcgtcaccagggacactgccattgtcaatggtagctgtgttgacctcgtcaaaagccttttggatgctaaccgctggagagagttgtttccaggcatcgtggcaagtgcaaacaccaccaagatcatctctactgggccctctaacttgcacgacgggttgcttcaattgatgcgtgcagagctccaggtaatgtcacctgaagtcccagtttgcgatgtgacattcttgaggcagagtgtgcagtttggaagtggactgtggtgtgtggttgatgtgtctattgataccatccttcctggagagagtaaaacagctcagtccagtgtgcagaccagcagtacagctgccagacgcatggaagtcaggctgttgccatcgggctgtgttattgaagaaatggagaatggctattccaaggtgacctggatggtgcatgcagcttatgatgagagagcagtgccagtgctttatcattcacttctccgctctgcaaaagcccttggtgcgtgccgctgggtagcatcactccagagacacagccagttcctttccggcctgcacaaatacatcttttgtcctgacagcacaaaagtggtgatgcgaagaaaagtcctgtacctggtgaagcagatgacgagcagcttcacaggcctatttgcgtcgatgtctaaggccacgctgcaagatggtgatgatactcacttcgcgcatcagatagttggtggtgcaacaggtgaacctgccggactgctgctgagcgccaccacaaccatatggctccccggcgtgaacccgaggcacgtgtatgaccacctgcgtgatgagcagtgccatggtgaatggcgctgcctcctcggtgagcagctgcatcagggcaatgccttgccgtatggtgcccccctgaatggtgagaccgtgccagagttctatcgcatggtgaacgggctgcatgaagggcatgctatctccctgatcagccccagagaaatgggtggtaacataagcaacactctgctcctgcaagaggcaagaactgatctttctggctccctcatagtttacgccaggacagatgtgaacaccgtgcattccatcatgaacagtggcctcaaccctgccaccgtcttcctcgtatcctctggatgtgccattcttcctgattgcctggaatcattccctctacacccagctgcaactgc

SEQ ID NO: 23693 - DNA, 801 bp, Oryza sativa
  ref <308>: DATABASE ACCESSION NUMBER: AK073785
  ref <309>: DATABASE ENTRY DATE: 2001-12-06
gagggaaagccggcggcctcaagggcgtcgccctcatcggcggcgccggcggcaacagcgcggtcgccggcgccctccacttcttccaggacccctccaccgggtataccgaggtgagggggagggtcaccggcctcgctccgggcctccatggcttccacatccactcctttggcgacaccaccaacggctgcaactctaccgggccccattttaatcctcacaataagtcccatggggcaccatctgatgatgaaagacatgtgggcgacctgggaaacatagtagccaacaaagatggtgttgcagatatcttcataaaggacctacagatttcactaagcgggcctcattccatattgggaagggcagttgttgttcatgctgattctgatgacctaggaaggggtggtcatgaactcagtaaaacaacaggaaatgcaggagcaagaattggatgcggtatcattggacttcgatctgcagtttaacaatctatagtcatgaagcttgaggtggtggtggtatgctgttcagagatatggaaatcattggcgctcctcattccagactgtttcaagaatggcttttgacgtgttatcactgccttcagttatctatacgtactttgttacggagtatattctttttttgaacgaacatacggagtatattctataaataaaggaaaagtttcctcatacttatactgtaccttggactgaagctgtgcaaactcacaataatgtgttactatttctcaatcttcagcttacaagcgatgctgctttgaatttggtc

SEQ ID NO: 23694 - DNA, 1620 bp, Oryza sativa
  ref <308>: DATABASE ACCESSION NUMBER: AK073786
  ref <309>: DATABASE ENTRY DATE: 2001-12-06
gccgtttccttcgacgcgtagcgtaacccaaaaatctaccaaaagccaccaccggcgcatcaactccgacgaaaccggcagcaggtatcccgatggcctactaagccccacgacgcttcggcgaccgggacgacgacgccgacgacgacgcctcgttctcctcctcctcctcctctccgtctccccctccgactacttcttccccccacgaggctctcccagcttgcgcgcgcgcacgatgggatcgcccatgtcgcggccggcgactgcggatgggagcgcgcgcggaggagggctagccttggctatcgcggacgagctccctcaagaggccgttgccaagcctgccttgatgagtcaggtcatggccgggaacagctctatggtggcaaagatggatgaggtttccagggtagctgatgatctgatgttcgctgaagatctgcagctggaagaggtcatccggttctcagctcactcagctggaccgaactgcgcggtgtgcgggcaggcgaccccgtcggtggatgcctcatggaagcctgacaactgcgaccatgtcatgtgcatcacctgctttggccaactcgcctctgattctcacgccgacgagctgcccaagtgcccactggcatcttgccaatcctcgccggacatcatcagtgtctcgaatgaagagacgggtggcggcaaagggaaggagctggcgacatatgtcgtgcttgaggagcacggcgaatgctcccgtggcgcggcagccacggctagcagcagtgccagcagtgagttctactgcaccatctgcatggagacggtggacgccatagagcggttcgccatccccgggtgcacgcacgccttctgcgccagctgcgtgcgccagtacatcgccgccaaggtggaggagaacgtgctgtccatcggctgccccgacccggggtgtaaggacagcggcggcggcgcgctgcacccggaggcgtgccgtgacgtgatcccgccgcagctgtttcagaggtggggcgacgcgctctgcgactcggcgctgtcgtcgctcaagttctactgccccttcagcgactgctcggcgctgctggtggacgacccaggcgacggcgaggaggcgatcacggacgccgagtgcccgcactgcagccggatgttctgcgcccagtgcaaggtgccgtggcacggcggtgccacctgcgccgagttccagaagctcggcaaggacgagcgcggccgggacgacctgctgctgaggaaggtggcgaaggacagcaagtggcagaggtgccccaagtgcaagatgtacgtggagagagtcgaaggctgcgtgttcatcatctgcaggtgtggccactgcttctgctacctctgtgcatcgccaatgtcgagggacaaccaccattgcaagaagtgcaagcgaacgtggtgaatgatctgaagctgcagaactctgattgagtcgaagaagttacttaagtttcgtactgttaaaaatggtcaattactatcattaacctagtttctacttattagcccgtgccgtacttagcattaattagctcgtatattaccactctgatgtcatttgtcaatcaatatcagtagtattactcc

SEQ ID NO: 23695 - DNA, 849 bp, Oryza sativa
  ref <308>: DATABASE ACCESSION NUMBER: AK073787
  ref <309>: DATABASE ENTRY DATE: 2001-12-06
gaacctttcctcttcttcctcttcccctccctctcgctgcctgccgcctctgcttgctcagatcttctcctctccttcccggattccaccctcagttgttgtctcacagtctccgaatcgctgggcggtggagccattggtgctcacccacgggcacgggcgatgggcgccgatggcggcggcggcggaggccggaagagctcgtcgccggccgggaagccggcggaggcggcacgggcggggagcctgctcgccggactcccctcgcggggcaacttcgtcgccgacagcatcgcgtccagcatgggaggcctcccggtttatgtctgcctgcacgacaccgctcctccagagggacaagttatagacacagacaccacaaacattttaatcagatctctccagttgagcaaacagaaaaatgaggcaaaagatgtaggatcaaggactccaggagaaagcagcaaggggaaaaggtctgcttccagacttttagatggcaagaatccatctaaaagagctaacactggcagcacggcagggtcatctgcccatggggaattgggatctgttttttctgagcagacgctccaatcatttacggtggagaagttgcgtattcttctgaaagagagagggctctcaccaaaaggcaaaaaggatgaactgatcgcccgcttaattgagtcctcggagtgatctgaactgcgatcggaacctcattttgttggatgttgtaccgtagtgacgatcatacaccatgcaagtgaacttctatcgcagacctcatgtaagcatatatttcatacagtgccgaaatgaaagatctggctgatagtttccacatcg

SEQ ID NO: 23696 - DNA, 1476 bp, Oryza sativa
  ref <308>: DATABASE ACCESSION NUMBER: AK073788
  ref <309>: DATABASE ENTRY DATE: 2001-12-06
gccccgttcccatccctcctcccgcagaccacggctcacccaaaaattatgccacctctcccctgccaacgcaccgcgccgccgtcgcccgtcatccctcccactccacctcaaccgccccctccgccgcgccggccatcccctctttgcgcatcctctctactccgacggctcagtggagctcgagcgccgttcgtcgcccactgcctacccccaccccatggtgccacccaggaagatcgccgtcactcatggcgccccaagaagctcgccgggctccctgctccttccccatcgcatgggcctcctcgccggtgatctcctcccttctcaccctcaagtaacgtcgtcgatcccccgctgctgccacaccttgtcacattccagtgcatgccctcgcccatatggccagatcgacttgtttggatcactcaagctgggtagagcaatcaaaaggactaaggttgaagcaattcctgtgctaggaaaagtccgaaaagctgttgaaatttagactgctcgagccaatgacagaaatctgactacaaacatatggaatttgcttcttccatccttcatgtgattggtggtctgccgactgcttctgatgactgagttgctctattggctttcgtgattaccgtcgtggccgcgcccttcgatttgttggtctcactcaccatggtggatatgttcgcataccggccacgcagtgcggtgtggtaagcttaaagctgacagccgagaggttgtccaagaatgatccacatatatgcttcttcctctgaactggaccattggaatgccaggaatcttagtggcgacagtgatcaaagccaacttgaccctatctggaatgaggatctcaagctctctattccttagcagtacggtcctcgcatgttgcaagtgttcaatgggtggcaattttctcagctagcaacaacaacagttgatgactgccaatgccaatgttggtgactcaattcttaagttatttcaaaataattttaacagtgcagcatgttctttattgatcctgtaccaacctcatgaaatcgaccggtctgaacatatggatgatttagcccacacaacaaatcaatgcgatttggaatttaattatttgggcatacgcggattggggatttcttttcgtgcagtaacaatatttctgttgtacttttgtgcgcacataggggagtgtggagttgctatcgtgacattcttcaaatccaagttagtattatataaggattttacctattcttcatatgtcatgcctataaatttgtcaggaaattgtattgaagagcttccctatgcagagctcattggtgctggagtttgagcgatggttcttttgttctttgagatgtatgttgcctttgctgttgcaagctaaattttctcttccaaccacagtgataaagaaatagcaatttaattattatgttggttttgatgccatctatg

SEQ ID NO: 23697 - DNA, 1052 bp, Oryza sativa
  ref <308>: DATABASE ACCESSION NUMBER: AK073789
  ref <309>: DATABASE ENTRY DATE: 2001-12-06
ttgatccaaaatcttccacatatacagtctctggatcaattgatggatcttgagaagggcaagaagccatcagaacaggctgcagcctgcaggattatgcaggtcaaggacaagctcatcaccctgcagcctgtggtgagagcttgtgtgttcttggcaacagcagtggcagctgtgatcatggggctgaacaagcaatcctacacaacagttgttgcaattgtgggcaccaggccagtcacacagaccttcactgcaaagttcaaagacactcctgcatttgtgttctttgtcattgccaatgctattgccagtggttataacctgatggtgctggtgacgaggcgcattctgcaacgaagagcgcagagtttgtctgttcatcttcttgatatggtgatcctgactttgttggccaccggctctgccacagcggcgtcgatggctcagctagggaagaatggtaacttgcacgcacgctggaacccgatatgcgacaaatttggttctttctgcaaccatggaggaatagcactcgtgtcatcgttcatcggtgtcgcgctcatgctggccctgaatctactgtcagcagcagccaactcaccccgctctaatgtgaccggccaatgagttgtccatatctctcaggacagctcattcatgacaaaattaacaatgcactgtttctgtctttggattgtactcaggttagggcagaagaactgtaagtctattatctgctccatgtgggagctggatcacaaccttcagtgagccagtgtgctaaatttggcatgcaactgttccatcttgcttggcctgaaatgagcaggccaagagtacaaacacataaactccaattggttatggggctttagctagatcaagttgttacactattaaattctactactttgtgggtgtaaattttatcttgtactaatagtcctgccaatttgtcctcttttttttttttttttgcttaggtggatgcaacttttcattatttaacaggcttgtctggtgaaccatgggctttccagacaattagt

SEQ ID NO: 23698 - DNA, 2472 bp, Oryza sativa
  ref <308>: DATABASE ACCESSION NUMBER: AK073790
  ref <309>: DATABASE ENTRY DATE: 2001-12-06
gatgaagttttcgagaagcatatggcagcagcaaaggatctgcttggaggagaggaccttgcaagattcttatctcagttgcacgcggatgtcagtaacctaaaagcaatgcttcgtgcaatttgcatagctgggcatgccacggagtctttctcagattttgttgttggacatggagagatatggtcagctcaattgttgtcatttgccataaagaagtctggaaccccttgcagttggatggacacacgagaagttttagttgtaaatcctacaggttccaaccaagtagatcctgactatttggaatctgagaaacgacttgagaaatggttcgctcgacagccagctgagacaataattgctactgggtttattgcgagtacacctgaaaacattcctacaaccttgaaaagagatggaagtgatttctctgcagccataattggttcacttgttaaggctggtcaggtcactatctggactgatgttgatggggtctttagtgcagatcccagaaaagttagcgaggctgtcatattaagcactttatcatatcaggaggcgtgggaaatgtcgtattttggggcaaatgtattacatccgcgtaccatcatacctgtgatgaaatacaatatcccaattgttataagaaatatgttcaatatttctgcccctggtaccatgatctgccagcagcctgcgaatgaaagtggtgatttggaggcttgcgtcaaagcatttgcaactatagataaattgtctcttgttagcgttgaaggaactggaatggctggtgttcctggtactgcaagtgccatatttggtgctgtgaaggatgttggagctaatgttatcatgatatcgcaggctagtagtgaacactccgtatgctttgctgtaccagaaaaggaagttgctgcagtttctgcagctttgcatgtcaggttccgtgaagcattatctgcaggcaggctatctaaggtcgaagtcattcataattgtagcatccttgctgctgtcggcctgaagatggcaagtactcctggggtcagtgcaaccctttttgatgcacttgcaaaggcaaatattaatgtaagggcaatagctcaaggttgtagtgagtacaacatcactgttgtattgaagcaagaggactgcgtaagggctcttagagctgctcactcaaggttcttcctctccaaaaccacacttgctgtcggaattattggacctgggttgattggtcgtactctccttaaccagctgaaggatcaggctgcagttcttaaggaaaatatgaacattgatctgcgtgtcatgggaatcactggttcgaggacaatggttttgagtgatacaggaatagatttggcccattggaagagctgctacaaactgaagcagaaccagccaaccttgacaagtttgttgatcatttgtccgagaatcaattattccctaacagggttttggtggactgcacagcagacacaagtgttgcatcccactattatgactggttaaagaagggaatccatgtcatcacgccaaataagaaagcaaattcagggccactggacaagtatttgaaacttaggactctacaacgtgcatcatatacccattacttctatgaagcaactgttggtgctggccttcctatcattagcactctgcgcggtctcctggaaacaggtgacaagatattgcgtattgaggggatcttcagtggaacattgagttacattttcaacaattttgaaggaacaagagctttcagtgatgttgtttctgaagcaaaagaggctggatacactgaacctgatccaagagatgatctgtctggaactgatgtagccagaaaggtaataattcttgctaggggatctggattgaagcttgagctttctgatattcctgtaaggagtcttgtgccggaggcattgagatcctgttcaacagctgatgaatacatgcaaaagttaccatcctttgaccaggactgggcaagagagagtaaagatgctgaagctgccggagaagttttgcggtatgttggagtggtggatttggtgaacaaggagggtcaggtcgagctgcggaggtacaagaaggaccacccgttcgcgcagctatctggctccgacaacatcatcgccttcacgacgtcaagatacaaggagcaaccgctgatcggcgaggcccgggcgccggtgcagaggtgaccgcaggaggtgtcttcagtgacatactacggctggcctcctacctaggcgctccctcataagctttgtagcaggaagcattttctgatggtggtcaagatggctttgaatcttgtaaggttgcctggtttcttcttctcttttcctttgcacaagcattctaaatcacagtgaggaaataagcctttgttctgtagtgatgttcgtcaagggcaataggtaggagttgtgcaggtcttgttgg

SEQ ID NO: 23699 - DNA, 1040 bp, Oryza sativa
  ref <308>: DATABASE ACCESSION NUMBER: AK073791
  ref <309>: DATABASE ENTRY DATE: 2001-12-06
gaacagccccgcattggcccatcaagggataaaccatctgatgaaccctatagcaatccccgggaatttgacagattttctggcaatgccccgaggacctcacaagctccacaaagagtgccaacagcaagaccaggaagagttgttggtccagtattgccttatgaaaatggtgccacaaaggattcctatgacgcacggagattggcaatgaactcagggtatcctccccagcaacaaatccctcaagcttatggttattatcagatacccggtaagtcagcttgttctgagctgtcgcaggccgaaaggtatacgctgcaccagcaggcctacacttgcgcaaacagtgccactgtgactgatgttgctctggacatgagagcacccccgttccatctatcaggagggccgaaaagcgattcgtccgaaaggttagcagcagagacaaacctatacacgagatctctcaatggcctcgctgctactgctgcgggagtggcagcaagtgcgcacagaaaggtcggtgttgttccctacggcatgtcgaggatgtattagtgcccaaccatggcacatcctgcatgcccaatgggagctctgatgctagcttgcggcgaagcattgggaacaaagtggcagttcaagctagtttgggcaccaagagcacagggcaatccaaggttgacgacgatgcctaagaagttgcattggtgccctgctgctcctgttcctgcttgatcaggaaccaccaccggaggtgtcaaaagcttttcaactctctattcgctttaggcaaatcagcttgtatctgcctgtgtgtgtgtaagaaaatgtgcccttcgttgcacacttgaagggggtagtccagtggcttgtaatctgagcatattttaggcgccaattgtatttctagggtgaggggacaaaagggaaagggaggaccactaaccttttcctcttttttttttctttttccaatgttgtatagagatgtttctcatatcaaaagtgctacatcagaatgacttgagaaagat

SEQ ID NO: 23700 - DNA, 1622 bp, Oryza sativa
  ref <308>: DATABASE ACCESSION NUMBER: AK099379
  ref <309>: DATABASE ENTRY DATE: 2002-08-28
gggtgggtcaaaacaaacacacacacacacatctgtctcttcttcaggtttcaggtctcctggctgctttgcttctgctgcctctgtgtggggctccagccttgctcagattgatgattggtgatccaaccatcttcatcacttacagagatggggtgtggtgcatcaatccctaagaaatgcaaggtaggagggaaggggaagaagcgccggagcgtcatacaggaggttgccatattcgtgccgacaattcgcattccggtggacagtgatgttgcccatccactcagaggactagtatccaaggagctcgtcgaccgcctctcaaagttcagagaccgcgttgtcgcgctctctgaagatatctattgcgcggatgtttcggatgtttcagagttacagcatgcccttgaggagtacttgccagttgttcttggtttaacaatgaaagaaagccgtcttgaatcatcggtggaattcagatggaggaccttggatgatgacgaagagtgttgtctttcaagtgcatggtatgaagttctgtcagtcatccacatgatggcgatgcttgcattgtttgaagccaacctgatacttattccgaagaacggtcaagttggaggtgaaaggaaggtatcagaagatgcaaagaaggatgtcgtcgattcgttgctcagagcatcaggatgtttagattactgcgtgcaccgtatacttgtacagatgccggcacaagtcaagaaaagttttcctagttattttcaggaaggtatgcttgaggccatttcaattcaagcattggctcagtgtgtagaaatacaacttggattggcttcagagtgtgagaaggcaactctgtcagtaaagaggaggctagcctgtgagctagtcagttatttctcacaggctcactattgcttatcgggatgcgacacgagcgactcgtttgggaagaagctcctgctgtttctgaagtggaaatgcatggaagccaaggcagtagcatactactaccatggccttgtgcttgacaaaggcaatgaagccagcagccacatcagtgcagtgtgctgcctctctgcagctgatgatctagttgcagatagcaagagggcttgtttgagcttctgcttggcaaaccccatcacaagggtacctcctccttggggtatcatgaggaatatgcacaagaaaatcccagattctgcgtgcaagagattccaaatgtatggatatctttttgaacaagacaataacagtgcacttcaatccttaccagatctaccagaatttgcgctgtcgctgagacccgaagggtatgaactgcctagcactgattcaatctgggataatgttgatagccagcctcagattcagagcctcaaggagcatctggatgatgaagacgaagtggaaacaaaatgatacttcagacatccaaaacgcttcatttcattgtgccatgaaaagtagcattagtactagcaaagacatcggaatgctcaattcagaagtgtttggattcagcatatggcattgagccaaaaagaaatcagaatatgtaccttctgtgtagttgaaagtatctatcactgattataaacagaatcaacaataatagg

SEQ ID NO: 23701 - DNA, 1745 bp, Oryza sativa
  ref <308>: DATABASE ACCESSION NUMBER: AK073792
  ref <309>: DATABASE ENTRY DATE: 2001-12-06
ggtgccacttctttggtttcatgccaaaaggtttttgaaggcccccttgtgaattccctgttgtccatcagacaaggaggcctcaagatgtacatcatagaggacaaagggggtgccattgccctcatgctggcctccctcttcttcctggggacatggcctgcggtcctcaccctcctcgagcgccgaggccggctcccgcagcacacctacctcgactactcgatcacgaacctcctcgctgcggtcctcatcgcgctcaccttcggtcagctcggcgatagcaagcccaacatgcccaatttcttcacccagctcagtcaggataattggccttcagtgctgtttgcaatggcagggggtgttgtgctcagtatagggaacctctctactcagtatgcatgggcatatgtaggtctctcagtgactgaggtcatcagctcaagtatggttgttgtaataggcacaacactgaattatttcctggacaaccgcatcaacagagcagagattcttttccctggagtggcctgcttccttgttgcagtcattcttggctctgctgtacatgcctccaatgcagctgataatgaagaaaaactaaatggctccacaaatatctataaacttggggaaaatggaagtgtggaaccaaacaaagaagtcatagaaaaagatgctcccaaggacttggagaatggagcttctgcaaccaaatatgttgccaaagctgaagcaggaactgcggaatacttgattgagctcgaagaacggcgttcgatcaaggtgttcggatcaagcaccttcatagggcttgggatagtgttcttctcaggagtctgcttctcactcttctccccggcattcaacctcgccaccaatgaccaatggcacaccctgaaacaaggtgtaccacacctggtggtgtacaccgccttcttctacttctcgatctcgtgcttcgtcatcggcatcggcctgaacatcctgttcctctaccgtccaatggccggtgtgccgaaatcatccttcaaggcttacctgaatgactgggaaggcaggcagtgggctctcctggctggcttcctatgtggctttggcaatgggtttcagttcatgggtggtcaggctgctggctatgctgctgctgatgctgtccaggcattgccacttgtgagcacattctggggaatactcctgtttggggagtaccggaaatcgtcgcgaaagacgtatatcctgctcgggttcatgctgttcatgttcatcgtcgcggtcgcggtgctcatggcttcatcaggtcacaggagcaccaagtgattgattcaaatcctttcatctcttgccttaatttggtgtttgcaagcgcaaaccactcttgctgtcagaaaacaaagaagttcaggcagcaatgcagggggggacttcagtccaggtctccaggaagcagatcatgccaacatggaatgaaactccattcatgaaatttccatttggatggagctgtacataaagggaaaaaaggaacaaactaagatagtttgtggatttgtgattttaagtttgtgtcagattatataaatgtaatgttatccctttctctgaattctaaaagacccatttgcagatagcatagggaaatttggagttcacctgaatgataagaaagatagtaactgttttggtttcgatgctgatgttcagtgcttaaaatttgaaatggtacatgacatacgagttgtttt

SEQ ID NO: 23702 - DNA, 2002 bp, Oryza sativa
  ref <308>: DATABASE ACCESSION NUMBER: AK099380
  ref <309>: DATABASE ENTRY DATE: 2002-08-28
ggcccttcctcctctcctcccccacccctcctcccccacctcactcctcctctctcccccggagccctagccctcgccctcgcctcccgctcccgccaccccgccgcgccgccctcgtcaccgccgcgcaggaccctcggtggcggcgggccatggcgtcgctggccgtctcggcgtccgcgtcggcgtcgggggaggaggtgacgcacctcgcgcagcgggaggcggcggagatcgacgagcagctcatgggcccgctcggcttcagcgtcgaccagctcatggagcttgcggggcttagcgttgcggcggcggttgcggaggtttacaagttgggtgaacatacaagggtgctagtaatctgtggtccaggaaataatggtggtgatggtctggtagctgctcgtcatcttcatcactttgggtacaagccttctgtatgttatccaaaacgcacgcccaagcctctgtattctggcctttgtactcagcttgaatcactaacaatccctttcgttcctgttgaagacctacctgcaaatttatcggaggagtttgacatcattattgatgcaatgtttggtttttcgtttcatggaacaccaagaccaccatttgatgatcttatcaacaggcttgtttcactgagtgctattgataattctgctaaaagaccagcaattgtttctgttgatatcccttcggggtggcacgttgaagagggagatatcaatggaggagggtttaaacctgatatgctggtatcattgactgcaccaaagctctgtgcaaaaaaatttaccggtccacaccattttcttgggggtagatttgttcccccacctattgtgagcaaatataagcttcatcttcctccatatcccggtacctcaatgtgtgtgagaattggaaaagctccatctgttgacatttcatctctaagagaaaattacatctcccctgaacttctcgagaatcaggtgatgcctgatccatttgatcagttcgttagatggtttgatgaagctgttactgctggtctacgtgaaccaaatgctatggctttaacaactgccgataaggagggaaaaccttcgtcaagaatggttcttttaaagggtgttgataagcagggatttgtttggtatacaaattatggtagccagaaggcacatgatttatctgagaatccaaatgccgctctgcttttctactggaatgagatgaaccggcaggtaagagtagaaggttctgttcagaaggttccagaagaagaatctgagaagtatttccacagccgcccacgagggagtcaacttggtgcaatagtcagcaagcagagcactatcattcctggaagggaagttcttcagcaggcgtacaaggaattggaacaaaagtattctgatggcagcgtgatcccaaaacctgattactggggtgggtacagattaacaccaaaactttttgagttctggcaaggccaacagtctcgactgcatgaccggcttcagtattcactgcgagaagtagataggagcacagtatggcacatcgagaggttgtccccttgactagtaaccccatcgcagctctttggtaataaaaaggatctcatcttattatcaagaatcaaatcttatcccagctgcaaggagtcccaattgctcgatgatgttagtgccatgattaggtcgcgtgtttgagactgtgagtgcctgaagctctgctttttgacatgcccttcacacatctgatgttctctgaagcacagagtggatgaatccatgaaggcccttctcttggtcataagatttttctgtaaatgccattaaattttaaccgtcctgtagaaagaattatgatgagaatctcattatctcagcctggagaagactgttggacataggtcgacatcgtagtatatcgaagaaataatgttctgggaggaaataagtatttatcagcatcaagcatataagtcaataaagttgtgtgctgc

SEQ ID NO: 23703 - DNA, 3673 bp, Oryza sativa
  ref <308>: DATABASE ACCESSION NUMBER: AK073793
  ref <309>: DATABASE ENTRY DATE: 2001-12-06
ggatgtgacatctcagtgtccatcggccatcgcctccttttctctctcctctcctctcaccatcttctcctacagcaaatcactcttctctctctctaaaaaacttcacaagcctactagcctactactaggcacgtagctagcccctgccactctatcgcccagcacaagccatacagctacccgctgtcactgcgccagcggccgcagctgcgcaaagaggagcgcgagaacccaagaaaccaaccaagagctgcgtcccataaaggcgcgctgcttcaatccatccatcttctgatcttccatatacttcgcttcctgtaaatgtcatcgccgccccggcggtgcctcgcagcggagcagcagtggccatgacgccggcgccggcggccgcctcctaccgcgctctcgtcgcgctcctgctcgtcgccgtcgccgttgccgatgatgggtcgacgctgctggagatcaagaagtccttccgcaatgtggacaacgtactgtacgattgggccggcggcgactactgctcgtggcgcggcgtcctctgcgacaacgtcaccttcgccgtcgccgcgctcaacctatccgggctcaacctcggaggcgagatctctccggccgtcggcaggttgaagggcatcgtctcgattgacttgaagtcgaatgggctgtctgggcagatccctgatgagattggcgattgttcatcactaaaaactctggatttgtctttcaatagcttggatggggacattccgttctcagtatcgaagctgaagcacattgagagcttgatattgaagaacaaccaactgatcggagtgatcccatcaacgctctcacagctcccaaatttgaagattttggacttggcacagaacaaactgagtggagagataccaagactgatatattggaacgaggttcttcaatacttgggattacgcggtaataatttagaaggcagcatctccccagatatatgccagttgactgggctttggtactttgacgtaaagaacaacagcttgactgggccgataccagaaaccattgggaactgtacaagttttcaggtcttggatttgtcttacaataaactttctggatcaattcctttcaacattggtttcctacaagttgctacactatctttgcaagggaacatgtttactggtcctattccatcagttattggacttatgcaggctctcgctgtactggatctgagttacaaccaattgtctggtcctattccatcgatactaggcaatttaacatacactgagaagctgtatatgcaaggcaataagttaacaggtccaataccacctgagcttggaaatatgtcaacccttcattacttagaacttaacgataatcaacttagcgggttcattcctccagagttcggaaagctaacagggttatttgacttaaaccttgcaaacaacaactttgaaggtccaatccctgataacataagctcatgtgtgaatctcaatagcttcaatgcttatggcaacagattaaatgggaccattcctccttcattgcataaacttgagagcatgacttatttgaatttgtcatcaaattttctaagtggttctattcctattgagctatcgagaatcaacaatttggacaccttggatttatcctgtaacatgattactggcccaattccatcaaccattgggagtttggagcatctattaagacttaacttgagcaacaatggtctagtaggattcattcctgcagaaattggcaacttgaggagtatcatggagattgatatgtccaacaatcatcttggcggtttgattcctcaagaactcggaatgctgcaaaatctgatgttgttaaatctcaaaaacaacaacataactggggatgtctcttcactgatgaactgcttcagcctcaatatcttaaatgtatcctataataatttggctggtgttgtacctactgataacaacttctcacggttttcgcctgacagctttttgggtaatccaggactttgtggatattggcttggttcttcgtgccgttcatctggccatcaacagaaaccactaatctcaaaggctgcaatacttggaattgccgtgggtgggcttgttatcctcctgatgatcttagtagcggtctgcaggcctcatagtccacctgttttcaaagatgtctctgttagcaaaccagtgagcaatgttccccccaagctggttatccttcatatgaacctttcccttcttgtatacgaggatataatgacgatgactgaaaacctgagtgagaagtacatcattgggtacggagcatccagcacggttataaatgtgtttcgaagaaccgcaaaccagtggcagtaaaaaagctatatgcccactatccacagagcttcaaggaatttgaaactgagcttgagactgttggtagcatcaaacaccggaatctagtcagtcttcaaggatattccctatctcctgttggaaatcttctcttctacgattacatggaaaatggaagcctctgggatgttttgcatgaaggtccaactaagaagaaaaaacttgattgggaaactcgtctacgaattgctctaggtgcggcccaaggccttgcttatcttcatcatgactgtagcccacggataatacacagggatgtgaaatcaaaaaatatactccttgataaagattatgaggcacatcttacagactttggcattgctaagagtttgtgtgtttcaaaaactcacacgtccacctatgtcatgggaactattggctatatcgatcctgagtatgctcgcacctcccgtctcaatgaaaagtctgatgtctacagctatggcattgttctgcttgagctgctgaccggaaaaaagccagtggacaacgagtgcaatctccatcacttgatcttgtcaaagacggctaacaatgctgtcatggagacagtcgacccggacattgcagacacttgcaaggatcttggtgaggtcaagaaggtgttccagctggcgctcctttgcaccaagagacaaccatcggatcggccgacaatgcacgaggttgtgcgcgtcctggactgcctagttcgtcccgacccgccaccgaagtccgcacagcagctggccatgccgcagcggcctgctgtcccgagctacatcaacgagtatgtcagcttaagaggcaccagcgtgctctcctgcgccaactcgtcgtgtacttccgatgctgagctgtttctcaagtttggcgaggtcatttctcagaacacagagtagaatagtctgcagaaatcgtcatccgatcttgggattcaggcaagcagctggtgaagctaatcaaggtagtgaagtgaactcacgttttgtgactttgtccacatgttgggtgcccagaaaattaacaagagaattctcaagggttgtggctggtgttctttactgtaaaaaaaatgcgtcctacttctttcttcttcctttttttttatctcgtttttgtctaacttaggaggtgtccatgaatctagtactaaatctcaagacagcttcttctgttctgtaacatttctgggattggaatgctggaactggtattactaatagtctctcggtttggacaaattcgcagggtggtgtttcagtttc

SEQ ID NO: 23704 - DNA, 2120 bp, Oryza sativa
  ref <308>: DATABASE ACCESSION NUMBER: AK073794
  ref <309>: DATABASE ENTRY DATE: 2001-12-06
gtgaaacagatagtcaatacttacgttttaaagactttcttaaagtatagcaagttcgataatatgattatggatgttaaaccaggtaataatggctaaaaactgtttagtgtagaaacacgcgagtatcagttgcatctatctgttatgtgtacgttttttctaatatcttatacttgttgcccagtacgtggcgttgcgttggtcctgtacatattgttggcagacttataagtcacttattactcctgcttactgtcctgctctagactttataggatgagatataacttctgtgatgcatttctgaaggagttttgtttctgggatccagaggtgtttcatgtcttgtaattattgaatgaagttcatgaatcatgagataattctcctaaaactggtattttgatgctaaaatgaaattatttgacacctaaagtatgttgtccttactatataaagaaaagaatcctattgggcctgagttgaaaataaataaatgtgattttttgcaccaatatatccttccttttttttctccacaaggaagattcaatagtgtctacactttgaacacactaattgtgaaattaactgataattgcatatatactccggaatttggtcactggcacctttccgtattaaattaactttagaagacaaacaaataagaatataataggtctgctgtgcaatattaattgtaatattttgcgcacttcattacaaatgcaacatagatgtggtggctgcagactcacaaccagtaccatttctttctgaagtatatacagataaatgaactattttaccctgtattgttgtctgttggttcttctagtttggtttgaactggacaggagtttgacattctgaagactatctttcgagcatctgtgctaagggtgcacaaatccaaatttgcacagtttatcatgttttatgcctgctcactggatcctgaaatctgtggccttgaattcgctctcttcctctctgatatctttattaaaaaggaagaggattcaatttctagaatgtctgcagtttcatatgttggaagctatttgtctcgggcaaggttcatttctgctgatacggtggttggtatactcaaaaggttagtggactggtgtgttgactattgtgacctccagaacaacataaggataacaaccaagcctataaatcatcaaatattttacgcaagctgtcaggcagtcatgtacatcctgtgctttcgcttaagatctattatggactacccaaatcttaaggcacagctttttaacatgccatttggatatatcttgacacacccactggaacctttaaaggtttgcttgccatcgatagttgatgagttcctgaggcaggccaaggctgccaggttgttcaatgcatctgtccattcagaatttgaagatgcgcttgaatctgatttgtccaaaacttttggaggaatgaatagacttgacatgttcttcccatttgatccttatctgctaaaagaatccgacagatatatgcgtccaaattttgagtactggtccatggtcaagacgacatacaacaattataacagtgatgttgatgatgagctagtggacctcgatgcacctgaaatgaatgtcggcagtttagatgatcatgttgagatagatctcaacagtgatgatgacttggaatactccatgaacaagatgtccataacgccgaaccgctctttctttcatcaaattatggcaaatagtgacactggccttaccatgcctgcgaggatcagaccatcaataagccccccatcataatgggtccaaagatcatcgccgccgccaacttgttgttcacttcacaaaagaaacagccgtatgctgggagtgcattaggatccagcttgtataagagtacaagtatcggatagaattggagctttacttcatagctggtagaagggtcgaacgacccatcttttgcgatgtatccagcccaaataggttagttgttgggatgaaatgtgaagtacagatgtgttattaaaaacgaagcgggagtggttgtgactatagactagcaggtagccctctggtatgtaaaagacaggcctgttttgatgc

SEQ ID NO: 23705 - DNA, 1915 bp, Oryza sativa
  ref <308>: DATABASE ACCESSION NUMBER: AK073795
  ref <309>: DATABASE ENTRY DATE: 2001-12-06
gaggagtcgccaagacgtcgtaggcaacacctcccttcccccctacccttgaaccgaggccgagtcgtggtcgccgcgagtggaaggcaacaactctccaaggcaggcacaggcagcagcagcaggaggagaggaggcaggcgcgggcggcgtgagcagcagcggcagcgccgcattacagccttgggagtaggaggaggaggaggcagcggatgatgatccctagggaaggggcggtgccggagcccgcggcggcgtcctgatccccgaccgacgatcgcggctgctgctgttgctattttttcagaggatggagaatcctcagattgagatgggggccttcaaggcgaacggtccgcaattgcagaatggtgggctacgttccagcatggttcagtcctggaacctgcagagattcgttgagagcgcgctgcggagcatcaggattgtcatattcacttctaagctcaatctgctcttgccgtttgggcctgcgtcgatcattctacactatactaccagcagacatggattggtcttcctattcagcatgctaggaataacacctttagctgagcgcttgggttatgcaactgagcagctcgcaatatacactggtccaacagttggggggcttctaaatgctacgttcggaaatgcaactgaaatgatcatagcaatatatgctttgaaaaatggaatgatccgagtagttcaacaatcattgcttggttccatattatcaaatatgttgttggttatgggctgtgctttctttgctggcggtattgttcatcggaacaaggaccaagtcttcagcaaggcaactgcagttgttaactcaggtttactgttgatggctgtcatgggactaatgtttcctgctgtccttcacttcacgcattcagaagtgaggcaaggagcatcagaggtttctctttcaaggttcagcagttgtattatgcttgtggcatatgcaagctatctctatttccaactaagtggacggaataatgcttatagtccaattggcagtgaagaaatgcccaatgaggatgcagcagaggaagatgaagaatcagagattggcatgtgggagtccatagcatggctcgcgatgttgacattatgggtgtctattctttctgaatacctggttaatgccattgagggggcatctgattcactgaacctacccgtggcttttatcagtgttattttgcttcctattgtgggaaacgctgctgaacatgctagtgcaataatgtttgccatgaaagataaacttgacataacactgggtgttgcaattgggtcatcaacgcagatatcaatgtttgtgattccattttgtgttgtcattggttggatgatggggcaaaagatggacttgaatttccaactattcgaaacagcaacgctcttcataacagtactagtcgtggcatttatgctacaggatggtgttgcgaactacttgaaaggacttatgctgatcttgtgttatctaatagttgccgccagtttcttcgttcacgttgatccacaatccagcgatgattgatgccacggacactgtaattattgtaccaaatacccttgaagcctttactaatcttaattctggtgagttgctcctccgtagcagagctcagcctgctggcaggagctggcagaatgttgacacggccgggaaaatcacgtggtgtcggttagtttgtccatgatctgcagcagcaattattgcacgttgcaatagtcaaaagatctgaagggcatctaggaggaggggtggttgtaatgtatacagattacagaaacaaggaaatgcaatgcaatgtcgcccatgtaaaaagtctccttgcatagttgcattcaattaattcagttaatgtggccctggcccgttctctcc

SEQ ID NO: 23706 - DNA, 1739 bp, Oryza sativa
  ref <308>: DATABASE ACCESSION NUMBER: AK073796
  ref <309>: DATABASE ENTRY DATE: 2001-12-06
gggcgtcgccaccccaccccaccccaacccaagcccaaattcccacgcctcctcctcctcctcctcctcctccgccgcaaaccctaaccccaatggcggaggacggcggcggcgacagggaccagcagaaccagcagcagcagcaggaggaggcggcggcaccggcagccgcggcggcgggggtggggggaggggaggagcaggggaacgggaggggggaggagagcgtgaagctgttcgtggggcaggtgccgaagcagatgacggaggacgagctcgccgccatgttcgccgccgtcgccgtcgtcgacgaggtcaccctcatccgcgacaaggccaccaaggcgtcccgaggctgctgctttttgatctgcccatcaagggaggaggctgacaaggcggtgaatgcatatcacaacaagcgcacccttccaggggcttcaagtccattgcaagtgaaatatgctgatggagagttggaaagactggagcacaaacttttcattggaatgcttccaaaaaatgtaacagatgctgaaatgactgatttattttcgcaatatgggaacatcaaggatttgcaaattttgagaggttcacaacagacaagcaaagccggctgtgcctttttgaagtatgaaacaaaagagcaagcgctggcagctatcgaagctctaaatgggaaacacaaaatagagggttcaagtgtacctttggttgtcaaatgggctgacactgagaaggaaagacaagctcgaaaagcacaaaaggctcaatttcacccatctaatatgtcaaatccaaatgcaatgcaacagtcttcattatttggagctatgcagatgggatatgtaccacagtataatggttatggctaccagccacaaggaacctatggactaatgcagtaccctttatctcctatgcaaaatcaagctgccttcccgaatatggttcagtctgttaatcaaggaagctctattcgtggagtcaattctgaactttcacctaattctgctcctagatcgtttaactcaatgcagttaggcagtccttattcgcctgtgcctagtatgcagtatccgggatcatatcctggtaatgctatcaatagtcgtccttttgtgaattctcacaattcaatgaaagttccaaatgcgaatgctagttctcccacttcttcaagtactagcagcaaccccggtcctcagatagagggtcctcctggagccaatttatttatctaccacatccctcaagaatttggcgaccaagatcttgccggtgcctttcagggttttggtagagtactgagtgctaaagtttttgtagacaaagcaactggtcttagtaaatgcttcggttttataagctatgattctcctgcttctgcacagacagccattagtatgatgaacggataccaattaggtggtaaaaaactgaaagtacaactcaagagagacaacagcaagcacagtaaaacttattgacagcgaccttttgtatgcccacacgatcaggaaaattggtacatatgtgtcacacaaattgatcgttacagttgttacctctggcctccaccatgtgttgtaaggtggcggcttgtgtatctttgttcaattcacattcttgaaaatttgttacattgtgtaatttgttgcagcatagttgtagaatctgtaccatcagatccattgtacatcatcagatattaattcattcaattgtttctttct

SEQ ID NO: 23707 - DNA, 2453 bp, Oryza sativa
  ref <308>: DATABASE ACCESSION NUMBER: AK073797
  ref <309>: DATABASE ENTRY DATE: 2001-12-06
gagtggccgcgctctgctcttccctccccctcccccgagaggccgagagacccgcctgcctgcctccccctcgccggcggcgcgcccgccccgtcgccctcgcccgccgcgccggcatccactgttccctctctttgagaggacttgcaaggagctgaatggagccgaaactagcattcccccaggatagtccaccacttgccatcctctgtgctgctaaggtcgcaggtgtttccctcaccctcgatccgaagctcgcctcgggttcagcacccacacttcaccttggttctggggattttatccacggtgttaacacaattcttcgttacattgctcgtgttgcatctgttaccagtttctatggtcaggatgctattcaggcagcatatgttgatcaatggctcgactacgccccagtcattctttcaggatctgaatttgaagctgcttgctcatttctagatggatacctagcatcacgaacctttttggttagttatggcttgtcaattgctgacattgtagtatggtcaaatcttgcagggacaggccaacgatgggaaagtctaaggaggtccaagaaatatcaaaaccttgttcgctggttcaacagcatagcagactattcagacacactagatgaagttgtctctgcttatgttggaaaaagggggataggaaagtctcctgcaccaagcctgaaagagaaattacctgattcaaagcagaatatctcaatccctgaagtagatctcccaggtgcaaaagttggggaggtctgcgttcgctttgcccccgagcctagtgggtatcttcacattggtcatgcaaaggctggacttttgaacaagtactttgctgagagatataaagggcgcctgatagttcgatttgatgacacaaacccttcgaaagaaagcaatgaatttgttgagaacgtcctgaaggatgtagaaacactgggaataaaatatgatatagttacttacacatcagattattttccgcagttaatggaaatggctgaaaatttgattaagcaagggaaggcttatgttgatgatacaccaaaggagcaaatgaggagtgagagaatggatggtgtggaatctaaatgtagaaataatactgttcaggataatttgtcattgtggaaagagatgatcaatggaactgaaaggggtatgcagtgttgtgtacggggtaaacttgacatgcaggaccctaacaaatcacttcaagatcctgtatactaccgttgcaacactgatccccatcatcgtattggctcaaaatacaaggtctatccaacttatgactttgcttgtccatttgtcgacgcattggaaggagtgactcatgctctccgctcaagtgaataccatgatcggaatgcacagtactatcgtatccttcaagaaatggggttaaggagggtagaaatctatgagttcagcaggttgaatatggtttacacggttcttagcaaacgcaagcttctctggtttgtacaaaacaaaaaggtggaggactggactgatccacgcttccccactgtacaaggcatagtacgtcgtggcttgaaggttgaagctttggtacaatttatacttgagcagggtgcctctaaaaatctaaatcttatggagtgggataaactctggacaatcaacaagaagataattgatccagtgtgtggaaggcatactgccgttctgaaagaccagcgtgtgcttttcactcttactaatggtccagaggaaccattcatccgagtcttacccaggcacaagaaatacgaaggtgctggaaagaaggctacaaccttcacaaacaaaatttggttggagagtgctgatgcatcagttattagcatcggtgaggaagttactctgatggactggggaaatgctatcatcaaagaaatcaagacacagaatggaattataactgaactgcttggggaactccatcttgaggggtcagttaagatgacaaagttaaagctaacgtggctgccagatattgaagatcttgtatctctctcgttggtagagtttgactacctaatcaaaaagaaaaagctggaagaagatgataatttccttgacaatcttaatccatgcacttgccaagagtttccggctcttggagacgcaaacatgcggaatctcaaacaaggagaaatcatacagcttgaaaggaaagggtattacaggtgtgatgctccatttatccggtcttccaaaccaattgtccttttcgctattccagatggacgacaaaagtccgcaacgaagtaggaacctataagatggtttctggaacagcaaatacaagaatcatgttcctgataaaactggtgttgtaaacttgttgattggaattttaaacttaaataattttgttgctccttttattctgactatatgaaaattagctgatcgatc

SEQ ID NO: 23708 - DNA, 934 bp, Oryza sativa
  ref <308>: DATABASE ACCESSION NUMBER: AK073798
  ref <309>: DATABASE ENTRY DATE: 2001-12-06
gggtttggagcatgcatggagccaagccaaaagggccaagctaggggggccatctatatcactggaagagcaggaatttggttagttcaagtcccaaatgatgattggatctaaaaagaaagacatctatatatgtctcatgattgagctgaactggcctcaacttaggttcacaacttcagctacgaaggttgcatgagaaaattcgatgataaagacaagggaatgctatcttctgatgagaaaggcgacaggatacataatagtgcaagtttaaagcaatgaagggtgcaacctcaatggtgatgcaaaaagatcggcatggtgtattgcatcattattcattcaggggcggaatcggggtcaagaggatcccctttcacagattctgctattattggaaccacatcagaactccaattcgactgtcatgctgtaaaatgcagatagtgtacagctcttccattctgaaggtctcataggcatttcatcagccactcctacctctgaagaaataaacaggggatctgcggagaatcaccaagaaatgctttttgatgattgtctccaccatcttcaagcctttattttgtgaaattgtaaatggatgtgatgtaatgccaatattggatgatgaatcgatgtcctgttggtctactgtcaccctgctgagtccccccaccttactgtgctggtgataatgaaagtggcagtggcagttgccttttgacttgtcaatgttgaatccatttcatttcatctcaagcaaactcaatccaattgaagcttaattaggctcatcgatctcactggttgctgcaatatctaatagtgtacactcagcttttttgacctttcattatttccagaccttcgaacatacattttgttttgaatcagttgttttgtttatggaattatgaatttaaatttt

SEQ ID NO: 23709 - DNA, 1597 bp, Oryza sativa
  ref <308>: DATABASE ACCESSION NUMBER: AK073799
  ref <309>: DATABASE ENTRY DATE: 2001-12-06
ggggtatccttcccaattccccgctgatctctatccaatccgcgccgcgcctcctcctctccaagacaggagatgccgccttggtggtggtggtgggatggatggatgtgagagcagattgattgattttagctgctgctgctgattgattgattgattggattggtgatgataattgctcaatcggatgcatgcgatgatccaattcttcttcttcttcttgtgatctacaaattccaatacatatactagtagtagtaagagtaagcattcatataagataatggaggcgtcggatctgaacacccacttgccgccgcgcaagcgactgctcgccggcctcaggatggccgcccctccctgcgccgatgctcccccacccgcgctcctcaccgccgatctcgccgcccgcctccgccacatgatggcctcctcatcctctcccgacgacatcgtccaggccgccaggtcggctgcctccaccgccgcccaagctgccgcggccgcccgggccaccgccgccgagaaggcggccgtcgctgccaaggctagggctgctgcccgcgctgccatggagttcctcgattccatttccaggcctgcctcatccaggaacggcctccagctcaagctcaaatccaggaagaagcatgtgcaggtcaagctcttgtacaagcccaatggccgccttgaggagggtagaggaggacctcctactactggggatgcttcttccaagccccgcaggcgcggcagggagaccgatgaagaggttgctcgcaaattgcaccgcgccatgaacagctcgccgcgcatttccttcactggaccgaagaggccacgcaccattgctgctgagaatgggggtgtgcttgatgcttgcaatggttcttcaccttatccaccaacgtttgaggtcagcacgataactaacggatgctctttagggcaatctagtgagctccctgtgccattttccgagcatgagggtcttgatgatgataataaagattcttctggtcatgatactacaaagagtagggctatcgttggtaatggagttggagctggaaacctaagtgctggtaggaaagtgaagatcaagagaaaggaactgcttttgaaccaacataatagtaaagatacacaagaggccaaagaaataaaaccgtctatagattctatacgatacgacgaatcaaagcaaaatggagctgaaaagagattgaaccagcttgtagatgcaaaggatcccggtgatggtttggcgccgatgaagatctcatctgtatggaggttcaaaaagttcaaaacatcacactgctcttctgacagtaaggttttgcacaacgtgtgcccctctacttcggcggctgagacctctgcttcggtgaaagctgattagtgaggtaccttagctcatagttggcagatgcttgtcttagctatgtttgttgtgagattttgtatgttgaagctaccattcggacaaacagggagggcaggtgatctctcccggtagattccccaccttctatttgattttcatacaaacgtgcgtgcttttatggtatataagttactggatatttctacc

SEQ ID NO: 23710 - DNA, 1106 bp, Oryza sativa
  ref <308>: DATABASE ACCESSION NUMBER: AK073800
  ref <309>: DATABASE ENTRY DATE: 2001-12-06
gatgcatggtaactatataaactactataccttcacagctaatgtatctactacatctaaaaacagctagctaattaactcaccatcatggcgttcggacgccgttcactcttcttgccggtggtgggcgtcgcggccatcctgctgctcgccgccggccacgcgaccgccgtcaacaccggcgagaccgtcgtgttctggggccggaacaaggacgagggctctctccgtgaggcctgcgacaccggcctctacacctccgtcatcatctccttcctcgccgtcttcggccacggccgctactccctcgacctctccggccacgacgtctccgccgtcggcgccgacatcaagcactgccagtccaagtacatccccgtgctcctctccatcggcggccagggcggcgcctactccctccccaccaacgcctccgccgccgacgtcgccgaccacctctgggactccttcctcggcggcggccgagccggcgtgccccgccccttcggcgacgcggtggtggacggcgtcgacctcttcatcgaccagggcggcgccgagcactacgacgagcttgcccggcggctgttcagccactacaagttcgagatgctgctgacggcgacgacgaggtgctcgtacccggaccaccgcctcgacatggcgctggcgacggggctgttcacgcacatccacgtccgggtgttcggcggcggcggcgacgccggctgcacgacgcgccacagggcgtcgtgggagaggtgggcggcggcgtaccccggcagcctggtgtacctcggcgtggtggcctcgccggagcaggacgccaacgcctacctgccgcgtaaggttctcttctccgacgtgctcagccacatcgtcgagaagcccaactatggtggattgatgatctgggataggtactacgacaagaagaccggctactccgctggaaaagttttttaattaacttccaatagactggaaattagttaaccatggtgaccaatactaatgaataaggatttgtagaaaacaaggatgtggttttgtcaatgatgtgcttctatgctcataaataaatacacggacttaataagaggatc

SEQ ID NO: 23711 - DNA, 1306 bp, Oryza sativa
  ref <308>: DATABASE ACCESSION NUMBER: AK073801
  ref <309>: DATABASE ENTRY DATE: 2001-12-06
gttctcggaccagaagcggctcgagatgtcgatgcgggagtttgtcgaccactgggctgcgagttcgagcaatggggattctgatggttccctgctgtacctgaaagattggcattttgtgaaggagtaccctggttatgttgcatacaccacaccaacattctttgccgatgattggctcaacatgtatcttgatagtcatcctatacatcgagattctgacattgccaaccatacaaatgaaataaactgtgctgactatcggtttgtttacatgggaccaaaaggaacttggactcctcttcatgctgatgtttttaggtcatacagctggtcggcaaatgtatgcggcagaaaactatggctctttctaccaccatcacaaagtcattttgtatttgataggaacctacgatcttcggtctataacataaatgatgatgtttctgaaaagcagtttcctgaattcaataatactaaatggctagagtgcactcaggagcagaatgaaatcatttttgtgcctagtgggtggtatcaccaagtccataacctggaggatactatatcaataaaccataattggtttaatggctacaaccttcattgggtgtggaacttgcttcatgaagattacaaggtagcaaagattatattgaagacattcgggacatatgtgacgattttgagggactatgtcaacgcaacttagcagcaaatacaggcatgaacttctatgacttcttcgtcttcataacacgttttgctttagccaatatagttgagctttaccatattcagaatccaaaagatactgacttcatttcagccgaaactgctaaccactttgtctataatctcatgtcgatccgtgatgttgcatcaaaaatggtatctacagaagctttcaataccgagaatatttgtaatatctcagaacaaaaccggagtgctttctctgatatcataaaaatattggaagaagagagtttcagaaggttattggtggcgttgtcaaaggcatataattacatagacagaggacaaaaagattgtctcaaaatgaaggattcaagtcagaagggttgtttgtcagtaacctgcttaaaacctgactgtaatgttgttggtgacattatttctttcatgcgtgagattcatggacctatggatttggtaacactaattgatagtgctctctctgatagatagttataagcttacctggcactgtaaacttatgtttgcaccgttgcataacctatttctttaggaaccctggatacttgaccactgttaaatgccc

SEQ ID NO: 23712 - DNA, 1270 bp, Oryza sativa
  ref <308>: DATABASE ACCESSION NUMBER: AK099381
  ref <309>: DATABASE ENTRY DATE: 2002-08-28
gaataggccgctttatcatcatctatctcttcttccagttccagctctctctctctcgtcttattgttggtcgttgacaagttttggttgggcatgaggatgagggagagcaacgaggaggagaagaagagcgtgtgcgtgatggacgcgtccggcccgctcggccacgccctcgtcgcccgtctcctccgccgaggctacaccgtccacgccgccacctacccccaccaccaccaccatccagaagaagagtaccagcagcacccccgcctgaagctgttccgcgccgaccccttggactaccacgccatcgccgacgccgtccatggctgctccggcctcttcgccatcttcaacaccccttcctcctcgcaatcgcaatcgcactcctgcttcctagatgaggaggagggtatggtggaggcggaggtgcgagcggcgcacaacattctggaggcgtgcgcgcagacggacaccatggagagggtggtcttcaactcctccgtcaccgccgtcgtgtggaggcctcagccggaggaggacgatgacgctgccttgcaattggacgagaacacctggagcgacctcaccttctgcagaagattcaagctgtggcacgctctggccaagacgctatcggagaggacggcgtgggccctggcaatggacagaggagtagacatggtggccatcaacgccggcctgctcaccggccccggcctcaccgccggccacccttacctcaagggtgcacccgacatgtacgaccacggcgtcctcgtcaccgtcgacgtcgacttcctcgccgacgcccacatcgccgcctacgagtgccccaccgcctacggacgctacctctgcttcaacaacgccatctgccgcccggaggacgccgccaagctcgcccagatgctcatctcctccgccgccgcgccgcgaccccctgcgccgccgagtgatgagctcaaggtgatcccacagaggatccacacaaagaagctcaacaaactcatgctggacttcaccagtggcgtatacggggacataaattaaattaaactaggggatttgccttcctttattttatatatcacacgtgcaactagacatgtactactcctcttgtatcttcttctatttcttttattctttctcctctaaagggagggaaatttggtttggtcaaatgtacatgttgtacatggccaagctgccacatgtattccattcttacagagggtaagatcatttcaatgattacttatatacc

SEQ ID NO: 23713 - DNA, 1063 bp, Oryza sativa
  ref <308>: DATABASE ACCESSION NUMBER: AK073802
  ref <309>: DATABASE ENTRY DATE: 2001-12-06
ggggtcgccgactcgccgccgccgccgccacgtccacttcagttgcagtcaccggtggcgatggcggactccggcagcgcgagcgagcggcgagaggaagggaagaagggaagggaggaggaggaagaagacgacgtcgtctgtctggacccgtcgttcttcgtcgaccgcagctacgagacgactacgttcaccttcggctcgcaagtgctccacctcctctgcctccgcgctgcttccactgattatgatcttactggacagttagtatggccaggtgcagttctgatgaacacctacttgtctgaacatcctgagactgtgaaggatcattcaataattgagctaggatctggggttggcattactggcatattgtgcagccgtttttgcaaagaagttgtcttgactgatcacaatgatgaagttctagagattataaagaagaatatagagatgcagtcatgttctgggaatgccaatgcagtgttgacagcagagaagctagagtggggaaactatgttcatataagcaatatcattgagaaacatccttctggatttgatctcatccttggagctgatatttgctttcagcaatctagcatttcctgtctctttgatactgtagagaggcttcttcgtattcaggctagtaaatgtagattcatattggcttatgtatcacgagctaaagtcatggatgttctagtgctcaaggaagctgaaaaacatggaatgcatgtcaaagaggtggatgggacaagaacaaccatctcaaatcttgaaggagtcatatatgacattaccctcaaataatgctgctattcgcgcatgttgatgaagtgcttaggtgatcagtagtcatgaaaagtacatgcaacttcctctgaatgactacatcctttcggaggaggaaagaataccacactgccacagtaaacagcattattgatgaagggcttcaattcatacgctgtcatgctgatttgatgtaggttttttggagagggattcgatgtggtttttgaatgctttgattatcatggatagtagttttgtc

SEQ ID NO: 23714 - DNA, 2605 bp, Oryza sativa
  ref <308>: DATABASE ACCESSION NUMBER: AK073803
  ref <309>: DATABASE ENTRY DATE: 2001-12-06
gacctcctgggctcctctctccactaccaacctctcgcggagacccaaaccctagctcccaaatcccgaccagccgaagcatttccaacggaattcctctgttcggctcctcctcggggttcaaatcgagcttgaatttgtggtttttttttggggagggttttttttttctttttggtgttgtttttggatgcgagtgtggcttggcagggttggtggtggtgatgccatgatgcacatgctggtggcccccgatggaggcggcggaggggagatgccgccgccgtacgggggagccgcggcggcgccgccgccgccgatggagcaggagctggagctccaccgcgacaacgccgacgacggcctcgacggccacgtgcggtgcttgaggtgtggtatatccggcaacgcgacgccccatatgcgccgcggccctgatggcccaagaactctctgtaatgcgtgcggcattgcgtacagaaaggggaaaatgagacgaatgatagaagctgaaccacctatagatgaagctgcacttgctaagctggttcctgaggtaggcatggaatttgagagtgaggacaaggcctatgaattctacaacaaatatgctggacatgttggttttagtgttcggaaaagtacatcacacaaatcttccggaaatattaccaaagtaaggacttttgtttgctcaagggaaggttacaacagggacaaaaaatcattggaagcaaagaagccaaggctggatacaagaattggttgtccagcgcggttgattattaaagtcacaccagagagtaaatacagagtcactgacttcaaagcggaccacaatcatcagctggcccctccttcgacaatgcatatgttaaggtcacagaggatattgacagaacttcagtctggggaagcagaattgtcagatgattctgtcatgacacctacaacaaaagcaaccggtgatcttgttgtgagacaaattggtttccttcgaagtatctctctcctcccagcagattataagaattatctccgttcaaagcgtatgaaggctatgcaactcggtgatggtggcgcaatattgaaatatttgcagacaatgcaaatggaaaatcctgctttcttttacaccatgcagattgatgaagacgacaagctaaccaacttcttttgggctgacccaaaatctagagaagacttcaactactttggtgatgtcctctgtctagacacaacttacaaaataaatggatatggcagaccattgtcattattcctcggagtgaatcatcacaaacaaacaattgtttttggtgcagctatgctttatgatgaatcatttgagtcatataggtggctgtttgagagttttaagattgctatgcatggaaaacaaccagcggtagctttagtagatcaatctattccacttgctagtgcaatggcagcagcatggccaaatactactcaaagaacttgtgcttggcatgtatatcagaactctcttaagcaccttaatcatgttttccaaggttcaaaaacatttgcaaaggattttagcagatgtgtatttggctatgaggaagaggaagaattcttgtttgcctggagaagcatgctagaaaagtatgatcttaggcataatgagtggctgtctaaattgtttgatgaaagggaaagatgggctttggcatatgagagacatatattttgtgctgacataataagtgcacttcaagctgaaagcttcagtagtgttctgaaaaagttcttgggccctcaactggatttactgtccttcttcaagcattatgaaagagccgtagatgagcaccgctatgctgagctccaagctgacttccaagctagtcaaagttatccaagaatacccccagccaagatgttaaagcaagctgcccatacatataccccagtggtgtttgagatctttcgtaaagagtttgagctgttcatggactctgttctgttcagttgtggggaagctggggcaacctctgagtacaaagtcgctccctctgaaaaacccaaggaacattttgttagatttgactcgagtgactgctcctgtatctgcacttgtaggaagtttgagtttatgggtattccatgttgccatatgttgaaggtgctcgattacagaaatatcaaagaattacctcagagatatctgttgaagcgatggagaaggactgccaagtctgcaaatgaagaaaaccaagggacactcctgtttctaatatgcatgagaattcatttcgcagaagctcatgatgcaggtgacttgaatctaaacattattccttctgcacggtgcctgctccacgatactggcgttgaagcagtgagaacaggccatgcggagctcccccgaataaaagtttccaacttgtaaattatgcagctgtaggaaatcccagctattgaggcgcccatcctacttaggctcttagactagattctggtatgaaatcatatgattgtgctgcccacctgcacccagggaaattttgtgcattctgtaaacagtctatttatcctagcccattcataaaagaaaaaaaaaggtgatcagatgccg

SEQ ID NO: 23715 - DNA, 1027 bp, Oryza sativa
  ref <308>: DATABASE ACCESSION NUMBER: AK073804
  ref <309>: DATABASE ENTRY DATE: 2001-12-06
ggccctccaaatccacccggggtccccctaccattttaaccccgcggccttagccgctaatgctccgcgtttgaaatcgctaagcgcacccgaaaccctagccccctcccatcccgagtcccgaccgccatgggcaagtacatgcgcaaggccaaggtggtggtctccggcgaggtggtggccgccgccgtcatggagctcgccgcggcgccgctcggggtgcgcacccgcgcccgctccctcgcgctgcagaagaggcagggcggggagtacctcgagctcaggagccgcaggctcgagaagctccctcctcccccgccgccgccgccgaggaggagggcgacggctgcggctgcgactgctgatgcgacggcggcggagagcgcggaggcggaggtgtcgttcgggggggagaacgtcctcgagctggaggccatggaaaggaataccagggagacgacaccttgcagcttgatcagggaccccgatacgattagcacccctggatctaccacaaggcgcagccactcgagttctcattgcaaggtgcaaacacccgtgcgccacaacattattccagcatcagcagagctggaagcgttcttcgctgccgaagagcaacggcaacgacaggctttcatcgacaagtataactttgatcctgtgaatgactgccctcttcccggccggtttgaatgggtcaagctagactgatagattttcaggaaaagaagggcaccatggacctctctgctccctccacagtagtagcgtggcagaggcgcttaccgtcaagttagctttgatcctgttgtaaaaatttagggttagcctgtagactcaatggtcaatgtgaacatacagaactgatgctgagttacaaccctaatccctcaactacaatgtaacccttaacagctcattctgtaaggaaccacctcctcctctagggcctagctagccttatcatctgttattaccagttgctggattaatgaagttagatctagatattgtgtcacagttt

SEQ ID NO: 23716 - DNA, 2504 bp, Oryza sativa
  ref <308>: DATABASE ACCESSION NUMBER: AK073805
  ref <309>: DATABASE ENTRY DATE: 2001-12-06
gctcagtaactgcacccacctccacacctacacgcacacagacaaacaaagccaaaccccccgcctcgcctacatctcgcgctctccgccccccgcccgcctccactctgcatggacgcctccgccggctcgtcggccccggcggcggagatcaggggtgaggcggcgagggatgacgtctttttcgctgacgataccttcccgttgctcccggacttcccgtgcctttcttccccgtcaagctcaaccttctcgtcgtcgtcgtcgtcgaactcgtccagcgctttcaccaccgcggcgggagggggttgcggcggtgagccgtccgagccggcctcggcggcggacgggtttggtgagctcgccgacatagaccagctcctcgacctcgcgtcgctgtccgtcccgtgggaggccgagcagccgctgttcccggacgacgttggcatgatgatagaggacgccatgtccgggcaaccgcatcaggcggacgactgtaccggcgacggcgatacgaaggcggtgatggaggcggccgggggaggagacgacgccggcgacgcatgcatggaggggagtgatgcgcccgacgatctgccggcgttcttcatggagtggctcacgagcaaccgtgagtacatctccgccgacgacctccgcagcatccgcctccgccgatccaccatcgaggcggcggccgcgcggctcggcggcgggcgccagggcaccatgcagctgctcaagctcatcctcacctgggtgcagaaccaccacctccagaagaagcgcccccgcacggcgattgacgacggcgccgcgtcgtcggaccctcagctccccagccccggcgcaaaccccggctacgagttcccctccggtggccaggagatgggctccgccgccgccacatcctggatgccctaccaggccttcacgccgccagccgcgtacggcggcgacgccatgtacccaggcgccgccggcccgttccctttccagcagagctgcagcaagagcagcgtggtcgtgagcagccagccgttctccccgccgaccgcggcggcggcgggcgacatgcatgcgtcgggcggagggaacatggcctggccgcagcaattcgcgccgttccccgtctcctccacgagctcctacaccatgccgtcggtcgtgccaccgccgttcaccgccggattccccgggcagtactccggcggccacgccatgtgctctccacgcctcgccggagtcgagccgtcctcgacaaaggaggcccggaagaagcggatggcgaggcagcgccgcctctcctgcctgcagcagcaacgtagccagcagctcaacctgagccagatccacatctccggccatccacaggagccctcccctcgcgccgcgcactcggcgccggtcaccccgtcgtcggccggctgccggagctggggcatctggccgccggcggcccagatcatccagaatcccctatcaaacaagcccaatcctcctcccgccacgtcgaagcagccgaaaccctcgccggagaaaccgaagccgaagccgcaggcggcggcgacggccggagcggagagccttcagcgctcgacggcttcagagaagcggcaggcgaagacggacaagaacctgcggttcctgctgcagaaggtgctgaagcagagcgacgtcgggagcctcggccgcatcgtgctccccaaagaagcagaggttcacctgccggagctgaagacgagggatggtgtctccatccccatggaagacatcgggacgtctcaggtgtggaacatgcggtaccggttttggcccaacaacaaaagcaggatgtatcttctcgaaaacacaggtgattttgttcgttcaaacgagctgcaggagggtgatttcattgtgatctactccgatatcaagtcaggcaaatatctgatacgtggtgtgaaggtgaggcgcgcggcgcaggagcaaggcaactcgtcgggggcggtaggtaagcataagcatggctcgccggagaaacccggcgtctcgtccaatacaaaggccgccggcgccgaggacggcaccggcggcgatgacagtgccgaagccgcagcggcggcggcggcaggcaaggctgacggcggcggctgcaagggcaagtccccgcacggcgtgcggcgttctcgccaggaggccgccgccgccgcctccatgagccagatggcggttagcatctgaagaaacagatgacagcagcagcagcaagcttcagtccatttgaaggttaattattagctagctagctccgtattataaccgatggtaaaacctcctaaaaaaattaattaagttgtgcatgtgaatcgtagcgctagctagggatgatatttgatcagtaacccgtagtccccgtaccagtgacgcttaagtacgcatggtttggttgttcatcgttgaacccctgtagtgtgtcgtcgtcctgtacatgcatcgaattatggaattaattaattacc

SEQ ID NO: 23717 - DNA, 715 bp, Oryza sativa
  ref <308>: DATABASE ACCESSION NUMBER: AK073806
  ref <309>: DATABASE ENTRY DATE: 2001-12-06
gtgccacacggcatcgcgactttgcgagaccgcaagccggcggtggagcatcgcgctccacccaccgctagcgcccaccgcccggcgcccgcgccaccgctggtccaccgtcctcggctcctcgcgacctcgcccccaccgtcttcgccgtctcgtaccgccgccatctcgcgacgctgtcccgccgtttcgcagtgccgtttcgcggccgcggcgccgtcccgccgtttcaccgccactaccactactgacgacgacgccacagccacaccaaggagccgacgacgcctcgcctcgcagtcgcagcagcagcagcagcccagcggcaatagccaacagcccagcggcagcagccagcagcccagcgacgagccgacgatcataaaccattgatttgatttcttttgtgctgcagatttatgatggaatcatcaaatgtaagtagctgttttgtgattgatccaagtactgtactgatggattgatgtgtgttgctgttctgtgatgaccgaaacaattgatgaactatgtactgatgatggagtgatagctcatagcagattagcagtatagcactgaataatagtgtatactatatatcttatacaagggtgttatgcaaattatatgaaggtatagaagaatatattgctgttctgttttgctgtaatttttttaaaatatttgttatgcaaattatatgaaggtatagaag

SEQ ID NO: 23718 - DNA, 1870 bp, Oryza sativa
  ref <308>: DATABASE ACCESSION NUMBER: AK073807
  ref <309>: DATABASE ENTRY DATE: 2001-12-06
ggcggcatcgtcggagccgacgcgaatggcttcccgcctcctaaccagatcaaccgccgcgcgcctcctctcccacctccgctcctccggggccctgagccctacccaccaccaccaccaccacctcgataatggcgccgccttggcctccctcctgggactcggccgcggtggcctccctgcggcggccggaccatggtcccctcgagacccgccgacgcggtggttctcttccccggctacggtggcggaggcgccgatgaccgcggacgggctcacggtggactcgatcgcggggaaggggtggacgatcctccccgaggccgagagcgactggcgcagccacgccgccgccgtcgcgcagtccgtcaagctcatcaagaagcggctcaagtggggatggatacttgagagatcaaggcagttgtctgtggtgttggagaggccggacctctgggatgatccagttttcgctgggaaggttagccgtgaacatggtgagctcatgggcaagattaaatcagtgaaccaattcgagcaggagttgatggagcacattgacatgttgaggcttgcaagagaagaggacgataatgaacttgagacggaaaccatgagggcattagccgaaatgagaagaagtgcaaaggagaaagaactgaatgcattgctttctggagataatgactcttgctcttgcttcattgaggttcaggcaggagctggaggtactgagagcatggattgggctgcaatggttatgaacatgtacagctcatgggcccaacgacgaggatacacagtcagtattatagaagaaatgcctggtgaaatagcaggaatcaagagggcaactatcaaagtggatggtgaatatgcatttggatatgctaaagccgaagtaggtgttcatagattggtacggatttctccatttgacagtggaaagaggcggcacacttcctttgctgctgtggctgttgtacctattcttggtgatggttctacccgataccagataaaagattcagatcttcggatagagcgtttccgctctggtggtcctggtggccaacatgccaactgcacagaaagtgctgttagaattgtgcacattccaactggtataactgcaacttgtcaaaatgaaagatcacagcatatgaataaggcatcagcaatggcagtgctccagtctcggctggaccagcttgagattgcccgccaagcacagatgaatgcagaccacacgcaatcactctctgaaatcagctggggaaaccaaataagatcttatgtactccatccatatcgtatggtcaaagatctccggacaaactacgaagtatccgaccctgattcagtcctcaatggggacctagatgatttcatcttgaactttttgtcaacgtcactggatgaagctgattgaagtgcctgtgcctgaagtccctgaagacaaaccatgcttaaatttagcctcagcctcaatgatcaatcattcgatccactgagatacagtccaagagatggtaagagggcagcttcattctttccaatactgacaaatatgacatctcaaatggtgaaagaccaaggtgtgcaacaatttttcaagtgcaaatatcagagctagaacgagcttatattagctttctagttagaaaaatggaaatataatgaacttttgtttcattgttagcccatagttcctttttgtattactggtgctggtgctatttgtgaatggcaatagtagtctcctaaatatagtcgtttctagtttctactcaatccagctgtcatacataaattgtttctttttgtattccactggcatgaatcaactatggtgcaatcttttccttgc

SEQ ID NO: 23719 - DNA, 1878 bp, Oryza sativa
  ref <308>: DATABASE ACCESSION NUMBER: AK073808
  ref <309>: DATABASE ENTRY DATE: 2001-12-06
gagctgataattaaaagagagaaaaaaaaaaactcgccccgtcgttccctcctcagctcctctcccctcggaagtcgaaaccctaagaaacgcgtagcgaaggcgaggctcccgagagagagagagagagccatggcggtggcggcgccggggcagctgaacctcgacgagtcgccgtcgtggggctcccgcagcgtcgattgcttcgagaagctcgagcagatcggcgagggcacatacgggcaagtgtacatggcgagggagacggagacgcaggagatcgtcgcgctcaagaagatccgcatggataacgagcgcgagggcttccccatcactgcaatccgcgaaatcaaaatcctcaagaagctgcaccaccagaacgtcatccagctcaaggagatcgtcacctcgccaggaccggagagagatgagcaggggaaaccaatccatggtaacaagtacaaggggagcatttacatggtcttcgagtacatggaccatgacttgactgggttggcagataggcctgggatgcgtttcaccgtgccgcagattaagtgttacatgaagcaactccttacaggccttcattattgtcacattaatcaagttctgcatcgtgatattaaaggatccaatctcttgatagacaatgaaggtaacttgaagctggctgattttggcctagcaagatcattttcaaatgatcataacggaaatctcactaatcgtgtgatcactttgtggtacagacctccagagttgctgctcggaagcaccaagtatggaccagcagttgacatgtggtctgtcggttgtatttttgcagagcttctcaatggaaagccaattctgccaggaaagaatgagccagagcaactgagcaaaatatttgatgtttgtggcacacctgatgaatcaaactggccgggtgtcacaaaaatgccttggtacaacaatttcaagcctccccgccaactgaagagacgtgtaaaggagtactttaagcattttgacaggcttgctctggatctgcttgaaaagatgttaacactagatccagcacagaggatatcagcacaagatgcacttgatgcagagtatttctggtctgatcccctaccatgtgatcctaaaagcttgccaaagtatgaatcttcacacgagttccagaccaagaaaaaacgccaacaaatgcgtcaagccgatgaagctgcgaagaggcaaaagacacaacatcctcaaccacatggccgtttgcctccaattcaacaaacaggacagccccatcctcaaatcagaccaggccagccgatgaacaacccccatgcgccgatggctgctgggccaggccatcactatgcaaaacccagagggccaggaggctcaagcaggtatccacagggtgggaaccaaggtggaggatatccgaaccgcggcggacaaggtggtggtggcagctatggaaatgccccttaccctcaacaaggtcgagggccgccgccaccgtaccctggcagtggaatggccggaacaggtggcccaaggggtggcgttggtggtggctatggaggaggatcaaattatccccagcaaggcggcccatatggtccttctggcccaggccgagggtcaaattatccccaacaaggtggttctcgcaaccagcagcagtacggaaactggcagtagtacgttacctaaactcagcaacactatgccaattgtcttaaactctgatgttgatgctaacttgtgcttaatctattctattgggcattacattttgttagagcgtgtattgccctgaatccagtaggaattgtagcaatgttgttcgttttgattaaagaatgataagagatacacaaattgagc

SEQ ID NO: 23720 - DNA, 2426 bp, Oryza sativa
  ref <308>: DATABASE ACCESSION NUMBER: AK073809
  ref <309>: DATABASE ENTRY DATE: 2001-12-06
ttgacgttataactatttaatcccttggctatgttattttggcagcagccaacaccatcgcatgagtcatttgtaggggcttttgcgcagactgatgcacatgctgtcgtatactctccattgtagatgtatgaaagagtgttgcaaccaatgactacaaacttattgtgcagattagagaaccggtatggccatgttgaaaagtcaagtgaccatcggctagattccattgactttgttacatcattgtagcaatatgtcgacagggcatttagtgccctagtttgaccatggagcaacgaaatatttaggacctcaacattaataaggaatggtttcatagatccatcagcagtcttgttgcaatagattacgaagcccggttcgatagcacactctgtgccaatgccaaatgggtatgggatttccatatcaccgcaatgggactggcatccaggagccggctgagctgatatagatgatagttgtgccatgattgcaatactgagcagtatcgctgatgccatatcaactctctgaaaatgatgtttgtagagaaatttatttataagtggcgcttaaaggcaagaaaatgaaacagagcaaacaaacttaatggcttgttagttccaaaacttccaaagcagcatgttgcctattaaccttacaactcaccagttctttttacttggcattaatgccattgatgcaatcttcaatgctcatgtttgatcattgattttttttctcattaaaatcattaagaatatagctacgcaaaagtattttcatgatgaatcataacatttttgcacatactagtgagataacttttaatatttgactgcaagaatgttataagggaaagccatctctaccgagagcattaggttcagaatctagagtaacgtggcttcaatggtgatgaagagctgcaacaacatgaccagaaatttttcatggtgttctctaaagctaaacgagtaaactttcagtggtatcaaactatcttttaccaactgtggcatttattccgaaaaccatgtgttatgtacaaccatagttagttcattttgcatataaggccaaacaacaatagatattcatatcttggttgtctgtcagaaaaagaaaatacaatagtgaacaaatgtttgcttactttcatattgtctgtactgaatcgtagttgtatgtcttttttttggcaattaattacggtcagggccgcaaaatggctcttactgcaaatatcaattcaaatttaaataataactgttgtacaggattaattatggtgcactaagttattattaaacaaaattaactgacagtgaaacatttatccaatttaattgctctattttttttctgatccttatcaagtactagcattgacagtgagttgaattaagcaatcctctgtctctgcctcaactgctatgggattaggacagtacttgccaagttttggccatataccatcagttttcttgggtgctaccttttgttttgtggcaggcttagcgctacttggcagtgttctaaaaatcaccattagaggcggcacctcggtgccaagcaccagctcagcgctgcgaatagcacattggtccacgtcagcgcgatggtcaacatcggtccacgttggcgcctaggtgcagcagcgattagtcaactaggcggctgactggtggtggtggtggtctggttctggcggctgcttggatagttggatgcatgttgctgctgtggtgtaagttgccgatttcagcctttggcatgttggcaactatcaaacaaatggtagaatcaaatattcaaatcctaaacacatgtattttctacaagttggatgttggcatgctgcaatttgttatgttgtatacttaactcactatctaggacctggtcaattctccctcccaagttggctctaggcgctacgcatcaccctggtgccagactagcgcctagcaccttcttgaacactgctacttggtcatggtttcatggtcagagatgatcaggtaatacgtttcttgtttgtataacttgtataggagtaatgtcacctcctgggttatcttacaatgaacctcatggtttaagcgaacattgtggttgttccttgcaggtacagtaaaaaaaaaactggcaagaatctgtgggatctggctaaggcgaagaccagggatattggaagtgtacaaatggtcagtgagtttcttctctcttttttttttttttttgtggtgatctcgtcaagtagatattgagttgcaaatacctagtactagtatctgggctgtctgaacacaacaatgttgaacgatgatcacatgatatatttcagctgatgtataaatcaagagaattattcatgtattccgaacaaggtcatatcaatactatattacagtacg

SEQ ID NO: 23721 - DNA, 1852 bp, Oryza sativa
  ref <308>: DATABASE ACCESSION NUMBER: AK073810
  ref <309>: DATABASE ENTRY DATE: 2001-12-06
agtctccacccggccgagctcaacctccgcgccgcaccggacggtcgcacccgcgtctcccacctccccggcggcggctcccctcatctccgccggtcgcctcctccaagcctccgcgacgcgcacggcagagatgtaccgcatcgccgggagccacttgcgctctctcaagagatacagttatagtaggtttgctagtacaagtgttgtgaagcagtcttcaggtggtttgtttagctggcttcttggggagaagtcaagccaattgcctcctcttgatgtccctctcccgggtattacccttcctccaccactgccagactttgttgaaccgtctaagacaaaagtcaccactctcccgaatggcatcaagattgcttcagaaacgtcagtgagtccagcagcatctgtgggactgtatattgactgtggttcaatatatgaaacacctgcttcatctggagcatcacatctgttggagagaatggcgttcaagagcactacaaacaggagtcatttgcggctagtacgtgaagtagaagccattggagggaatgtctctgcatcagcctctcgtgaacaaatgtgctatacctatgatgcattcaaggcctatgtacctgagatggttgaagtgcttattgatagtgtgaggaacccagccttttttaactgggagattaaagagcagctggagaagatcaaggctgaaatagctgaagtttctgataatcctcaaggtttacttctagaggcactccattctgctggctattctggggcactggcgaagcccctaatggcacctcagtccgctattcataggttggacagtagtatccttgaggaattcattgctgaaaattacacagcacctaggatggtccttgcggcatctggagttgaacatgatgaactagtttcaattgctgagccacttctgtcggatcttcccagtgtgaagcgtccagaagagccaaaatcagtttatgtgggaggagactatcgttgtcaagcggactctgacaagacacatattgctcttgcttttgaagtaccaggtggatggtttgaagagaaaactgccatcattgttactgttcttcagatgctcatgggaggaggtggttctttctctgctggtggtcctggaaagggcatgcattctcgattgtatctccggatattaaacaactaccatcagatcgagtcattctctgcattcaacagtatctacaaccattctggtctttttggaattcatgcaacaactagcccaaattttgcttccaaggctgtggatttggcagcaggagagcttcttgaggttgcaactcctggaaaagttacacaagaacagcttgatcgagctaaacaggcaaccaagtctgcagttttgatgaacttggaatccagagtcgtagcatctgaagacatagggaggcagattttgacgtatggggaaaggaaacccattgagcatttcttgaaagatcttgaagcaatcaccttgaatgacatttcttctactgccaagaagatcatttcatcaccccttacactggcatcatggggtgacgttattcatgtcccgagctatgaatctgttagccagaagtttttctcaaagtaagcaagcctatcgcatggcttgcccccgacttctaaagttgcagacgtgtaactctactggtccttggccctaaccgctggaattcacaataataaattgtctagacttatttttcttagatattttaattttaagcaaataatagttactcaaacggcgatgatgctgactgtcctttttattcttttcctttattatattgatccataattttgcgcc

SEQ ID NO: 23722 - DNA, 2128 bp, Oryza sativa
  ref <308>: DATABASE ACCESSION NUMBER: AK073811
  ref <309>: DATABASE ENTRY DATE: 2001-12-06
ggcttccctccccccctcccctccctttccttcccctccaaggaagctatccccgtctcgcctaaaccctagcgcgccgcgatgtccggctccggcgtccccgccggccgcggctcccgcagcttcgacttcggcgccgacgacgtgctctgctcctacgacgacttcgccgccccctccgagcccaagcgccccgatccggccgacaaggactttcacgacagtagattggggagaccatttggaaaagcttatgaacaagagagttacggcaaggaggatgtactttttgctgttgagaagtgcatgaagaaatatgctgataatttgctgcgatcgcttgagggaattactaatcgtctttcacaactggagatctattgctataagcttgagagatccatgggtgaacttcgaagtgatgtgctccgtgatgagactgatcaaagattgaagtctcttgagaaacatcttcatgaagtgcacagatctattcaaatccttagggacaagcaagagttagctgaaactcagaaggaattagccaaatttcaacttacacatgacacatctaaaaagaaggaagatatgccaacaccatctttccctgagcaaaagacgcttgaagaaaaggcagatgcacctggtcagcagctggcgattgttttgcctcatcaggtgaactcatcccttgcacctagagcttctcaaccagtccaacagtacaaagatcagacagtgcagcagccacctagctcttctgtaccacagcaggaccgttatgttcttagccaagccattgtttactacccacagcgtcaagctccaggcattcaggatacacaggggcagcaagtacaaccagaggtgcagtacttgccagtaaggccttcagcaacgcaagatgttcctgtccatgcttcatctcaacagtctcaggcagcaaatcaaacccagcctcagtctttccctccctaccagcagcagtggccccagcaatcttcccagccggctcctgcaccagtggcccagccacagccgactttctcgcagccatttcctccacctgtgcagcagccccaattatctaacactcagcagtttcctccacaaccaatgcagcagccccaactatctaacactcagcagtttgctcctcaaccagtgcagcagcctaatgctcaacagtttcctccgccaccagtgcaaccgcagcaatctaacactcagcttcctcctcaggcaatgcaaccacaacagcatcctcctgtacaaaatcagatgaggcctcaaactccaccaaactaccctcattatcaaccccaccagtccttgaaccctccccctgaaactctacctggcagcatggctatgcaaggaccatacaacacggttgctccggcagcggggagccgttctgaagtgccatattcatacggaggacctggcatgccaccaccgcagcacaacatgcaaaggcagcagctacctcctccaagccagggctctttcggacctccaagtaaggggggctatgccggcccgccacaatatgcgccgcagggcagctcacatggctacaacactgcatatggctaccccccaagtggtccttcagcagcccaggcacctcagatgcctccagctccaggtaatgttggtatgagtcacccaggttcgcatcagatgatgcgcggccatccttatggggaaatgattgagaaggcaatcaccatgggatatcccagggagcaggtgatgaatgttattcagaggatgaccgagagtggccagccgatggatttcaacacattgctggaccggttgaacgaagcagggtccggagcaccccctcgtgcgtggtgatttcgtcctgggttgggtttggacctctctccatcccggcacggcgctcatacgtgtgcaaagagtggtactatcgtgtagtagttgaataaataagatttgaagtgatgccatctgttgactgttgcgtatttgtacgatgtacatattatacattgatcttaatcttcatgtacttcctgcacgtgtaccaccaacttctttgcaattggaccatttcagcagatctgtgctaatccaaattattgccaggtatattgtc

SEQ ID NO: 23723 - DNA, 1302 bp, Oryza sativa
  ref <308>: DATABASE ACCESSION NUMBER: AK073812
  ref <309>: DATABASE ENTRY DATE: 2001-12-06
gacaattccgctagtccgagtcaaaacaaaatcaaattcaaattcacgggataattcaaagatgctgcttaatcaggcgtcgagagaggtggccgcgctggacagcatccggcaccacctcctggaggaggaggaggagacgccggcgacggcgccggcgccgacgcggcggccggtgtactgccggagctcaagcttcggcagcctcgtggccgaccagtggagcgagtcgctgccgttccggcccaacgacgccgaggacatggtcgtgtacggcgccctccgcgacgccttctcctccggctggctccccgacggctcattcgccgccgtcaagccggagtcgcaggactcctacgacgggtcctccatcggcagcttcctcgcgtcgtcgtcgtccgaggcggggacgcccggggaggtgacgtcgacggaggcgacggtgacgccggggatcagggagggcgagggcgaggccgtggcggtggcgtcgagggggaagcactaccgcggggtgaggcagcggccgtggggcaagttcgcggcggagatcagggacccggccaagaacggcgcgcgcgtgtggctcggcacgttcgactccgccgaggaggccgccgtggcgtacgaccgcgccgcctaccgcatgcgcggctcacgcgcgctcctcaacttcccgctccgcatcggctccgagatcgccgccgcggccgccgccgccgccgcgggcaacaagcggccatatcccgacccggcgagctccggctcttcttccccttcatcctcttcctcctcgtcgtcgtcttcctcctccgggtcaccgaagcggaggaagagaggcgaggccgcggccgcgtccatggccatggcactggttccaccaccgccaccaccggcgcaggcaccggtgcagctcgccctcccggcccagccatggttcgccgccggtccgatccagcagctggtgagctaagtggcgatgtggtagtggtagtggtgatttagccatcttgtgcgactgtgcgtgatcgattgctgcttgatgggtcgagcaagttcagaacagagcatcactctctgcagaatagaagaagttcatgaacagagcaatgcactgctccaagaaatgtgacgagttccaggcaatcacgccattgttcttggatgattgcgcagcaccagaaaaaagggaaaaaaaagattgtttgtgaaatgtggtgaggttttgtaagacttgcacaaaatttgagaaaaagaaaaagatcaatacatataaaatcttactagaaaaaagactttccc

SEQ ID NO: 23724 - DNA, 1531 bp, Oryza sativa
  ref <308>: DATABASE ACCESSION NUMBER: AK073813
  ref <309>: DATABASE ENTRY DATE: 2001-12-06
gagtcagaagcacacggagccaagcaaaatgctcgccctccgcaaaaccctcctccacggccgcctccccgccgcgccgccggccgccgccgccgccgccatcgcgtctaggatccccgccctcctccgtcgcctctcctcttctcccggagacgggcagggcggggacgaatggggctcgtcctggtccaccggcatcaccaaggaacacttcgacggctccgacgccgcggtcggccgcccggtcacctccccgtccaagccggtctcccctgagcttgcggccgtccgggccatggacgaggaggacgagatcttccgcgccatggagcgcgacaacagggaggccaaggcgtacgtggactcgtggggcgaccggatgcgggagacgtgcgagctgctgaagcaggtgcgcgagccgggctcccggggatcctacctcaaggactcggagaagcaggagatgtaccggctgcacaaggaggaccccgagacgtacaccgtggagcgcctcgccaaggacttccgcgtcatgcggcagcgggtgcacgccatcctgtggctcaaggagatggaggaagaggaggagaggaagctgggcaagccgctcgacgactccgtcgaggtcctcctcgacagttgcccagagtttttcaattcccatgatagggaatttcatgttgcatcacttccttataaacctgacttcaaagttatgcctgagggctgggatggcacaaccagagatcctgatgaggttctgtatgagatttcaatgaaggaagatcagatgctgtatgaggaatttgttcaacggttacagttcaacaagaagaaggtggcaggcgaggtgaagtgtcataagtacagccgacgacggcccgacgatggatggacctacatggttgagaaacttggagcgcagtcaaagcggggctctggaggtggctggaagttcgccagtttacctgatggatcaagccgcccactaaacgatatggagaagatgtatgtgaagagggagactccaaaacggcggaggaggataatggcacccttcaagtaacaagaatacactctacttaccgttttgcaggttttcttaacactcttttggcattattcaggaaagcagaaatactgaaaccgtctcaagttttaaccaccagtgttggtcctgtccttttgcagcatagggaggtggttattgtattcatgtcatttgtagcaagttccgttgcccccttctatatttgaactgttggcgtatcaccatcacctcattgccaggcagcacactcgataaccttgggttgccaggcaacttgtagtcaacatttcataaaatcaccttttgcaatgtgatgcacagttatgtttaatgcaagtaaggaagtagtccataattaaggttgcttgtagctgtggatggaaggcctaaaatacattggtgatcttcctaagatacatttgtgatccggggagatatgcttttctgattgtcttaataaaatcgtagtgcgttttttcc

SEQ ID NO: 23725 - DNA, 827 bp, Oryza sativa
  ref <308>: DATABASE ACCESSION NUMBER: AK073814
  ref <309>: DATABASE ENTRY DATE: 2001-12-06
ggggaagggaagggaagcgacttgcggcggagccctccccgcgtctcccccgccatcccaccaccgccgatggccgctaggcccgccaccgacggggagggcgtcgacgcctccgtaccctggtggcggcggaagcgcccgcggctgccgccgccgccgccggaggccgacgcggaggaggtgaaggcggaggcgctggcgctgatggcggcccaccccgtgctcccgcggctcgtcgtcttcgacctcgaccacaccctctggccgttccagtgtgatcgtctgccaaaagatgaacccccttatctttatccacaagctagaggtatactgaaagcacttaaggataggggaattgagatggccattgcttctcgagcatccaggaagaaaggtgttgcaaaagcatttctggaaaaacttggcattcacttcatgtttggggctcaggaaatattctacacttggagtccaaagaatgagcatttccagagtatccatcggaagacaggtgtacctttcaagtctatgcttttctttgatgatgaggccagaaatattatagcaacaaggaaattgggggtcagttgtgtgcttgtggatactggtataactctggagaagttaagaactggactaagcaactatgctaatagatcagcatcaccaaatgcagagccggcgggcgggcgaagtgctgagattacgtggtatttagatgtggctactggctagttaatactagtctgggaggacttatgtatgctcatgtattatatactcctttggagcacgtactttaatataattttaatataatttaaggg

SEQ ID NO: 23726 - DNA, 3191 bp, Oryza sativa
  ref <308>: DATABASE ACCESSION NUMBER: AK073815
  ref <309>: DATABASE ENTRY DATE: 2001-12-06
gcctccccaccccgcatcactcgccgccgctcctaaacccctcgaagagaaccccctcctcccctcgcgccaccgccgcccgcatccgcgccgtcaccgggagggagagcagcagcggcggaagcaggagcagctcgcgcgagagagggaggaagccatgggaggcggcaggaagcgcgggcgcacgcagcgccgccacttcaagcaggggcgggagaacgtctggaagcacaacccgcagcgccccccggcggctggcggcgaaggagccgaaggaggcgctgccgaggggcgcgaagggaacccctcgtggcagcccttcgccaccgagaacccagccttcgaggactactacaaggcacagcaaattattccggagggagagtgggacgacttcatgaacatgctccggaaaccgctgccagccactttcaggattaatgcgagctgtcaattttatcaagatatttgctcacagttagaaaatgacttcaggaagtcattggaaactgaggttagtgatgagcatgaagaagatgctattcggcctttgccttggtaccctggcaatcttgcatggcatttgaatttttctcgaatgcagctgaggagaaaccaggcacttgagggttttcatgaattcttgaagcgagagaatgaagttggcaatataactaggcaagaggctgtcagcatggttcctcctttgtttctgaatgtgcaacctgatcatcatattcttgacatgtgcgctgctccaggatcaaagaccttccagttacttgagatgatccatcagtctacaaagcctggaatgcttccaaatgcccttgtggtagctaatgatgttgatgtgcaaagatgcaatcttcttattcatcagacaaagagaatgtgcacagccaacttgattgtgacgaatcatgaagcacagaactttcctggctgtaatcttgcaaagtttagttcagaaacatgcacggatgagtccaaactgcagaggttggaatttgatcgtgtattgtgtgatgtgccttgtagtggtgatggaactgtgcgtaaagctcctgatatgtggagaaagtggaatgctggtatggggaatggactccatcgtctccaagtagaaattgcaatgcgcggtattggtttgcttaaagtgggtggaaggattgtttactcaacatgttcaatgaatcctgttgaaaatgaagtagttgtcgcggagattctacggagatgtggggattctgttgaacttcttgatgtttctaatgagctacctgaattagtcaggcgtcctggacttagcacctggaaggtacgggatagagggtcttggtttggcactcacgaagatgtccctcgctacagaaagaacgtgatatcaccaagcatgtttccttcagggaagggcaccatggatagccatgtggctattggcagtgttgagatcaacacagatgtaattgatgctgatatgaaagattcaacaaacatggtagagggagaacaagaaacgaaaacagcatctgatgattcaataatggtggtgatcccaatactgaagagacgagcaaacttgagtctaatgaagttccaaacgactctgataaaaagtcaaattctacgtctatccgcacagaacattcaaatttccctctgcatcgctgcatgagaattgttccgcatgatcaaaacagtggggcattttttattgcagtccttcagaaaatctcccctattaatgggaaccaagaggcagaacttataaaaggcgagcacaatatttcaaaggatagggctgagaaacttgagaaaggtctcggatcagataaggtgccacataaagaaaataccgtgcagcagcaaggagttgatgatggtaatgttatggatgaacagcaaaatggagatgtggataatgaaacatcaaatggtaaaagctcagaggaagctaaagtaattgttaatgaggcagaaaatgatcaagcaggaccaagagataggaggaggaagccacagaaccaaggaaggtggagaggggttgatccagtgatatttttcaaagatgaagctacaataagaagtatagtatctttctatggtatcaaggatacatttccgcttgagggtcaccttgtgactaggaatcctgatgctggccatgttaaaagaatatactacgtgtcaaaatcagtgcaagaagttttggagctcaatgtaaaagttggtgagcggcttaagattacctcacttggcctaaagatatttgaaagacagtcatcaaaggatggctcaccatgcacatttaggttgtcttcagagggtttaccactgctgcttccatacatcaccaaacagattctctacgcttctgcaattgacttccagcaccttttacaatacagaactattaaatttcctgattttgtggatgcaaaattcggtgaagaagcttcagctttgttgcctggttgctgtgttgtagtactttgggaagggcatcagaacatagattccatcgccatggatccttctgcaatcgccattgtttgctggaaagggaagaccaatttgtgcgtcatggtttctcccctggatgggaaggagctgcttgagaggatttgtttacgttatgggctcaaaatccccaaagcggatgatgtaaaacccagcatgaagattgatggatcagacgagcagcctgatctcagcactgaggcagttgatccagaagctgtgcccgaaagcaaagcatctgacatggagattgcagatgctaaagaggtggagtaatcctgctgaatgctgatgctatccaaggccacatattatagctggatacaacatcgccccatcatttgcctaccggtattagttgagcgatgagccgccatttttcattgattctggcatttacgccgttttcctgtttgatttatcatattctgtttctgaagaatgggtgaatgaactcgcccattagtgaaagggcaccacgttgctctaaagcccatctgtccatgtcatctggtaatcgtgcacgtattgccccctccatacttccggctggctcatccacctgtaacctatcagtatcagcttatttttcttcgaagagaatgtattacagggagtcttaacctgaactcttgaacctgataaattttgatatgacaatatttcag

SEQ ID NO: 23727 - DNA, 2467 bp, Oryza sativa
  ref <308>: DATABASE ACCESSION NUMBER: AK073816
  ref <309>: DATABASE ENTRY DATE: 2001-12-06
caggcgttcccttctcttcctccttccttctttcctgctgcctgcctagtctagtctaccaccctcctctccaacctttctccttcctcctcatctcctcctccaagccgagccaccgaaattcctccaatcctacagttcgctcgcatctctccctctcctccccgtcccaggcgcggccaggacctccggatcggtgaaaagaggccgccttggtgcttcttggcgccgaatcttggggaggaggtcgctcagattcggatttagggtttttggtggtgagagggggaaaatggcgacggccgtggcgtgcgcggagagggcgacgagcgacatgctgatcgggccggattgggcggtgaacatcgagctctgcgacatcatcaacatggatcccggacaagccaaggatacactcaagctcctaaagaaacgcctgggaaacaagaattcaaaagtgcaaattctgacgctttatgtgctagagactctaagcaaaaactgtggggatgttgtttaccagcaaatcattgagcgagacatattaagtgaaatggttaagatagtaaagaaaaagccagatttaaatgttcgggagaaaatattgagtttgattgacacatggcaagtggcttttggaggtgcatctggcagatatccccagtatcacgctgcttaccaagaactcaggaatgctggtgttgattttccacctcgtgaggagaacacggttccactgtttacacctcctcaaactcaaccattgaggcaaccacatctatatccacctccaggtcaaagctatgaagatgcagcgatacaagcttctcttcaatctagcgccccttctgcacctgccttgagtctaagtgagattcagagtgctcgaggaattgtggatgtgttggatgagatgttaaatgctttggaccacaggcaccctgagggtgtgagggaggaggtcattgttgaccttgttgggcagtgccgatcttatcaaggtcgagtcatggaccttgttagcaatactggtgatgagagccttctatttcaagctctcggtttaaatgatgaactgcagcgtgttcttcagcgtcatgatgacatcgcaaagggagtgcctcccggttcaggcccagctcctgctgctgctaatgtaaaccgaggaacagcccctcctaggcctactggggtttcattttccccacttcttaatgtgcaccatgaagacgatgagccagaagacgagttctctgttctttcccgcaggtctgcaagggatggcacagcagcacagggcaatctaccttctgctccaaaaagtgaaaggccttacccaagcccacttcttcctccgccaccatcatcaaagaggccagttttcacggaggcaagcagtgttgactatcttagtggcgactcctacaagacagaaaaagtatcagatgactttattaatccaactgccccagccaatatacctgcgccgtctcattcaaaaacagaaacgaatccgccgccaagttatgatagccggtcagaaagtgtgtctgatgacttcataaacccaactgcagcacccagcttctctatgccttctcgtcctatgagcgagtcaaatcgtcctgctgtcaataggcaggagagtctacctgatgatgattttataaacccaacagctatccctggtttttcttcgtcttcaaatgctaacaagtatggagactccggtgaagatcttccaaaagctccatgggaagcgcaagctccaggttccttaccgccacctccagcaaggtatggccaaagacagcagtacttcgagcaacagcacggccttcctagtggtaacaacggtgccgggtacaatggactggtgagccaaacagaaggcctttcgcttaatcagaggaataccgagaatgagagaggttcatcagttccgaccgcatcacggcagaccaaacctgaagattctcttttcaaggatcttgtcgatttcgctaagaacaaaccgtcttctccatctaaaccagccaacagccgcaggactcgctgaccaatgggtgctagggaagcactttgaggagttgccaagctatttggctttacaggtttagcggctttagagatgatatataccatcaaataagagtttcagtctggatttcattaccttgggaattactttggctgtgcaaggtgttattgtgcattcgacagttagaattcacagatatcagatacattcagtcatgatcataatgggttgtgtgttgtgtagtcaggatgtttttttttttggaacctttgccacattttttttccttttccattcatgctcctactttcctttgctgtatatattactccatttggcagcaatattcatagttcaggttgcaatttgaagttggtgtaactttactgtttttttcagtgtggagaaactgtaacatggcctttg

SEQ ID NO: 23728 - DNA, 2890 bp, Oryza sativa
  ref <308>: DATABASE ACCESSION NUMBER: AK073817
  ref <309>: DATABASE ENTRY DATE: 2001-12-06
gtttgcgtctcgtataaaccctaagtctctctcttatccattcgtctctcttctctcatcagaagcggagcccgcggcgagagagcacagaggtatagtggtgggagggggaaggccatggcgccggcgctgagcaggagcctgggggcgtcgtccgttgcggcgctgaggccgaccccgtcgcggggccggggtcccacgctgcggagcgcggtcgcggtgcaggggaggggagcggcggcggtggccgcgagaggggtgaggtgggaggccgggaggaggaaggggaaggggaggatggtcggggtcaggtgcgaggccgccgtcaccgagaagcccgccggggaggaggaggcggccggcgagcagttcgagtaccaggctgaggtcagccgattgctggatttgattgtccacagcctgtatagccacaaggaggtttttctccgtgaactcgtaagtaatgcaagtgacgcgctggataagctgagatttctcagtgtaactgattcctctgtattgtccgatggcggtgagttggaaattaggatcaaacccgacccagaggctggcacaattactatcactgatactggcattgggatgaccaaagatgaactcaaagattgccttggaaccatcgcccaaagtggcacctccaaatttttgaaggctcttaaggagaacaaagatcttggtgcagataatggacttattggtcaatttggtgtgggattttattcggcttttcttgttgcagagaaggttgtggtttccactaagagtccaaaggcagacaaacagtatgtatgggaagctatggctgacagcagctcatatgttattaaggaagaaaccgatcctgagaaaatgttgacacgcggaacacagattactctgtttttaagagatgatgataagtacgagtttgctgaccctggacgtattcaaggtttagttaagaactattcccagtttgtttcattccccatatatacatggcaggagaaatcaagaacagttgaggttgaagaagaagaaccgaaagaaggtgaagaggcaacagagggtgaaaagaagaagaaaaagaaaacaatcactgagaagtactgggattgggaattggctaatgaaacaaagcccatatggatgagaaatccaaaggaagttgagaaaactgagtacaatgaattctacaagaaggcattcaatgagtttttggatcctcttgcttacacccactttacaacagagggtgaggtggaattaaggagcgtcctctacattccaggaatggcacctcttagcaatgaggagataatgaaccctaagaccaagaatatccggctgtatgttaagagagtcttcatatcagatgacttcgatggcgagttgttccctagatacttaagctttgtaaagggtgtagtggactcaaatgatcttcctctcaatgtttcccgtgagattcttcaagaaagtcgtattgtcaggatcatgcgcaaaagacttgtcaggaagacatttgatatgattcaggagattgctgagaaagaggacaaggaggactacaaaaaattttgggagagttttggcaaatttgttagacttggctgcattgaggacacaggaaatcacaaacgccttgctcctctgttgcggttttactcttccaaaaatgagacagatttgataagtcttgatcagtatgtagagaacatgccagaaaaccaaaaggcaatctactacattgctacagacagtcttcagagtgcaaagactgctcctttcttggaaaagttggttcaaaaagacattgaagtaagagcacgatttttatttaccatttaccaaaggtttgttgtttgcttgtgctacagttctggctcagaggcacacttttcctttttcaggttctctaccttatcgagccgattgatgaggttgccattcagaatttacagacatacaaagagaaaaaatttgttgatatcagcaaagaagacctggaattgggtgatgaagatgaggacaaggaaaatgagagcaagcaggaatacactcttctatgtgactggataaagcaacagcttggtgacaaagttgccaaggttcagatatcaaaccggcttagctcttcgccatgtgttcttgtatctggcaaatttggttggtcagcaaacatggaaaggcttatgaaggcacaaacacttggtgatacttcaagcttagagttcatgagaggaagaagaatttttgaaatcaaccccgaccacccaattgtcaaggacttgagtgctgcttgcaaaaacgagcctgaaagtaccgaagccaagagggccgttgagctgttgtacgagactgcgctgatctccagtggatatactcctgacagcccagctgagttgggtggcaagatctacgagatgatgaccatcgctcttggcgggagatggggaagaccggaggagtctgaagccgccaccagcgaatccaacgttgaggtagagtcttctgaaggttccgcgacggaagttgttgagccctctgaagtgaggcccgagagtgatccatggaaggattaatgtgcttgcaattctaggcataccttttcttagcccaaaggtaggataggagcagactgcaccacagaagccagatctatgatgaactgagcacaaacgtcttagacattgggtatttgggtttgtcatgtttgggttgccgccagggctaaaaaattttgtaggcatttgcttatttataagctcgtaatgagaaggccttatacatatgtcctgctattattttagttttttacttctgaggtagaggaaaaacaaaagctgaaatgtgtttgcgatatcaccgttaatcaagttcagtattc

SEQ ID NO: 23729 - DNA, 1112 bp, Oryza sativa
  ref <308>: DATABASE ACCESSION NUMBER: AK073818
  ref <309>: DATABASE ENTRY DATE: 2001-12-06
gataatattttgctggagaatagtcggatgcaggaggcgaaaaaagattcgatctttggaggccttgcctctggggcgcccgtcggagcggatcgcttcccgtttgatcctcgggagtattcgccggcgatgagctccgactccagggagctgctcgggatcgatcccccggagctcatcttccccttcgaattaaagaagcaaatctcgtgttctctgcacctaacaaacaagacagatgaatatgtcacgtttaaggttaagacgactagtccaaagaagtactgcgtccgtccaaataacggcattgtggctccccagtccacatccaatgttcttgtaacaatgcaagctcagcgggaggcgccaccggacatgcaatgcaaggacaaattccttgtgcagagtgccatagtgacacaagagctcacaccgaaggatatcaccggagacatgtttacgaaagaatcaggtaatgtggtggatgaggtgaagttaaaggttgtttatactcaacctcacccgacatctctcaatggcgggtctgaggaaggtctaggaagcttgagttatcaagaagcaacaaaaggatctagagaatcagaaacagtaacctctgagccattggccttgatttcaaagttgaaggaggagaagagttctgccattcaacagaacatgaagcttcgagaagaactggatcttctaaggaggcaaatggggagtcagcacggtggtttctcactagtttttgtgctggttattgctattctgggaatcctgcttggttttctcattaagagatgagcgtctgtgatcatatatcttgttccacttttctgtgaaagagttgatagtcgtgggccttgtctgttgtgttagccatttgtaccaactcatgatcgtcttatcttaggacctgattcctcttgtaatttctgactatcaaattccaatcagtagctactgcatccagtcaataagtcgtctgtccatttagcatgtttgagtataagttttttttggtcaattgtattcatcttttgacacctgtaaatatgacacttcccttaacattatggcttgcgatatgtatatgctggatccttgtg

SEQ ID NO: 23730 - DNA, 1811 bp, Oryza sativa
  ref <308>: DATABASE ACCESSION NUMBER: AK073819
  ref <309>: DATABASE ENTRY DATE: 2001-12-06
ggaaccactccgtcctctcctcgcccaccgccgccgccgccgccgcccatcctccttcctctcctcgggcgctgaaccgccgagctgagcagccgccccgccgccccctcctccgccgccacaagcccgatcgaggggtgtctcgcccgggatatatatatatggcggcggggccggcggggatcgtgtggcagacgccggcgaacccgccggagcggcaggactacatcttccgcgacggtagtagcaacccgcagcccggcctccgtctcgtccccaacgcgcgcatctttctttctgcccgccaaaccccctccccggaggccccggactgacgcggttggttattccccccccattttgcttcgcagggcggcgctacgtgaggccctactacttcgagttcatctcccatgtgaaaaacagatgggctgggaagaccattgttgacctcttcaccgatgagttcaagggccggcctcgtgaatattatgttcatgcagtgaagtgtgggaggcttcaggtggatgaccaaatggttcacgcagactatgttgtgcaatcatcacaaaagataagccatttcttgcacaggcatgaacctccagttttgggtggtgatattacaatccttcaaaatgaagctgatgttgttacagtttgcaaacctgcatctgttccagttcatccgtgtggtcaataccgcaagaatactgttgtcggtattctgcaagctgaacatggattggtgcccctatttctattttgacagccgtgcatcggctagatcggttagtttcaggtctccttatatttgctaaaaatgctgacaaagctgaaagtttcaggcaacagatcgaagctagtttgctgcagaaagaatatgtggccaaggttgttggggtgtttcctgatggtgagcaaactgttaatgcaaatgtgcacttcaacgcacgggaaggaaggagcactgcagaggtttgtgatggtgatggtaaagctccaattggaaaacaagcctgcaccaagtttcagaggatctgtactgatggaatccacagcattgtcctgtgcaaacctgtgactggccggactcatcaggtcacactaccttatacacatcaacattgatttgctcgttcaaacttcaaacaatcgaaacgacctggaaatttcccaaaaaaatgaatctaaaagcctactacatagaaaaagttcaagtggcctttaaacttactgcactatctgaatcataatggaaatcttaatcctgctagagcttggcaaaatgcattttaggtgcacacaggtgacacgcaaactgttgagtgcctctttatttagtcatagctcccttgtccctgttttgataacatgcttcatgcccaatccgttacttccaaaataatcaaattatcagacatctgttcaccatagcatgtctctgatgcaagatgagatagatgtggtcataatttttctgctgattctttgtgccaatagtatgccctcttgtcctatggttttgttttttcagttacttatctatatttctgatacagctttttgtttgacaaatgtagataagggtacatctaaaacacattggttacccaatagccaatgacgaggtgtacctttccgagaatttttctccacgttcgtcaaagggaacaagaatcaacagagcaaccacgctagcttgttcattgccatcttcagatcctgacagttgtgctgaccttgggaacaatgatacaaacgaagatacagaagccgatgaggagttcagcatcgatccgatgtgtacg

SEQ ID NO: 23731 - DNA, 550 bp, Oryza sativa
  ref <308>: DATABASE ACCESSION NUMBER: AK073820
  ref <309>: DATABASE ENTRY DATE: 2001-12-06
gatcagcagcagccacagcaaaatttggtttgggataggtaggtgttatgttaggtctggttttttggctgtagcagcagcagtggaaggggcatgcagaggagcaggagattcagtttgaagctggacttcacttttgcctctctctcctgtgcttgcctcttccattcctgctgctaggctgttctgtggaagtttgcagagtttatattatgggtttaatcgtccatggcatcagcatcagcagcggtaggagaaacttttctgttattgcaccaaactctcaacatttcggtcattctgctccaggtctgaattcatatccatttcactaattctgtctacaggtatgtcatgacaatgcggccgtgcgagctccatgagctcgaatgccattgcagtggattcaggacaacgaaatggacactgtttttcgttggaaatttgggcgtatgccgttgtaaaattcatgtttcagagaaatgccgctacaaaatgtatctatgagcttgaagttatctcaaagctatcagtaacacattatttggtc

SEQ ID NO: 23732 - DNA, 898 bp, Oryza sativa
  ref <308>: DATABASE ACCESSION NUMBER: AK073821
  ref <309>: DATABASE ENTRY DATE: 2001-12-06
gctctcccgcaaacagcacaaaaaggcagcagctttgctctgctcgggtgttccgccgccaccgccgccgccgacgaatcactccggcgggctcttccctcctcctcgtcgtcgtccaccggcgaccggcgcttcgtacgatgttgaacctctttaagataaagggacagaagaaggaagaggcggcaaatacaaatgggagacctcctgctaagaagcaaagtccaggagaattacgtctccataaagacattgctgagcttaatcttccaaagaaaaccaacattacttttcctaatggaaaggatgatctgatgaacattgagattactcttcggcctgacgaaggatactatgtgggtggagcttttgttttcactttacaagttcctcctacttaccctcacgagccgcccaaggtcaagtgcacgactaaggtttatcaccctaatattgacttggacggaaatgtctgcctgaatatcctgcgtgaagactggaagcctgtcttgaatatcaataccattgtatatggtttgaaccttcttttcattcaacccaatgacgaggatcccttgaaccatgatgctgcggctgtcctccgagatgacccacaaaagttccggaggaatgttcagacggcgatgtcgggaggctatgtcgacagggtgcattttccaaggtgtaagtaaaggtgtgtgtttgctggtgctctgtggctggcttctgcccaccttactcctgaataccgttctgcaatctgaacaatgtgacttgcccaagaaatgacatatttgtgttacatttgagtatgaatgatgcttggttgaaatgtactggaatcatgtaagcgcaacgatgtttaaactgaaatgtcaaatgatgtttggaacttggc

SEQ ID NO: 23733 - DNA, 1452 bp, Oryza sativa
  ref <308>: DATABASE ACCESSION NUMBER: AK073822
  ref <309>: DATABASE ENTRY DATE: 2001-12-06
gaatggcatcgtcgttttggctcgtctcctcccccgcgactataaaaacgggagctttgctgctgcgccggccgccccaccacctccggtccatctcggccgccgccgctgtcgctgtcgcgatcgcaatccccgcctagatagacttccccaagaacccgccgccgccgctgcaggggtggcgtggcatcgcgggagaccagctcgagccttcagcctcttttgcgccgccgccgccgccgccggtcgatccgtgttcttggctcaggcggcgtcaatggcggcggcgaatgggagcgcctgcggcggaggcggcgtggacaaggagaaggaggagttcaagcagatctacggggtgctcaaggaggagctgctcagggaccccgccttcgagttcaccgactcgtcgcggcagtggatcgatcgcatgttggactacaatgtacctggagggaagtgcaatcgtggtctctctgtggtcgatagctataagctgttgaagggcaccaatgttctaagtcaggaagacatgtttctcgcgagcactcttggttggtgcgttgaatggcttcaagcttactttctcgtgcttgatgatatcatggatgattctcacactcgacgtggtcagccttgttggtttcgggtgcctcaggttggctccattgctatcaatgatggaattatccttcgcaaccatatcacgcgaatgcttcggctccactttagaggaaaactttactatgctgatctccttgatttattcaatgaggtcgagttcaagacagcttcaggtcaattgctagaccttatcactactcacgagggagaaaaagatctaaacaaatataacataggagttcaccgccgcattgttcaatataagacatcctactattcattttatctgccggttgcttgtgcactgttgctatctggagaggacttgaccaaatatggtgctgtagaagacattcttgttaagatgggaatatactttcaagtccaagacgattatctagattgttatggtgaccccaaatttattggcaagatcgggactgacattgaagattacaaatgctcttggctagttgtgcaagcccttgagcgtgctgatgagagtcaaaagagcgttctatttgaaaattatggaaagaaagatccagcctgtgtggcaaaagtgaagagcctctacagagaactaaacctagaggcggtctttctggactatgagaacgagagttacaagaagttgattgcggatatagaagcccagccaagcatagctgttcagaatgttctgaagtccttcttgcacaagatctacaagagacagaagtagggggggtttctgtgcaggaagctgtccattgttgcatgtttcttctctagcaactgatgttgtatgttgcaatttgctgatcttggataataatgttgcaaggtgtt

SEQ ID NO: 23734 - DNA, 718 bp, Oryza sativa
  ref <308>: DATABASE ACCESSION NUMBER: AK073823
  ref <309>: DATABASE ENTRY DATE: 2001-12-06
gggctgcatgccttcctttgactttgcgacggagaagtggagtgtggccctccaagggccgttgaacagaattctcgaggaatccaatggcacgctcagctatcatgaccttgccaatcagcttatgttatctggacttaaaggcactttgtgtacatcgcactggaatgatcaattttataccgtggatctatggtttctaactgattctgaaaagggtacatggtccaaagatcataggattaatgttgatgctgtttttcatgggattggagattatctgaaagtgcaacctttgcttgtgacggatgagggaaagatagtactctcgatgcagatgggatcaaaaggggttgtgcagatttatgatccagtaactgacacttcctcggatataattcagattagtatctacactggagcaagtgtgttcactggaagtttattatgtccacagagtgtgtgacaaggttggcagggcattgtacgaggtgctaccacaaagctgggcacttaggatctctactgctctgatgatgtttcggtttggtgtcatcaaggtgtagctgatgtccctcgaaaatgtaacaaaaaaaatggtgtagctgatatttgctgtgtcttcgtcatgtctctgaatctctgatcgatcgcgttattgcgatatgttctgtaatcatatcaacaattctggagttaagcatatgccgttagctcg

SEQ ID NO: 23735 - DNA, 1427 bp, Oryza sativa
  ref <308>: DATABASE ACCESSION NUMBER: AK073824
  ref <309>: DATABASE ENTRY DATE: 2001-12-06
ggccgcgcctgcgccaccaccaccaccgttcgtccgctcgccgcgtcgacgagctcctcctccgcttcgcgcttcgtgtcagggtttggagtggagtggagggggaaggaaaagggggagggatgatgcacgcgaagtcggagtcggacgtgacgagcctggcgccgtcgtcgccgccgcggtcgccgaagaggggcggcggcgtgggcgtgggcggcgcgaactactacgtgcagagcccgtcgcgggagtcgcacgacggcgggtacaagtcgtcgtcgatgcaggcgacgccggtgtacaacagcccgaacgagtcgccgtcgcacccttcctacggccgccactcccgctcctcctccgtcagccgcttctccggcaccctccgcgacggctcccgcaaggccggcggcgagcgcaaggcgctcaacgacaagggctggcccgagtgcaacgtcatcgaggaggagggcccctacgaggacctcgccggcgacaccggcctctcccgccgctgccagatcgtcctcggcttcctctgcttcgtcctcctcttcaccgtcttctgcctcatcatctggggcgccgctcgcccctacgagcccgacgtcgtcgtcaagagcttgacgatggatgatttctacgctggtgagggcacagaccacagtggggttccaaccaaattggttacactgaactgctctctgcacatagctgtatacaaccctgcttcaatgtttggaatccatgtcacgacgggtcctattcgccttctctattcagagatctctatcggggttggacaggttcgcaggtactaccagccgaggaagagccaccggttggtgacggcggtggtccacggcaacaaggtgcccctctacggcgccggcggcgggctgatgctgtcgagctccggcggcgcggtgccattgacgctggacttcgacctcacctcccggggatacgtcatcggcaagctggtgagggtgacgcacaaggtgcacgtgacgtgccccatcgtcgtcgacgccaagaagacgaagcccatcaagttctccaagaaggcctgcgccgtctacaagatctgagaggccatcgtcgccgccgccgtcgccggtcgtcgtccatcacgccggcggcgggcgtcgcctgcagtgatcgatcggcgacggagccgttcttctgttcttgcagttgttgtatgtattatgcttgtgaagaacaataagcgtttatatggtcacttgttaattttacttgagcttcgattttgttgataaatcagtaaatcactttgtatggtagtagtgttttattttctctgctttctttctttcctgaggaaactatgtaccgaagtgtggtactagagtcagtctagatggttttacgttaaagatcaccatgtttacagtttcgcatgg

SEQ ID NO: 23736 - DNA, 3036 bp, Oryza sativa
  ref <308>: DATABASE ACCESSION NUMBER: AK073825
  ref <309>: DATABASE ENTRY DATE: 2001-12-06
gtataggcgaggcgaggagaggaggcgacggccgcgagcgcgaggcgaggcttccgactcgagcaaggagatcccactgctccaaccagatcaggtgatgggtggggaatctacaggaaacacgacctccattccccaatgggagaagccactgttcccctcagtatccatgttactctgagctactgagctctctgctaagttggtgcctcagctgtgtatcttgcagcaagagtgttctagccttctaggctgccaagatgaagtccaatgcggttacctccaaaggcaaggccgtgttcgagctgaagcacaggctggtccaggccatcaacaagattgcagacagggacacctaccagattggattggatgagcttgagaaggccgctgacaccttgcctcctgacatggttggtcccttcttgtcttgcgtggttgacaccgatgccgagcagaagagtgcggtgaggaaggagtgcatcaaggtgattggcacattggctcggtcccatggaagcctagtggcacctcacatgacgaagatggtgaccagcattgtcaagcgcctcaaggatgctgactctgttgtgagggacgcctgtgttgatacctgtggtaccctcgcattgtgtgctagaggctatggggatggtggcgctgcattggttgcgttggtgcggcccttgtttgaatcacttggtgagcagaataggtatgttcaggctggggcagcgtcttgcttggccaaggttattgacgagagcaattacttccctggccctgttctgccgcagatgcttgttcgtgttgttaaactgctcaagaatccccatttcatggcaaagcctgcagtgattgagttgatcagaagtattattcaggctgaaggtgcttctacagagcagtctttaacatctgctctaacaagtattatggatgccctgaagagtagtgattggactacaaggaaagcagcttcaatagctctatctagtattgctctcagttctggatatctggttgcctcctttagaacttcctgccttcgctcccttgaacgttctaaatttgacaaggtcaaaccagtgcgtgatgcaattacccaagccattcagttgtggaaggttattccagggtctgatactcccgagccatcagaagctggatcatccacaaaagaaaacttctttggtgaccatcatgatggtagaagtataaatgatggtggatcacgagacacttctttcaggagagttgatcctgcatcttctgtttctgcaatcagtggcaattctattacttcatcaaagaagagatctcctctgtctatcaataaaatagccctgaataatgctgcaaatcagcaacgctcgaagttgagcgattggcatgttgagatatctgttcctaagcagaatatgataccattagttgattttgaagaaaaggtgtctggcaatggttccatgctaaagggttcaaatagaagtccatatgaaatcgtagacaatgacagcaagtatgagtatgaccccatggatgataaacaagattgctcctctatgtcagaagtagccagcaggagttgtgagacaaagcatgtcacttctgctcaggaatgcgttgaggattgtgattctgcaagagacattgagcaattccccagggctcaaaagagtaagagcatagactccactgttacagatatcacttcacatgggacacatacttgctgtttgggtgcaatgaaagaactatctcatatcaggaagcagcttcaagagatggagaggaagcaagcaaatatctttgatatgttgcaggaattcatgtctaactcagtggagaacatgtcagtattaagcatgaaagtgcataatttggagaatgctgtagacaaaactgtgtatacaattactcaaagtgaaagccgctatcaccttcctggttccaagtttattaagaaccaaagtgccacttcttcaccgagggtttctacttctacacctagatcatctgtggatgctaactataagccaccaccaattcctcatttgaaacaagagaaaaagtggatgcaagatcaaccatcaaagggcttaaacatgggtgtaaaagagggggaatttctaaagagtcatactcatgacaaaactagaaagcctggggttgtgagatcggaaagtgctctgggaagatatgttccaagctcagcaaggactcgagcatcaggggttaagggaaactttccagtttcacttaccaattcctgtgagcagcctgagctgcaaaatgcattgcgtgcttctaaagaatttgatggtaatgatgacatggcgtctgcatatgtagaagccctgaacagtggtgactgtgattatctgattgacgtaatggatagaactggacctgttcttgagaaattgtcacgtgaaacaacaagtgaacttttgagggttatagctggccagtttctgaataaaaaaatgtttgatttggcattgccttggcttcaacaggtagcggatttgagcatgatttataagccaagtcaactttttgtgtctgtgagagcacagaaggagttccttgctttattggaggaagctgcaacaagtggatctacagagccagcaatcagaattgccattgcacagcttgcatttaaactgacaaaagtctgtgaggttgcaccatgcaggaaagttttgagtagagtgtgcagaggaaatgaaactatcatggccactgcgatgtgaaatacttcccctagcaatgtaccccctagtgtatgttcaaacttcaatgtcatgctgcagtgattgagtgcacccatttcattttgttgtagccctgtaatctgtgtgacaatgtatactcggtttgggtactatgtgcaagactagatgagttctgcaaattcatctatagtttgctagttaagcttggatcttctgttgctaggaaacggctgtttttagctgtgttgtgagatttggtctcataagtagtgatcattgagcttgtgaattc

SEQ ID NO: 23737 - DNA, 1334 bp, Oryza sativa
  ref <308>: DATABASE ACCESSION NUMBER: AK073826
  ref <309>: DATABASE ENTRY DATE: 2001-12-06
ggcgcccgccgccgccgccgcgatgaccacgctcctgcgccgcctcctcttgggcgccaccccggccgacgcgttgctcaccggccgcctccccttctccacctcctcccgccgcacgccgcaccgcttccgccgcagccgccgctccccgaaccctgcgccgccctcccctgaagccgtctccgcggccatcgccaccctcccgtcccgtctcaccccgcctctcctctcctactccctctcctccgtctccgacgcccgcctactccttccggtcctcacccactcccttcgtctcgccaccttccgccctgacccgggccccttcctcgtcgcgatcaagcgcctcgccgccgccgatctctacgccgatttcgaccgcacctgcgccctcgccttctccctcctcccctctctcccgtcccccgggcccttcctccgcaccgcgctctacttctactgccagttccgcaagatcggcaaggcgttccacgtctacaccctcatgcgcgcctccgccgaccccgccgcgcgcccctccgccgacacctaccacgcgctcttcaccgcgctcttgtcccgcggcggcggcgacaccatggtgcactacatgtacatggacaccgtctccgctctgttccggcagatgctggagggagggtgtcccgccggacacgcgcgcgctcaacgtgctcgtcaagggctacgcgcagtcgctgcacctcaacgacgcgctgcgcgtgttccaccagatgcggcccgtctacggttgcgaaccggacgccctcacgtacagctacctggtgcacgggctgagcgagcagggccggacgaggaacgcccgtgaggtgttcgatgaaatgctggccaaggggctggcccctacggagccggcgtgcaacacgttcgtcagtgcgctggccatggcaggggaggctggggaggcggagcgtgtgatgtgggacatggctcgggcgggaagggtggtcgacgacgtcacgaggagggcggtggtggaggagctgtggagatcggggaggagggacgacgccgaaagggtggtgagggagatggaggagcgaggcatcgtgggtggcgctgagcggagagccttgctacgttcgctgcacgatgagttcggtgacgacgatttggatgttgatgatagatggcggaacacaaggtgattgtctgacagatggagagttgagaagcactcataatccatccggccatccatgtcccaaaaacatggcaatcaacattgaacactactaaatgccatgagatgtaacagaaaattttgtgataaagtatcagtaaaattcatttgc

SEQ ID NO: 23738 - DNA, 1742 bp, Oryza sativa
  ref <308>: DATABASE ACCESSION NUMBER: AK073827
  ref <309>: DATABASE ENTRY DATE: 2001-12-06
gacgagaccgaggaggcgccagctcgactccgcgcgagccgaggcctcgaaccctaacccccattcgatttccggcgagatgcccacccgcgtctgagccttgctcgtcggcggcgaggtggggtggggcggggggcgggggcggcgagggatggaggcgaggcgggtctccgcgaaccctcggccgtcctgcgtgcggagggtgctcgcgcggaagcggcggaggcccgaggcgacggcgaacagcgcgcggaagctgcagcggcgggagatctccgcgctgccgtgccgcgcgttctccgcgagcaccacgcgggagcggttccgcaacatccagctccaggaagagtttgatactcatgatcccaaggagatgggttcactactaccttacttgatgaaaaggtctgagattattgagatagttggagccagtgatatcatctttgctttatcacagtcaggagtatgtgctgcattcagcagagtctcaaaccagcggatttgctttctgaatggaagaccagatgaagtcattcgcagtttgttttacaacaagaacaatgactcactcattactgtatcagtttatggttctgaaaacttcagtgccttaagatgcaggacaactcgaatagagtatatacgacgggggaagccagatgctggtttccctcttttcgagacagagtccttgaaatggccaggttttgtggaatttgatgatgttaacgggaaggtgctgacttattctgcccaagacagtacttacaaggtgtttgacttgaaaaactacactttgttgtatacaatatctgataagaatgttcaagaaataaagatcagccctggcataatgctattgatatactcaagaaaaaagggctgtattccccttgacattctttctattgaagatggtaaacgcttgaagtcattcaaacaccttcttcatcgcaataaaaaagttgatttcattgagcaattcaatgaaaaacttctgatcaaacaggaaggggagaaccttcaaattcttgatgtaagaaacttccaatcaattgaagtaagcagaagtgaatttgtgactccttctgcgtttatctttctgtatgagatgcagctgttcctgaccttccgtagtagatcagtatccgtttggaatttccgtggtgaattagtcacatcttttgaggaccatatgttgtggcaccctgattgcaataccaacagtatttacatcaccagcaaccaagatcttattatttcttactgcaaggctgatccaaatgatccttcttcagaagaaaatgcttgctccataaatatcagtgagatcttaaccggaaaatgcttggccaaaataaaggcagggaaccttaacaagcaaagggtgtctaagttccaaagtacaccttccgaggcactgggggacatcacagctctgtactacgatgaagagcgtgaggagatatacaccggcaaccgactaggccttgtccatgtgtggtcaaattgatagttgctcaggcagtcaagctttccttcgggcaacagcaatcctcacctagcgtggcataatcggggagatactagctacaaccgtagttcatcatcggggagatactagcgtgcctgatcggtgtagctccaagggtgtttactgtttaccatatgtatcgttttggaaggtttgtcactgttagcgtgccatcttaccccccgagctatatatatctgattcc

SEQ ID NO: 23739 - DNA, 1651 bp, Oryza sativa
  ref <308>: DATABASE ACCESSION NUMBER: AK073828
  ref <309>: DATABASE ENTRY DATE: 2001-12-06
gactcggcagccggcaccgaagccaacaggcggagcaaaaatggcgatcgcgatctctcaggaggcgttcgacgccatggtgcgggagaacatggaggacctcggcatggacgccgacgaggccctcgccgacgccgtcgacgccctcaccctccaaggtgccgacctctccgggatcatcaagcgcgtgcctggagaggccgccgcggcggaggtgagcccggtgatgcgggtgctggacgaggtgaaggcctcttctgccagtgacagtgacagtggcggcaggtccgaggaggatgctgagaggttggcctctttgctcgacgagttgcgcgagctgtgctccggcgatgggttggagaatgcggcggtcgctgctcggaatggcggcgtggaggcgctcgtcgccctgtgcgcgtcggctggggttaagcaggagagactacttgcctcgggcttgaaggcgctaagctccttgctccgcgatgttggaagcactgaaaagttcaggcaaagcgaagggccccaagttgtcatgggtattttgaaaggaggttcagaaagttcagatatactggaaggtggctttagggttgtggcttcagcatctgcaggcaatgaagttgttaaagagtgctttatggtcctgaaggttgatgaactcatttttcaagttatgggggagaaatcaaatagcaatgtgcaaagcttgtatgatgccatacgtgttctattgacacctgatgacaatcgtgtggtggcttctcaagtatatggatattctcggaggttcgcagaaactgggattgcagcagttcttgtcaatgcactacgtgagaaagttgccccttccagcttaccatcagcttgtgcggctctgaaggcaattgctgtcaatgatgaaatatgcagatccatatctgaaaatggtgggattgatgtgcttcttcgctgtattgatgaggctagtgaacaaaagaacaaagttatagcaaaatcttgctgctctctgctgtccaagctggctggaagtgatgcaaacaagactactatcattgaacgaggtggttttgataagttcttgaagttgacatcgagattttctgaagacccaccaataatacaagaggtaatgtctatggtgactatccttacactgcggtcaccagaaaatgcagctcgtgcaatgggagcagggtatggcactttggctatacaggcaatgcaaaagttcccttcttctgctcaaactcagaagcaagcctgccttatgatccgtaatcttgtcgtcagaaaccctgaaaaccggacgatcttgcttaatgatggtgtggagaagcttattaggaaaaccaagatgatgcacgggagctgcaaagatgctgccacatctgccttgagggatctgggcgtggacaactacaatgcatagacagggaaatgaatttactgtgcgtaaattttggcaatctgaggatgttttgggggaattaatggtgtgtttgggttgataggattttggctatgcttgtgcgtggtctcaattttgtggaattagtggtgtgttgggttgctgcccctgcaaactgcttcagctatgaatttgtggaacaatagttcagtaacacgaggcgttgaaaagaattgcacg

SEQ ID NO: 23740 - DNA, 2523 bp, Oryza sativa
  ref <308>: DATABASE ACCESSION NUMBER: AK073829
  ref <309>: DATABASE ENTRY DATE: 2001-12-06
ggcggagcagcggccgcgacgcgccccccatggcctcgccgcccgccggcgacgccccgccgccggcggcggcggcacgggaggaggaggaggaggagggcgtgagctgcggcatctgcctgacggacgcgcggcgggcggtgcgcggggagctcgactgctgcgcccaccacttctgcttcgtctgcatcatggcgtgggcgcgcgtcgagtcgcgctgccccttctgcaaggcccgcttccgcaccatcacccgcccgcccgtccccggccgcttcccttcccagcgcgtcgtcgccgtccccgagcgcaaccaggcttgcaacccttcgggcaatggcagcagcactgtagacgctgatctctatgcaaacaccagctgtagcgtatgtaacctctccaatgatgatgaactgctgatgttgtgcgagctctgcgattctgctgtgcacacttactgtgccggtctaggcactgaaattcctgagggtgactggttctgtacggactgcatgacagccaaggaggagcattcgaggtgtgagattgacgatgacaattctagtgatcatggtgaatttaaaatcaccattgaagttccaatagctgatccagttgctgctccttccatttcggatattgtggatgagggtcactctccaaatttagtacaaaggtcaagtgtgcagagcaacaggccttccatttctgatccagttccttccatttatgatattgtggatgacgattacaccacaattccaataggcagggtcaatgcaaggagcactaggctggacagtagggctgagcgtttgccatcacagggtatttccgttggaccacaatgccctgaatctcctcaggagcgagaaaatagtcgggtgtgttcgcatgcccgttctcgcattgagtctgagagagctagaacactgcgtaactctcgcaatcttggtagccgtataagggaactgcgtgagaactggtctgctctccgttcaggttcgattgggtttgcaacacaattacacaataggagaaggggaaatggtgctggtacttgtgatattgaagaacgccatcggtccacaacaaccttcatggaggtggctgcttcctcatctggtcatgctaaaaaaatttcacctaagaatagttctgatgtgcacaaggcatggaaaatgctagaaatggcaaaatcatctggtgggaagaagaaacctgacaacccttcctccctcaattgcagtgttccattctccatggggaatagatcgacttcatacagcccaattgatgcaattttaggacataagaataacaagctgtatgatggaataactcagaaaaacaacgcggaacaacaccgtagtacaaacatggaaaataaacctccaacaatgaattttggagaatgccgtaaactgcaggagaaattccatgggtcagctcatggaagaacaccttctacaattatgaggcaggaaagtttgactggtaaagtttcctcatcaagcaataatgagaagcataatcgtagtataaacatggaaaataggcctccaacagtgaattttggagaacaccgtaaactgcaagagagtgcatcagttcatggaagaataccttctacagttatgatgcaggaaaatttgaatggtaaagttgcctcatcaagcaataatgaggatgcaggtcaaatatttgaatcttcacgtgacgtaagcagaccagagaaatccaaaccagttgtatcctgtccgcttacgttcagtttactatctggccagtccatggtgacctcatcacaacaattaagacctggatggagccaatctaccgaaatggtaagctctcaggaaccatcagccactgcggcatctattgacatcggtacagctggagcaaacgacaaagttaaaggttctagaccagatcgtcttgagcgcaagagaaaacttggttctgaaacacatgatgacaagggatccaagagatctatgtcaagttgtaaaataagaaaaagtgatatttcatttttggccatacgtgagttgaagctgctcaatatagacaaaacttatggttctgacaccttcaaggaagttgctcgagcagcaacgcatactgttttggcctcctgtggattggaacattcaccatcggtagctcttgcactcccaagaccggtttgcaagcacacctgcaaaactgaacctctcccatctccagatgtactgaccgatttttgcagagaatgcttgtgtaattttgtaaaagaagtcatcagctcattgttgtctggcaggaagatggagtgaactgcttcatcatgttagaatagtttagaaacctacatacagttgtggttttctttcctgtagttacttaaggtgaaacatcctgcaacagatagtgtagacagtgtagacatgttgtacattctgtaccatgttaaggttagtgtagacatgtacattctataccgtgttaaggttatcattacagagcagtttttttccc

SEQ ID NO: 23741 - DNA, 2403 bp, Oryza sativa
  ref <308>: DATABASE ACCESSION NUMBER: AK073830
  ref <309>: DATABASE ENTRY DATE: 2001-12-06
ggcggaccatcgattcgctcggtctttcgcctcctcctcccttttgcctttgcctccctcaccgcggcggctgcggcggcgagcaccacccaccccctctcctctcccccccctcccgccgcccggagcttaagctagggtttccaccgcccgagcctgcgctccctccgtcgccgccgcccgcccgcccgcccgccttcccgctcgcccgctcgcgcgccgcttccggttccccacgcgcaccgatccggcggtgacccccccgaaaccctagggtttctccgcggcgcaggagctatgaatcacccacagcaaactatgcctcctagggcttctgccaatggatttccccatcggaagcttgacagggagggtagtggaaggcatgacaataaaacacagttgctgagatcttcatctggtggttttagtggtgcagaaaatggaggcaaactaggacatggaagcccttcaagggatcgactaatatatgttttgacacaacttattggacaacatgtggatgtgcatgtgaaaaatggctctattatctccggaatcctacatgcaacaaactctgacaaagacttaggagttatcatgaaaatggcacaggtgataaaggatggttctgccaggggacagaaaagtgcagctgatgttgtaaagaagcctgagactatgataataccaggaagggagcttgtccaaattcttgccaaggatgtagcacttggtggagatgagctgccaaaaggtccttctcaagaaaaaaggaaggacttaatgatagactctgcgatttctcgctctcattatcctgaggagagggagcttgagcgctgggcaccggatgaaggggattcagagtgcatcgaattggaaaaatatgacagaaaggggaacaggagctgggaccagtttgaaacaaatgcagctttgtttggggtaaagagtactttcaatgaagaactttataccacaaagctagagagaggtcctcacatgagagagcttgaaaagcatgcttcaagaatagctagagaaatagagggagaagatacaaaagatatgcatcttgctgaggagaggggtttatatttggatgatgactttgaccatgatgaagagataaaatattcagcggtgcgcagagatacagacaataccaaatttaagtcatctacaaatgtcttgagcaatacaaatcaagttgattcactcaccagggcaggcaacactaatcccaaggctttgttatcaactgcggatgaagaatcatcttcccatttatttggcactgatttgcctgtcactaacaatgttagccagttagtatctcagtcccagctgaataaacttttgcccattgatgaaagcaggttggatgacaaactgaccaaagatagcagtggtaatagggacacaagcaatttgcaaactgagaatattatatctgaaggtggcaggtcatcgatttctgaagacttggaagtgccatcttcaagctcgcacgcttctgagccttcatcatctggtcaagcaaagaaatcctcagaaagtctacctgcagattcttctttgtctagaaaagttccttcttcgggggaatatgtgaattcctcccaaggacctggtagttctacatcatcaacatctgagcgcattgctgcaagctcagttgcatgtgctccaggcttgtccccgagctcttcaatgggttctcttagctcagaaaaatcatctttgaacccgaatgctaaggaattcaagctgaaccctaatgctaagagtttcactccatcaacttctgtgaggcctccacaacctccagcatctgatggaccatactactatgctaataacatgcctacagcacctcttggacctccaatgtttccaccggcctatggtggacagcctatggtgtacaatgctcagcctggaccttcgccccaaggttacatgcatcctgctgggccacagtatgggcagcagatgatgatggggcagactcgtcctgtttattattatgcgcctgagatgcaacaatacagagggagaaacttctaggtagaaaattttgaaccgctgccatgtttgaaagttgcagctatacccgtcaaagggatgctaaccagaccagaccgctgttgggatgaaaagaagtgtggccatataatctcaaatctcaaaacaccaactgcgtgttgccaggccggagcacgccattgttgcacaacctgtgctcaagtctgaagcaggttaactgggatttattattatttgtttcacagacgtggtgttgtaaattaaaatcgctggtcgtttgtgacccttgaaatggtcggtattcataaacgtgtgtgaccgttctctttttgtaaaattcgtgttttattt

SEQ ID NO: 23742 - DNA, 2197 bp, Oryza sativa
  ref <308>: DATABASE ACCESSION NUMBER: AK073831
  ref <309>: DATABASE ENTRY DATE: 2001-12-06
tgggggcagcgccgcgcttatccggcgcaggacgcgacacgcggccgcggcgtcgcctccaaaccacacccccacgcacgcacgcacgagcaccaccaccaccaccaccaccgccatagctagccgctgaagccagcagagcagacgaggaaaccgaggctccaggggtgagtgcgagcgcggcgaccgaggatctatctgggatgagccacctcgggcgccgggccgcttcgtgatcggcggcgggcggcggcggagggacgcgatgaggacggcgcagcagcagcagcagaagcagcggggcggggtggtgcgcgtggaccaggcgtcgcccgcgtccagcttccgcgagctcgacgacgccttcctccagacacagacaaaaatctggcttggtgaagttctccatcttaggtttgatgaagccgttatagttgcagaccttcttgctgatggagagttactatttcaagtttccaaagtactgtggaaaaggcttgtgagaatgaacaaagaacaaatgaagcaatccaaggtgtatatttatgagagaacatcgtctggtaagagcaatggaaaatacatgccctatccaaaagttgactcgtttttgaagatatgtcaaattctcgggttagctggaattgatttgtttaccccttctgatgtggttgagaaaagaaatgttcggaaagtttgtatgtgcatacgcttgctatctaagaaggctcggacgatgcgcctgactgtgcctgattttgatattgtcactcatacaatagccatgcccaactacattgttggaggcatccggagaagtctggagcaaccacaatgtagttcatctggttcaagtggttacagtccaagtgccaactctaaggcattaaatcagcagagagtttttggtgcagagaatgatcaacaatgtgaaacacattatgattctgatgaagctgaaagtaagctctctgcattagaacctgaggactcagtcagtgaagacaatatttccacacttttgaaatcgggcaacatgcccaaggaagaaaaggaaggctatggagatagtgagcgtggtatgcatgaagagaagtcattgtctgaatcagttggatcgattgatttcggcaatatggaatctgattctgttggttcaactcctttatttcacaaaaatgaatcatattgctgtattgaatctccaactgaccagtgttcaagaactagaacaattaggtgttcattaagttcagaagagtcagattccataagcagtcatttggtagttgacagcagcaaggctaaaaggactcatggcgaacatctcgagcctcttaacggaaatgggaaaagatttgctaacgatcccgaaaaagaaagcgatgccctccaaaaggtcacctttgatcaacaatgtgatctgcttgcctgtgatggggagtctgtatgttcaaattgcgacagtacaccatactcgagtttaaccccaatagacagtgcttgtggcaaattgccagcagtttctgaagatgatagtgcatgccgagggctggaactcgaattccgttgtgggaatgaaacggacgtttcccaaaaagaagataaacaggtggaatcagaatataaagctgaaaatgacagctctgctcaaatgaatgagaatgatgttcccaaatcagggaaagggatgctaaagtctgttgctggaggaattacacttgtcggcgcagtgttcttcatagctcatctcagaaggagcaaggacagaagcttcgcaggtgttatagctccattctctgaaaaatcagttcagggcgactcaagggcaaagaaagtagagaaaacaaaggcgggtgccgtgtatcccggggaatggctaaaagtttaatcaagaagaacggacatgccacggtgccacctaagcgcaatttggaagtttattttgcaatatgcatacatcttgtaaaagtaaaatccatatgctaaagaacacttttttttaatcagctactccagtttgcacgagtagagggctttaagaagcgactccactagtatagcaagtgttaatatttattttcttatagcagtccaaagcttacaataatctgtaatctggataaacaagatgcctcaagttctctccatgtacagaatgatccatgaagttgattaatttattataagcagcagc

SEQ ID NO: 23743 - DNA, 3566 bp, Oryza sativa
  ref <308>: DATABASE ACCESSION NUMBER: AK073832
  ref <309>: DATABASE ENTRY DATE: 2001-12-06
gtatctcccccttccttccctacaccgaaagcccgaaacccaccttgcctcgcctcgcctcgccggatccagatctccaccgcctcgcctcgccgcgccgccaccaacccactcgccgtcgccgtcgccggcggcggatcggccccacatcacctcggcctccccgagcaaaccggcgggggacgcccccgggcaacgggcgggcgaagaggggcgcaatggagcagctgcggacgatcgggcgggagctggcgatggggtcgcagggagggtgggggcagtcgaaggagttcctcgaccttgtcaagtccatcggcgaggcgcggtccaaggcggaggaggaccggatcatctcgcgggagctggatcacctcaagcgccgcctcgccgaccccgacgtgccccgccggaagatgaaggagctcctcctccgcctcgtctacgccgagatgctcggccacgacgcctccttcggccacatccacgccgtcaagatgacccacgacgagtccctcccgctcaagcgcacgggctacctcgccgtctccctcttcctcgacgagcgccacgacctcgtcatcctcgtcgtcaacaccatacagaaggacctcaggtccgacaactacctcgtcgtctgcgccgcgctcaccgccgcctgccgcctcatcggggaggaggccatcccggccgtgctgccccaggtcgtcgagctgctcgcgcatcccaaggaggccgtgcggaagaaggccgtcatggcgctccaccgattctaccagcgatccccctcatccgtctctcaccttgtctccaacttccgcaagaggctctgtgataatgatcctggggtcatgggtgcaactttatgccccctctatgacctgattttggaagatccaaattcgtacaaggatttggttgttagttttgttaacatcctcaaacaagttgcagagaggaggcttccaacttcctatgattaccaccaaatgcctgcaccatttattcagattaaactattgaaaatacttgcggtgctgggtagcggtgataagcaggcaagtggaaatatgtacatggtcttgggtgacatattcaggaagggtgacactgcaagcaacattggcaatgcaatattgtatgagtgcatatgctgtatttcatccatattcccgaacgctaagatgcttgatgctgcagctgaaacaacatcaaagtttctgaagagtgatagccataatcttaagtacatgggcattgatgctcttggccggttaattaaaataaatccagatatcgcagaagagcaccagctggctgttattgattgcttagaggatcctgatgacactttgaaacgcaagaccttcgagcttctttacaagatgacaaaatcaacaaatgttgaagtgattgttgatcgaatgattgagtatatgattaacatcactgatcaccattacaagacagaaattgcatctcgttgtgttgagctagcagaacaatttgcacctagcaatcagtggttcatccagaccatgaacaaagtctttgagcatgctggagatcttgtcaacatccgagttgcacataatttaatgcgacttattgctgaaggctttggagaggaggatgaaggtgctgatagccaactaagatcgtcagctgtagattcctatctacggattgttggggagccaaagcttccttcttcgtttctgcagataatatgctgggttttgggagaatatggaacagcagatgggaaatattcagcttcatatattattgggaagctgtatgatgtggcagaggcccacccaactgatgacactgtcagggcttatgcaatctccgcaattttgaagatctttgcgtttgaaatcgctcttggaaggaagatcgatatgctacccgagtgccaatcgttgatagatgaattgtcagcttcgcattcaacagacttgcagcagcgtgcatatgagctacaggctttgctaggtttggacaaacaggctgttgagaatgtaatgccagccgatgcaagctgcgaagatattgagatcgacagaaacctctcgtttctaaatggttatgtgcagcaagccattgaaaatggtgctgcaccctacattcctgagagtgaacgctcaggagtggtaagtgttggcaactacaaggcccaggatcaacaagagacatctgcccatgctcttagattcgaggcctatgagctacctccagcagcttcacaggccagtatttccccaactactgacctggttccagttccagaaccaagctactataaggaagatcaccaaatgtcaagatcccagccatcaggcgattctctttctggtgaatttggtctcaaacttcgtcttgatggagttcagaagaaatgggggagaccagcctattcctcctcatctacgccttcaagttcaacatctagtcaacaagcaaccaatggaggcgttagttctgaggtgggagggtcaacaagttcacaggctcgggaatccacatatggttccaagagacagcaggccactgaagtttcagcggaaaagcaacggttggctgcttcactctttggtaaagctgataggaagacccaggctgggcgaaagacagcaaaggagagttcctcaactgagaaagtagctactgctaatgcaacaccgcagccagccaaagagcaagtaatcccttctgccccaccacctgatcttctggatctgggagagccagtttcatcaagtcctccattagctgatcctttcacacagttagaaggtcttctcggaccagcatcagcctctcctgtggtttctgaaaccccagcttcgagcacttcgaaaacaccagatcttatgtcaatcttttcggatgatgtacaaactggagtgaccagtggatccacagaaccatcactcggggtaaatgtggtcgctgcaaagaagggccctagccttcaagatgccttgcagaaggacgcagcggcccggcaagttggtgtgacgccgacagggaacaaccctattctattcaaggacttgttaggctagaatatacagcatatgttcagcgtgctcaaattgggtaagtggagtttgcctccaagatggtcttgattgcctgatcggtgaaccagtaatgaatgatgctgttcgatcagcacagggcacatgagggcatgaggtaaatttggttttgattcacaggacacgaccttttaccctcccaattgggagaaggtaggtttgggatgagatgtggatggttgcgggtctttttcctgttgcgtttttcacatggtaatttcttgtcgagacttagtgtacatgtgtttattacatgatgtgtaatttgtacatgatgagaccgtggtccagaagcgtgtgccggcgctttttttcggttcatctggcagggagtatatgttttgagatttacccacattggatatacagtagctgctgggcactagaaactcggttgccacttcctctgaaactggctggaataataaaatgtaagttttttcttccccttacgctttc

SEQ ID NO: 23744 - DNA, 1280 bp, Oryza sativa
  ref <308>: DATABASE ACCESSION NUMBER: AK073833
  ref <309>: DATABASE ENTRY DATE: 2001-12-06
gtcaagcaaccactggtagtacactgcaaatattcctcttgccgtgtcactggcttgctctgctcgatcacgagcttgaactgtgcttgtgatcagcgagcaatggctactcaatgggtgctcgtggtggttgctgtaatggccgtgctcttcgccggaggcgccgccggcgggcagctgtcgacgaggtactacgacggcaagtgcccgaacgtgcagagcatcgtgagggccgggatggcgcaggccgtggcggcggagccccggatgggcgcctccatcctccgcatgttcttccacgactgcttcgtcaacgggtgcgacgcgtccatcttgctcgacgacacggccaacttcaccggcgaaaagaacgccgggccgaacgccaactcggtgcgcgggtacgaggtgatcgacgccatcaagacccaggtcgaggcgtcctgcaacgccaccgtctcctgcgccgacatcctcgccctcgccgcgcgcgacgccgtcaacctgctgggcgggccgacgtggacggtgcagctgggtcgccgcgacgcgctgacggcgagccagagcgcggcgaacggcaacctgccggggccggggtccgacctcgccacgctcgtcaccatgttcggcaacaaggggctgtcgccgcgggacatgacggcgctgtcgggcgcgcacacgctggggcaggcccggtgcgccacgttccgcagccgcatcttcggcgacggcaacgtcgacgccgccttcgccgcgctccggcagcaggcgtgcccgcagtccggcggcgacacgacgctggcgcccatcgacgtgcagacgcccgacgcgttcgacaacgcctactacgcgaacctggtgaagaagcaggggctgttccactccgaccaggagctgttcaacggcgggtcgcaggacgcgctggtgaggaagtacgccggcaacgccggcatgttcgccgccgacttcgccaaggcgatggtgaggatgggcgccctcctgccggcggccgggacgccgaccgaggtccgtctgaactgtaggaaggtcaactaaagtcaacctgatgacgaacgtgtccaagaactacaagtgtagtgaacagtcaagatggctgtttctgctcctttggatttatttttgtgatctggttaatatttttattatttgtggaattaataatgttgctgtaaacatcttttgatagctgccagtcagtcaatgatcatctgtaagcataaaaaaacgtttgaaaatatgttgcacatgtttttgtg

SEQ ID NO: 23745 - DNA, 844 bp, Oryza sativa
  ref <308>: DATABASE ACCESSION NUMBER: AK073834
  ref <309>: DATABASE ENTRY DATE: 2001-12-06
gtgcgaggaggagaagatgccaccgcccgtgccgccggaggagcggcggaagccttcgccggcggagtcccgccagtggacgcagcgcttcttccaggtcctcggcgccggggagcccctaccggcccccgcggagctccccgctgcctactccgcgctcgtccgcggcgtcctctcctccgccgccgtctcctcctccgcctccccgcgcgtctcctgcacgctcaccgtctcccccgccgccgttaacgggtacaacacgctccacggcggcatggtggcggccgtggcggaggccgtcgggatggcgtgcgcgcgcgccgcggccggcgacaaggagatgttcctcggcgagctcagcaccgcctatctctccgccgcccgactcaattccgaagtggaagttgaagcgcagatactcaggaagggcagatccgtggtggttactacggttgagtttaggctcaaggataccaagaagctctgctattcatctcgagccaccatctacatcatgcctgtggtgagcctgtgaaaaaccacatggtacgtggatgaccaagtgtttgtttacacaacaattactgtgtagtatatatatgtgcatatatagcaaatctatatatgccacattcacaaacatagatgagaacattatcatatgcctatccagcaaccttccaaagctcagatgccttgaaaggcttccctttaagttccgcatccttgttattttcacttggaacttcagccaacaatgaatgtatgttagtcaggacatccagacaagaagtatataaaagattaaaccatgcgagctagtatatgatacagttctgttttc

SEQ ID NO: 23746 - DNA, 949 bp, Oryza sativa
  ref <308>: DATABASE ACCESSION NUMBER: AK073835
  ref <309>: DATABASE ENTRY DATE: 2001-12-06
gttccgcttctcacttcccaagccagagggcgccctctctccctcccatgcacgcgcgctctcccactgagccttccaagccaccgcagccgcagccatgagcgccggcgacacgctcgacaagctcgtggtcttcctcgcgaagcgcgatggcatcgacaagctggtcaagacgttccagtacgtgtccaagctcgcgcactgggcggcggagtcgtccagcccgggcctcgccgggcgcgccaagaactgggagacgtccgcggggctcagccgcaaggccttccgcacgggccgcttcctcacggggctcaacgggctgcgccgcgcgccgggggagttcggcgcgctcgccgtgctcgccaacgccggcgagatggtctacttcttcttcgaccacttcacgtggctctcccgcgtcggcgtcctcgacgcctggctcgcgcgacgcatgagcttcatctccgccttcggcgagtccgtcggctacgtgttcttcatcgccatggacctcatcatgatcaggaggggcctcaggcaggagaggaagctgctcagggagggcgggaaggacaaggacaaggaggtgaagaagatccggatggacagggtgatgcggctcatggcgacggccgccaacgtcgccgacctcgtcatcggcatcgcggacatcgagcccaacccgttctgcaaccacgctgtcacgttggggatcagtgggctcgtctcggcgtgggccggctggtacaggaactggccgtcgtgagctgttccaactctatttttcgcacgctcttcggccttgttacatcataatgattttgccaggcactgaactctgcttctgtagcaaattttacagtcgagataccgttggtgtatagtcgcatagatcgacgcatactgtactgaacagctcactggcaatcccaaccaatctttcatgatc

SEQ ID NO: 23747 - DNA, 2314 bp, Oryza sativa
  ref <308>: DATABASE ACCESSION NUMBER: AK073836
  ref <309>: DATABASE ENTRY DATE: 2001-12-06
gaaatacattcacttgcattaataatctctcatattttgaaagcaatctacaggaacaaggacaactatgttatttgccctttcaagtttcaagttaatcaagacactcgggtaattatgtaatttgtaaaaccattatttttttacagggaaacaattacatctttttatgcttcgtcactccagaattttgttcttaagtaccttcctgaagggtattagggtagtgtacattttactgcaagccagtctcagcctctcaggttgtcttagagaataacagatcaagagtgtcagtaaacatcacggaatcaatattcttctgaatccttctgagtgaggagattcagatttctgactctcacaagtcatcagaagcaaccttttgtccatattttgataatttgtatgactttggttttcttatttgttattgttctgtaccttttctgttcttggatgttttcatgcatcaattatgccacatctgttcttgttatgattcgaagttttcagcaacacatcagtcagatatgtcacatctgattaacttatgtatttcatcatatattttttgaatcctatctaatgttcctcagcttttcttttttcctgagattttttctcatatatactccatcccatctgttcctacttcctaggttcttatatcttgggatggagggaataaaaaatatagaacatatatgtctttttctttttttttaaaaaaggttggggggcctggtcccattaccttaaccaccacaaattattctccaccactgggtgactggggttcatttatttaatgtgtacctccataccagcatcactttatatggatggaggacatgcgtgacactgtggcaccatccctttaaggcactcaaaaaatttaatctgatttttggttgcattgcttcaagaaatttcctgtcatatacagacaagcagaggagcaggtgagagggaaaagatggatcctgttcctcttttcaatccttgtgaaatgggaagattcactttctcacacagaattgtgttggcaccattaacaagagcaagatcatatggcaatctcccacaatcacatgccatactgtactactcgcaacgggctacaaaagggggacttctgatttcagaagccacaggggtgtcgtctgatgctccatgcacaaacacccctgggatatggaccaaggaacaagtagaggcctggaaacctgtcgtggatgctgtgcatgcaaaggacgggatattcttctgccagatttggcatgtaggaagagcatctgacttagagcaagaacccatctcaagcacggacaagccagtggaaaagaatgaagacatggatttccctgtcccaagacgcttagctgttgaagaaattcctgatgtcatcaatcatttcagaatagctgcaagaaatgctatagatgctgggtttgacggggtcgaagttcacggcgcgcatggcttcctcctcgagcagttcatgaaagacggcgtcaacgaccgcgccgacgagtacgggggcagcctgcagaaccgctgccgcttcgccctcgaggtcatcgatgccgtgtccaccgaggtcggtcccgaccgcgtcgggttccgcatctccccttacatcagctactacggctgccatgactccgacccggacgcgctgggcgtgtacatggcccgggagctggacaggcgcggcgtcctgtactgcagcgcggtggagcccgagatggtcgctgcgacaacagtggtggacggcgagacgacgacgacgacgatgagtaggaggatgatgatcccgcataggctgcacggcatgagggaggccttcaggagggggatgttcatggtcggaggagggtacgacagggatgctgggaacatggccgtggcgtctgggtacgccgacatggtggtgttcggtcgcctgttcctggcaaatcctgacctgccgaggaggtttcagctggacgcgcccctgaacaagtatgaccgggcaacgttctatacccatgaccctgtggtagggtacacggactacccgtttcttgatgatgatcgtgaggcgatgagtgatcacacaggctgagtgatgatacggtgaaatttttactctgataataatactgtgatctttgtgtgtttgggtgatgggcattgcgacgtcagatcgtggccagatttcagctgtggaaagtaggtgattgtggacttctggcgtcatgtgcaatgtaaaaggagagctccctttaaactttacaataccgttcatataacttctaaatgatttcgc

SEQ ID NO: 23748 - DNA, 996 bp, Oryza sativa
  ref <308>: DATABASE ACCESSION NUMBER: AK073837
  ref <309>: DATABASE ENTRY DATE: 2001-12-06
gacaaggcaagaggcaagaggcaagagcatccgtattaaccagccttttgagacttgagagtgtgtgtgactcgatccagcgtagtttcagttcgtgtgttggtgagtgattccagccaagtttgcgatggcttctcagcaggaacgggctagctaccacgccggcgagaccaaggcccacgccgaggagaagacggggcgcatgatgggcacggcgcaggagaaggcgcgggaggccaaggacacggcgtccgacgccgcggggcgcgcgatgggcaggggacacggcgccaaggaggcgaccaaggagaaggcgtacgagaccaaggacgcgaccaaggagaaggcgtacgaggcaaaggacgcggcctccgacgccaccggccgcgccatggacaagggccgcggcgccgcgggcgccacgagggacaaggcgtacgatgccaaggacagggcggctgacacggcgcagtccgccgccgaccgcgcccgcgacggcgccgggcagaccgggagctacattggacagaccgccgaggccgccaagcagaaagcggccggcgccgcgcagtacgccaaggagaccgcgatcgccggcaaggacaagaccggcgccgtgctccagcaggcaggggagcaggtgaagagcgtggcggtgggggcgaaggacgcggtgatgtacacgctcgggatgtcaggcgataacaagaacaacgccgctgccggcaaggacaccagcacctacaagcctggaactgggagtgactaccagtaatacggtataagaagcatgtgtcgtctttggcactgatgccaaagtgtacgtgttgtatcctcttttttaagtttcagctcgacttcgacgtgttcggtgtcacactttggtttttcagttgtgctcaactgttcatgtttctggttccatggagggccagtgtggaggtcaatgtttaagctttcgttttaaaatctgataataaagttggttaagacctg

SEQ ID NO: 23749 - DNA, 3783 bp, Oryza sativa
  ref <308>: DATABASE ACCESSION NUMBER: AK073838
  ref <309>: DATABASE ENTRY DATE: 2001-12-06
gactttctctctctaccgccgctctcgcagcaggccaggttctctctaatggtcgtgaggcagtgagctcgctcgtacatggattccttgtgggcagcgatagcggcactgtttgtggcggcggcggtggtggtgaggggggcggcggcggccgacgacgcccagctgctcgaggagttcaggcaggcggtgccgaaccaggcggcgctcaaggggtggagcggcggcgacggcgcgtgcaggttcccgggggccgggtgccggaacgggaggctcacgtcgctgtcgctcgccggcgtgccgctcaatgccgagttccgcgccgtcgcggccaccctgctgcagctcggcagcgtcgaggtgctgagcctccgcggcgccaacgtcagcggcgcgctctcggcggctggcggcgcgaggtgcgggagcaagctgcaggcgctcgatttgtccgggaatgccgcgctccggggctccgtcgccgacgtggcggccctggccagcgcctgcggcggcctcaagacgctgaatctctccggcgatgcggttggtgcggcgaaggtcggtggcggtggtggcccgggctttgccgggctggactcgcttgatttgtccaacaacaagatcaccgacgatagcgacctccggtggatggtggatgccggagtcggggcagtacggtggttggaccttgccctgaacaggatctccggtgtcccggagttcaccaactgctccgggcttcagtaccttgacctctccggcaacctcatcgtcggtgaggtgcccggcggggcactttccgactgccgcggtctgaaagtgctcaacctctccttcaaccacctcgccggcgtgttccctccggacatcgccggcctcacgtcgctcaacgccctcaacctctccaacaacaacttctccggcgagctccccggcgaggctttcgcaaagctgcagcagcttacggcgctctccctctccttcaaccacttcaacggctccatcccggacaccgtagcctcgctgccggagctccagcagctcgacctcagctccaacaccttctccggcaccatcccgtcgtccctctgccaagatcccaactccaagctccatctgctgtaccttcagaacaactacctcaccggcggcatcccagacgccgtctccaactgcaccagcctcgtctccctcgacctcagcctcaactacatcaatgggtccatcccggcatccctcggcgaccttggcaacctgcaggacctcatcctgtggcagaacgagctggagggcgagataccggcgtccctgtcgcgcattcagggcctcgagcatctcatcctcgactacaacgggctcacgggtagcatcccgccggagctagccaagtgcaccaagctgaactggatttctttggcgagcaaccggctgtccgggccaatcccttcatggcttgggaagctcagctacttggctatcttgaagctcagcaacaattccttctcggggcctataccgccagagctcggtgactgccagagcttggtgtggctggacctgaatagcaatcagctgaatggatcaatacccaaagagctggccaaacagtctgggaagatgaatgttggcctcatagttggacggccttacgtttatcttcgcaacgacgagctgagcagcgagtgccgtggcaaggggagcttgctggagtttaccagcatccgacctgatgacctcagtcggatgccgagcaagaagctgtgcaacttcacaagaatgtatgtggggagcacggagtacaccttcaacaagaatggttcgatgatatttctcgatttgtcatataatcagctggactcggcgattcctggcgagctgggggacatgttctacctcatgatcatgaatcttgggcacaacctactgtcaggtaccatcccatcgcggctagcagaggccaagaagcttgcggtgcttgacctgtcgtataaccagttggaagggccaatacccaactctttctcggcactttccttgtcggagatcaatctgtcaaataatcagctgaatggaacaattccagagcttggttcccttgccacatttccgaagagccagtatgagaataacactggtttatgtggcttcccactgccaccatgtgaccatagttccccaagatcttccaatgaccaccaatcccaccggaggcaggcatcgatggcaagcagtatcgctatgggactgttattctcactgttctgtataattgtgatcatcatagccattgggagcaagcggcggaggctgaagaatgaggaggcgagtacctctcgtgatatatatattgatagcaggtcacattctgcaactatgaattctgattggaggcaaaatctctccggtacaaatcttcttagcatcaacctggctgcattcgagaagccattgcagaatctcaccctggctgatcttgttgaggccacaaatggcttccacatcgcatgccaaattgggtctggtgggtttggtgatgtctacaaggcacagctcaaggatgggaaggttgttgcaatcaagaagctaatacatgtgagcgggcagggtgaccgggagttcactgcagaaatggagaccattggcaagatcaaacaccgtaaccttgttccacttcttggctattgcaaggctggtgaggagcggttgttggtgtatgattacatgaagtttggcagcttggaggatgtgttgcatgaccgcaaaaagatcggtaaaaagctgaattgggaggcaagacggaaaatcgctgttggagcagcaaggggtttggcattcctccaccacaattgcattcctcacatcattcaccgagacatgaagtcgagcaatgtgcttatcgatgaacaactggaagcaagggtatctgatttcggtatggcgaggctgatgagcgtggtggatacacaccttagcgtgtccactcttgctggaacgccagggtatgtaccaccggagtactaccagagcttcagatgcaccaccaagggtgatgtttatagctatggtgttgtgttgctggagctgctcaccgggaaaccgccgacggactcggcagactttggcgaggacaataaccttgtggggtgggtcaagcagcacaccaaattgaagatcacggatgtcttcgaccctgagctactcaaggaggatccatccgtcgagcttgagctgctggagcatttgaaaatcgcctgtgcgtgcttggatgaccggccgtcgaggcggccgacgatgctgaaggtgatggcaatgttcaaggagatccaagctgggtcgacggtcgactcgaagacctcgtcggcggcagcgggctcgatcgatgagggaggctatggggtccttgacatgcccctcagggaagccaaggaggagaaggattagaaacaacaaccaccgacacacaggagaaacagccggcggtgagtggccaccaacgaggccagtcggcggcgaaatgcccgtagaaacaacagtcattcagaatcagatggatgccattttgaactctccacacaagcttagcaatcgcttctgatggtgctacaagataagaattttccagctgtaggttgatcagtcgaagttgttatgtacctataggagtagatcttttcttctttcttttttcgcagctttcttcgtctccctgtttgtttttcccgtcgcgtcgcagtaagagctgtgtatgtacatatataaatgttgaattttctttggcgc

SEQ ID NO: 23750 - DNA, 2371 bp, Oryza sativa
  ref <308>: DATABASE ACCESSION NUMBER: AK073839
  ref <309>: DATABASE ENTRY DATE: 2001-12-06
ggtttcatcagtggagaggaaggaagagaggaaaccccattgaggaggaggaggagatggtgaggcggcggcggcggtccgtgctgctgctcctcctcgccctcacggtgctctcgccgctcgtgctctacacgcgccgtctctcggcggcgctgaaccccaaccagaggagggatttgcctggcgaaatcgtgaatcagggccgtggtgttaaggctagcaagctaaatgcacttcctctggaaactgtgggttctttgaaagaacccgttggcatcgtcttctcggaggagtcacgcgaatctgcaagcaaatcgaccgaacccgatagccaagaatttctattgaggaaggcaggggagcacaagaaccgggtgctctttgaggccacggctgctgatagtgccagatcggaagacgatgacttgatcgagcaagtgacaagcaaggatggagaagatgatggcttggcgacggtgtcagttgatcagcagcagataaccacggcatcccaacagcgatctgcttctgaggcaagttcattggagaatgtgcctgaacagacatccatggaaaactctctggaaggaaacaaagatggtgctttgcttgatactagaatccgcaatatcagggatctgttaatcaaggcaaaggtctaccttggtcttggagccattcgagcaaatccccagtacctcaaagacttgaggcagcggattcgggaagttcaaaaggttcttggtgatgcatccaaggactccgatctacccaagaatgccaatgagaaggtgaaaacacttgagcagacactgatcaagggaaaactgatgcaggatgattgttctgttgttgtcaaaaagcttcgagctatgcttcactcagctgaggagcaactgcatgcacacaagaagcaaactgttttcctaacacaacttgcagccaaaacccttcccaagggtcttcactgcctccccttgaggctagctaatgaatattttttattggatcctagccatcagcaattcccaaacaaggaaaaacttgatgaccccaaactatatcactatgcattgttctctgacaatatattggcagcagctgtagttgttaattcaacagtgttaaatgccaagcatccttctcatcatgtcttccacatagtaactgacagactaaactatgctccaatgagaatgtggttcctctctaaccctcctgggaaagcaacgattgaagtacggagtattgaagagttcacatggctaaatgccagctacagcccagtgctgaaacagctcgaatcacaatcaatgattgattactacttcaggacacatcgtgcaaactcagattcaaacttgaagtacagaaacccaaaatatctttctattctcaatcatttgcgattttatctacctgagatttacccaaatctccacaagattgtctttcttgatgatgatgtagtgataaagaaggacctaaccagcctctggtcaattgatatgaaggggaaagtaattggtgttgtagagacttgtggagagagcttccatcgttttgatcgttaccttaatttctcaaatcctgtcattgtgaagaattttgacccccatgcatgtggatgggcttttggaatgaatgtctttgatctggctgaatggaggcggcagaacataactgaaatctatcactcctggcaaaagcttaatcaggacagattactatggaaacttggcactctgcctccaggtttgattacattctggaataagacgcttcccctcaatcgttcatggcatgtccttggtcttggttacaacccgcatgtgagcagcagagatattgaacgtgccgcggtcatacattacaatggcaatatgaagccttggctggagattggtctgcccaaattccgaaactactggtcggcatacctcgattatgaccagcccttcctgcgggagtgtaacatcaatccttgaagaaagatggcaccttcaatgatccacactgacataaccaatagttttccccattcgtgggtcttgtgctctttagtttagtttttctagtatttgattgatttttttttaattgtagatgtcagttgttaactagatttccttgccacatgtcctttgtatccctacttctgcataactgcagatatggttgtagatgttttgatattacattctctcctggggcaggaaaatgttaaatagtgtgattctcctgtgtatggctttttaatccctacttctgcataactgcagataagttgtagatgttttgagactgcattctttgctggggcggaaaaatgttatatggtgtgattctcctgtgtatggcctttttatct

SEQ ID NO: 23751 - DNA, 2549 bp, Oryza sativa
  ref <308>: DATABASE ACCESSION NUMBER: AK073840
  ref <309>: DATABASE ENTRY DATE: 2001-12-06
gtgtgctcttcaaaaccatgttaagactgctctacagtcaactggaaaaatagtgacgccatcacagattgtcaagaacttgcgctgcatctcccgtagtttccgcaattcaaggcaggaggatgcacatgagttaatggttaatttacttgaatccatgcataaatgttgtctaccttctggagtaccaagtgagtctcctagtgcatatgagaagagcttagttcacaaaatatttggtggccgcctaagaagtcaggtgaaatgcacacagtgctcacattgctccaacaaatttgatcctttcttggatctcagccttgatattggtaaggccacgtctctggtgagggcacttcaaaatttcactgcggaagagctcttagatgggggagaaaagcaatatcagtgccaacgctgcaggaaaaaggttgtagcaaagaaaaagtttacaattgataaggcgccatatgttctgacaattcatctgaagcgctttagccctttcaacccccgtgaaaagattgacaaaaaagttgattttcagccaatgctagacttgaagccatttattagcgactctaaaggcgcagattttaaatacagcctttatggtgttttggttcatgctggttggaacactcagtcaggccattattattgcttcgttcgaacttccagtggaatgtggcacaaccttgatgataaccaggtacgccaagtccgtgaggcagatgtattgacagaaagcatatatgttattttatgtacgtgacagagttgggaatccgactccacgcaaggataatatcactgctaatatgccagccaggagaacaatacctgaaaagatctcaggtctgagtgatatgatccagagcggcgtaattgaagcaaaattgaacggttcctcgtctccttatggcgataagaggttgcacggcataagcaatgggaactcaatcaagacttcaagagagcattatttgaagaaagatggcaaaactgaagctcctaaagcctctgaaaacaatggcctggcttccacacagaaagcttctgcacctcaaattgatggtgctaccttatctgctcaatctaagcaaattacttcaactggtcacagagaggaattgcaaccaaaggttgatggcttaaccgatacctcttccctgggcaatggcaatgcgatattgtctgagcgaaataaacaaacatcccagcatcaaaatccattttctatgccagcttcccatggaaaggacacaggggcagggcttgctgcacaaactttcccaactaaggatgctattgtttcaaatggtgttgtacctagtagcagggatccaatttccagtgagaaggtgtgtggcttgcaaaaatccatcaagcaagatgacaaaacggtgaaagaacttcctataagtgagaacaatatagtatcaggacttgaacgagtcaacgccagaaaacagactagctctgaagtttccatgaaggtagctgcagctgattcgtgcaatagcaacacacctaaaagggtggatttgaagtcaaagaaacttgtgagatatccagtcatgaacatgtggcttgggcccagacaagttatgctaggttcactaaaggtacaaaagaaaaagaaatgcaatagaactagaagacggtctgtagtttgtgaggacatggccaatgccacttgttcaggtaacaacacaagcgagcagcaggcatcaacatcaacaacaacgtcgtctgaaactgtgcaatgtactcccagagggcggaaacgtgcctatgatagtgacagtcctaaaaataataaccagaagcaaaacaagcaagacgttattggagccgatactggtagtggtgaacttaacatggataagagaaatgttattagtgaaaccgctgctagtgctgagcttccgaagctgggtccaggctcttctgcaaatcaggaacattcaaggaacaatgttcatgcaaaattgggagttccccggcattttactgttctgacaagggacttggctgaagttactgttccatgctgggatgatgttgctgtgtcaaatgctgaggcaagagagtcaaaacattcagaaagcaagagcattggatatgtgttagatgaatgggacgaggagtatgaccgtggaaagaccaagaaaatcagaaattcaaaggaagactacggtggaccaaaccccttccaggaggaggccaactacatctcacagagaaacatgaaacagaggacctatcaacccaaatcctggaagaaacatgcccatgttagaagatgacaatgacgattgacgatgcccatgttgtagtagcagtgtagcgcccatttttgaagaattcatttgttgttcgttttgccgtgttacatcttagcattccggacaaacagctgctgggactggacatgcattcaactgttgttttcgccatgtcgtatttaaacagctggaacctctgtattcaattgtattggattgttgtagcgagaacgagttggttaatactactgtcgttcc

SEQ ID NO: 23752 - DNA, 1520 bp, Oryza sativa
  ref <308>: DATABASE ACCESSION NUMBER: AK073841
  ref <309>: DATABASE ENTRY DATE: 2001-12-06
ggcgtgctagggcgagccggcgatcgcgcgcgcggcggcggcggcggcggaggaggaagaggaggagtgggcgacgcgacgcgacgccgcgccgcgcggccgtgtgctctacctggacgtacgagggaggggggccgagccgagagaccagcttggccgcggtgcgatcgcgggcggcagtcgtacgtgcgtgcagcggcggcggcggctctgtgcctaccgtcggcggggcggcagggcgtcggagctgcctctgttttgatgataaaagtgagaatgcctggaagtctcgagttggtgtgctttatgtgatgcacccgataacatttttcaccaatatcattggtgtggtgaccattgttctgatctccatcgtctccatcttgggccttatttgcctgtgccactcactgaacttccaattgttgatcaaacggaggaggagaaattactaccaagcgaatgacgagcagcttagctacttcaatgggccatggctgactcgcataacattaatactggttgcactatggtggggtgttggagatgtgttgcggctcacatttgtcaatggggaggggaggttcatttctgatcagacatggcaagccaatgtatgcaaattttacatcgtctcaaatttggggtttgcagaaccagggttgttcctgttgctagctttccttcttagtgcagcattgcaaaatcaagaggttggtgccttaaatcgtaaatggaaccagaggaccatatgtgcagtgtttatgctctgctcaccctcactcatatgggaagcttgtgtagtttttattggtcctcatattgcttcaaacgatggacagacatcaaaggttgcaaagtattggtattcagcctcttcagtccatgatggcgatgttgcatgcacatacccattgttgagcagcatatttcttgggacgttctacaccgtgttaactctttatgtcatatttgttggagggcagatattatctttagtgatcaacaaggggcttcgacggaggatatatatgctaatttttgccaccggaatactgcttcctcgagctatgtttcttggattctcggttcttccatggccaggtgaaatagtccatgaatctctcgtgtttgtctccttccttgtcctgatgattgctgctatgcttggtattgttattctggtgtatttcccagttgcggaaacctttgaagtaagaaaccaagagcatattgagctgcaaacaagtcattccattgccctgtgaatctttgatggctgagccttatgatttgacatatgtttcagcttttcattctaaggacaagacattgggagatgcttcagatttattatgtggttgttgctgagagctatctccccaattttgtaaacatagaacaaattagattaggttatcgttctcctttcttttcttcatgcatgtcgccatgaacagaagttataccctgtacaatagtttctataggctagtgaaatgaccaggcatactttacct

SEQ ID NO: 23753 - DNA, 1820 bp, Oryza sativa
  ref <308>: DATABASE ACCESSION NUMBER: AK073842
  ref <309>: DATABASE ENTRY DATE: 2001-12-06
gagtgccgcagaaggatccctcgccgacgagggcgcggtagcagcagcacaagcaattcgcgcaggagagaagtggccgcaggccgcagcgatgggcgcgccggtttgtggcgcactcgtgtgcttcttcgttctcctcgttgcccgtgcggccgcggagacggcgccggtggaacgtcccacattgccctcagccgacgtcgccatcgacggtaatggcaacggcgctcgtgctggtgcgggcaaagctgccggcgccggcgccgtgggaggagggatcgtgtcaaactcggtgctggtggcgttgctggactcgcgctacacggagatggcggagctggtggagaaggccctgctgctccaggcgctggaggacgccgtcgccgagcacaacgtcaccatcctcgcgccgcggaacgaggcgctggagcgggacatcgacccggagttcaagcgcttcctgctcgagccgcggaatctcaactcgctccagtcgctgctcctcttccacgtcctccccgcccgcctcccctccggttcctggcccgccgcggccacccacccgacgctcgccggcgaggatgttgagctcgccgcggccgacggcggcggcggcatgcgcgtcgcccacgccgccgtctcgcgcccggacgcggtggtcaggacggatggcgtcatccacgggatcgaccgcctcctcgtgccgcgctccgtccaggacgaattcaaccgccgccgcagcctcgccgacatctccgccatgccgccgacggccgcgcccgaggtggatccgaggacggatcgcctcaagaagccggcgccacccggcgattctcctgtgctcccgatctccgacgcgactgttcccgatccctccgtcgcgctggcgtcggagcccagtgaccactacgacggcgacagccaggtgaaggacttcattcagaccctgctcaagtacggcggctacaacgagctcgccgacatcttcgtcaacctcacctcgctcgccaccgagttagcccagctcgtctccgaagggtacgcgctcaccgtgctcgcgcccaacgacgaggccatggcgcggctcaccgccgaccagctcagcgagcccggctcgccggagaacatcctgtactaccacatgatcccggagtaccagaccgaggagagcatgtacaacgcggtgcggcggttcggcaaggtgcgctacgacacgctgcggctgccgcacaaggtggtggcgcgcgaggccgacggctcagtcaagtttggccatggcgagggctcggcgtatctcttcgacccggacatcttcgccgacggcaggatctcagtgcagggcattgacgccgtgctgttcccgccggctgagacgaagacgaagacgaagccggccaccgcccggatcaggacggcgcccgctatcaccggcgtcagcaagattaaacaccggagaggcaaattgctagaagcagcatgccaaatggttggcatccttggccagcgatcgcaattcacacgctgccagtagacaggaaagattgatctcatgatactgaaacacggtctagaggtgatagactctgctggggccatccacatatggttgttttattttgtttaaaaatgagtagtaaatcaggtgggcaatataagcaggtgtgtataggtgtgtcttacggcaggaaaaaaaatcatacttgaacaccaaaatcttctgtgtataggagggtttgttttgttcgttgttcttgctactgtttctgacagaatcttaatcttgagtaaagatcgcagcatcccatgggttaaaagcttcc

SEQ ID NO: 23754 - DNA, 1152 bp, Oryza sativa
  ref <308>: DATABASE ACCESSION NUMBER: AK073843
  ref <309>: DATABASE ENTRY DATE: 2001-12-06
gacacctcgatcagtagctccatcgtaagatcgattcgaccaacatatcaacaatggcgcttcgacgcctcgcggcacttctctccttggcagtactactgtccgccggcctcgccgccgtgtcggcgacgtcccagaacaccggcgacaccgtgatcatctggggccggaacaaggacgagggctccctcagggaggcctgcgacgccggccgctataccaccgtcatcatctccttcctcagcgccttcggctacatcccgggcacctacaagctcgacatctccggccaccaggtctccgccgtcggccccgacatcaagtactgccagtccaagggtaaactcatcctcctcgccatcggcggccagggcggcgagtactccctcccgtcctcccaggcggccgtcgatctgcacgaccacctctggtactcctacctcggcggccgccgcaatggcgtctaccgcccgttcggcgacgccaacgtgaacggcatcgacttcttcatcgaccagggcgcgagggagcactacaacgagctggccaagatgctctacgaccacaacaaggactaccgcgccacggtcggcgtgatggtgacggcgacgacgcggtgcggctacccggaccaccggctggacgaggcgctggcgacggggctcttccaccgcatccacgtcaagatgttcagcgacggccggtgcccggcatggtccaggaggcagtcgttcgagaagtgggcaaagacgtacccgcagagccgtgtcctgatcggcgtcgtggcctcgccggacgtggacaaggacgcctacatgccgccggaggccctcaacaacctgctgcagttcatcaacaagcagcccaacttcggaggcgtcatggtttgggacaggttctacgacaagaagaccggcttcacggctcacctgtgagtgtgtgactggtcgtgacatttgaagaccattaattccttaatattggatcaataaaagctttgtgtgcagtacttgtgtactacacaaataaagtcatgtaatgaaaataaacatatattgtgtctgctataaagatttgtatgttgggtaatgtatgtaatcaataaataaagcgaggtacggtacctcgggtgaaataataaagagctttgag

SEQ ID NO: 23755 - DNA, 2547 bp, Oryza sativa
  ref <308>: DATABASE ACCESSION NUMBER: AK073844
  ref <309>: DATABASE ENTRY DATE: 2001-12-06
gctcacagtctccttccccatctcagactcagatcgatctaaactcttcactgaacccagccgccgccgccgccgccggctgcccccctccgccgctcaccggcgaccagccatggctcgagccccttccttcctcctcctccccttactcctcctcgtctcctcctcgctcacgcccgccgccacggcggccgcgtttgtcggcctcgactccttcctcgcggcggcggccgcccgcgacccctccgccggcaacgacaccttcggcgccctccccgccgcgctcctccgccagctctcgaccccgtccccgctcctccccacccgcctcctctccctctccgcgcaggtccccgtcaccgtccgcctcgccggcgcctccttcccgcccgccaccggccgcctcctcgagtccttcgtcaactccgccgtctcctcctcgcgcttcctctccagccgccgcccgcaccgcctcgcgctctcccacaagatccacctcgaggtcgccgcctcctcctcccagctcgcgccccgcgccgccgccgccgtccgcgcgcacctcgactcctccgcggcgccgttccacgccgccgcgctctcctccgtcccttactccgtcgtcgacgacctcgtcgccgaggactaccgcgcgctcgtcgacaccggctccgccccgtcggtgtacatctacctgctcaacctcggcccgcagccgcggccgtacgcctacaccgcggcatcgtcgccggccgatgcgcattcacctggcttctcccgctgcctcgcccccgtctgggctggcaaggagcggtacatttggatcgacctgggtgcagggccggtggactatggccctgcgctctccggtgaaggcgcgctcccccgtggcgagttccaccctctcgccgcgctccacggccggccgaggtcggagaaggcattggttgctgatcttgcttcgctggtgctcagtgcttacaagtcattgctagtgccttcgctcagaattccagtgcattacgagagctcgttgctggttcaggtctttcacatccttggacacgagagggatacgtccgggcttgattggggttcgatcgaacagtcgattcgtgatgggaatctggcatatgaagggcagaggttgaagtttgatttgaacaggatcaggttctctgactgcccaatttgctcgtttgcggttgcgcggtcgacaacctcgtttacgtccaggttcttgtttgataattacacgctgattgtgagtgaatacttggactccaagcggatgaggcaggtgctgtctgactcgttggaagagttgcacaaggtggctggtgttcatgataatgatgactatgacaaggttgtgccagtttttgtgtttgatttagattatgataagcttctgttgctagataggtatcaccaggcagtggcttttcgtgatatggtgatttctgtgaggacaaggagctcacagacggtcagcgactacagctgtaatggtcgacatgtgattacaatgactaggaatcttgaccggccgatcatcgcttcagttctgcagagcatgtggggtgtgtcaccgacacaccagtcatggagccctgagcacaatgctaccgtcgttgactacacttggagcactggacatacaccatttggcccattctcagagaccaaatcgctttcttttgtgcagaaagatgcagcccgtaggaatgttcttctaaccactctgaactacacaatcacaagcgctattgatgttttggagtcaatggctgcgcatggtggagagagtatactccttagaaggaaaaggcgtgttgaattcattcaaagatggaatctgctcacttataaactggagaaggtggtctcagccatgtcccgcctcgactacaataaagcgatgtactttctgagatcgtcagatcatgatctgtttgccgtccacactttggtgtatcaggcgtctcaggagttggaggcttctctggtttgcttcaaagatccaccatttccctggttgtcagtttccatgtctggaattttcgtttttggtttcttttatgtttactcgaagagagataaattgttcaggagcaaaaggaaacagttttgactgcacttcagttcacggatactgtttgaatgctcatcttgataccatagtcaggattcagaaaagttgcatccttgcataatacatggagatgtcactggatgcatgaaacgggtgcatcttgttttaaacagatgaattcacttgtacgagatatactggatttccttaggaagcactacttccactagttttgtaggttgcatgtgcccaattcactcggtacatactgttgatctagattctggagacatgcatatatgttttctattcttgactagcttaattactgtcatacttgctgggtgcataacctatgtgggatgctgtgctcaattgatcatgtgtaatttcgagatgtcaatttttctaaacaatgcctttgcaggatattttaagctgattctttaagaact

SEQ ID NO: 23756 - DNA, 2630 bp, Oryza sativa
  ref <308>: DATABASE ACCESSION NUMBER: AK073845
  ref <309>: DATABASE ENTRY DATE: 2001-12-06
gaccttttgctccccaccaccacctacctctcccctcttattcctcctcgcctcctccccgcatccgtacaccggcgcgccgctgaattcctaaccctagcccttgcctccgcctctcctccatggccgccgcccccgcgtccccgttcgcgtagccctccatgggatccgcccgcgccgccgacgacgaagggaggagaccgaccgggggagaagaatgaggtgctgcgccagccgcgtggcgtccgccgggtgccgggccatgggagttgcgggtggggtgaaggcgacgtcgctccgcagcagccgccgccgccgcgagctgccgtcgccggccccgttctccgagcccttcaccgaacgcccggcgatcctatataattaactggccgccccgcgccgtctctcctccgctgcatcggtcgccggctctagctgctgaccgccgtgcgtagcgggcgcccgcgccgctccacgcgctgtcccggcgatctcgcctggctcatctcgctctgcttcctctctgcttcctgattcgttcgtgcgcgtggggtgatctgaaatggaggtgttcggcgatctggataaggtggacgatgctgagtgcgtggaggtggatccgaccaggcggtacatacgctacaatgaggtgctagggagaggagctatgaagactgtttacaaggcatttgatgaggttgaaggcattgaggttgcatggagccaagtggagatagatgaggttatgcaatctccagataatcttgaacggctatactctgaagttcatctactaaagtctctcaagcatgaaaacgtaatgaagttctataattattgggttgatgatcaaaagaagacaattaatgttattacagaacttttcacatctggaagtctcaggcagtatcgtcagaaacatccacgtgttgacttgaaggcaataaagaattgggctagacaggtactccgtgggctggattacctgcacacccaccaacctccaattatccacagagacctgaagtgtgacaacatttttgtcaatggaatcatggagaagttaagattggagatcttggattagccacggtgatgctaacgcctagagcaaaaagtgttattggtactcctgaattcatggcgcctgagctatatgatgagaattatgatgaacttgttgatatatactcatttggaatgtgtatgttggagatgttcactcttgagtatccttacagtgaatgtacaaatgcagctcaaatttttaagaaagtatctaagggtgtcaagccggctgctctggctaaaatcacaaatattcaggcaaaacgatttattgataaatgtttagttcctgcttctgaaaggctgtctgccaaagaactattgcaagacccctttctttgctctgataattctagtgttcttgttggcactaagtttccgtcatcattacccaaatcagtagatgtctctttggaagctttgcacatggatgttgacaccaatgaatctatgtgtactagcacatgcaagagaaatgatcttggtggtccacatagatctgtgttggagttcacgcgaactaacaaaaacacagagctaaagctaacaggcgagaaacttgatgacaattcagtatcactggttttgcgaattgccgatttgtgtggacatgcaaggaacattcattttctcttctacttggattctgatacagctatgtctgttgctgctgaaatggtcgagcagttggagttagcagactgtgatgttactttcattgctgattttattgatcttttgatagtgaatcttgtccctggtcagcagctgatgaatgatgcagtaatgagtacttccagcgaatctaaaatgggtgaaagtgagcacgtaattacttcccagcagcatccatcggagttgacacatgattatgtactagttgaaggtatgatgcattcgaaagaagccaatgcatcaccaagtgattatattgattctctcttgaatgcaaccaatctaggaggaccaaatagctctgaagggtcagacatttctgttcagcttgatgggagttccaaaagtcttagtgagtatggcgttgacgaatacaggacactggaatgtggtgcgtacaaaggaaccgataaactgggctgcagacatccgttaagtaatggttcaagtaattttgcaatctttcagatggatcaagcatcacatcactcggagttggtgatcggtgcatcggtttcaattactgaaaatcgagatgtgttaaatggagagcttggtctgattgaagctcagtacgagcaatggtttcgtgaattaacaaggatgcgggaaggagctttggaaggagcccggaagaagtggttaccagataaatgatgatgtataaagtcaagttttgtgtttcatctgaacatcataagaaagaatgttcagatgttcatgttccagcttcctggttcaacatttcttgtgtttcatacataattgagcaacgttaataatttttagtttaaacgttgctgtagtctgcaatgctgtaaagccagcttgttggtaattattaagccgtttggcaagagtttacagcatgatattttgatggtgtt

SEQ ID NO: 23757 - DNA, 900 bp, Oryza sativa
  ref <308>: DATABASE ACCESSION NUMBER: AK073846
  ref <309>: DATABASE ENTRY DATE: 2001-12-06
gccccgcctcgctgcttcgcctctcgttccccaaggccccgaagccgccggcgccgccgccctcctccggttcgagctctccgccaccatgatcatctgcaagaagaaccgccgcgagatctgcaagtacctcttccatgagggagtcttgtatgccaagaaggactacaacctggccaagcacccaaaggttgatgtgcccaacttggaggtgattaagctcatgcagagcttcaagtcaaaggagtatgtgagggagaccttctcgtggcagcactactactggtacctgaccaatgatggcattgagcacctccgcagctacctcaacctgccatctgaggttgtgcctaacaccctcaagaagtctgccaagcccccgtctcgcccattcggctctggccctcctggtgaccgccccagaggcccgcctcgctttgagggtgacaggcccaggtttggtgacagggatggttacaggggtggcccacgtggtgctccaggtgattttggtggcgagaagggtggtgctccagctgagttccagccatcttttaggggtagcagacctggctttggtcgtggcggtggtggcgcattcggtggtggcgcatcttccatggagtaaagcttgatcgggacggagcatattgttttgcccaatggcttatgagatgcaatgcgcgggggtcgtcttcactgttggtctttgaattgtgggaacaatgagaatttttgtttatgaaattgtagctgaggttgttctagacatggctgtgttatgccttttgttctgttagatatcactctcgaaatgaatctgttggtttgaccgagaatcttttagaatgttatgagcaagctgccatttaatcaaaaattcatctcattttcatgcct

SEQ ID NO: 23758 - DNA, 1491 bp, Oryza sativa
  ref <308>: DATABASE ACCESSION NUMBER: AK073847
  ref <309>: DATABASE ENTRY DATE: 2001-12-06
ggccatccttaaccgagaagcatagctcgcttccacgcaagattaaaagctgcccctcttgctgctgcagactgcagtcctgcaagatcagcgcctgaagcaagaagcgaagaatcaaacgagagcctagcagcgtagcagatcgatcgatcgatcgatattatggaggcgcgaggaagcagaggaatgcggctgtggctcctgtccgtggcggtgatggccatggcgatggcgacgaggtcgcaggcgcagctgcaggtcgggtactacgacacgctgtgcccggcggcggagatcatcgtgcaggaggaggtcagcaaggcggtgtccgggaaccccggcatggccgccggcctcgtccgtctccacttccacgactgcttcgtcagggggtgcgacgcgtcggtgctgctggactcgacgcaggggaacagggcggagaaggacgcgcccccgaacacgagcctccgcggcttcgaggtcatcgacagcgccaagtcccgcctcgagacggcctgcttcggcgtcgtctcctgcgccgacgtcctcgccttcgccgcccgggacgccctcgcgctggtgggagggaacgcgtaccaggtgccgggggggaggggagacggcaacgtgtcggtggcgcaggagacgaacgggaacctgccgccgccgtcggcgaacgtggcgcagctgaaccagatgttcggcgccaaggggctcacccagacggaaatggtggcactgtcgggcgcgcacaccatcggcgtgtcgcactgcagctccttcagcaaccgcctctactcgtcgggccccaacgccgggcaggaccccagcatggaccccagctacgtcgccgcgctgacgacgcagtgcccgcagcagcaggggcagcccgcggcggggatggtgcccatggacgccgtcacgcccaacgcctttgacaccaactactacgccgccattgtcgctaaccggggattgctcagctccgaccaggcgctcctcgccgaccagaccaccgccgcgcaggtcgtcggctacaccaacaacccggactcgttccagaccgacttcgccgccgccatggtcaagatgggctccatcggcgtgctcaccggcaacgccggcaccatcaggacaaactgcagggtggccagctgatcgatcgacctaagcatgatgtatagctcgtggcaggcttgtgtgagttgggattgtgatgagattaaattgaaaattgtacgtacgacgacgtagctagctagatagagtgttgtaaacttatttgtttgatcattcatttggtctctctgtattacgtgctagctagctcaattagcttgctcgtgcgtcccttctcccctcttcccgtagattattttactctgcactctgtacttctctgtgacattatagtgacaatatagttttattgttccatcttttaacctctgcatgtacatgctgcgaatagaaagccagaataagaaacct

SEQ ID NO: 23759 - DNA, 1283 bp, Oryza sativa
  ref <308>: DATABASE ACCESSION NUMBER: AK073848
  ref <309>: DATABASE ENTRY DATE: 2001-12-06
gacgaaccgacttggtcgccacggaagcgcagcatcaacaaaggcagcagcagcagcagcagcagcagcagcgttggtggtggtggtgtgtcatcaccaacattttcacgagaggagaaggatggaaatggcggcggcggttgggggcagcgggaggagggacgcggaggcggagctgaacctgccgccgggcttccgtttccacccgaccgacgaggagctcgtggtgcactacctctgccgcaaggttgcccggcagccgctccccgtcccaatcatcgccgaggtcgacctctacaagctcgacccctgggatctccctgagaaggcgttgttcgggaggaaagagtggtacttcttcacgccgagggaccggaagtacccgaacgggtcgaggccgaaccgcgcagcggggagagggtactggaaggcgacgggagccgacaagccggtggcgcccaaggggagcgcgaggacggtggggatcaagaaggcgctcgtgttctactccgggaaggcgccgaggggggtcaagacggactggatcatgcacgagtaccgcctcgccgacgccgaccgcgccccgggcggcaagaagggctcacagaagctggacgggtgggtgctgtgccggctgtacaacaagaagaacaactgggagaaggtgaagctggagcagcaggacgtggcctccgtggcggcggcggcgccgcgcaaccaccaccatcagaacggcgaggtcatggacgcggcggcggctgacaccatgtccgacagcttccagacgcacgactccgacatcgacaacgcctccgccggcctgcggcacggtggctgcggcggcggcggcttcggcgacgtggcgccgccgaggaatgggttcgtgacggtgaaggaggacaacgactggttcaccggcctcaacttcgacgagctgcagccgccgtacatgatgaacctgcagcacatgcagatgcagatggtgaatccggcggcgccagggcacgacggcggctacttgcagtccatcagctcgcggcagatgaagatgtggcagacaatcctgccaccattctgagatggatggagcaagaaaaaggttgctgtagataaagggcggaaataggagtgatggctagaaaattattagatttactagaacgaaaatgattagaaatctggcaagcatgattctgcaaatgtggtggtagatgcttgcagtatgtaattcatttgttcagtatatgcatttggtaatctgcaaaacatctccttttgttctc

SEQ ID NO: 23760 - DNA, 1290 bp, Oryza sativa
  ref <308>: DATABASE ACCESSION NUMBER: AK099382
  ref <309>: DATABASE ENTRY DATE: 2002-08-28
gtgaagccacaacggccaagcagaaagtgcaattagcctgcaggcagctaatcagtagtagcttgctagccatggcttctgcaactaattcttcacttagcttaatgctgctggtggctgcagctatggcgtcagtggcatcggcgcagctctcggcgacgttctatgacacgtcgtgccccaatgcgttgtccaccatcaagagcgtcataacagccgccgtgaacagcgaggctcgcatgggggcgtcgctgctcaggctgcacttccacgactgcttcgtccaagggtgcgacgcgtcagttctgctgtccgggcaggagcagaatgctggcccgaacgtggggtcgctgaggggattcagcgtcatcgacaacgccaaggcgcgggtggaggccatctgcaaccagaccgtctcctgcgccgacatcctcgccgtcgccgcccgtgactccgtcgtcgcgctgggagggccatcatggacggttctgttggggagaagggactccgccactgcaagcgaggccttggcaaataccgacctccctgccccttcctctagcctcgcagaacttatcggcaatttctccagaaagggactcgacgcaaccgacatggttgctctctcaggagcacacacgatcgggcaggcgcagtgccagaatttcagggacaggatctacaacgagaccaacatcgattccgccttcgcgacgcaacgccaggccaactgcccacggccgacgggcagcggcgacagcaacctggcgccgctggacacgacgacgcccaacgccttcgacaacgcctactacagcaacctgctgtccaacaaggggctcctgcactccgaccaggtgctcttcaacggcggcagcgcggacaacacggtcaggaacttcgcgtccaacgcggcggcgttcagcagcgccttcacgacggccatggtgaagatggggaacatctcgccgctgaccgggacgcaggggcagatcaggctcagctgctccaaggtgaactcctaattaaggagtagtatgacgggatgcgttcgttgctggaagcaaatcttgtcgacgacgacataaacgggccacaccacatatacccatatatgtagtataaccacaagtataggtacggtggtgttgtactagtacacgtaaagtatatggcagccagctcgctctagcaatccatcaagtgtatggagcagagcagccatggcattagcacctagtataccaaaataaaagctcctcatgcgaaggcatgcatggaggattaatg

SEQ ID NO: 23761 - DNA, 1715 bp, Oryza sativa
  ref <308>: DATABASE ACCESSION NUMBER: AK073849
  ref <309>: DATABASE ENTRY DATE: 2001-12-06
ggtgctctggagaagccattgcacaatgatgttacagaggctgttttgagtcttcacaatgctggcgggtagcaactgtggtaggtagtgggagttcctacctacccctccctgtcttcctactaatttggtggtgcgcatcatgggttcaaggagcaatccggcggtttgacttctccgtccgcacctactctagcctttgttcagtggtacgaggcgccgcgcgagcctgccggaatggccgcggcgtcgtctccggcggcggccatcacctgccgagcggcggtggcgtgggcgcccggtcaggcgctggtgatggaggaggtggaggtggcgccgccggaggccatggagatccgcgtcaaggtcgtctccacctccatctgccgcagtgacgtcacccagtggcaatccacggctcaaaccgatctgttccccagaattttcgggcacgaagcatccggtgtggttgagagtgttggtgaaggtgtgaccgagttcgaagtgggagaccatgtgctcaccgtcttcatcggagagtgcatgagctgcaagcactgcgtttcagggaagagcaacatgtgccagaagctcggcctggagaggaggggtgtcatgcacagcgatcagaagacccgcttctcgctcagggggaaacctgtgtaccattactgtgcagtgtcaagcttcagcgagtacacggttgtgcactccggttgcgcggtgaaggtcggcccaaccgtgccgatggacaggatatgcctgctgagctgtggtgtatctgcagggcttggtgcagcctggaaggttgctgatatctcgaaggggtcgagtgtggttatatttggccttggaactgtagggctttctgttgctcaaggtgctaagctgcgcggggcttctataattatcggtgttgatactaatcctgaaaagcaagaaaaggggaaagcttttggtgtcacagattttattaatccagaagaattgaatgaacctgttcagcaggtggtgaagcggctgaccaatggaggtgcagattactcttttgagtgcgtgggtgatacaggagtagtgtcgactgcactgcaatcatgttctgatggttgggggctgactgtaactcttggtgtgccaaaagcaaagccagaggtttctgctcattatgcactacttctgtctggaagaacattgaaggggtctttgtttggaggatggagacctaaatctgatctacctttgttagtggacaagtatgcaaacaaggaaatccaagtcgatgaccttgttacacatgatttgtcattcgattacatcaacaaggcacttgaactgatgctagaaaacaagtgtttgcgatgtgtgattcacatgcctcagtgacagggttggacaactaagtgttatcgtatctctacaattttttcgctttatctcagtcgtgaagttttcatcagcaaatcagattatcacatcattctatgtttccaccttggaagttttgatgctgtctaactttgtgtacctatctcaagaattattcatgctatttatcttgctgtaaaattagtttgtaatgactgcaattttgtattgatgttccatgtataggccaagatctatcttcttccagagcttcctgcttcaaatgaatcatgtaaaactgaaggacagcgtaaaggaaatgaaattacattcactgattttcatccgtc

SEQ ID NO: 23762 - DNA, 2247 bp, Oryza sativa
  ref <308>: DATABASE ACCESSION NUMBER: AK073850
  ref <309>: DATABASE ENTRY DATE: 2001-12-06
gtggttggaagcggagaccgagagagagaagcagcacccaaaccctagccctcccctctcctcccgcacgcgcgcgtcggcgccaccaccgggagctccgccgccgccgccgcctcatccgccccgtgccatggcggagacccccgagcgcaggaggtactcagggtccccctctccttacaggggaaacccaaaatcaaggtcaagatcacgatcacctgctgctcgatcccagtctaggtctccagtccctgaccctagatctcaggcaaggtcaagatcaagaagccgcgagagggagcctgatgctgtaaatcatggaaatacactgtatgtgactggactctcttctcgagtgactgaaagagaacttaaagattacttctctaaagaaggaagggtgactagttgccatgttgtccttgaaccccatacacgtgtttctcgtggatttgcttttgtcaccatggacactgttgaagatgctgaacgctgtatcaagtatcttaaccagtctgtaatggaaggccggaacatcacagttgaaaagaagagattgtgcaagctatgtgcaacaatcaagatgctgagttcatcaatttcaactttagctcatacagcttgatcaatggacagcccaaagggttactatgcaccacaagattcacaactaaacatagcaaattttcaactaaacccctgagcattcatcttcaacttccaacatcaactaatcaacgggcattcacaactcgttagacaagcatgtgtggtgacgtacgcatagcaaatattggatccctgctagttggagtttgcgctcttcattacatatttcctccattggtccgtaattgcggcatatgttgattgatcgtaagaggaactttcacgtcgaggtcgcccaaggacgccaactcctggaagctatcttggtcatcgatatgaccgtagagagccacgtgggagataccgcagcagaggaggtggctatggccgtgatgagtactacggcaatagctaccgcaggtctccgcctccaatgtacccatcctacagggacacaagggactaccctccatacagggacacaagggactactccccccacagggatgctcgagattactacgacggaaggggaggcaggggatactccccacatagatctcctccttatggcggtggcagggcccggagggagcgatttagatcattgccgtattctccctaccggatgcctgagagaggctatggacgccaagccggtggtggtggctatgacaggtaaggttgctcccttggctcttgttgcattagatacctgaattccaagctggaaaacgtgctgttcctgttagccctgatgaatgttagattgctgtagctttgtactatttgaaagatgcattcctggatttaatgaacgttgttgtatggggtacctatagacgggggtgtttagatggggctaaaactttttaacccatgtcacatcggatgtttggacgctaatttagagtattaaacatggactaataaaaaaactaatttcataaatgagagctaatccgcgagacgaattttttaagcctaattaatccataattatcaaaagtttactgtagcatcacattgtcaaaatcatggcgtaattagactcaaaagattcgtctcgcgaattagtccaagcttatgaaatgggttatgtaattagtgtatgtttaatactccaaattagtgtccaaacatccgatgtgacagggacttagaataagtctctggaaaccaaacagcccctagtctgtaatctggaatgattttaagtacgactggtatgtcttattttggcacctttattggagtgtttgaaatcgtggggggcagagtggcagtagctgctacgtggctattatttgacatgggccataatgcgcatccttgaaaggtgaaagctggaatattcacctggaggacagcgcggtaagtttgatgtaagtaaaagtgcggtggtgaaaaaacgtgggtgtgtacatatgagaagacaaaaggctttgatgtgccggtcctgcagcccctgcatcatcattgtgtctgatgccatggaatggaatccagccagagaagtgagattgcaactttgcaagatcgatgcatgtgacggcgtttgtggttttttgttgttggattggatgatggaaccgaatggatcatgtgagttaatctactagtacagtattaaaagcc

SEQ ID NO: 23763 - DNA, 2294 bp, Oryza sativa
  ref <308>: DATABASE ACCESSION NUMBER: AK073851
  ref <309>: DATABASE ENTRY DATE: 2001-12-06
gtggtgcgccgccctagcgaccgcaactgcaggcgcgcatttcacgggattccgtgggctgtgctgtgctgtacagaccggcgacgagccgccgccgccgtggaggatcggctacttatctgacataaacaaacgaagatgctgctcgtctagttccctgatttggagattcatcaaatggatcatctcagtattagaaatcctttgtctcttctgctctcactgcagttgtcacttttgttgttcaatcccttgtctgtagcagacttaacctctgaaaagcaagcccttctagactttgcctctgcagtgtatcgtggcaacaggctcaactggagtcaaagcacatcattgtgttcttggcatggcgtaaaatgctcaggagatcagtcacacatatttgaattaagggtaccaggtgctggtctcattggagcaattcctccaaacactcttggaaagcttgactctctccaagttctgagcttacggtctaatcgtttagctggaagccttccatctgatgtgactacgcttccttccttacgatccatataccttcagcacaataacttttcaggagatttgccttcctttttgaatcctaacctcagtgtagtggacctctcctacaattcctttaccggtgaaattcctataagcttacaaaacctttctcagttatcagtcctgaatttacaagaaaattctctctctggatccatccctgatctcaagcttccaagtctgagactattgaatctgagcaacaatgatttgaaaggccaaattcctcagtcgcttcaaacatttccaaatggctcattcttggggaatcctggattatgtgggccacctctagctaaatgcttgcttcctgattcaccgacgccttcaccagcatccccttcatcagcaccaactccaatgtcagcgcatcatgagaaaaagtttggcgccggattcataattgcagttgctgttgggggcttcgcagtactgatgtttgttgtggttgtgttggttgtgtgtaattcaaagaggaaaggcaagaaagagagtggtgtggactacaagggtaagggcactggtgtcagaagtgagaagccaaaacaggagttcagtagtggcgttcagatcgccgagaaaaacaagttggttttcttggagggttgctcctataccttcgatttggaggatctactgagagcttctgcagaagtccttggcaagggaagttatggaactgcttacaaagctatacttgaggatggtaccgttgttgttgtcaagagactaaaagatgtcgtggcaggaaaaaaagagtttgagcaacagatggaactaattggtaggttaggtaaacatgcaaacttagtccacttcgtgcttactactattctaaggacgagaagctcatcgtctacgattatctcaccaatggcagtttctcaaccaagttacatggtatcaggggtgttactgaaaagacaccattagactggagcaccagagtgaagataatccttggaacagcatacggcattgcacacgttcatgcagaaggtggcgccaagctcacccatggcaatattaagtctacaaatatcctcctcgatcaagattacagttcttatgtttcagactatggtctaactgccctgatgagtgttccagccaatgcatctcgcgttgtggtcggttatcgcgctcctgagaccatcgagaaccgcaagatcacccagaaatccgacgtctacagcttcggcgtcctcctcatggagatgcttaccggtaaagctccactccagtcgcagggcaatgacgatgttgtcgacctaccaagatgggtgcactcggtggtcagagaggagtggacagccgaggtgttcgacgtcgagctgatcaagcagcaaaacatcgaggaggagcttgttcagatgctccagatagcaatggcttgcacatcaaggtctccagatcgacgcccatcgatggaggatgtgatcaggatgatcgagggactgcgccattctgcttcagagagccgagcttcctctgatgaaaagatgaaggactccaatccaccatcggtttagttatgtgctcctgtgttcatatgcctcaccaagctgcgagttgcagatcatttgattcttagctaatttgtgattgagttcatgctaaacatggtcgacattagatgcagcctcagaaagctgagcatattctgattggaacttatgagtcttgaattcttgattcttgacaagtgtaggatttttttctctggg

SEQ ID NO: 23764 - DNA, 1584 bp, Oryza sativa
  ref <308>: DATABASE ACCESSION NUMBER: AK073852
  ref <309>: DATABASE ENTRY DATE: 2001-12-06
gtcggaaaaaaaaaatcaattcgaagctcacagtagctcgcggcggcggcggcggcggctcgggctccgacttcgtgggcgatggcgggggcaggaggagggggagtgcgcgacatggacgcgctggagggcgtgcgctcaatcgtgttgaagccctcggagtccctcgacgaggggcggttcacgaggatcgccggcgccgacttcaacgacgccggcctcggcctccccgggctgctcgcgtcgctcgccaccaccggattccaggcctccaacctcggcgacgccgtcgacgtcgtcaaccagatgttagattggaggctgtctcacgagaagccacgtgaggactgtgatgaagctgagcttgatcctacatatagagaatctgtaaagtgcaaaatattcctgggattcacttcaaaccttgtctcttctggcattcgagatgtagtccgttttctagttcagcatcacatggtggatgttattgttacaactgctggtggtatagaggaggatctcatcaaatgtcttgctcccacttatagaggagaattttctttacctggaacactgttgcggtcaaagggattgaatcggattggaaatcttttggttcccaatgataactattgcaagtttgagaactggatcatgccactttttgatcagatgctacaagagcaatccactgagaatgtttggacaccatcgaaggtcatagcttgtcttggcaaagaaataaatgatgaaagttcctacctttattgggcgtataagaacaatattcctgtatactgcccagcattgactgatggatcgcttggagacatgctattctgtcatgcagtccgcaatcctggcctaattattgacattgtacaagatataagattgatgaatggggaagccattcatgcaaccccaaggaagacagggatcatagttcttggtggaggtctacccaagcatcatatatgcaacgccaatatgtttcgcaatggtgcagattatgcagtctatatcaacacagcccaagagtttgatggcagtgattctggagcacaacctgatgaagcagtttcatggggaaagattaaaggttcagccaaacccgtcaaggtgcattgtgacgctacgatcgctttcccattaattgtggctgcaacattcgcacgcaagtttcacggtgcgaaacaagcgaactgaatttctgggtttgagctaaaccgattcctgtcgaattcgtctccccaagttgagtgttcagacctcggagcacggcttgtacatcccttctcagggatggagcaggaaggttttgttggtagtaaaatggtacttactcacgaactgtacggccatgcttgatcatctttcttcattgtgcacattcgatcatctttcttcgtggtacaccactgaggctgtagtagcattttgcttgcgtgttgcaggggacacttcatggaagttaagacattgttcgctttgttcatccgctgttcggatgatttctgactagtgcaagagggaaaaggatatttatctcacagaccgttttggatatgtacgcattcagcg

SEQ ID NO: 23765 - DNA, 1874 bp, Oryza sativa
  ref <308>: DATABASE ACCESSION NUMBER: AK073853
  ref <309>: DATABASE ENTRY DATE: 2001-12-06
gagccacacactctatgctctctatctgcttcctaagcacatacaagcactactctccatacagcaagcagatacaaacagaaggatgaagctcagagtaaaaggcctcggcctccttcttctccttgtcttgcttgctctttgctccaccatcgacgtctgcgatgcaagaagaggcaagcattggcgacctaggagctcaccgagctcctctctgctaaggaacaagggcaaaggaaagaagggcagctccaaccggcagcatggaagcaaccggccgagcccgaagccgccactcagcccgccaccgagtcctggtaatggcaaaggataccagagcccataccagccaagcccaagtccaagcccgaatgcacctgtaagcccaagccctgtcaatgggagtggacatgcaagtcccaagtctccaactccaagctgtggaaaaggtaatcagccaccatcgcggccaacaccaacatcaccacagggcgcagtgtttaacgtggttgattttggagccaaaggcgatggcgtctccgatgataccaaggcctttgtagcagcatgggctgcagcgtgcaagcagggagcatctacagttgtcgtaccatcagaacttgagtttcttgttgggccaatctcattctctgggccttactgcaaaccaaatattctgttccagctggatggaacaattgtagccccaaccagtgctaaagcttggggttctggtttgcttcaatggattgagtttaccaaactaaatggagtatcaattcaaggcaatggcatcataaatggtagaggacaacaatggtggacctattcagacatagatgacgacgaagatgatgacacacagtacgatgtggagtttgaaaggatgccacaagttaaacctacagcattgagattctatggtagtttcaacgttgtagtagctggtatcactattgtcaacagctcgcagtgccatctcaagtttgacagctgtcaaggagtgatggtccatgacgtaacaatatcctccccagaaaacagcctcaacactgatggaatacacctgcagaactctaaagatgtcagcattcatcataccaacctggcttgtggtgatgactgcgtctccattcaaacaggatgcagcaatataaatatacacaatgtgaattgtggacctggccatggaatcagcattggaggcctaggccgggacaacacaaaagcatgtgtctccaatgttactgtaagagatgtcaacatgttcagaaccatgactggtgtcagaatcaagacctggcagggtggcttaggcttggttcaagatgtacggttctcgaacatccaagtctcagaagtccaaacaccaatcatcatagaccagttttactgtgacaaaagaacatgctcaaatcaaacatcagcagtggcagtatcaggcgttcagtatgagaacatcagaggaacatttactatcaagcctgttcattttgcatgcagtgacagctcaccttgttcagggataactcttactggagtacaactcaggcctgtccaaataccccactaccgcctaaacgaccctttctgctggcaagcttttggggagctctacactccaacagtccctccaattgcttgcttgcaccttggaaaacctgctgggaacaacttacagtcataccacgacttatgttgatacacaaaagtaccttcatccattgattggtgcttatccatgagtggtcgtgaaacttccgacccctttgcaccattgcttggcggtgtgcatatatacagttattctgatgccattgttactatagcacgtgtcacccttcaattaaagaaaagatagatacttccatatg

SEQ ID NO: 23766 - DNA, 2131 bp, Oryza sativa
  ref <308>: DATABASE ACCESSION NUMBER: AK099383
  ref <309>: DATABASE ENTRY DATE: 2002-08-28
cctcttcggcctctcctttcccccgctccccttccccgaggagccacgccgccgccgccgccgccgccatgccgaagcactaccggcctgcgggcaagaagaaggaggggaacgcggcgaagtacatcaccaggaccaaggcggtgaagtacctgcagattagcctcgcaaccttcaggaagctatgcattctcaagggcgtctttccccgggatccaaagaagaaggtggaagggaaccacaagacctactaccacatgaaggatattgccttcctggcccatgatcccttgattgagaagtttagagaaatcaaggtccacaggaagaaggtcaaaaaggcgtttgctaagaaaaataaagatcttgcagacagattattgaaccgaccaccaacttacaaacttgacaggcttattcttgaaagatatccaacttttgttgatgctcttcgtgacttggatgattgcctaacaatggtgcatctttttgctgcgttgcctgctgttgaaggtgaacgtgtgcaagttcagcggattcataattgccgcaggttgagccatgaatggcaagcatatatatctcgaactcattccctgcgaaagacatttatatccgtcaagggcatatattatcaagctgaagttcaaggtcaaaagatcacctggctaactccacatgctcttcagcaagttttaactgatgacgttgacttcaatgtgatgcttacctttttggaattctatgagacacttctgggatttataaacttcaagctttaccattcgataaatgtaaattatcctcctgttctggatcctcgtttggaagctttagcttctgagctctatgcgttgtgccggtacatgtcttctggaagagtacctggaaattcagaacctgctggactaattgaagacaaagagggtgaagacaataaagagagctcaaaaacagatgagtctgaactcagattggcacaacttcaacaccagctcccaactaatgaacctggagcgctgatgcatcttgtacaagaatctactgctgctgatgcagacgacgctgatgccaaagaatgcaggagtttattcaaaaacctgaagttctacctaagtcgtgaggtgcctagggaatctctcttatttatcattccagcatttggtggtaccgtttcatgggaaggagaaggagctccttttgatgagacagatgaagacatcactcatcagattgttgatagaccgacccaaagccactttttcctctctagggagtatgttcaaccacagtggatatatgattgcgtgaatgctcgcatcatattgccgacagaaggttatattgtcgggagggtgcctccaccacatttatctccctttgtggacaatgatgcagagggttacattcctgagtatgcagagaccattaagaggctgcaagctgctgctcaaagccaggtgttgcctctgccaagtttaggggacgaagatatggaaaattcactggtagaggcaattattgatcgatcagagtctaatgaaattgctgacaagaagaggaagttggagatgctagagaagcagtaccacgatgagctgaggatggaatacgaaggaaagaccttctcaaataggacggcagataaccaaccagatgttgtggacaaaagtgatactaaagaagctgacgatcatatggaggactctcataaacaagccgagaaggatgctcctgacatttccaagacccttatgtctcgcaagcagagaggccttcttcaagcaattgagattaaccaggaaaggaaaaaggacaaggtgaacttgctgaagaaaaggaaaaagaatgctgattccagtgcttcggccaaaggtcgctgaggctcgaacttcatttgctccatgctgtatctgttttgacaaattgttcatcggtcgctgcttctgtggagttgctgccatgatctgcacacctacgtattcttatgcatgataagcagctccattttgatgtttaggtgttttacatgggctttaagaatatgcccagatacctcagtagaaaattttgagctatttacctagtgtccaaagtgtgttccctgatgattagtagctattactcttcc

SEQ ID NO: 23767 - DNA, 1912 bp, Oryza sativa
  ref <308>: DATABASE ACCESSION NUMBER: AK073854
  ref <309>: DATABASE ENTRY DATE: 2001-12-06
gagggagagcgcagacacacaccccccatactgccacaagggccgccgccgccgccgggagcgatggccgccgccacctccatcaacgccgtcccctgctccgctggtcggccgaagcggaggagccagcgccgcggcgcctctacggtcgccgtgcgcgcgtccggcgacgctagcaccgtgacgctgctggactacggcgcgggcaacgtgcgcagcgtgcgcaatgccatccgccacctcggcttcggcatccgcgacgtgcgcagcccggaggacatcctcgccgccgaccgcctcgtcttcccgggggtcggcgccttcggctcagccatggacgtcctcacccgctccgggatggccgacgcgctccgcgagtacatccgcagggaccgccccttcctcggcatctgcctcggcctccagcttctcttcgactctagcgaggagaatggcccgataagcggccttggtgtgatacctggagttgtcaggcgatttgactcttcgaagggtctcattgtgcctcacattggctggaatgctttggagatcaccaaagacacgcagctgctcaagggagctgaaggccaccatgtgtactttgttcactcctatcatgctctgccttcagatgaaaacaaagagtggatttcttctgtgtgcaactatggcgagagtttcatatcatccatctcaatgggcaacattcaggcagttcagtttcacccagaaaagagcggagctactgggctttcaattttgaaaaattttctcagtccaaacacttcaggatcaaaggtcccatctcgtaggaaagcatcgaaccttgcaaagagagtcattgcatgtcttgatgttcggtcaaatgatagtggggatcttgtggtaacaaaaggtgaccagtatgatgtaagagaccatagtagtagcaaagaggtaagaaacctcgggaagccagtggatttagcaagccagtactacatagatggtgctgatgaggttagcttcttgaatataactggtttccgtgactttccgttgggagatttgccaatgctagaggtattacgttgtgcatctgagaaagtatttgtgccacttacagttggtggaggtataagagacttcacagatgcaaatgggagatactactcaagtttggaagtagcgtcagagtacttcaggtctggtgctgacaagatttcaattggtagtgatgccgtttttgctgctgaagcctatttgcagactggtgtaaagacaggaaaaagcagcttggagcaaatctctagagtatatggcaaccaggcagttgttgtaagtattgaccctcgaagagtatatgtcaagaatccggaagaggtgcaattcaaaactgtaaaggtgtccaataaaggtccattaggagaagaatatgcatggtaccagtgcacagtaagtggtgggcgtgacagccgtcctataggagcatatgaactagccaaagcagttgaagaattgggtgctggagaaatacttcttaattgcattgattgtgatggccagggctgcggatttgacatagatctggtaaaaatggtgtcagatgctgtgactatccctgtcattgcaagcagtggtgctggtactgtcgaacatttttctgaggtctttgagaaaacaaatgcttctgctgcccttgctgctggcattttccatcggaaagaggttccgatttcagcagtgaaagagcatctggtagatgctggcgtggaggtcagagtgtaggatggaaatcctttgatctattgggaaaataaatcagggctttgtaacagttgtgtgttctattttgggaataagatggtaattcataggccatggattggaaatgcaatttcgtaataaattgtttgaaatcttctgtttg

SEQ ID NO: 23768 - DNA, 3554 bp, Oryza sativa
  ref <308>: DATABASE ACCESSION NUMBER: AK073855
  ref <309>: DATABASE ENTRY DATE: 2001-12-06
gatggacacgcggcaagccgcgtcaggcgccggcgacctcgtcggtcgccgccgcgctccacacgcccccggccggcgcggtcaccatccgcttcttctccaaacgcccacgcgcttctcacctctccagctcctgcgccgcgcgcaccccttgccctccgccggcagccgcctctggttcctaaaccctaggcgaagaccttcctccgctaaccggctctggctcctgttcgtccccggcggcgtgcggcctcgctcgctcgaggtgctcccaattcccaaagttacactggtggcgcggcgtcggtttcgctcacacggtgctcgtccaaatgcctacccggcttgctggcgcgtagcacgccctggatgatgccatcacgcactccaaatctccagtattccaccaggtgttgctcaaggcctcagagtacacctattgttgcgggagatggcaagtggttcttgtgatgattaaaggctaaggtgatcctgatgttacctttacaggtaagtggaatcatgttcagactttaactatttctatggacgatggctactgtctttcaattcagtgttggtttcagaaattcagttcatctattatcataatctgttttctgtcaccggcaacaatttagcatgcaccaaataactttacttatttttgtattcggtacaccttgtagtatcatcttccttgtaacatatggacattttctttttggtcttcattttgagttgtttaaagcctctctgcatggttctttgatctttgcatcctccttaagatgattgagataccattgccggcggtactgtggatgagaagaaacttggctatgcacttgccactggacacccctgtacagttataccttccgcaatggggcaagaagctaatggacaaccatccaaatcattaccccaccagttcaaactgattttctctagtcctaggcataaatatagcaagacagccatgaatgctaaaccagcatcaagggcacctgaaagtagataattgtgtctctcccaccagtcacgacggtacttatagaccacataacctgacaaaaatgctacaaatatccatgccgtgtagttgactgaagtggcaggaggcatctggctgattccggcgatcagcacaggcatgttgacaagtaggatccatttctgacctgggaatgccttgtgtgcaaaccagacgaggaggggagcaatggcaccccccaagaagaaccagttgacagcagaataagtgcctaaatcaccaaatattctgcgtgggccaataaggccccatatgactgatgcatcatagaataaatgatcataagggcaggtccaagggctgcctggggggaggagctcggtgttgcatatgttagggattgtatccatgagccaccatgctgttccaaggtacacaaatgctgctatcaaagtgcccaccacctgctatttttgaattgctattagggacataatcaacactgaataatgataatctgcttatcctccttttttacaagcaatacacccatttattcatgtgactagtgaagctgacctgagccataaacatggtccttggtggaatcttcatgtagtgtcccagcttaaaatcttgtaggaatgctagggcttgctgtgggccaatgtaaccatataccttgaagcacatgtttgcgacaggtcgtccaggatacaagtaccccatgatgtattccgtgatgatattcaagcctggagtctgtcacatacagtataataagctgaagtgctacacttggatgtgtgcattagcatttgcctttatgcttttacttcttacctggtttgtcgttgctgtgacgattccaattggaagggtgaagaaaattgcaagggcacatgcaagtagtaccccccaccagggtaactgcaattgttctatgtaatactcacaagtgaacatggtgattgcaacactggctataaggatggagatgaaccaccattcaggaacctgtttgtacctcttcataagctttgtatacctagagggagaaggaaggggaggataccttccatggaaaagaagaacgtggacaactgttgcagtaagacatgcaaaaccaagaccatagctgatagaaaagaaggtgctgatgtataatggtccattcttctcataggcttttgtatcaaaatgaaactgtgagtctataatggtagagatgttgtacttctgtccagtcactgtgaaaaggccatctgaaaagatagggaagttttgtgccttgtagagattaatccagtaggcgattggtgtgattacataaatgtagatgaagaagccggcagcaatgttggcagtggcaaaccatgggctagccagtgggcttccgagatatgacgagatggatgaccagtcgagtccaattgcaccaatgccaaggccatggagacctgatccaagctgttgtgcgagcacagatttgggaaagatccaacaaatccaggagagggaagtgagcatctggaataggtagcctgggaaaatgtagtaggcaaagctgcacacaaatgctaccaagaagaactgggatatctccaaatacacggaattctggttttctgcagcagcatgcacttgcatagctgagtgtccaagtcgcctaaatctcctaattgttgcgtagaattcagatgaagatgatgctgggtgggttttattattgaattgactgcacgttgatgtcacctctacctggctggtgaggacgacgaggagggagacgaagaaggagatgcgcttcccgtagaagactcggacggcggtgatgacgttaatggcgaagacggaaccggcaccggcgttggcgaagatggtgatgagcacgtgctccttgacgttgaacgggccagggttgagggtgaattcccacggccggccacggaagaagacgcgctccggcagcgcggcggccatgaggcggccgagcggcacgacggcgatctgcgccgagatggccgtgacggtgagcggctccttgcggtaccagaagaaggtgttgaggaaggacagcacgacgcaggacgccgtgcccagcacccatatccggaacgtcagcaccggcgtcgccgggtcgtcccccaccggcaccgtcagcgccacctgctccaccggcgagttctcctccggcgagccgagccgcattgaggatcgcactgcacgagaagaactcatcaggcaacagaacagtttgctttcttctagtggtgttccatggcgggaaaaagaaaacagctgagacgactaggctttgccgtgcttacacagtggagaggtgatttggctattatcttgttcctcttcctctccatctccatggccttgctcttgtacttcttggtgatgggaggacgccatggatggataatgggaggagttgggagctgtgccagtgtgccagagagccagagtgcctgcctttgtagctagtagccgtggagtagcttatgtggactcttgactttttgtgcaaaaatctgcctgcatctgc

SEQ ID NO: 23769 - DNA, 2401 bp, Oryza sativa
  ref <308>: DATABASE ACCESSION NUMBER: AK073856
  ref <309>: DATABASE ENTRY DATE: 2001-12-06
ggcacgtgcagcttttcccccctcctccagcgtcgtctcgcctccgcgcgctccccgccggcgacggccccgcccccttgcctcctctctcgcgagcacggccgccggcgagcaggtctggagcagcgacgcgcgcggccggcccccccatcgcggtcctcgaatcgaatcggagcttcttccggatttttctctgattaagagcaatctgttagttccgctcctggttcactgaggaataatttgccgtgggatgcatcagtaacaatggaagaacttcatgactgtgtggtccagttgaggagcaatcctcagcggtgcagggacaccgtttatgttggctgtggtgctggatttgggggtgaccggcccatggctgctctcaagttgctggagagagtcaaggaacttaactaccttgtgctcgagtgtttggccgagcgaactctcgtggatcgctaccaaatcatgatgtcgggaggaaaaggatatgatccccgagttaaggagtggctgtctgtgcttctacccttagccttggatagaggagtttgcataataactaacatgggcgctgtggatccacttggagctcaagaagaagttctggagctggcatctaatttgggattggaaataacagtcgctgtagcttatgaaacatcttcaggaaattctgtattttctaatgaatcaactggggtgcgacagggcggaagcacatatcttggtgtggcctcaattgtacactgcctagaaaatggcaaaccacaagttgttattacttctcgggttgctgatgctgcgctgttcttagcacctatggtatatgaattaggttggaattggaatgactttgaggagttgtcacaagggacattggctagccatcttttggaatgtggatgccaactcactggagggtatttcatgcaccctggagatgcatatcgagatttttcttttgaacagcttctggatttgtctcttccatatgccgaagtcagttacaaaggagaagtgtttgttggaaaggcagagggcagcggaggtcttctaagctacagcacatgtgcagaacagcttctgtacgaagttggagatcctgcaaactatattactcctgatctggttgtagatttccgtgatgtgaagttccagcaaatatcaaaagacaaggtccagtgcaaaggagcaaaaccatccaatccttgctggcccgagaaactcctccaattgcttcctactgagagcggatggaaaggctggggagagatatcatacggtggccaagaatgtttgaagcgagctcatgcagcagaatacctcgttaggtcatggatggatgaaacatatcctggcattgaaggaaaaattatctcatacataataggatatgatagtttgaaagccattggagataacaaagacagttctgtcaaacaagtgatggatgtcaggttccggatggatgggctatttgagctggaagaacatgctatcaaatttgttgaagagttcattgcactttatacaaatgggccggctggtggtggcggcataagcactgggcagaagaaggaaataactctgcagaaaatactggttgatcgggagaagatcttttggcaagtaaatatgaagaaatcaagtattccttctccacagaatcaggctacgaatgctgacaagggtcaaatgtgtgatcaacaacaacacaagtgcccaagaaggtgtgcaatgggcactcttcccttgaacacaaacatggacacactgccatctgctgttccttctccatctggaacaaagattcctctataccacgtagctcacagcagggccggtgataaagggaatgatttgaatttctccatcattccgcatttccctgatgacattggtcggctgagggcagtgatcactcgagattgggtcaagaatgctgtttcaccccttcttgattcctccttgtttcccgctgatcgagcaaatcaggttcggtatgatccgctcgagaatgtaagtattgagatttatgatgtcccaggaatcagctccctgaacgttgtcgtgaggaatatcctcgatggcggtgtgaattcttcgagaaggattgatcggcacgggaaaactctatcagatctcatcttgtgccagaatgttgtcttgcctccgtgatcgcagatatctatctggttctgtagcttccgaccggggcttttagaagcttgaaaatttggcatgcaaatagccagaggtgaaccgatccctttaccttcatgaagctgcattcgcttattgtatgtaccatgagaaaaataccaagaaccgtcaagtatgtgcatttccaagacataccttggttgctatattagttgatgagattttaatgagttcc

SEQ ID NO: 23770 - DNA, 1801 bp, Oryza sativa
  ref <308>: DATABASE ACCESSION NUMBER: AK073857
  ref <309>: DATABASE ENTRY DATE: 2001-12-06
gcgccgccacacctccacctctcctcttccttcccctcgccgccgccgccttctcgtcgacgcagccatgtcggcggcgcagcagcagaagcacgaggtggaccgggcgacggtggccggagccgtggccgcgctgttcaagtggatgcgcgcgcgcgcggcggaggctccaccgaacctcctcgccgacgagcgcgacgacctcctgctcctccagctctccctccgccgcatcccgccctcaccgacgaccaagccgcgcctccttccgctcccccaccccgtcatcgtccccggcgagtcggcctccatctgcgtcatctccgacgaccgccccaagtcccgctccccggccgcctccgacctgctcgacgcgtccaggtcccaccacctccccgtctccgaggtcatcccgctctccgccctccgcaccgactaccgcccgtacgagtcccgccgccgcctcgccgcctcccacgacctcttcatcgccgaccgcgccgtcctcccgctgctcccgcgcgtcctcggcaaggccttctactccaccaagaaggcccccgtcgccgtcgacttcgcccgcaccgggtggctggagcaggtccgcaaggtgatgaactcgacttttctctacctgcggacgggcacctgctctgggatcaaggttgggaggctggacatgaaggaagaggacaccgtggagaatgtgatggcggcggtggaggcggccgtggagaatgtgcccaagaagtgggcgaatgtgaggtctctccatttgaaggctgtggattcagttgcattaccaatttaccaggctgtgccggagttgggcatgaagatcgaggtccggtttgcacaattggagggagaagtcggttccggggaggttatcgatgcttcggaagctggagctgcactgaagggtgtcggcaagaagaaggcgaagaaggcattgaaacatgtggaagaagagaatgctggtgaggaagctgcacaggagagtggcaagaggaagaggggtaagaagcaactagctgaggatttgatggagcaagacatccaagatgtgagtgagaaaaggaagaaggtgaaggagggcacccctgctgccgaaacgccgaagattagcaagaagggtaaggagaagagcaagcgtgcattggacaaggagggggaggatgcaagtgtggaggaagccagtaacaagaaaaagaagggcaagaaagaggtggtgagtgatgttggggagaagaacagcaaggtgaagaaatcaaatggtgataaggagaagagaaggaccagattaagggtataggttttattctctatctcctgagagatgcttgtgatattggttgatcgacagtgtcgtgatgttcatcgtgttgattagctgggctaatctgatagtttatctgctggcagaagaactatgccactgtcaagtttttggtagccttgtagtactttataagatctccaatctaccgcagaatgttctacttttgtgtgcactagaggtgtcttcaaaagttgtatcttttgtttttgttagcttactagcctgactgcctgagccttcaggttaaagatagtatggtaaaactgtttctggcttcatgtggttcgcatcaattttgtgatcatctaagaatatgtctcagttgttgtcttccctgaattactcatctagcatatgctgtacacttggaacccagtttcaataggagctgggctgggccatttgtactctcttactttgcatgacttgtgaggcgatggaatggaattgaattgctgc

SEQ ID NO: 23771 - DNA, 2058 bp, Oryza sativa
  ref <308>: DATABASE ACCESSION NUMBER: AK073858
  ref <309>: DATABASE ENTRY DATE: 2001-12-06
gtggcctccagctactacgcgtcgtggcttctcgcgctgcattccgagagacgacgaagcggtggtggtggtggcggcggcgctgcaggcaaggcgcgaggacggtgagcggcatggcggggcgaggagaggggaacggcgctgcgacgatggcgggggtggccaccggtggcgtggaggacgcctacggcgaggaccgcgccaccgaggaccagcccatcacgccgtgggccgtctgcgtcgccagcggtcactctctgctgagggatccacggcacaacaaggggctatcattcacggagaaagagcgagacgcccactacctgcggggtttgctgcctccagtcgtgctctcccaagaacttcaggagaagaggcttctgcaaaatgtgcggcagtttcaggttcctctgcaacgttacatggctctgatggaccttcaggagaggaatgagaggcttttctacaagctcctgatcgacaacgttgaggaattgctccccgttgtgtacacgccgacggtgggcgaggcttgccagaagtacgggtcaatctttagacgaccacagggtctgtacatcagtcttaaagagaaggggagaatattggagttactgaggaactggccagagaagagcattcaggttattgttgttactgatggtgagcgcattttaggtctcggggatcttggttgccagggtatgggaatccctgtgggaaagcttgcactatacacagcccttggaggtgtccggccttctgcttgcttacctatcaccattgatgtgggaacaaacaatgaggatttactgaaggacgagttctacattggattaagacaaaaacgagccactggccaggaatatagtgatcttctggatgaattcatggctgctattaagcagaactatggacagaaggtgctagtccagtttgaagacttcgcaaattacaatgcatttacccttcttgagaagtaccgtgcaaacaatcttgtcttcaatgatgatattcagggaacggctgctgtagtgcttgcaggcctcattgctgctcagaaatttgtcagtgggactttagctgatcacacattcttattctttggcgcaggagaggctggtacaggcattgctgaactagtggctctcgagatatcaaatcagtccaaagttccagtggaagatgctcgcaaaaagatctggctacttgattcaaaggggttgattgtcagttcacgtaaagattctcttcagccctttaagaagcgatatgcccatgagcatgaaccagtcaaagatctactggatgctgttaaggttatcaaaccgactgcattgataggttcagctggtgtgggtcaaagtttcacaaaagaggtgattgaggctatgagttcaattaatgagagaccaatcatcctcgcactatccaatccaacatcacaatctgaatgtactgctgaacaggcatattcatggagtaagggccgtgcaatatttgggagtggaagtccatttgatccagttaaatacaatgacaagcttttcgtgcctgcacaggcaaacaatgcatatatattcccaggatttggcctaggcgtagtgatttcaggagcgataagggtgaaagatgaaatgatccttgctgctgctgaaggcttagctgaccaggtgaccccagagcatgttgacaaaggccttatttatccacccttttcctgcatcaggaagatatcagccaacatcgcagcccgcgttgctgcaaaagcctatgaccttggattggctagccatctccctcgcccaaaagacttggtgaagtacgctgagagctgcatgtacagccccatttaccgttcttatagatgaagtgatgctcaccttagtgtacagcttcatttggctacagcatgctgtcttgtattacagtaataatttgcggttggacctatatcgtacggcagtagcattttatccctgaactgtgcttgtacatatttgccctgtcatcatgtaataaataacccaagtctgctattgcagaatttggttcagg

SEQ ID NO: 23772 - DNA, 3094 bp, Oryza sativa
  ref <308>: DATABASE ACCESSION NUMBER: AK073859
  ref <309>: DATABASE ENTRY DATE: 2001-12-06
ggcggcggacggagggagggacggcgccgctcgggagagggagcgggagcgcgtgcgtcgccggtggccgagccgagccgagctgcgtcgcggtggtgctctccgcgggcggcgagattcagccctgacccgaggaaggtgaggggaattcttcctcgggggtgggtttggtgcattccgtggtgtgagatgcgggggatgaacaaggctttcggggtttgggatgtcgcggggatttgggggcggtgggtggttttcggctgggaatttgcggatttcgtggctgctagtggtgttcccgtggctttacgaacagatgtatatgcttgatctcgtgcggctttcccttctatccctctctccatggtttgctcgcgttggggggtttcgaaaaattttccctactgttagtcctcgattctggtcgtcggcatggtggcggtcgcctccgcctccccgctcaccgccgcggcggcgccctccatgtgctgctcgccgcccgccttcctccctctccgtgcgcaccgcaggaggattttccgcgcggaggcgatgaagacgcagcaggagaagaagcagaccgaggtggccgtcgaggagtccttccccttcagggagacggctcctcctgatgagccgctggtcaccgccgaggagagctgggtggttaagctcgaacagtctgtgaacattttcctcacggagtcagtcatcacgatacttgatggattgtaccgtgaccgcaactacgctagatttttcgtcttggagacgattgctagggtgccgtattttggtgaggatctcgtcgtacatgctcgctatagcctgcagcgtttatctctatgcttcacatgtatgaaacatttggctggtggaggagagctgattatataaaggtgcactttgctgagagctggaatgagttccatcacctcttaatcatggaagtacgtctctagctctttctgtctgcacatcagtgcatttatatatgctgtttcttcctgttttgatgtccttttagattatgttagctgttagcatatcccgttttctttaactgaatataatctttaaaggaattcaacctactgcttattgacacattatctgttttttttttaatattttggttatggtctttgatgttctgactttattcctcatcttggttcatattaggaattgggtggcaactctttatgagttgatcgttttcttgcatggtttgctgcatttttttactacttcatgactgttgcgatgtcacgagccccggcgtaagaacgtatgggatatgaatgtgtgattggcggtggacgagggggtttggtggaacgacgacccgtgatgaacagcaagggatgagcaaatagagaataggagatgagagaactagagtttgaatctgcttaattaaacgccaccgaaactgtgcctctaaataggcgtacacgaattaaccaatgtgctaaaaacaagctaacaaactgataaacagactaacaatctgaactcatccaatcgccgcactgtagtcatccggcacgcagcttccgcgcgctactccgccgttccgcccggcgacgcttgcggaaccacacgccctctgcgacgatacgtaatcccgaccatgacatgcgatgtacatggtgagcccaagaatggcatgtaagtgtgcacctatgccaattatgaagtaaaacacttcatttttatttccatgccttttatgtaatgataacgcttggaattgtttatcttatatacataccgcttttctgaatgtgttgagaggcatgcgtactcaacctatgacaagtttattaagctccatgaaggtaataaaacgttgatggatttgacatctctcctgtcgtgcaaaattttatcatgacaactagacatctcaaaatttttgttgctttatctaggttggacagactttgtaaaccaaagtggaaatgaggggaccgggaaaactaagtatttactttttttatagggataagtttatgcctaccttttgtcacagattgcccttgtgtgaataatttgatacatgcgccagtgaacttatgttatatcagctatttacttcaattattggcaatcaggattcaggcatggtgtttattttagttttataggtatcgtgtgcataaattcaaaaacatgtattattcttccatttttgattaagatgtcggctctggtatccttttatgatgtactatatttagattttttttccgtcctacatagtggttacttgaattgtgggagagttgaaacatacctgaaaaaattagcaaagctagatcccctaaggtctgaacaccaaactggtagactctttgcattactatccattcagaagttgatgcattgtacattttaaagggtgcattttaataaaccaaaatgttgaacactgcaaccaataacaccatgtctacccgacctgtccaccaactagaaatttacaggaacatcacactctgtcaattatatttacgtatttcttggcaaaataacatcctgatctgacctttgactgcagaaatgtagctgatgccatgcctgcatgccacccatgagtggcatacctaatatcaatatcaaggaatgacttcctgtagtgctcttcttccttgagagcacacgcaataagctatcaaagagtatacagcttttccaagaaaacgaaagggaacgacagagaattgccactctctaacccaagaaatatcacagttgcaagatcttggcagcacacttattgagttgtggaacctaatggacacaccaactgctgaacagaaatgctttgaccatgttacgtctttgatttcagtctcaccaaatacaaaaatgccccaaggatgccttgcacgtgaacttattgagaagtttacaattgatcgaccattttatgttcttttgctttatttggattgtcattgaagctaacttaatttttctgtaaaatccggttgaggttaagaggttgaattcttctgatcattgtcaatacaactatagcgattcattgagggtaagagctcacataacttttatgtgctttact

SEQ ID NO: 23773 - DNA, 2758 bp, Oryza sativa
  ref <308>: DATABASE ACCESSION NUMBER: AK073860
  ref <309>: DATABASE ENTRY DATE: 2001-12-06
gaatctgaatttgaccagcatgcatgctcagcgtcgttgccgtgtagatattccccatcagatcactcgctctcctcttattccttgtcccaactccaactgcagaggaagctaccagcaattctcgtctccatgcgtccccagagctatgcatttcttggccttgttcttctcctcttctccctgcttcctcttgctccatgctctgctgcaaatctaaataatgatactctcctggctggccaagcgctcgccgtcggtgacaagctcatctcgaacaacggcaagttcaccctcggcttcttccagccagacgcaggcaccagtaagtcatctgatactagcaccaattcccctggctggtaccttggcatatggttcaataagatcccagtttttactactgtatgggttgccaacagggagaggccaatcactatccctgagctcaatctaacacagctcaaattctcatcagatggcaatcttgtcatctttaaccatgccactgaatccataatctggtccactcgcgttattatcgatagtcataggacacaagaaaccagcagcacgaacacgagtgtcgttctattgaacaccggaaaccttgtgatagaaagcacaacaaatgtagtgttgtgggaaagctttgactccccaacagatgttgtgctccctggtgccaagtttggttggaacaagatcactggcctgaaccgtcaatgcatctcaaagaagagcttgatagatccaggtcttggctcatacagtgttgaactagacactaatggtaccaagggggtgatcctcatgctccgcaaccctcctaaagtgtattggtatggtctaacatcaccaactcttataccagagctcagatccctgctagcaatggatccacggacgagaggtttgatcatccctacatatgttgataacagccaagaggagtactacatgtacactttatccaacgaatcgccttcttcgttcctctcactggacatgtctggtcagatcatgctcaatgtatggtcagaagctaaccagtcttggcaaatcatatatgcccagcctgctgatccctgcaacccatttgctacatgtggaccttttaccatctgcaacggcaattcaaatccagtatgtgaatgtatggagagttttactcgaaagtcgtctcaggattgggaccttggtgatcggacaggaggatgctccagaaatactccattagattgcactattagcggtaacaggacaagttcagcagacatgttccaccctatagctcatgttaaattgccctatgactctgaaagcatacaagatgccaccactcagagcaaatgtgcacaagcctgtctcagttcctgctcatgcactgcttactcctatcagaacaacatatgctctgtctggcatggggatttgtttagtgtaaatcagaatgatggcattgaaaatcatttcgatgatgttctttacctccgccttgcagccaaagatttgcaaagtttgagcaaaaacaaaagaaaaccaattgttggagttgttacaaccataagcattattattcttgtgttactaataatgctcatggtgttggtaatggtttggaggaatagattcaagtggtgtggtgtgccattacacagaagccaaggtggtagtggaattatagccttcagatatagtgatttagaccatgctactaaaaatttctcagagaagttgggagaaggaggtttcggctccgtgtttaagggagtgttgagggacttgactgttgtagcagtgaaaaggcttgatggtgcccgtcaaggcgagaagcagttcagggctgaggtgagctcaatcggattgatccaacatatcaacctagtcaagttgattggtttctgctgccaaggtgacaagaggctacttgtttatgaacacatgttaaacggttctcttgatacccatctgtttcagagcaatgctactatactgacgtggagcacgaggtatcaaatagccataggagttgctagaggactttcctacttgcatcagagttgccacgaatgcatcatacactgtgatattaagccacaaaacatacttctcgacgaatcatttactcctaaaattgcagattttgggatggcagtatttgtaggaggggattttagcagagttctgactacatttagaggaacagttggatatcttgccccggagtggattagtggtgtcgcaattacaccaaaagttgatgtttacagctatggtatggtgttgctagaggtcatatcaggaatgagaagtttacctaatgtacacagtagcaacagtcatcatgctgcttacttccctgtgcaagccatcagcaagcttcatgagggagatgtgcagagtttggtggatccacgtttgagtggcgacttcaatttagaagaggctgaaagggtttgcaaagttgcttgttggtgcattcaagataatgagttcgatcggccgacaatgggtgaagtggtcctggttcttgaaggtctacaggagtttgatatgccccctatgccaagactacttgcagctataacgagatcttctaatgtagctgagatgtaaaaacaattcaaaatcctctaattgctaaaatgtactgtataatgctactcttgtatttacatttttttttctttaatgacagacttttgtaagcaacggttgtcgatgcacagtgagaaatgtgttttttgttgacggt

SEQ ID NO: 23774 - DNA, 2395 bp, Oryza sativa
  ref <308>: DATABASE ACCESSION NUMBER: AK073861
  ref <309>: DATABASE ENTRY DATE: 2001-12-06
gaacctccaataccactctcaccggcggtggccttccggcctccccgccgccgtgtccgcgtcgggcgtcggctacctcaccggcgaccggtgaccggcggccgtgtgcccggaggagggggaatgtggaggctatcttgcctcttccgggagtatcatgtatcaccagatgcattctgcagatcgaaggttggggcctagcttgcagttgcagatggtctgaaggctacaaatatttgttgcccacgaactgtttgatagaatgccgaggaggaaaccgaccctttgcttctgccttggatttatatagccagatggggaagtaaaattacagttttggcgtgatgcgtctttcttctctcatctttcaactgccgcggcttagctaccagctagcccgaggatcagggctcatcaagacttcaagaggccatcatgggctccccagctttgagaggttttccagaccatacatatagtccaccattctgaacctcagctcaagcctctgaagctccggcatagctccttctagaaagctcagagaaggtagcacaggtgccgcaaaatgcagtagcttcagcttttcaaatccctcatccagcacaaagatcttacctcctgacttcattgtattcctatgtattattttgagagcatttgaatcattgtctgctgcatggagtgaaaaagtgagagagaataactcaggcaggctactcagaaccaccaaagtatctgtcttaagtgaagtcaatgacagagtaagcttctcaaggttgtgcaggcggtcaatccatccaggcgctttagataactgccagaaagctcgagggtgtacaggtgttctggtgctgcttgcgaagaactcagtgagctttcaaggaaacctgtgaaactgtcatcaattgcaagaaacttgagggaacaactgctcaaatgctcaatagcagagagcagtaactcatcgtctttcgcttggaactttacaagcttgtaaatggcaagtttcttaaggttggtgagcttctccaaggcttcaagaggacgcagctgttttggaaggtccactttgctagcttctttatgtggaccatgcaaggcagtgttgcctctctcctcggctctggtggttgtagagtgtctgatgggcatatctcgtggctgctcccggtcttcttctaaagttgagcttccactgatctcaatcccggaaagtgtttgtagagctacgacctttgtaatttcctcagttaatttcaatgctgtccgcttgcttttgttgccagcaagtagatgggtcattcgctgaagctttgcaaatgatgtaggcaactttctgacatttgtctccctaatgtccagtacctccaagtactccagcctccctatattcttcgggatcttgtcaatatctgtccgccgcaagcccaggtacttcaactgatacatgttgcatattttcttgagctgatgtgggtgggacaagtccttgcagccatcaaggtccaatacctgcagtatctggaacttgagcatagtagaatgaagagcactgaaactctccaatactgtcaaggatcggacatgggacaatttcatcctctctaccatgtctgtttcttgcttatcacttttatggacagacaatcgccgtaccttgtagcttggaagtggtgtctgccagtggccgccaataacggcgatgaaattctcatcactagacttggagacaatgtactggaggaccatgtcatgaatttggcagctcttcaccctgccgttgctgctgtatttgataggctttatcaagttcctgccaatgagttcattgaggctgtcttctgcaacttcctcagcagtcttcccatgctcttcagtaatgaatccttcagcaatccatcttcttatcaaatgcttcctgctaatactgcggcccttgggaaatgtgctcaagtacagcaagcatgtcttaagatcaggtggcagatttttgtaacagtggttaattatttgcgttactccttcggtggtgagattgcttcccaactctgcacttaaagcctcatctacatcaaccaaatgctgatccaatgtcaggtcaatctttgatttcattttactagcaatcagccctgctactactacaattgccaaaggcagacccccacacgttttcatgataatgcgagcattaataggtctaatgggacacagatcattagcagatattatctgaagaaacaaattgtaggagctctctggatcgagctgtttgagcttgtgcacatgaccttgttgacggcggaggcttcagctacagagttaaaccttgtagtcaccactacacaactacccttatcactcttggggaatgaatccctaatgttttccc

SEQ ID NO: 23775 - DNA, 2236 bp, Oryza sativa
  ref <308>: DATABASE ACCESSION NUMBER: AK073862
  ref <309>: DATABASE ENTRY DATE: 2001-12-06
gacacttggcagaggcagccggctttccctttccccttccctctcgtcgtcttcttcgtctccctacctcctcttacctcaacctccaataatccccatcttcaaacccccctcaaaatccatatttggtgttgctccactgattgattccactcaagattgtcgtcaatcggtctctgcatatggcagttggttcctcctgcccaccaccaccagccctagtttaggcctcccccatcaaatctactgccatccccgactagtatacctcaactcttcaatttctcttgattcaaattcaaatgagggggatgcttcctctgctctgctgcagtagcgcttaattgacaaggcgggggtcccgttgtttcgcgctgcgatctctcatcacttcttctccgcaatctctagctggtctactttgtccaatagcgaactgctgaccaaattcagtgtgccctgttcagttcatcaggatatccatgtctgaccatcgaacacacgcgagcgactgtcatccagttgccagccaaccagatgttcagtgcctagtttgcacaaggccgtttactttggatgctcaggtgaccgatacctttgaagctttagccatatgcagggactgcaagatgacagtactcaatgatgatgaaagagatgaaataaccagcacttatcggcagaacacacggaggaggcagatatccaggactgcaagcattgatttcctggaggacgcattcttgcaggagttttctcagctgatcgacttagcaagaagacaaggtcgtgaaacggatattgattcttcgtcggtcgcgccgcaacatgcatcgtttaattcaacaccaagccaatctcaaagatggcatgcttcagatgatgagagcgatggccttaattatgttgattctgtgtttggtgaaattgaatctgccatcagtcttggtgactatggtggagattcagatacctccatagaggaacatagcgtgatgacaaggaggaggatttccattcaacttgacaatgacagctacatgaacacagatactgatattgatcccatgaatgctagactggatcagtgggattcagatgaccaggaagatgtggaagagtctggttttgatgaaatagtcaacaccatgacccagcaccagcagcaatcacatgatattcagctaagtggattgagtgaggacgaatctgaagatggtgtatggaattggagtgtgagtgtacgtcaaagagcaaatgtgaccaacttgctagatgacatggaagagccagaaatgaggacaacttttgtcgggaatccagatgactatgttgatgcaaggcagtttgagatgctccttgagcaatttgctgaggacaacgattccagaagaggagctccaccagcagcgacatcctttattgaaaatctcccctccgtgattatctctgcaagccatcagacaaatggtgatgttatttgtccagtctgcaaagacccaattcctaccagagctagagcaaaacagctaccatgcatgcatctttatcattcatcgtgcatcttgccatggcttagttctagaaatacatgtcctgtctgccgatatgagcttcctacagatgatgcagagtatgaaaggtccaagcaagccacaaccaatgtaagagacattcaggttgtggaagaaatttctgatgaacaagaggtccaggtaactcgtcagatggctgctggtgtgatcgaagagactaatacaagtgaacacaatgttcgtgttgatgagcaaccaaacagtgcacgcaggcgcagtggatggctttttattgctgctgctccagttgtaagcctcatcggtttcgctctagttttatgctttacaaatcccgctaggagtggtagaaggcaactgtactgtagatccccaagtgccactgaagtacatgtggacaccaaaaagagttggtggtctatgttctagaatgttccgttggtacatctgataacaaaatgactatatggtggtgtgtgattgtttctttagaatagttttattttaaaattttcaaacgttgtagttgctgcagttaccggtcggagtgttgtaaaagaattcacatgccaccggttgtaaaagaattcacatgcctactttcttctgctactttgctcagtcaagcaaagtgtgtattgatacttgctatttgtttaacatatatgtgtcattggatgtcc

SEQ ID NO: 23776 - DNA, 1023 bp, Oryza sativa
  ref <308>: DATABASE ACCESSION NUMBER: AK073863
  ref <309>: DATABASE ENTRY DATE: 2001-12-06
ggaagaaaacaacgccgtccgccgcccatcgctctccaccgcgtcgccattgtccccttcgtcagccgccccatcgccatccatccccccggtcccctcaaccctaaccgcgctacctcaaccggtcgtcgccgccgcctcaccctgtgccctcgccagatcgatgccgcgatgccctgcctcctcgccttggagcacctcgcgctggatcccgcaggtcgcgctcctatccacggccaccgcggaacgatctgcgactgacgattgcgatttggaaaatttatggaatgctaatgaccacggcaatcagcaaggaggcaattgcccagttcttctttgtggattccttcctttaatctgaacaaaaaggactcagagctgctatgctgagttcatcagaggtatatgtgtggcaaattccactctctatatttgtctaatcattttctaggtaagctgtaagtaatctgctacgatgaagtcatgctcacaatgaacaatcattactgtgtactcaggctcactaaaatttgatggcttttgcatctgcaatattttaatccttatgctcatgcaacttaacctttcatatcagtgcagtacaatccaacttttgattattgatacgtataatcttgagttttcaactgatcaatacaagaaccttaattgtaagtctcatcttttgcacttgactctgtgtatacattatatattgactaggaacatggaaagtttcaaattgctgtcagatatatgtttcctaagtttgatgatttgattaatcttgcagctaataatcaccattgatctcagctaaacacctcttacataattgtttagcggctatttatctagaatgtaaaaagcaaaaaaaaaaaggccttgtttaatggcactaactgcacattggtaatgtatcatactattaggtaaatatgtactgatgtactttacactcctattatgcaaatgctaagttacaatatgtactttacactctattatgcatgttataaaacc

SEQ ID NO: 23777 - DNA, 1560 bp, Oryza sativa
  ref <308>: DATABASE ACCESSION NUMBER: AK073864
  ref <309>: DATABASE ENTRY DATE: 2001-12-06
gtgggcgcatcataagaggggcagcaggctgcacgcccggccataccgtagagcacttctcttcttgttaccttagctgggtaggcagaccggctttctcgtaacataacgtagcgtgctaggctagctacccgagtcgatcaccggcgacatgatgcggcgtccggcgccggtgctcgtgctggcgatccttgccgtcgcggcgtcgacggcggcggccgcggcgatcgagggagaggtcaagtgcggtgggtgctcgccgtgcggcggcgctgactgcccggtgctgtacccgtcgccgcccccgccggcgctccccccaccaccgccgtactactactacagccctccgcctccggcgtattaccccgggtcatactgcccgccgccgccagcggcgtacgtccagttcgggccacccacgtcgcgctccagcagcagctcatcgcggcccagcacgagctccgggtggtgtccatcgccgccacgagggcgcgtgccgagcgcgaggatgaggtccgcgcccttgcggagaggccgcgcgcatagaggccgaggctcgggccgccgtcgccgcgcgcgcggaggtcgaccaggtccacgcggacgttcaggtgctcgccggcgcgcgcactgaactcgtggaccggttgcaggacctccgcggcagctcgcgcgcttccaggccgaggcgggtaagactgagtccgtccgtgcccaggttgaaaccatgcgccgggagatccagaagggcagggctgcggttgaatttgaaaagaaggcacatgctgataaccttgaacaaagtaaagcaatggagaaaaatatgattgctgtagccagtgagattgagaagctaagaggagatcttgcaaatgctgaaaagcgggccactgctgtcaccgcaacagcacctgtagctaatcctgggttccctacaacatatggcaattctgaggcaacatatccagcacctgcagcatatggtaactctgagacaacatatgcaccaacgtatggtaatactgaggcagcatatgcatcaacatatggaagttctgaggcagcatatgcagcagcatatggaaattctgatgcttatagcactaatcaggctcatacccgcaccgatggcaatcctcattacatggctccacctgttcattatgcgcagtatgacagccagcacaccaatgtgcaaagatgaatgatgagtcagggtagctttgaccttgggtgtaatcctggcatttgtcaatgtagttgctgggttcaccaaatttaaggttatctgcaggaattcattccatggaagtgatggatacactgtttttcccctatcttttcattaaccagttccggaatgctcgagccagttgcctgaagtcaaaatctttctgcaaattgtcgatgtatcaccctgatgaaccatggattagtgagaccgcagctcagtctttttagtcagggattgtgattattcgcaaatgtagtgctgcagcattttcctttgtaaatatatagtggataatggtccaatggtaacaagccgttctcatg

SEQ ID NO: 23778 - DNA, 2161 bp, Oryza sativa
  ref <308>: DATABASE ACCESSION NUMBER: AK073865
  ref <309>: DATABASE ENTRY DATE: 2001-12-06
gagtctcttctcttcttccacctcgaagcgcggccgaggagaaagccaccgaacagtgctgcgcagtgcggcgcagcgccgccgcggcgagggccatggagttccggttccgcgccggcgatcgcaggcatcgacctccctccgccgcgtccgggcccttctccgacacccgccgcggctacttcgtcggggcggcgcaagccatgcgaggtaattaagcaggggctggatagagctgtgatgtcgagctctcactcgtccctgacaggttctgccaccccccgcgcaggcgcagtggggcacttccgcggcgggctccggccgccgccgccgccgccgacgccgttcgggtgggaggaggccgcgcggctggagcggatcatcagcgaggaggtggggcggcggctcatcgagaaggaggtggagcggcggctcatcgaggaggacgtgcgccgcgaggtcgccttcgcccacggcctccacgtgctcccgcacgatcccttcccgcgaccgccgccgccgccgccggagatgccggtgggcatgcacccgcacccgcacgagccgccgccacgcttccaggagttgggggcatgggagggatttcgacctcgccggcagcacgccggagtcgctgctccgcttaggttcgggcagaggatgctccttggtggcgcggagaggaggtggtcgccgccgccgccgccgcggccgaagccgaagcacaagctcgtgctgcgggagatcgaacctggggaaagctccgaggttccttcagaaacaaaacattcagaagcaaaacctttggaaacaaaacctttacaaacaaaggtttcaggagtgaagaggaaagtagatgcaattcctgcaaccactcgaccagggaaattacagaaaccagcccaggactggagctgtgcactatgtcaagtgagtgcaactagtgagggagctctaaatgaacatcttgaagggaaaaggcataaggcaaagctggctcattgtggagccagcaatgcgattaaggatggcaaaagcagcctgaaagaaaaaactgcaaataaggatgatgcaggccctagtgatgcacctaagaaaatatgcatccaggtagatggagcaatgcatgaagttgttcaaaaaagcaattacctgtggtgcgatcgctgcaaagtcaggtgtgacaacaacgtgaccatggctgaccatctgcggggcaagaagcacagtggtttaaacaaggtttggacatcaataaatgctgtcagaatgaacaagaaaaaggaacagtcggctgctacatgggaagaaacggtgaatgaaaatgaacgtactgaaataccagtggaagctaaggatgacagcgcaggcttgtccaccgaagaagacgaaacatgccattatgaaattccagtgaaaaatagtaagaatgaaggcacatacttggccactgaagtagatcaaagtgactctgaaattgaaactccggtagaaattatgagagaaggcttgaacatggccaccgatgccaccgatgaaaatgtccgtatggaagatccactggaaatcaagaaggaaaaccccgatgagacaaatcttgcgccaaaggaggagcaacactaacaccatagattggtgttttgcttgacttcttcattaattaagacaagcttatgccaaacatatgcccgttctctcttcaacatatggagctcacagggtaacaacactacttagggataaatttttcttgtaaagttgtttggctactggtaatcaagttaggaaccatgcaagttgtttatgagttgtgccctctgtgcctagcgccatagatgacttgcaagatttctaacttgagtgccagtgtccaagtaattttgcatggaacatttctccctaatttgtgtagcttgttattctgtaaggtgcatatgttaccagaatggataatttgcatgatctcagagagaaactgatgtgggcatgcgaagtattttcagcgagttcaatatcttagccgcctctatgctactgctagttgcattagttttgattgatgcttggcagtgaccaagctgagctgagtcctgtctatatagaggtgacgagttgcttagctccctgtaactgtacttcagttattagtttcttcgtaacc

SEQ ID NO: 23779 - DNA, 2264 bp, Oryza sativa
  ref <308>: DATABASE ACCESSION NUMBER: AK073866
  ref <309>: DATABASE ENTRY DATE: 2001-12-06
gtgtgtctgcctctctctctcgcgcgcgcagcctaccgccacaagcaaagtccaggagggctcgggcacggaagcttctggaagcttccgcgttggcgtgaggaaggaggcggaggggaggggagggggactgacctactccctcaccgcggtcgttccaagtcccgcgccgccggggattcccatcccctctcgcggcgcgccgcttcgacgggaggcatcgtcgtatcgcatcgatctggtttggggggttttgggagtctgaagtggtgggtttgagatggaggacttgctggacacggagatcgggaagcatgactacgactggcttctgactcccccaggatcacctcatgctcctatactggaggttgtggagaaagctccatcctcagatgtccctaaacgcattactactagatcatcctcaaccactagagcatcaaggctttccattcctgaaacagagaatgggcattccacagtaccaactaggccagcacggagtaactctgtctctcgcccttcaatccaatctactcttatttccagcaacaacaggtcatcagttgtcaatgcaagcatttcctctgtctgttcgccacctacaactccaagcaagaggactagcactctttcttcatcaaagccatcagttccagcttcacgtcaagtaccaacacggccctctactccaactaaaacccgtccatgtactccagtgaaacctcggccatctactccagtcaaacctcggccatctactccaaataaaactcgaccttctactccagtcaaaactagatcttctgtaccgaacactatgtccacctcaactattgccaaaacaacatctgcacaaaactcgagaccatcaactccaacctctcggcctcgtatcatgtccaattcatcttcaagtacaagttctgcagcaagtcgtcctagttcatcctctggaagaactagtacaattagtcgcacctcctcttccacaagtacagttccttcagtcagccgctctagctctcgttcatctacacctacgcgtcagcctatcacacgttcatcagccccactggctggctactcaccttctgttgggaggatatttggcagcaataacataacatccatcgggcggcctgtaaccagtaatggtcgaagttcagcaccttcttctgcaccatcatctcgtccaagttccccaaattcacgtgcacgagctccagtcaggccgttagatattcctgattttccaagtgaaactccaccaaacctaaggactaagctaccacaacgaccactatctgctggtagagcacgcccaggagtgggtttgggacccaagtcagccccaaatgctgaacaagttcgctcagctcctgtaaaaaagatgactgtgcctgctattacgcgaagtaaatttcctgatgcaccatctagggtatcttctcttacaaatggacaccaaagcagacagtccgaggggtctgctgtggaaggccaacatactaaaccattacggtctatcacgggcacagataatggctttggtaggacaatatcaaggaagtcacttgacatggcaatcaagcatatggacattcgacaaaacctgggtggtattcgtggtgcatctctattcccgcctagcattcgctctgccggtgcgaaggtccggtcagctcgaatgtctgatcccgctcatctcagtttaaatggcgattgtcattttactgacaatggcagcatcaatggacacttctctggagattcgaacggaactctttcaaacaacggtggcagctcaactggttctccagacagggaaagcattggaactaaggagacactgtgtgaactagatctgtataccactgcacggtatgaggcattgttgttgagggaggacataacgaacacgaactggttgcacaacgttgatgacaaatctgaccagagcccagtgtttgatcaccggtttgagccgctcccagagccatttggtccactatgatggttattagctgtaaaatctcgttcctcgttatgtttacaattagtagttgcaagttgtatgcggttatatctttctgtgtggttgtccatttcccccatcttttcatgaatcttctgaaagataagattgtggggtttatgttttgaagtagtactccataaatacctggagattcgattttgagttatcgctgtactgaaatccaagtgtcagagcacgatatagtttctctttttatccc

SEQ ID NO: 23780 - DNA, 1481 bp, Oryza sativa
  ref <308>: DATABASE ACCESSION NUMBER: AK073867
  ref <309>: DATABASE ENTRY DATE: 2001-12-06
tgtgcagtgagcttactgaagtctgcaacacgaggcagagccacgcacgcaacgaaacccgaagccgttgcttcgcggctctcgcaaccctcactctcctcgccttcccttccacggacatggccgccgctcccctctcccctcctcctcccctccacgcgcgcctcctcctcctcccgcctctcctcccgacgatggccgggggctcccgcggacggcggcgggggcgggggcgccgccggttcgcggtcccgccgtcgcggaacgggagctcgtcgcaggggacggagtggtgccccgtgccgccggagcagctgccggtgaacgagtacgagtcgctggcggcgtcgctgcccttctcgtgggcggcgggggacctcacggtctactgctcccgcctcgcgctcaccggcgccgccttcgcgctcttcgtcggcctccccgtcgcgtcgttcggcggccgcggaggggccggcggcgacgccgtgcacctcgcgctcggggccaccgggtccgggatactggccgtcacgctcgccgtggtgcggatgtacctcgggtgggcgtacgtcggcaaccgcctcctcagcgccaccgtggagtatgaggaaacgggatggtacgacgggcaggtgagatactacgcttgatcctgtcattgactcatttctgtgattctagtgcagtactaacatggagtttatgcttacactggtatttttgggatcaagtagagaaagatttgacaggatatatatgccttgaccttgatctgatacttggcattgatttggtacttgctggacaatttggcatgctatttttcgtggaacatttggtttgccacaggacaagatcgctcatgttcctttacaacttacaactacaataactgggatatctttgacagcacgcttatttagctctggcttaacaagattttgtggctttagactttactgctttagctaaacaatagtggaataaaaaccaactttcctttgctttcttaaaagcagggcttcagtgccttttgtctcaaaaaaggggaaaatcaacagggatcactgaatcagaaatatatgcagtgccaccaaaagaacactcccaaaagtcactgccttgcttatcattgtactcaatagtcaatactgttgatgctcaagtcataccaattcttattagatatcacaccaataaccaactgctgaagtattagatttgcagctatatgcaatttcatagaattctcagattgttagcttgttatcaaggtgattatgaaattcagagataaaaatgacatgcattttttaatcctaattttccccttgtcaccaagataaatggggttttagatcacaacaacctttcataataacatacccacagatatattaaattataaactgcagtagatctcctatattcctgtaaactcttaaaatacctttcttgttcactgagcagcaacgcgtccc

SEQ ID NO: 23781 - DNA, 1327 bp, Oryza sativa
  ref <308>: DATABASE ACCESSION NUMBER: AK073868
  ref <309>: DATABASE ENTRY DATE: 2001-12-06
ggtactgacctctgaatataatagtgctacgccgcagccgacggcggtcttttccggccgctcccggcgcccgccggccatgtcaacaacaagctcgtcaaaaaccgccacgtgccctctctgccacgccgacgtgctgctgccacggcggcggtcagccggctcctcgacgcacagaagccacgacctcgacgacggccccgctccgccgtcgccggagtccagctgccgcagcaacgccgcggtgtgcgggtgcgcccgctgccggcgccctgatctgatcagtcccggaaccggcatgcggatgaggaacagattcggcgatggccccaacaggatatcagcccagagtggagcatggctgtgccgagagcgcacggcggagacttgccggagcacaagtagccggtccggccgctaccggcgcctgcagcctgcagcggtcgccggaacacgacgcgccgaactcataaagcggctgcaagagctctgccacccagcaaataaccttccaaattgttctgcttcttggcaaccacagcgacagcggcagaaaacaattgatcgaattccagatagcctagattgtggggtgacaatggaaaggggcaagaacaagcgtgatggaagtgacaatgggctcatcttctctaacctaatgcacggtgttgctgccggcatctatgggtatcctcctcaccagggatacactcaggctcagagctacctactgctgccggaagcatatccacctcctccgtggacataccctctttctagtgcttaccctcctcaacctgttggttacccttcaggtggctaccctcctgcagtctactctgactcgtatctgcaccaaggtagcagagttgcgcgggagcaatgccctctatcatattccaataatgctgtcacttgcagggaggatgggcaaatgaactgtgaaaatggaacagtaaatatggagaaaagtgcaatgtcctcaaataagatggctactagtctactaaagagttgcggcaatgtgatgccatgcagaaatatggagagaagtggcccagccatgtataaggtggacatgcgcggcagtacgaagcaattctctatgggcagcaagatgatgttgtgtctgattgtgtttggatgtctgatagctgccttggatatgtttagaaatgttgcacaaaaacagatgttttctgtcgttagtttactttcttttgtagtcgcgacctatgtctgctaggagtctctacatgtaccgtaaaattgctctttgtgtaatgtgtacttcttcatcctgtaaaaatagaatcccaatcaaact

SEQ ID NO: 23782 - DNA, 2122 bp, Oryza sativa
  ref <308>: DATABASE ACCESSION NUMBER: AK073869
  ref <309>: DATABASE ENTRY DATE: 2001-12-06
gactgcttctctcgccggagagatgggcgccccctcattcgtctgcttcaagtgaccatggggccccgaaccctcaagtccacctgcaccgtgccctgcatcgccggggacctcccctccccctcatctgacggaggaggcggaggtggagcagcgggcgctggcgagagggagggacgcggcctgtgtgggtcgctgcaggggctcgtgcgcgatctcgaggacggcgccggcgtgcgggcgggcgggccggattcgtgctccccgacgccaacgacgacgacgaccggtggctccccaaggaaggttgttgatgccagagagagaggtgaaagatgaccagacgatcttcttgagcctaggagctgatccagtgatgaagttaatcttggtgatggtagagcaatcaacactaagaagtttgagccatatgaactcttctttttcgaaggtaatctggttctggcttatgtcaaaagagttttccaagagcactaggcagcatatatttagttccctggcgatgattcgtagatcaccttgcttcagcaatgtaccacgaagagtcagcttggctattcgttcaacattgtaaaaacatgatgatagcaaccttccgcagctgctgctgttcaactcaagctcttcgaattttggaagcccatgaactccagaaatagactctatgcaagtggaagataaaaccatcttctcgagctcacaggctgcctcatcctcaaaagtaatattagtcaagtttgagccctcaataagaaggtacttgaggcatttgaaatcatctttcttgaagttgagcacactctcggtgcatgaaatgtgtcggagcctaacacactgtaacatgggcagctgggcaaagaacttcagatcatcttggttcagtggggtgttgcttagagttaccttggcaagtttcttattaccaccttcggtcagcaatggaaaaagatgcttggctccactgatgcttagactctcaagaaactcaggatggtgttttaggcgagatgcaatatcttgtaactctgggcttgaaggagtaacctcgagtgtggttgtgggaatagtgattgacagagaacggaggcttgcatgtaggtcactgatcgctttaagcaaactcccaaggtgacttttcttaccatcaataaccacacctagcttcctcaactggcatagcttcccaatatcttccaaattatcatggtgctgggccttgacattagatagtacctctatgtttatcatcttgtctatcctggaaggaatccggacgttagtgacaaaatttcttggagttggatcagtctgactagcaccagcaagtagacgcttcagcttcaagagcaggacatttactgttgcatttgcaggcaccttggtttctcggatatccaatacctctagctcgcggaggcagttgatttcactgggcagctgggtaatatctgttccctttaggctcagatatttgagcagtaacatcttgttgcagatgtccttgaggtaccgctgattcttactagcaaagcactgacaaccttctagatctagcaccttgagtagggatactcgagatgatcgtgagaggccttggaagaacgtgccaattctatcagagctgcggagtcgaagatcattgaaaatggagaagtggcgagccaagtgatgtgataggcgtgtctccacaatatgttgttttctggcaattgcggtaatgaacccatgaactggatcgcctaccacacagctcttgatctttcctgtggcactaatatcatcaggataaacaagccaccgacggatgagggcatcaaaacatcgatttgcctgatacacagagctgggccaatcttccttgaatgtcaacccttctgcaacccaccttgcaatcaaggttgaccgcctaatcttctgtcccttggggaagatagctaggtacagcaagcatgacttgtattctttaggtagatcattgtaagagtacatgaacatcttcttagctatggtgtcgaatgatttttttggagactgcagggtgctgtgtagcttccttaactcttcattgctcctcttgggattagcatacacagcatgagtg

SEQ ID NO: 23783 - DNA, 826 bp, Oryza sativa
  ref <308>: DATABASE ACCESSION NUMBER: AK073870
  ref <309>: DATABASE ENTRY DATE: 2001-12-06
gtggaaaaaaacagcccgaaaacagaagcaatcgcgacagagaagaagagggccattcccttcgtcctcctcgtcgcctccgctttcccaatccaccatctccccccacctaaatccatcgaatcatccgccaccgaattccgccgccgacgcggtcgatccctccccggccggcgcatggggatcgggcccaatcgccgcctctcccgcccctcatttggggttcccgggatttgacggctttttgcttgcttgagcgcttgcttgctgattcgatcgggtgggaagatttccgtgcctgcctccggtggtggttcgatcgggcttgggggggattgatgggtttgctgttcgtggagtcgctcccggggccgaaggtgttcaagtgcaagttctgcggggtggactcggcgtcgccggacgccatcgtgtccaaggagttccgcggccgccatggccgggcctatctcttcgacagcgtggtgaacgtgagccttggtcccagggaggatcgccttctcatgactggattgcacacagtgaatgatatctattgtagctgctgccaacgactccttggttggagatacgagaaagcttatagtgaggaccagaagtacaaagaaggcaagtatatattagagaagcacatgatgctgaaagaaggatagtgattggaaaaccgctgaactattaagtctgcaaatgcaggcatatgaaaccatgtaaaatatcgctgaatattgggtttcaattctccccaaaattgattatctggcgaggaccatcgtcattaaattgcatttatgaaatataatgtcatgcg

SEQ ID NO: 23784 - DNA, 2028 bp, Oryza sativa
  ref <308>: DATABASE ACCESSION NUMBER: AK073871
  ref <309>: DATABASE ENTRY DATE: 2001-12-06
ggtcttctcctcctcctccgcttcgcctcctcgcgcagatcccgacgcacacctcgcgcccgcgccgcctataaattcccccgcctcgccgttgccgccgccgcgggaagcgaggcgaagcgagggagcgcgtctagatccgcaccggcgaaacgacccaagctgcctttcccgtcgccgcacgcatcatccgggctctgttgctgctgctataccgcgcccgttcgctgtagcagcaggaggaggaggaggaggagcggagtggtggcgatggcggcgaggaagaatgccggtgtcctcgcgctcttcgacgtcgacggcaccctcaccgcgccccgcaaggtggtgacgccggagatgctccagttcatgaagcagctgcgcgagcatgtcactgtgggcgtggttgggggatctgatctggtgaagatttccgaacaactcggcaaatcagttactactgattacgattactgcttctctgaaaatggcctggtcgcgcacaagaacggcgaactcattggaactcaagtaagtccttaggcaaatatatgcattatatagtgtctgaaatttcacttggagatcatcaaattcctggctggggcctgggaataatggtagaggttcttcttttcatttggccaatttctaaatgacatagtgttgccatacccgccccccccccccccccaaaaaaaaaaagtcattggctgctactggtcttagaacgacgcctttctatattatggaacattatggaacataatgttttgtgctctgcagagtttgaaatcgtttcttggagatgatcagctaaaggaatttattaacttcacgcttcattacattgctgacttggacatcccaatcaaaaggggtacattcatagagttccgaagtggaatgctgaatgtgtcgcccatagggagaaattgtagtcaagaagaacgtgatgagtttgaaaagtatgataaggtacataacattcggcctaaaatggtctcagtgcttcgtgaaaagttcgcccacttgaacttgacattttctattggagggcagattagttttgatgtgttcccacaaggctgggacaaaacttactgcttgagatatcttgaggaatttcaagaaatccatttctttggggacaaaacctacaagggaggcaatgattatgagatatttgagtctgaccggacaattggacatacaggtgtgctgtttgtttcataaaagctattattctcatgacattactgtatatgcgttggacttgaacttcttgttataacttaaaacttgtgtataagataggattaggtttattggacacaaaaattttataatgttactgtgagacattctataaccatcagcacacagtcgtagatcagactgtgaaacttgggtattgacccaaccagacaggctattccaatcaagcaatactgcacagatcatgcaaatgaatgttcagtagcagtatacttgctggcagtttccatcattagaattgaccaattcaggttaatgttcatgaataaaattcagtttgaaacaaccacaaacacttgggtcaagtcttgaataaacaaagcaataacattttcttctggaaatacttcacaagttccattatggttgagctgtatcctcttactaaataggaatactcttgcaagcttctcatatgtggctgagtcttgtttgccgaggttaaacttgctttaaatcttttctgagctaatacatgattgatgccatcaccaagctgatttcatcatttatatttgcagttaccagtcctgatgatacagcagagcagtgcagatctctcttcatgtcgaagtgacctgattaccgtgcattttatttattttacatagcattcctcacatttcctgtatttcccttttttttataccatacaagtgctgcttcttacagaatgtacttctccgtattcacaagtttcagattatatgtgtacactttggttcaaataaatgagagctggcattgttt

SEQ ID NO: 23785 - DNA, 3384 bp, Oryza sativa
  ref <308>: DATABASE ACCESSION NUMBER: AK073872
  ref <309>: DATABASE ENTRY DATE: 2001-12-06
gggttgtggggaaagagaggcaaagggagaagctttcgctttcccggctgctgctttcctccctcttcatgggctgtaactcttataccactactacctgcacatgagcacaggctcattggcaagaagcttgcagctcattgcagagcatcgcagtgcggcgtctcttctcttcttaccccagcgagaccccatttccacggtgggagaagcaacagtttcgccgctgatcggcggcggccggccggtggttgccggggagctgcatgctaactgcagagaggaggcacgagaggatccttgatagtaaggtctgtctcgttcgtccttcagatatcctaatattgccatcgcagcgtactgctggatctctctggcaacaagtgccaccatgctgcagtacctggacttctctcatgctagcacctcaaggaagtggtcacacaagaagcagggcgaaggatttgaagccccaaggaatagcatggagttcaccctggaggctccacaaagctatggcgtcttccaagaggatgtcccgtactcctgcaacatgaggcaacaatacccaaaagctggtctcaaccacagctcatccccaatcaagaggatcatccatgaggacgtatccttcagaacaaatgaagttcagaagagaccaagtgtcattgccaggttgatgggcatggactcacctccaatgagtacaaccgccggtgagcttgccgccggccacacggaggagaaaaggcaagacatgataacctccacaaggccaatgccaagaagagatccttctgaaatggtctcaaccaagcatgcctccttcgtgcaacacaagggctccatgaagcattcgccgaagcaagctgaggtctgtgcctacgacgacagcatggagctctttggtcagctgagcaaggcgatcagcagcagtgaatgggctaaaccgcagccgcgagagcacccgcaggaggaggagctgcagaagttcaagaaggatttcgaggcgtggcaggcgagcaggatgtgggagcagtcgagagctctggaattggagagccatctcgacgacgatgacgtcaggtgcactgacatcgtgccttacaggttccagcacagagggaaggataatgccggcaagaagcacacgcactccaatggcgacgcacactggaggaggagcaaggagagcggcaccggcaccggcacgtcgatctccggcagccggacgttctccctgacgagcgcggacgccagctcgacgcggctgccgctgtcgagattctactacgaggaggagaggctgctgtcgccgaagaagatagtgatcctgaagccctgtcccgagatgagcaccgacgacatcgaggagtcgtcgttggggtcgccggagatggtgaagaaggagaacaacatggaggccttcctcgaggaggtgaagaagcggctcaaggtcgagctcgaagggaggatggcttccgacgacagggcggcggacaggtgggccgccggcggcgacattccggctgacccgaagcagattgctcggagcatcgccaaccagatcagggagaccgtcaccaaggacctgcactcggcgttgctccggtcggagtcgacgcggtcgtaccgcagcgacatcccgctcaatggccagagccagatggactacatctgcagagatgccaggaagcacctctccgacaggctgaagaatgtgctccgacgagagccggagaccgagccgccggcactgtctcaccggagaagaaccgcctcggcgtcgttcaacgaagagccgaggccgaagccgaggcatgaggtggcaaggaagggcaagataaggagcaaggaggagaagaagcacgcgatcgagttcgacgtcaggtctttcagacgtggccaccacaaggcgtcaccaactccggcgatcgactccgacccggtatcgccgaggaacctcatcaggtcgttctcggcgccggtgtcggggaccaccttcgtgaagcttctctcggaggagccgcgggtgctgaccggagcacggctgcagcgcaagcaggaaggctacgggagcaggccgccaccgccatcgtcggaggaggagaggaaggggaggaaggacacgttcaacatcaagggcagggtgtccaacctgaggcagaatctggggctgagagcgaagctgttcggcaagaagctccactccgccgacgagtcgccattccccgatgatctccctccgatcggaacgctggtcaccgccccttccgtcctcatccaccccggcgtcctccaggagaactccaccgaggtgccgccgagcccggcgtcgtggtgcagtagccctcctgatgagatgagcaggggaggttacccgagccctgtctcgccattggaggcttcgttcagcgagcaccgatctcccttgaagatggcggctagggacatgagttcgagtgcttctgaaccagagcatccatcgtcggagcaagctcaaaccgatcaagaactcgcagaaacaagtccaatccaggacgacgacgacgacgacacagacgagatagataaccccatcaaagcttacatcagagcaattcttgtcatcgccggtctgtacggacagagacgaagctctgaccaactcttctcagaccgcgaggtgaaaccgatccccgcgtgggtgttcgaggaagtcgagtcgtcgtcgtcctcctcagccccggccaccaccgactgcgacgctgcggccaccggcgtcgaccaccgcctcctcttcgacctgatcaacgagtcgctgccgcgggtcgtccagtcgtcgacgacgctgtgcgcgttcagcaggtggtacggcgcggcgccgaggagatcccccggcggcaagaggctactggacgggctgtggaacaccgtgcaggcgtggctggcgccaccgccgccgacggactcgcccaactccgtggacgagctgatcggccgcgacatgagcatgtcgccgtggaacggcccgttccgcgaggacgtcggcgcggccggcgcagagatggaggcggagatactggacgagctcgtcgacgagacgctctgggacgtgctgctcaacgtcggcgactgattgactgactgatcggtctcgtggatcaactccttgagtatacctgtacattttggggcgtgttttttttttttcgttttgtttaactctgcttttcagagtgcttgctgggtttgtggcaaggtggtgttggtgagtgcaaaatgtccgtaagctttgtgtgttgaaggatactgaatttgtcatcacaaatgcataaggaagcttaaaaaagagtgaagaaaaaataaatcgactgtagttgcatatgcagcttcatttgcacc

SEQ ID NO: 23786 - DNA, 2270 bp, Oryza sativa
  ref <308>: DATABASE ACCESSION NUMBER: AK073873
  ref <309>: DATABASE ENTRY DATE: 2001-12-06
gtgggaccaaccgttgcggatcatcctcccctgccgcgcgtgggtgttgtcttcttcccctccactccacaacccgcgcccctcgcctccgccgcctcgccggaatcgaagccgcctcctcccctctcccgctctcaccggacggcaccgatccgttccctgctcctgtctccaccgttctactcgcctcgaaagggaggggggaggatgtggtcgtcgagccaggcgagcacgaggggcgtgattgaggtggggagggtggaggcggggccttcccatttccccaagaggcccgcgccgcggaattcctccagggtcaatctgtcaaggacatatgcaattaaatcttgttcagtgagtagccgtacagggctttgccttggacaatgttatcataagaagtcttctgcttgcaaatgcaagttgggatggtcttctcaaccactgtctagcttgaggcatcacttaagagtacattcatcagcatcggaggcggttcttacttcccaatctgatttcacaaaacttcttgttgggaatgaaaaaattggtgttctcttgctgaatcttggaggtccagagacccttgatgatgtgcagcctttcttgtttaatctatttgctgatccggacattatccgtcttcctagattgtttcgctttcttcagaagccattagcacaatttatatctgttgtaagagcaccaaagagcaaggaaggctatgcatccatcggtggtggttctcctcttcgtcaaattactgatgcacaggctgaagcactgaggaaagcattatgtgataaagatattcctgccaaggtgtatgttggaatgcgttactggcatccattcactgaggaagctatagaacaaataaaacgggatggcatcacaaaacttgttgtacttcctctgtacccccagttctccatatcaactagtggttcaagtctccgtttactggagggcatattcagagaggatgagtatctggtgaatatgcagcatacagttataccttcctggtatcagagggagggatatatcaaggctatggcaactttgattgagaaggaactgcgaacattttcagaaccccaaaaggttatgatatttttcagtgcccatggagttcctctggcatatgtagaagaagctggtgatccatacaaagcagagatggaagagtgtgtggatcttatcatggaggaactcgaaaaaagaggaataacaaactcatgcacacttgcctatcagagccgagtggggccagttgaatggctgaggccctacactgatgagacaattatcgagttggggcagaaaggggtgaagagccttctagctgttcccatcagttttgtcagtgaacatattgaaactttggaagaaatcgatgtagaatacaaggagttggctttagaatccggcatcaagcactggggacgagttcctgcattaggttgtgaacccacgttcataacagatcttgccgatgctgttattgaaagcttgccttatgttggtgctatggcagtttcaaaccttgaagctcgacagccactggtgccacttgggagtgtggaagaactgctagcggcgtacgactcgaaacgcgacgagctgccccctccagtgactgtatgggagtggggctggacgaagagcgcggagacctggaatggacgggctgctatgctggccgtgctggctctcctagtgctggaggtgacaacaggagaagggttcttgcaccagtggggcatcctgcctttgttccactgagccgatggccctcttcaggtcagctctttttgaggtgatctaatcataattttgattcatatggataatttcccgatgctgtatacgaatggaaaaagaaagaatattaactgaatttgactacgcaccacattacccatgttgtacatatgaaatattctacggactcttagtacgaagattaacaaattgaacactggcaaaacgcctggtttcccaaggcagagacatgatatttgtgtttggccatctgggtttaagagatgggattttgctgttgattgcgtggtgggggctgcggcagggttaatcttatcatgaaggctttaatcttatcatgcaagagaagacggaaaggaagacaacaacagaagcaccgcgaagttaggctgtgaaccactctgcatgcacgattacctgtatcgcaacaatttcacctcctgtgatagtaaagggatttctcggctgggcagtgggcactc

SEQ ID NO: 23787 - DNA, 1638 bp, Oryza sativa
  ref <308>: DATABASE ACCESSION NUMBER: AK073874
  ref <309>: DATABASE ENTRY DATE: 2001-12-06
gggggtcgctccctctctcggctctcgcgctcgctttctgtctgtctctgctctcgctccgccgccccgcctcctccgttcgccgagcgcccgccgcgtcgccggccgccacacggccaacctcttccttcctcgccgccccctcgcgcttccagttcctcctcctcctccgtttctaactagcgaggattagggttagccctactaccttcgcgctcttcccccaacccccgcttcgcttcttcctcgtctcggtcgcagcacgacgtccgcttcagtgagggaaggggagggagagggatggatgtgctgaggaagcaggcgagcaagttcaaggagcaggtcgccaagcagcagcaggctgtgataaagcagttcagtactacgggctatgaacattcagacgctgttgtaattgatgaagttgaattacagagacatcaacagcttgagaaattgtacacttctactcgttctggaagggatttccaaaaggacattgttcgagcggctgaaggtttggtttctattggaatcaggcatgttgaagtgggaacaaaattttcagaggattgttatagatatggaggtgaaagtagtgctagtgatgaagcccttgcaaaagcagcatctctgtatggaggtgctctaagaaatgttgagaaagagtacgaagaatttaatagaattttatcttctcagactatagatccattgagggctatggctgcaggcgctcccctggaagatgctcgtggtcttgcacaacgttatagccggatgagacatgaagctgagatcctttctgctgaaattgctagaaggaagcaacgggtacgagaagctccacttgctgagcacactacgaagcttcaacagtctgaatctaaaatgatagagcacaaagcaagcatggctgtgttaggaaaggaagctgctgctgcacttgccgctgttgaatctcagcagcaaaggataactcttcagcgcctggttggcatggtagaagcagaaaagttatttcatttgaggttagctgctatacttgatgatgttgaagctgagatgtcctctgaaaagcaaaagagagaatctgcaccgcctactattcattcccataagcgtgctgagaaggcccagtacttccttgctgaggcggtgcataacttcaatggtaccacagaaaaggagttgagtttaattgttggtgattatgtcgttgttcgtcagattgctccgaatggttgggccgaaggagaatgcaagggggtggcaggatggttcccggctgcctacgtggagaggcgtgaaaatatcccgccaaacaaagtcttcccgcaagcataaaccgccaaatgctagttgaaaatctagatttgcgctgctaaaatctgtaatttggtttgggactgccatgatttttggtccttttggagttgtttaggccgtatgactggtatgttctttgttctaccttgtacatgttttagtaacttgtgatcagtatacatgttttcctggcagcagattagacagtagactaaaagctttggccattcatgatgatgcctttcgaatgtaaagttatttatgtaccaaattctttcgctaatgatgtgcttattgattgatgattcc

SEQ ID NO: 23788 - DNA, 3913 bp, Oryza sativa
  ref <308>: DATABASE ACCESSION NUMBER: AK073875
  ref <309>: DATABASE ENTRY DATE: 2001-12-06
gtctcgtcgggcgaagaagcccgacttcccacccactctccccgtctccagaagcagcagccgagccgccgccgacgagcggcgatcgccggcggtgggttgggctggcggctagcggcggaatgggggtgccggaggcggtggcgctggagatacctgcggcggcggaggccgaggaggaggttgaggaggaggaggggtcgccttcgcctccggtggtggccagggtgccgccgcggatcaggaggcggctcctcctccggcaccgcgggggagcgccggccaccgcggaggagatcgaggccaagctccgcgatgcggacctccggaggcagcaatttcatgaagcgttatcgtgcaaagcgaggtgcacagtcagatacccttcgtgtccatctcaggaggaggatcctaagaagcgccttgaagcaaagcttgtggctgccgagcagaaaaggttaagcctcctggctaaggaacaaagtcggcttgctaagttggacgagctgcgtcaggctgctaagaatgatgcggagttgaggttcaagaaggagagggaggaacttggcatgaaagttgaatctagagttcggcaagcggaggagaaacgtacacaactcatgcatgctcgttcgcagaggagggctgcactggaggaaagaacaacaaagtaccttgtgcagagagtggcgtgggaaaacaagtacagggagcgtgtacattcagcgatcctgcagaagcgcactgcagctgagaagagaaggacggggctattggaaggtgagaaaaggagagcccagggtaggttttcacaggtccaacttgctgccaggactttatcttgccagagagaagctgacaggagcaagttaaaagaacaactagaagacaaacttcagagggcaaagcggcagagagctgagtatttgaagcagcgaggaagtactcacagctttacatacaccgcttcagttaaacacggtgattttctttcaagaaatctggcaagatgctggagaagattcataacatctaggaagacaacagtggtgttggctagggcctttgacatgctaagaataaatgaggaatctgttaagcctatgccatttgaaaaactagctctttgcattgaatctcccacagttcttcagaccacaagggcatttcttgatcgcttggagagtcgttttactttatctcagtcatcaagtccatcatcaccagaaaatattgatcatctgctcaagcatctgggatcaccaaagaggactctatcaaaaagtgggggaagaactagagtgacaccaacaaaggcagctagaaattcagatgttagcaagttacctagatattcaccgaggatagttctttgtgcttacatgatactaggtcacccaagtgttgtttttaatgaacgaggtgagcgagagaaactacttgtggagtcagcagaaaactttgtgaaggaattcgaactgctgattaagacaatacttgatgggtcaagtggtgcatgcatactgaaacagccaatactagatgatctgtctcctggatcttctaattatcaggaatcttctgccgttgttgctgatcggaagaaattcagatctcagttggcttcttttgacaaagcttggtgtgcctatctttaccacttcgtggtgtgtaaagcaaaagatgcaaagtcactagaggaagatcttgtcagagctgcatgcaaacttgagctatcaatgatgcaaacatgtaaatttaccgctgaaggccaaccagagaaccttaatgataatttaaaggccatccagaaagaggttatggtagaccagacacttctaagggagaaggttcggcacttgggtggtgaagctggtattgagcggatggaagttgctttatcagaagcaaggacaaagttttttgaagcaaagggaaacaggagccccttggcaacaactataaaaaatgtagcagctacatgttcttctggagaatctcctatttctgacatgaaggagaattccaacattaatgataaaaggccaagtcaggctgtccaatctatgttcagagttccctcttcaccatctgaaagtaacacagcaggcatcaccatgagtaatccaatgacagtgagcagcactctgtcagaaaaacggccaacagagaacgagcagatggtcaatgagattcttcatggttttctagctgacagctctagtaatattgggactgttgagggtggtttcaaggaaaaagtaagggaaacaatggagaaagctttctgggatgtggttgtggattcacttagaggagacatgccagactacagctatctggttcagctggtaaaggaagtcagggatacattgtatgagatggttcctaaaggttggaaagaagaaataatcaacaatattgaccttgaaattttgttgcaggtacttgaatcgggcacccaggacatgcaatatttgggacagattttgcagtactctctgggtatgctgcgaaaactatcctctcctgcaaaggaagacgaaatgaagagaagccatgacaaattattgggtgaattaactgaacactctgagtgtaataacagtggttcaaattcatttgtaattgctgttatcaaaggtttgcgcttcaccatggaagaactaaaggctctgaagacagaagtcagtagagcacgtatccaactattagaaccaattataaagggctcaggtggagtggaatacctgcagaaggcttttgctgatcgctatggattcccgtccaatgcatcagttgctctccgttcaactgctcagtggatttccacatcaaaagataccgtggaagtagaatggaatgagcatgctcagccatttgttgccaccctccgatcaggtcatggagttccagatcagcgacagtctacaatacctgtgtcagatgatacggggctaccagagtgcacggggcaaaggcttgaccagctaataaggattgggttgttacagctcatcagtggcatagagggtgtgcaaatgcagtcagtaactgagaccttcaagctcaattggttgaggctgaggtctgtacagagtcaattccagcaagtgattgtaattgcaacaagcatgcttgtgcagcgtcaagttttggcgaccgacgacccaaacatcactcccacagagctggaaagcgcgacatcacaactgttcaacactctcgcagagctactggacaacttccccgacgttagcaccgccaagatcatggaggtgatgctccgttcgtcgtgtcgtcgtcgtcatcaggctcgacaaccggctctccatcagatgaaagaaccgagagcaggaagcagatactggccagggtcttcctcaagagcctccagaccgatgaccccgtcttcaagaaggtctcccggtccgtctactgtgcgttccgcgcgatcaccctcggtggcagcggtgccaggggacggaagctcgccgacgccgccctgaggcgcatcggcgcgacgaagctcaccgaccgggtggtgagatcggccgaaatcctcatcagggccgcgtccatttcacagcaggtccacggcccttggtacaatcacttggtgtgattcatggtggaaaagctagtgaaaacggcgtcgtttgagcaatctgaaccgctaagcgttcgtgtgaagaaccgaagatctcgtcttgtttacttgttagtagtggcaaggcagatggtagattggtacgtgagcaatgccctgctgctttgtgtgaataaataaaagagatggtactgtactatgcttgtatctgaaatcctgaacaatgtgtgcgtgtgtggtggtgttcatacgtgtgatcaaatctatgcttgtatatatacgaaacttaaaaatggtttcatc

SEQ ID NO: 23789 - DNA, 1644 bp, Oryza sativa
  ref <308>: DATABASE ACCESSION NUMBER: AK073876
  ref <309>: DATABASE ENTRY DATE: 2001-12-06
gcttcctaaacccatctcgatccctacctagctaagctatttcattcacacctcgatcaatctcgatcgtctctctcgtctactactagtactagcttcttctcctccatttctgacctgagctagctcagaacagagagctgagaatcatcagctagctagctaggcgtctggggagagagcaggagccatgtcggagtcggaggtgtcggtgatcaaccagctggaggaggaggagactcggctggagctgccgccggggttccggttccaccccaccgacgaggaggtggtgacccactacctcacccgcaaggcccaggaccggagcttctcctgcgtcgtcatcgccgacgtgaacctcaacaactgcgagccatgggacctcccaagcaaggcgaagatgggggagaaggagtggttcttcttctgccacaaggaccgcaagtacccgacggggatgaggacgaaccgggcgacggccagcgggtactggaaggccaccgggaaggacaaggagatcttccgcggccgcggcctcctcgtcggcatgaagaagacgctcgtcttctacatgggccgcgccccccgcggcgagaagaccccctgggtcatgcacgaataccgcctcgacggcaagcttccccccaacctcccccgctccgcaaaggaggaatgggcggtttgccgggtgttcaacaaagacttggcggcaaagattgcccaaatgccgccgcctcccttcccgcgcaacgactccttcgacctcgacctcgacgacttcctccacctcgacgccgacctgccgccgctcatcgacgaccccttcgcctccacctccacgctcaagacggagccacctccgccggccaacctgatgcacaaccactacggctacttctccctcccggcgtcagcgaccaattataaccacagctccggcgccatggcggaccaggcgattcggaggttctgcaaggcggaggcgtcgacggcgtgcttctccggcgccgacgctgacgtggatccggtggtggacgagctgctctccttcccggactccatcacggactactcctacatatggaaggcctgaccagattaatttcgtggttaatttgccatatgatcgatcagattaatcctgtttaattagttggtttattaacttgattactgtcaaaggtttgggttaactaggagatgatgatgatggagtttgtggtgatgcgagagagagagagattaggtcgcgctgatctggtctgatcaaggtgtgcagagcagatggagcggactaattcattaattagcttaatcaaattagttatataggtttgtttgtcttaattctgtatgtatatagttatctgattggggataatacatagagattactagctagctagctagtttggtgattaggggggtgatgagctagctagagagagatatctcatcaaaattaaggtctcggttggttgattaatctgcagattatatattgccttgtgtgtgataggccatgtggcctctttctgtgtatgtgtgtgtgtggatggaaggagtaaattaactaaaccccttgtacatgtaccatcagttgtgctttacttacatgatcaattcaaccattgatcgatt

SEQ ID NO: 23790 - DNA, 1366 bp, Oryza sativa
  ref <308>: DATABASE ACCESSION NUMBER: AK073877
  ref <309>: DATABASE ENTRY DATE: 2001-12-06
agcctgatcaaaccgggcacagaaaaacaaagaaaaccaacgaaaaaaacgacgcaacacggcgcggcagagaagacaacaccgcaccaccacccccgcctcctcctcctcctcgtcgccgtgcccgatgaaggcatgaagctgcccccgagacatgcctcttagcccacgtgcgccctcccgcgtctcgcccaagccccttgcgccgcaggcatgccgttcccgcgccgcgacatcgaggccgctggcgccggctccggctccggcgacgacgactcgccggccgccaagaggggcaagccagaggccgcgggggcgcgcccctcgctgacgcggaccgaggcggccgcggccgcctccgtgctggtgctcttcctcgtcgggatcttctgcgtcttccgcgccgcgccccgccgcgagttcgaacagatcctccgcctcccccgcagcctcgccgacgtccgcctcctcaaagacaatcttgcggtgtatgcaagagattatcaggctaatttcatactgggatattgctcaatatacatctttatgcaaacatttatgatccctggaacaatattcatgtctttacttgctggagctctttttggggtggttaaaggtggtattttggtcgtattcactgcaacagcaggtgcttcgtcttgctactttgtctccaagttgattgggaggccattgattagctggttgtggcctgaaaaactgaggtatttccagtcagagattgccaaaaggaaagaaaagctattgaattacatgctttttcttagaattacaccaactttacccaacacattcataaacatggcgtcacctattgttgacatacctttccacattttctttgctgcaacactaattggtctcatcccagcatcttatatcactgtaaaggctggtagggcactaggcgatctaagatcacttagggaactgtatgactcaaaaacactagtaattctattcctcattggaactgttgctgttgctccaacgattctgaaaaggaagagaatatacgaatgatgccactaaaaagcatctaaacagtgtattagtagagcactccagaagtgtattagttttttttccctttctttgttgatattgtatacctattcaatttagctgtagagatgtagtagtaacatgatgaatgttttcctcaataatagatgacgctaagctgttgcatctgttgccccaatgttcttataaatccccacgtcccaattaacgatgcggtggaactatctggttgttgtggttttacagtaaatcttactgctcccaattggatgggcaaccttatccgtcgttttgaaatgatgtgttatttgccacc

SEQ ID NO: 23791 - DNA, 2924 bp, Oryza sativa
  ref <308>: DATABASE ACCESSION NUMBER: AK073878
  ref <309>: DATABASE ENTRY DATE: 2001-12-06
ggttggtcactcggtcagtccggtgctgctgctgcaagagccaagaaccagggcgtacttgtgttcttcaccttttactttttctgacggatcgttaccgtcttcttctgctgttacggcattgctgattagattgtggggctgttctgtctcaactctcaagattggtggtcgaatgagtgtctctttacttgattagatgctgatttgcccaacaagtttggatttttttttcttttctcactgttttgtcagctcgattcgtgcaggtagctaagcttttctcgtttcttgagcaatggctgttggaagcagttcagtactagtttcctatggttgatttgtactgttattttccccccttctgaatttgatctgggtaaagtagtagtaaagtgagtagaatagttcctttctctctctctctctagttaccagttgcttcccttttggatgcttttttatgtgattctgaaaacaaaaaagcttggaatctttgatgtgctctcaagctctttgcccaaatgatggctgctagagcttgcagtggcaacatagcttttgctttgtttgcttcccctcacttcccgttacagttcttgtcagctttttccccttccttgagagttgaacatttaagcaaattattcttcctttctcatgctagtataatttgctggtcaaaacattgttggttctttgataatgtttttcagatgaacacctcttaatggtttttaaaaaatatttcttatttacacctttttttcttggggtttttttaaatgttcatgtctaaccattaagcagcacaatatttgagttacgcagtggcttcgtcttaacctgctatacttcttgattatcatttctgccgggctgtaatggaatagatgcttgttctgttgacagtgtattgggacttcagattttgagtgacatgagtgtatttacggttttctatctggctatagtttgctaaattattttcacaaaacaaaaaagaggtgtgttcgcaaggttagcatactatactatatctctgtcacatcataatcttgaataaatccaattgtcttctagtggcatgttccaatcgtcatagttatttagcgatcttatgctgctcaatttcttctattaaaatttctagtcttttgtttgtgaatgcatatatagtcgattagagacaacacttttttccatttagcaagcttattatctttataaaaaaaaaaccatgcatattgaagcacctctctgttgctggacaaatgttttaagctcttttactacaactagtgcagatatcttttattaaaaaaaaatgccaacaagatattgaacattgtgtttccagactcaagaggtacactgtttttctaagcagagagaagcaccttgctgtgtagcgttttacttatttagtctatgtttcatcttgttgaaaattttcaggtttaacattttgttagatagcaataagctgttgtctttatcaacatatagcggtgtacacaagttattacatgttagggctaatatagatcagttgagattgaccgtatacatcatgcttaggtttcaaatatctgttctgatgaagaaaactctgacaaatgattctgaaggataaatgatggaggatatttggtagtcaaagtattcaatgcagatgtttttttttctttgccataagcgcataacaagaaaatacactaaatatatgaccttccttcttacttgtaaagaattagaagctgaatcatgtttgtttattgatgtttccgaatcaattggacattgccttctggggtgccaagttgaaagttcatctcttcacgtacttcttacatagggatgctcagtggaataatagctggcattcaagttcaacagaaaatagaacaatggagagggaaattgtggcctcatatgaacccaagaagaataacgaaatcaggatgtttgagagttcagacgagatggcaacagatctggctgagtatatttcacaagtttcagaaatttctattaaggaaagaggttactttgctattgccctgtctggagggcctcttatcagttttatgcggaaactttgtgaagcaccatacaacaaaaccctggattggtctaaatggtacatcttctgggctgatgaacgtgcggtggctaagaaccatgtggatagctactataaatcaacaaaagaagattttctctccaaggtgcctattcttaatggtcacgtctactccatcaatgacaatgtgacggtggaggatgcagcgacggactacgaattcgtcatccgtcagctggtcaagattcgcacagtcggagtttcagagagcaacgactgccccaagtttgatctgatcctccttagcatcggctctgatggtcatgtagcctcattgttccccaaccatcctgcacttgagctcaaggacgactgggtcacctacatcaccgactctccggtgccgccaccggagaggatcaccttcacccttcccgtgataaactcggcatcgaacatcgccgtagtggccaccggagaagacaaggcaaaggctgtgtattttgccatctctgacggtacagagggtcctgatgctccatcaattcctgcaagaatggttcagccaacggacggtaagttggtttggtttttggacaaggcgagtgcctcgtttcttgaggccaagaccaagaacgatgggtatgagcatccaaagtattagcgacttggcattccctttttgctgcctatgaagagttgagttgatcatgtagtagttgatggtttttgatggaagatgctttcctccattaccttggtagtaagcagttcaggtgctcgttttgaaggtacttggatctgagaatatgaaaatatccgtgtctttttggagttg

SEQ ID NO: 23792 - DNA, 3330 bp, Oryza sativa
  ref <308>: DATABASE ACCESSION NUMBER: AK073879
  ref <309>: DATABASE ENTRY DATE: 2001-12-06
gggtctccatccgcatcgcagagacttgtccgccgctaacccttgtactgcgccgccgcctgctgcactgacctccccgccgtcgtcgcgagccccgcggcttccggctgccgtcgccgcgagccccgtggcttccggctgccgcctcccccagcagtaacctccccgagcgccgaggcttgcggtgctcgcggcgccgccgtcgccccgagcgacagccccccgcgcgcctggtctgctcgcggtcacttagtcgtggaggagcgcgatgcgagggcaaacaggccgtggatactcgcgtcgccgccgtcgacgccgtggccggccccgcgcgcggcaaggagcggtgcatcgctgctgccgggcctatcggcggttggtagagcgctggtggtgggctatcggtgctgccaaatcgccgccgtcgacgccgtcgccggccccgcgcggcaaggagcggtgcatcactgctagcggatctatcggccgttggtagtgcgctcgtggtgggctatcggttttgccaaatcgtgtgtcctcgccgtctcagaccgtggtgggatgtttggaagaaaaaagttgtatcacactggtatgttgtttgaatggaaaatgatggtttatggtttgcaatgaaaaatgcatgattgaatgaagggtcaatatgtttgagtactgcatatatctgaaactgtttgaaagaacgtttacatcactgagttgaccaagataaaaatagagaatttgttatcatcaattataagtacttgacatgttttgctcctgtttgtggcaaatttcttcagattcttccttgtgtagatgcattatgtcttcttggacttgaatcacctcattcatggttgaattgatcaaggtggtggccactttagctctaaaagtagttgtcgtgtgctgaaataataaaacgaggaaaaattagacatgatatacttcttcagcacgtagatcgcatagcagatcttagcagagaatacttgccattgcatcgtactcgggggataggtcttttccattccagtgttcaatgcacttgagcgtaaacaatccacatgaccatctgaaattttcaattatgtttatagtgttacatttagacatcatagtaatttttatttacagatagtagaaatggttacccgtccttctgttgaggcacttgcatcgggcatattggccatttcgtgatgttcgtagaattccatttataagtcttgtgttcatcttgtttggcataacgaagatacttctctattcctttgatctgttatattgcaaagaaatataattagttgtagtgctttcagaagggaagtgtatgaaatgtgttttcattataccgtagtggtaagggttttttctgcatcatagcttgtcctatccatatgcagtgagtccagtatttggattttttcattgacaccatccaggacagctacataccagtgggccgagtttctatttaagggtgggaaaatctacatgcggaatcatgagtaagaaatgcattttcacttatggatataatgtatacgatgtatgtattaccatttcatgctctaaatagctggcagcaactttagatctttgatcacgatatctcttgttgcatgtacctttgtctgtaccattaattttccacagctggcattgtgttgcagtttcaaggagtgcaattccctgtcctcgtggagtgtcggattgcttgtctatgatgatttgtatgtatgcatctatgacctgtccaatagcagtgcatattgtgagtgtttaattattctgttgttggttaaattagaagcaggagatagcagtgcttacagtgccgttcaaccactttgctttggatggagcctgttttggtaggataagtggtttcagatgctgtcgaaaaatcttgattcctgcaattgttgatagcaattttttgtcttcactcttagagatgtaactcaaggttacttcatccagcaggcttagatcatgtggtttcggttccctactagatttaactggctttggaaatgtttttttgtagtagatgaaatcagtttgtgacttgtgtgttggcttgataatccttccctccggtcgtctaagccttccgccaattgttgataactgctgcaatgtacaagcaattagcataatggtcagtgtagcatttgtaatgtagatgtaggtctattatttgaaaaaccagtgttggattttgctggctattgtcatcgctttcgattatgtgtggagaagtagctgttccatttggttgactatcgtagttctgttaagatgcaacaagattagttagtcatttgtaatgctcattggaatatactattttgcttgcaaccttacctttgaatcatcaactaggtcttgtcggcaatctgccctggaatcaattactgtctcttcttgtttggctgctggtttaaatttacggaaagttcgtgaccttgaagttgtacccaacctgtactttattgcctatgcatgttcgaaatcataaatagtacaagtacaatatcattaacttagtacctgaatttgttatgagtacaataactgttaaaattggttctgtacctgaatatctcttctattttgaatgcaagtattctctattgagattagttttgtggatatcttgttgtccagaaactgacaaccttgttgaatctgcatgagttgtgtcataattgcatcgaaattggctgattgatgtgcctacaacagagagatttaataaatgtttgaggtgagtagtttaaacttcatacagtgggtattacctcaggatctttgtaattttcaggacttgatgccttcaacagagagatttaataaaggtttgagttgaactgtttaaacttcatacattggctattacctctggatatttgaaattttcaggacttgatggaacattaacatcgtcttctatgtaaacatggtgtggactctcatcatcatcgcctcttccatgctcaggtacgatgtgtatgacatccacagtgttatcttccatgaaaccatcaatttttttttcgtcaatttggccttcacattgtactgggacaatgtcccctttgatctcttcaggatcatctatgacaaccacaacctgtaatgtaatatgaatagtatataatagtaggtaattaacatgttaaaactaatatttaatgttgcaaagagttgtaacttacagtccctgtttcaagaatacatttcttgtcgtactttagccatgtcattacattcatttcattccaataggccattagcggcggtggccttccaacg

SEQ ID NO: 23793 - DNA, 2317 bp, Oryza sativa
  ref <308>: DATABASE ACCESSION NUMBER: AK073880
  ref <309>: DATABASE ENTRY DATE: 2001-12-06
gagcattcgccgagccacacgacgaggaggagggggacgaggtgttgtgtggggtggtggaaggggactgggcacagctgcaagaaccaaccaagagtccggcagaccgtaccaccggagaatgcctgtaccagcggcgccggtcagaagctgttcttttgcagggtaggaaggggttgaagcaacggccagcctctctggactttggcagcggcagccccgggttcaatggagcccctctttctccgggctttgtggttgggggtgtgggtttgatgaacaagggtcttgtgtcatcatcattcatcagatcagacgtttttcctagtcccaggacaccgaactatcggcggcatcgttcatcagtatttggttaccaaaaggggtggagctctgagagagtaccgcttgcttccaaaggtaacaggaggtacccaggcagcagcatggcatttcccttcagcaatgggaggacattgccctccaaatgggaggatgcagagagatggatcttcagtccgaattcgagtgacgtgctcgagaagacttcatttgctcctgctcggcgaccaaagtccaaaagtggtccattagggcctcctggaaaatttggtggacaatactcatctgtgtcattgcttgacaatgggagggttggacatttgacagcaaactcgcctttcttggctggagtactgataccagaacattattgtggagagaaagataacattgggaggtatatgagcagaacagctggtgaggaggccagcattggcattggaggcaagtcttgtctggcaaatggtgggtctcatgctactcaatataacagagttcgtcgacgactggatactgcgattgagtcatcaccttcattgcctagcacccaagcgtctgtacaagatgaacaggttggaatcacagaagagtcagcctccattatcacccctataattttgcggaaggatgcggcaactcaaacaagcccaaatctaagtcggtcatcttcgcccagtgtcagtactccatttatccatttgcttacgacacaccaagtcagagaaaaggagaattgtttctctgatgttatcagggatgtgcacatggacgatcgagtgactcttaccaggtggtccaagaaacatgttacacgagcatctagcaagaactcaacaaatgttatagatgtgaagaaaaagacagtggagtctaagtcttcttcctgggaattaacagaagcaaaatccatatcaaaggttgagcgagagcaagaaaaaattactgcttgggaacacctccaaaaagccaaggctgaggcagcaatccaaaagttagtgatgaaaatcgagaaaaagagatcatcttcactggacaagatttggaacaccctcaggtctgcacaaagaagagcacaggtaatgcgtgaaactgcagcagcaaaccaggatgagcaatcttccgggaaggctaaaagggcatcacaccttaataagaacggccagatcagctctctgagtggctgcttcacttgccatgccttctagtgtcatgtagtttaagaaggaacaggacttaaagtaattcttcgtgttatcaacacgctcgtgttgacttagtgaagttcagagatttacagaataaagatgatccagcagatggaaattatccccccttggattttgacaagatgctgctgcaacaatgggggaccatgcattatcatgatatagatttctacagttctgctttgtgttagtttcgattctgccatggggggacaagagaaaatggtgccacgaaggaaaggtgaaattcttctgcatacatcccatgtgcctgattgatatcttagcacaatgataattgataaggtcctcctctatcattcattacccattaccaacattctagatgctatgagtttgtgtgcgatgaaaacaaagcagatatgtatcatttgcaccacaattccaacggatagataagaagggaatgtttcagtcagagggaatacagtgccttactgtgattcatgctggaaaactctactggattgtgaaagggaaccaggtggaatgcaatagatttagctagcgtatgctacatttgcatacacagttacaatagcatgtgttggagaaaaatataggaatacaggagaatagagattctgtttgaatttcatggcaatttgacaagctcttcgcagaacaactctcccatttctgtaatgagctgtttcttgtaattcctattgcaacacataggcgttactgaatgttgataaatgatattgccatcgcaattttttttt

SEQ ID NO: 23794 - DNA, 3386 bp, Oryza sativa
  ref <308>: DATABASE ACCESSION NUMBER: AK073881
  ref <309>: DATABASE ENTRY DATE: 2001-12-06
gttggttgatctgcacttatgctatacgctgcttctctcccgaaaccatgcggctgctgctggttctgccgagatggagctggggctcaagccccaacgagccccaacgagccccaacggtgaatccgcccctgctagtcgtagctagctagcgagtgaatcagtggagtgacgagagatctcgcgatggcgaaggcggtggtgctgccgctggttagcaagcttcaggaggtggccctgagcgaggggagggcgctggttggcgtcggcggcgagatcaaccgcctccgcgacaagctcatgtggctgatggccttcctccaggaggcggacccccagaggcgggcggccgacgccggcggcgagctcatgcgcgtgctcgtgcaccagacccgcgacgccgcgttcagcgccgaggacgccctcgacgactacgccgtccgcgtcgacctgtcccgctaccccggctggtcgcgcgccgccgtcggcttcctcgccggcatcaccacccagctgcgcgtccgccacaggctctccagcgacatcgcggccatccatgcccgctttgaggagatcgtcggcaacaaggacaagtacaggctggagggctctgcgccctcgtcgttgctgacgtggactgcctccgccgcctcctcgagtgaatcaatcctctggggtacatccaagccaccaattatcgggcgtgacgaccagcagcaggaactagaggcaatgcttctcagctccgcaggatgcctcgccgtaatatatgtcgtcggcgatagtggtgttggtaagacgatccttgtaaacagtgtctgttcaaaaccatctgtcagagaacacttcaaagagcgaattggagtgaaggtcggaaaagatgctggtatatccaacatcctgagtttgataagcaaagaactgaagaaagaaaataacgaaagtgacaatgagaatcctagaagcaagatacaaagacgtcttggtgaagagtgctacttgatcatcatcgatggcaggcagatgtccatcgctgactggaatgctgtgatccatgctcttccgaagaacgaaagaggtagtcgggtagtgctcatcacgaaaataaaaccacagtttctagaccacccaatgaatgatgtccatgagataaagctgacatgcctcaatcaaacggactgcaggaagctgttccacatgaggctccatggcaaagaggaggatgaacaaaaccaaacctacctgccaatatactaccagcgtgtgtatgacattaccgggggctcgccattggcagttatcctgcttgctggactcatgcacaacaaggagtatccacatgaatgggatagggtgttaaaatacctcgagtcagccaaagagaagcggctcaacaggatactgtccctgagcttcgatgacctgcaccatgagctcaagctctgcttcctctacttcacagcattcccggtcagctacaaggtgtaccagaacgtgcttgtcaacttgtgggtatcagagggctttgtggtgccgcggcacgggaagacggtacagcaactgggacagctatacctgaggcagcttaccactaggggactagttactgaagcatcagctgatggtgactacgacatccgccactttttcctccatgacagtgtctacttgtttgcacggtcagaggcacatgaggcaaacttcatggagctgcatgatggtgactacttcccatcgccggacagggctcgacgcctcacactacataacagtatggacagatacgcggcactagataacaagatgcccaagctacggtccatctttgcaatcttcgaagagataccagccagcacagcagaagaaagtgtatcatctcctagctgcttccccacctgctgttcatgcgagcagcacagatcaccgaaaatttcaagatttgacctcaccaagctgctgaaaagatccaagttcctacgagtaatcatgatcgaaggcctgaatatcggcaccgagttgcctgaggcaatcggaggcatggtgcatctccgttaccttagcacgcgttgccgatctctgaggaggatccgcccgtcgattgggaatctcaaaaatcttcaaacaattgatgtcagacaaagcttagtgcatgaactgccgtgttccttttggaagatcacatcgctaaggcatgtgtttggctctgagctgatcgtgccaagatggactcgtgaactgaaacagctaaatacactcaagtcggtgagagcattgcaggattgggatggctctatgttgagaagaatggttaacctcaagttactggatgtgactatccaagagaagctcaaagaggagaaggcgcgcaagttatcagacaaccttaacaatctcaacaaccttactacactgatcttgaaaggagttgacctcccaatctctagcatttttacggcaccttccctgcaattcctcaagactatagaactaaccggaaccatcctgctcacaactccatcaccagaaatagacaagatgaccacttcaccttctgatttccagctgccgaacttgagcaaattgtcattgtcaaagacgtgtctgcaacaagggttcattggaaagctaggcaagctgccccttctttccaatctcacactcaaggatgtttcttgtgacggagaagagcttgttttcaggcctgatgggtttcattgcttgaaaaaattggaagtaaacgacacgtccaaacgtgttgtgatagaggagcatgctttgcctgtattggtctctttgcatatcattgggaacagtagaaattaccaacactcgatccatcctactcacaagattatcaacaagattagacatgaggacataaatctttttcagcgtatctgcacttgtcatcagaaagagataaccaaaggctaacaagcatatatccttgtaagtttgtcaaattatatcgctttagctctgtatttttccatcatatgttgtttacatgcatgtaacaattggatatccttctttttgctaatttccagtgttaggaagagtccttcgaagtgaaagttgtacgatgtcatcgacgaagagtcagtttcctcttcaaaatgtcatcgacaatcataaaccaattctgcaatatgacattgcgaaagtgatttccttctgtttgcaatttttacacaatgcgcaaattacctgtaagtagacttgtacttcgttttcttgttttcgtttttctcaggagtcgggtgttgacgtgttgtagttcgtcattaatttcgtttccttgtgcgcggaaatgcgacccgcctcctggatcattctgtactattgcaacttacacaaccactgaataaactcgattagtgatc

SEQ ID NO: 23795 - DNA, 2166 bp, Oryza sativa
  ref <308>: DATABASE ACCESSION NUMBER: AK073882
  ref <309>: DATABASE ENTRY DATE: 2001-12-06
gggccgtcgccgtctcccgccttcgtcctcccctccagccgccgaccgaccgagcgcgatggcggcggcgcggctccggctgctgtccgcggggctcctctcgccggcggtgtccagggcgcggcactcttcttccctgcagggtctccgcgcgctgtccacgctctccactacgctcgggtccggcgcgggggaggacgagatcgagcgcatccgccgcgagttcgaggacgccaagcggaactacctcagcatccccgtcgccatcaaggacatggccaagatgaacccgcaaggcatttatgtgaacaagaacgtcaaactggatgacctgcaagtctatggttttgactatgactacacgctgtcccactactccgagcacctgcagtgcttgatctacgatctcgccaagaagcacttggtcaatgagttgaagtatccggagagctgcttgaagtatgagtatgaccacggctttcccatcagggggctctattatgacagattaaaaggttgccttttgaagcttgattttttcgggtctatcgaaccagatggttgcttctttgggcggcataagctgagtttgagtgagataaaagaactctatggcacacggcatattggcagagatcaagctcgccagcttgttgggctaatggatgtcttctgttttagtgaggcatgccttcttgctgatatagttcagcactttgtagatgccaggctggagtttgatgcatcctatgtatatgaagacgtaaaccaatcgattcagcatgtccacagaagtggtctgattcacaggaaaattctttcggagcctcagaaatatctgataaaaaatagccaggtcttccgtttcttaaagatgctaagagagaaggggaaaaacctatttcttctcaccaactcacctttctactttgtggatggaggaatgagctacttgcttgaggatgagcattttgatgggaattcctggagggagctctttgacgttgtcattgcgcaggcaaataaaccgactttctataattcagaccacccattcagggtatatgacactcaaaaggatacactagcttttactgcagttgacaagtttctgccaaatgaagtttattatcacggttgcttaaaatcatttctgcagattacaaagtggagaggcccagaggttatatactttggtgatcatcttctcagtgacttgagagggcctgcaaaagctggctggcgaacagctgctgtaattcgtgaacttgaggatgaaatagaaatccagaatggtgacagctaccggttccaacaggcaaaattaagtataatacatgatctacttgggaaagttcatgcaactgtggttagcactgagaaaggacaagtttaccgagcattgcttgatgagttgaatgcagaaaggcgtcaatgtcgatctgcgatgcgagatcttttcaatagctcttttggtgcaaccttccttacagatactggaagggaatcatcgtttgcttatcacatccatcaatatgcagatatttacaccagcaagcttgagaattttttgtcatatgcccctgaatcatggctccatccacctcatgacataaagataatgccacataatgcgaaggtcccagcgagtttgttcagtggctcgtagctcattctatccatttccgatggagaaccgtaacacccattatggtttctgtgtccgacccgagagtatgaactgccatgccactgcatctggttagctgatgaataaagcttgggtacacccaacccaacatacgtggcgccaactcagcaagatgtggctagtgctgcgattgacagaagagaagtgatggttgttatgttctgtaccgttatttgaggatgatttcggtctgacaggcgtggttttctgtttccaagacatccagaggactaaacaaccaaccaaatgatggttgctaataagaattgttttccaatcatccatcttgtttctcattgttctattctccttttggatgagatatgtaaaacacacatgattcgtattccgttaacagtaaaatctcccaaattatgggtaatccttttccttcaagcttcttttgaatgatcagcaagcaaggaatggataaacatatacagtatttgaatttg

SEQ ID NO: 23796 - DNA, 1459 bp, Oryza sativa
  ref <308>: DATABASE ACCESSION NUMBER: AK073883
  ref <309>: DATABASE ENTRY DATE: 2001-12-06
ggcaaatcccccccaaaaaaaaaaaaaacccgccaccgcgagcacgccgcgcgcctgcttcctccacctgcgccgggcgagaagatgatgctcccccggctcctcctcctcgtcgttgcctccgcgctgccgctcgcttccgtcgctgcgggcgccgtcggcgtcggcgaggggttctgctcggcggagccgtcggcggcgtcgggcggctgctccggcgtgcggccgccgctctactggaaggccaccaacccgactctggcgcccgcgcacctccaggatttacctggcttcacacgtagtgtttacaaaagggatcatgctttgattacaccagagagccatgtattcagccctttgcctgactggatcaacacattaggagcatatttaattagtccagctatcggggcacatttcacaatgtacctggcaaaaatgcatgatggatcaaaatcagccctaccaccaaaaggtgttgaaaggcttatctttgtactccaaggaagcattctattgtctgaggagagtgggaatacccatactctgctggtggactcttatgcctatcttcctgcaaacatgaaacactctgtgatctcagatgaagtaactacccttgtaatctttgagaggaggtacacaaccattgagggttaccatcctgatctcattgttggatcaactgataagcaaccccttcttgaaaccccaggagaggtatttgagttgaggaagctgctacccacttctctgccttatgactttaatatccatataatggattttcagcctggggaatatcttaatgtgaaggaggttcattacaatcaacatgggttgctgcttttagagggacaaggaatataccgattgggagacagctggtacccggtgcaatcaggggacaccatttggatggcaccgtttgtgcctcaatggtacgctgcccttggaaaaaccaagacgaggtacttgctgtataaagatgtcaatagggatccactgatatgaggaatgcaacatttcctgaccgatggtaatagatcaaattggagagctattacgctggtcttgaagagtccctgtggaagatgatctcagaaaaaaataaatcttctttctcgctgatgaacccttcaaaatgatgaatcgacgcaagaatctcagatctgtacatggaatggtcaagctacccacttgttcttattggtcaatatgaattcagaaaaaaagttgctgtactattttctggacagaactgggctatgctgtgactcttcggaaatctgtattggctaaccccttgaaatgtcgaaataatgcgtcgctgtaatgaaaccaggtacctgattccaagattagtgccttttttttccttttaattgcagagcatcaaatatgtggcgacatgtcgaacatcaatgtttgggtatctgaagatgccttttaaaaatgg

SEQ ID NO: 23797 - DNA, 1762 bp, Oryza sativa
  ref <308>: DATABASE ACCESSION NUMBER: AK073884
  ref <309>: DATABASE ENTRY DATE: 2001-12-06
ggacggtttcaggactcggccgcatccctcctcgcccactctccctcacgggacacctgcggggctcgccgacaacatgaacaagaacgccgcaccggaagacgtcgagagcggcgagcacgagcggacagggacggtatggacggcgacggcgcacattgttacggcggtgatcggctccggcgtgctggcgctggcgtggagcgtggcgcagctgggttgggtggccgggccgctcgccctcgccggcttcgcctgcgtcacctactacacctccactctgctcgccaacgcctaccgcgcgccgcaccccgtcaccggcaccaggaaccgcacatacatggacgccgtcagatcatacctcagtcctagagaggtgttcatgtgcggaatcgcgcagtacgtcaacctgtggggcaccatggtcggctacacaatcaccgcaaccataagcatggtcgcgatcaggaggtcggattgcatccatcggaacggcgccggcgccgccgcgcggtgcgacaacacgtcggcgacggtgctcatgctggcgttcagcatcgtgcaggtggtgctgtcccagttcccgggcctggagcacatcacctggctgtccgtcgtcgccgccgtcatgtcgttcgcctactccttcatcggcctcggcctgtccgtggcggagtgggtgtcgcacggcggccacctcagcggcaggatccagggcgccaccgcggcgtcctccagcaagaagctctggaacgtactgctcgcactggggaacatcgccttcgcctacacctttgcagaagtgctaattgagatccaggacacactgaaaccgtcaccaccggagaacaagaccatgaagaaggcagcgatgtacgggattggagccaccaccatcttctacatctccgttggctgcgccgggtacgccgcgttcggttcagatgctccgggcaacatcctgacggcgtccggtatggggcccttctggctcgtcgacattgccaacatgtgcctcatcctccatctcatcggagcatatcaggtttatgcacagcccatatttgcgacaatggagagatggatctcctcccggtggccggaggccaagttcatcaacagcgagtacaccgtaaacgtgccgctgatccagcgaggatcggtgaccgtggcgccgtacaagctcgtcctccggaccgtcgtagtcatcgcgacgacggtggtggcgatgatgataccgttcttcaacgcggtgctggggctcctcggcgccttcagcttctggccactgactgtttacttccccatcagcatgcacattgcgcaggagaagatcaccaggggagggaggtggtatctcctgcaaggcctgagcatggtgtgcttgatgatctcggtggcagtgggcattggctctgtcactgacattgttgatagcctgaaggttgcaacccctttcaaaactgtcagctaaaagcagtgctgcagtatattgtagaacagtgacaaacagaaaacagctacgagttgtacaacaatgtaggattctggactctgattctgtgtctctgtgtatcaattttctcggatatccggccggttcctgaaagatttggaactctgaactttgctggatcagctatattgacacattaggttgttcctatctgattaaacaggtcggaacttggaacatagcagaaagaggttggaatatgtagtagtattggaataacctgtacaacggcctttgccttttagt

SEQ ID NO: 23798 - DNA, 976 bp, Oryza sativa
  ref <308>: DATABASE ACCESSION NUMBER: AK073885
  ref <309>: DATABASE ENTRY DATE: 2001-12-06
acacacacacaaactgagctggacacttgatcagtttagctctcttgctcctctagctgaccactctactatacacacacatatatacttttttcttggtgtattagtaagcacacctcatcgacatcaatggccaccgtagaggttgagaccccgaccaccgtgctggccgaggaggcgccagtggaggcgacgccggcggccgccgccgccgaggtggaggcgccgaaggaggagacgccggcggcgccggccgaggctgtggccgaggaggcggcgcccgccgaggccgaggtggcggagaccaaggaggcggagccagctgcggccgagccggcggcggaggaggtgaaggaggccgagcccgagccggccgagccggaggccgagcctgccaaggaggaggtggcgccagagcccgccgccgccgccgaggcggaggccaaggaggccgagccggcggcgcaggtggccgaggaggtgaaggaggaggaggcggcgccggcgccggccgccgaggaggtgaaggtggaggaggcggcgccggtcgcggagccggaggccgagaaggccagcgagtgagtgcatgccggggaaggctggctcgccgtcgtcgtacaccgtggagtacatgcatggcccgcgcgcgccgccgccgccggcgactcgccggagttgtacgtacgtgtgcgtgtagcgagtgatgagttgagtgagctggagtggtagtactcgactccgtaggtgtgtgtgggtacgcgtgacgtggggctaaataaaagagtttgtcatcgagggcggtggggcccagcgtcagtgacgcggtgcccctctctggcccccacatgcctccgtcgtcgcaggcgttgtttgtcggtcttttgtgctttttttttttcgtgtttgattggttttcatcgtgtaatgggtgcgtttctgagagtacattgtctgtctctatgtgtgtgcgatctct

SEQ ID NO: 23799 - DNA, 1895 bp, Oryza sativa
  ref <308>: DATABASE ACCESSION NUMBER: AK073886
  ref <309>: DATABASE ENTRY DATE: 2001-12-06
gaccccgcttcctcctcccaacccctccccgacgccaccatgcgccccttccaccctccccgccccaacgccggccaaccccaccgcccgcgccccggcgaccccgccccgcctcccctccccatgcacccgggcttcaaccctccgcccgtccccaacctcgccgccgccaaccccatggccgccgcggcggcggccaaccctttcctcgcgatgcagctcttcggccaggcgcagcagctccagagcctcggcttcctcgccgccgccgcgctccagcagcaccatcaccagccgcagccgcaggcccccttcttccccgggggaggtttcccgccgaaccccaaccagttcggggccttccctgtccagcacgccgggttcaacggcggcggggcgtttcgacctggtggcgtgggcgtgggcgtggccggcccccgtactccccgcccgatgatgggcgcccctggtaatggttacaacagcggtggcggcagcggccatggtaccggagctggtgcgccgagacccatgctgaatggtggggggaacgatcggaatagcagtgctgggaagggcggtgaggtaaaccacactaagatcaagccagatggcatccctcgttttacctctgaaaatggtgagaggaaaaatacaacagatcagaaagcccgattcaactctggaagagattgtagggatagcaggcaatttggcccatctggtggaaggggaaggggaaggggaaggtctttcaatcaaggtcgtggaggaggaaacaacaactggagagatgcaaaatccaacttcagaagcagtgacagtccaagtccagcatcaggacaacgccgcaatgacagtccagcatctggaggacaccggaagcggcctcgtataatttatgatgcaaacgaagttaaacagtggcttgaagcacgcaagaagaactatcctacaagtgtcaacataaataagaagttgtctgagagtcgaccagatggtgagaagaaggatgaagaggcccaaatgcgccgtcaggaactcaaggaagtattagaaaaacagaaagaattgggttttgaactccctgaactaccacctggctatctatctgaacatgaggatcaaggcaatggtaggagaagtaactggaaaacacaacgcagggattgtcgttttggaaaccgtgctgataacaaaagatcaaggtatgaccgcaatgattttcagtctaagagacccaaggtacggaaccaaactcattgtgatgatggggcagtgctcaagagcagggagccaaccctcttgcagaaacttcttagttcggatgtcaagagggacaggcataggcttctccacacgttcaaattcatggtccttaacaatttcttcagtgattatcctgataagcccttggagtttcctagtgttaaagtaaaccagatcgaacttgaaagcaacattgctgaagaggacctagatgacttgatgaacagcgagacggcaaaggacagcatccttgatttgaaggaaaatggtgatcagaaagactcgagctcaattgatggagaatcagacctcgatgacgacaatgatgatgaagatgaagaagatgatgatgatggcaatggcagtgctgagagcagcgacaaggatgagaacgaggacgtcgatgcagggcagatgtaatacgccgtttttttaaaacatgatggaagtaaacgactccagacgtctacacccaaaggtatactcaaccaaaatgtaatgcacctgaagtcagaggtgcaagtatccagcagggcacaggccaactgtgtttttggtgtatagttggcgttcacaaatgatatttatgtagctgcctttgaaattttgttatcagttgcatttgc

SEQ ID NO: 23800 - DNA, 1146 bp, Oryza sativa
  ref <308>: DATABASE ACCESSION NUMBER: AK073887
  ref <309>: DATABASE ENTRY DATE: 2001-12-06
gtttctcttcttctctcttcactcgtgttgaaattgaaataaatcgcggtcaagataaaaaaaaaagaaaaaaaaagaagaaaaaaatcgcggtctcctcctcatcgagccgcgcggctggatcgaggattcgagcaggttgatttcagagttgagtgccactgattcagctccaaagttagcatgagtactgtcagcggcactcggcgtgccccaaggaggcaatcacaagatggtcctggtgataaagtcgttgtgaacctggacgcgatctcctccccagtggttggaagccgtcgcgcggtgccgacctccactggtgcgcgcgcctcccccattgatgtggaagctctggatgatgaagtgcagacattgtccgcttcgcaagtgcctcctccgagaaggaaccggagaactaggaggcagcctgtggcagtagttgatctggaagtagatgctagccgggaagggaacaaacgtcaaagggttgcacctgttatacactgcctctctccagaaaggggagaagggtccagcttgaagactagcaatgagcctcctaaggcaaaggaaccggtttttaactgtccggtgtgttggaacaagttggaggagccctccacaacaatttgcggccatatcttctgcacgacatgcatcaagcaagccatccagattcagaagaaatgccctacttgcagaaagagtctgagggcgaacaatttccaccgtatttaccttccaaactctgatagttaaggctcattggatgtaccaaaggaacttctggcagcagcagcagcatcctccaatctaatatattcagaggaacaggagttctcccataacgtgtaccattttgctgtggaattgtgtcacggcaaaatgaccacctagacccgcatgttcatccaaggctactgttgtttgtatgtagatgcatcaccaggagctcatcagctgcaggtgacaactctggtttaggctaccgaatggcctctctgcctccaaaggatacacaacaaaactaactatagtccccattggttagatttatctagtttgtgtactgttgtatttaccatgcgtttggccatgtaccttaccttctctccatagttgttgacgtagccttgaatcagcttg

SEQ ID NO: 23801 - DNA, 1156 bp, Oryza sativa
  ref <308>: DATABASE ACCESSION NUMBER: AK073888
  ref <309>: DATABASE ENTRY DATE: 2001-12-06
gacatctcctatagctcatcacatctctacatacaagtgaccagtgagagtaatttggcgccatccatggcggcattaagccagctggtactagttacagcctttttggccgctgcattgctcccactgggcatggcggcgacgacgtatcccatcggcagcttctgctcggagtccgggatgaactacggcgatctcaacagcagcgaggccgtcgtcaggcggcgcagcgtcaacttcgtcgtctccgacctcgtcgccaaggcgcgcaccggcggcggattcgccacctccagagccggcagggggtacgacgccttctacggcctcgcgcagtgccgcggcgacgtctccggcggcgactgcgacgcctgcctcgctcaagccgccaagcagattgtctccaactgcaactacacatcagactccagaatatggtacgaatactgcttcatgcggtactacaactacgacttcatcggggaagtggatacgagggaggatgcaagcgtgaccatgataaattggcagaacatggacaaccccaaggcattccagaaggcagcggggaaagctatgggaaaggcgacagcacaagctgttgcagtgggtaggagtgggctaggcagggcgaaggagcagtacacgccgtttgtgagtgtttacgcgttagcacagtgcacgcgagacctagcgccgccagcgtgcgcacggtgcctatcggagatagtgtccaagtttgacaaaacttgcaacagcgctcaaggatgccagattgattacagcagctgttgggcgcgctacgagatctaccccttctacttcccactcgaggcaggcagtcgtgccactatcgacatgtccaagtacaccaaggtcaccatgcactaaataaatctagcatatacataggctatgcgtacaatgcgataatgcatacatacatatatacgtcgtaccgtgtagcagtatatgcagatgtgagatcaatcccaataatagtatttatgtttatgtttaatttcaggaatatgtatgcaacgaataaatcatatgtaaaaggttatatatgtataaagttgtatcacccttatttatcatgctagctgcagtttgtttggaataaattaataaagatgtgtattgggcatgttgt

SEQ ID NO: 23802 - DNA, 1790 bp, Oryza sativa
  ref <308>: DATABASE ACCESSION NUMBER: AK073889
  ref <309>: DATABASE ENTRY DATE: 2001-12-06
gctctctcctctcttcgaggagtctccctctcctctcctctccttctagagagagagagagaggcgcagccgccgccgccgctcgcaaagcgccacgtcccccgatcgagccggctagggttccgccaccgccgccgcagccatggtgggctgttccagagggggcgggggcctccccgcctggatgaccgccgccgccgcccgcgtcgatctctccagcgccggcggaggcggcggcatacccggctcgggggcctcctcctcctcctcctcctcctcacagcccggatactcggggccgcatcagcaggctggggttgcgggggcggccgccgaccaggagctcgggatggccgagcgcgcgctctccgccgccggcgccgcgttcgtctccgccatcatcgtcaaccctctcgacgtcgccaagacgagattgcaggcgcaggcggcgggggtgccctactaccagccgtcgcagatggcgtcgctcggcccggacgcgatattatctgatttcagatgttcgccgtcatgcacacgtggtgtcattttgggaagtgagcctatttgcccacctgactgctttcagtacaagggaacacttgatgtattcttgaaagttgttagacaggaaggatttggtagattatggagaggtacaaatgcaggcttggcgttagcagtaccaactgttggaatatatttgccttgctatgacctatttcgcaactggattgaagattttacacaaagtaatgctcctggtttgacaccatatgccccattagtagcaggatcagtcgcacgttctttggcttgcattgcttgttccccaattgagttggcaaggacacggatgcaggcatataaagaatttcgtcctggagtaaagcctcctggaatgtggaaaacattgcttggcgttgtttcaccacttgcaagctcaactcagaatgcacaaaattatcgtgctctttggacgggtgtgggtgcacaacttgctcgggatgttcctttctctgctatatgctggtcaacactggagccgattcgaagaaagctgcttggtatcgtcggagaagaaggtgatgcagctagtgtgctgggtgcaaactttgcagctggctttgtagcaggtagtcttgctgctggtgctacatgccctctagatgttgctaagacaaggagacaaatagagaaggatacgcaaaaggcaatgagaatgaccacaaggcaaacattagctgatatttggagctctggaggtatgaaaggcttgttcaccggtgttggtccacgtgtagcacgagctggcccatcagttggaatcgtcatttctttctacgaggttgtgaagtatgctcttcatcaaaggcacatatcatgaccaagatttgtgcaaaaggtagaaagatgtctgcaattttgtaagaacacggcgtagcctggtctcccaagtttgtgctggtcagttactaggaactttggtgggacagggctaggtgtaacttagaagatcaaagtgctcaacagtcgacaagcctttcatggatcagcccagtatggcctgatgctctctttgaagatttaagtttttgccatggagtgatctccagttttgttagggatggaccatgcataatctaatctttccttttgtaccagaagctggaagtgcttcgtttaactttgcaggaggacctgtagactgtagtggaagatgtagcactgacactgataagttaataataataaccttggatatggtatccccgaaccacaggagaagc

SEQ ID NO: 23803 - DNA, 2893 bp, Oryza sativa
  ref <308>: DATABASE ACCESSION NUMBER: AK073890
  ref <309>: DATABASE ENTRY DATE: 2001-12-06
ggggagctctccgccaccccgcgcggcggcgagatcgaggcgccgccgccgccgtatggcctcggctgatcccttcctagccgcatcgtccccggcgcacctcctcccccgaaccctcggccccgccgcgccgcccgggaccgccgcgtccccctccgcggcccgcggggcgctgctcgacggcatctcccgaccactgaaagggtccaaggagctagttgagcaggctagaatggcgatgaaggctgtcggggacatagggaagctctatggcggcgatggagcgggggtggctgccgccgctgcggatggcaagaacaaccagctggggagaaggcctgcgccggaccgcaagcgatttcggctcaagaccaagccccccgcgaacaaaccggtgcaaaatgtggactacacagagttactgaacattgaagatcctgatgaatactttttgaccctggaaaagctcgaaagagctgataaggagattaaaaggttaaggggtgaggttccaactgaaggaacatataataaccgaggcattgaaccacctaagctacgacctgggctgttgaggagaaaatcagtccattcttacaagtttagcgccagctctgatgccccagatgccattgaagcacctgcttcccaaacagaaactgtgacagaatcacagactacccagatgatgtgcatggctcagctcatgaaatgacaacagagcctgtttcttcaagatctagccaagatgctataccagatatctcagcgagagaagattcatttgtttggaaggataacagtttcaccttgaattacttactctccgcattcaaagatctggatgaagacgaagaagaaaatttactccgaaagactttacagattaaagaaataagcataggaaaagtttgtctccctgacttcaatgttccaggtgacacgcctgcaagcaacactactgagcagaaaaatcccatgagtgatcatgcattagaaagaactgcacctggaagcaaccttgctcgaatttcacaattggagaaacgcatttttgttggagatgccctggaagataaacatgcagatctttcaaaagatgatgaatctgatgggtctccggaaagtctgctgtgtaaacaatcacctgtgcgacgttcatctgatgcagtgggtttgatgatcaatgagggctctactgcaatggagaccccaagtcctagcatcaaatctccagagcatgtgcttgaatctgaatcgaaccctccagatggtgtaacaacagatgaacagccaacagaaaattcaccaattggtgtggacagagatagtgaacttgtcaaagagaagggcacatcttccaggcatagtgtttcgttagaggaagatgttatgccaatagattgcacggtttctcctcccgatcatttggaaggtggctcgactgaagtgttgacgaacattacaagtagaaatgtatctccattgcatcatggagatggcaattctgaacatcaggaaatagttggaggtgatgtggcccaagataatccgatccatacactggaaacacccccagaagatactccacagaatcaatctgaaatacatcgtggaagcattgagaaactggcagttgataaaagcaacgcactctccccaagtcaagggaagcaacatagaggcaaaaataagaagcagccatcgaagagaggaaaaagagagacagataatccgatccatacatcagaaacacccccaatggatactaatccacagaatcaatctgaaatacatcgtggaagcattgagaaactggcagttgataaaagcaatgcactctccccaagtaaaggcaaggaacaaagaggcaaaaataagaagcagccatcgaagagaggaaaaagaaagacagacaacctgatccatacaccggaaatacccccagaagatacagacaacacagtacatacaccggaaattcctccagaagatacttatccacagaatcaatctgaaatacatcgtggaaacactgagaaactggcagttgatataaacaatgcactctccccaagtaaaggcaaggaacaaagaggaaacaataagaagcagccatcaaagcgacaaaaaagagcagcaggtgaggcaggtgatttggaaacacacgcaccaaactttgaaccagagattcaacctcatgtgcaggacacagatgttgagcaacagccagcttgtacaagccagtcaccatcaccgagtaatggtacgagtaaaaatgaagttcgaaagagaaataagaagcaagatttgaacagaagaaaaagcttggcagatgcgggtcttacttggcaagcgggtgttagacgaagcacacgaatacggtcaaaacctttgcagcattggcttggtgaaagatttatatatgggcgtatacatggaacaatggccacagtcatcggtgttaaatcattctctcctagtcaggaaggcaaaggcccattgagggtgaaatcctttgttcctgaacagttctcagatttgttagccgaatctgccaagtactgaggtcctggcccgggaaagtccctatcttcctttctttggacaagttgcattcttcgacatgcatggctcgcgcaacctgtgatctgttccgtatctatgtgttacttttgctgttaatttttcgtcatttgaggtgcttcctcctatattgtagagctaactctgtgtagaagtgtttgtatctgtggagttgcagtgtaatgcatacatgctatgaacttgcatacatgatttattttttttaaaaggaagctgctcggagtcggggcccgggactgcccattttcatttgtagctgttgtgtgttttcaaaaggtaatttcgc

SEQ ID NO: 23804 - DNA, 3039 bp, Oryza sativa
  ref <308>: DATABASE ACCESSION NUMBER: AK073891
  ref <309>: DATABASE ENTRY DATE: 2001-12-06
ggcggggccggttccggtggaggtgaggccttttggccgccggatctggcagccacgacctccccgccggcggatccagccacccgaaggcgtgggctggtttagcacgaggtttggagtgtgagccgcaactggagacaatggagttgaaggaggcggcgttgctaccaacgccgacgttctttttggcgggtgagagcagtaggagtacttcgacggcgtcgcctcacgcagcggctatggaggagtcgccggagggagagccagagtggaggcgatggagctggaggcggcggcggtggcgttctttccagcggcgggcggcagtagcagcagccagcggcgagctccatggggaaggactttgctcctccacccccattttcttgctctccctctctctaatccagatccagagccggtggggaagttggatgtgaaagatccaggatctccggatctgttgagcttggtggcggcagtgacaacggcaacgtctcagacacgccatccttcccgagcatgcaccggcgatgtgcaggagactgaggtcaaagcggatcttccccggctccatttgaccttgaggggtagcaaccggcaatagtagtgccaccaggaggggtagcaagtcgctatcaacacttttagctgattcatatatcatcactaagcctagcaagcaatcttagaagaaactacggcgctaaagtgatgccctcttttatcaggacaggtaaaagaagaaaggtttttttttccagtgctcattgttaatttgattgttagatctgatgtgctttaccattttgcacatcttctctttctgatgtgatttgagttgaagtattaattgtttaggattttcatcctaacgaagtaattcagtatatgagttgttactgaaagaactttgcgtttcatatttcagcttatagatctgcaaatctgtgggggatctgttttggcagcgtaatagtgacatgggggacactttgtgaatagtgctgatggcgatgtaaaagtccaattttttttcctgaagattgctcaatttacgacttactgtttaaaaattacaaacaagaaattttgttttgtataagacatatatgtattataaatttcaggcatataaatttagttctctacaatagatagaaactcaaaacacattttgattcctcatttaatttttgtctgtaatatatatttttctggtgaataaactaaattaattactattttcgtttcatttaagtgtcctctgacaagcattaagtaatgtctgctttcatttgctgcagatcctctaaagttgcttgaagtgtataattaacaatgtggaacaactcacgaaggccatgcctaattctcattgtttaagtcaggtaacaggctcagcaaattcaaaggtgcatttcaaatggactggtatttatttatagaactctccaccttaattctctacagaccataactaattttattgtttgttgtcattttttttttgttatatctacacagaaccttggtgctccatgttcaatttctgaaaatataaacacctatgattaggaatggcacagctgacaaagtggccagttaacgcttctggaacaagaactatgcagcacaacatataaagccttagagcaaaaacatcactactataaataagcactgttatttctaccacctctgctgctacctgctatctaagatattaatggaactgccaccacttgcatctgcatggaacctaatatacttatgctgcatattttgctggatgctttggctcagatgcattattgcactgcaataaaccttgaaccattccagcgctaaattccattgtgcactttgaatgctcccagtcataggttctttctttataccatactaaaaacagaatatgcttatgagaactcgcattaatttttctcttaggatagctggcttcaaagtttatatgcttttttccccataacagcaagcttagatgcatttcatcctttcttgtgcagttccagtgtatttaaatgtatcactgggtttaattatttgtatagaattcaaatgtgacttaatatttgcataagttcagtctccatcaaagtgattttgctctaagccacaaaaatggagaacttctccttcacttgaatttctctgttccaaactggaatacttagtttaattgttaacttttgtctaataaatatcttgtccttttttgttagatctatatcttagattacaccgtttaagatctaattcatgtgcctcattttttggtttcaaattgctcaaaatatagtggatattaacagtactgcatttgagagcctcatttttggttgccttcacctgggtggatgctgattgcagcttgtggtgaatccaatgaaattgcactgggagtggactgctactggttactcaaaaattcttcctggccttggttttataccttatatcccctcttaataaaatgatagtgattagtaaatgcaaataggattgaccactcttttttttttcatttttaattaacaaccgttgatgtcattcgtagtgtccattcttgggtggttgtgttttattttatatcggtaaatgattacaggaaaacacatatattgataagatatatgccatttgctgattccattttattgtacagcttgggaacgagttggccgaatggaccttttgattgcttcctgcaaatgatgatggtttcacagagttgctccctctcccagcctccaaccatcttctcttatttctctatgaccatcgccttcaccactgtcaggttcataccaatccttgccctaaagtgcaattgcatttgtctcccgtcggtccctacgattaataaatatatttggtccttgtgattcaaggcttcctaatttgatttttcaaggaaatcattaacattaggtggttagtactctccaacttaactctctaatgtgtcatggacagtctggatatagaaaattacactttggatgttctttgttc

SEQ ID NO: 23805 - DNA, 1599 bp, Oryza sativa
  ref <308>: DATABASE ACCESSION NUMBER: AK073892
  ref <309>: DATABASE ENTRY DATE: 2001-12-06
gagtactacttgtttccattaccaaaattctgcggcaacttgtttacagctgagtatcagatattcagagtatagggagtacttcttgtcccgaaggcagctgatgagaaggaaaacagagatggtgcggagcacctgctgcgtggtgctgctcttgctcctcagcgttgctgctcgatcggcttcggccatcatggacggcctgctgccgaatggcaatttcgaggaggcgccggacaagtcgcagctgaacggcacgagggtgatcgggcgctacgcgataccgcagtgggagatctccgggttcgtggagtacatcgggtcgggccagatgcagggtgacatgctcctgccggtgccggagggcgcgtacgccgtgcggctgggcaacgaggcctccatccagcagcggctcaccctgacgcggggaatgcactactccgtcaccttcagcgcggcgcgcacctgcgcccagtccgagctcctcaacatcacggtcaccccggagatcggcgaggtccccatccagaccgtgtacaccagcagcggctgggactcctactcctgggcgttcaaggcgagacgcagcgacgtgtcgctcatcgttcacaaccctggcgtcaccgatgacgcggcctgcggccccctcatcgactcgttcgccatcaagactctgcaatctcctccaagcaccaaagataacttgctgaagaatgggggcttcgaggaaggcccgtacatcttccccaacacgtcgtggggcgtgcttgtgccgccgatggacgaggacgactactcgccactgtcgccatggacgatcatgggatacaccaagtccgtcaagtacgtggacgcggcgcactacgccgttccaggcggcgcacgcgcggtggagctggtggccggcatggaggcggcgctggtgcaggaggtgtgcaccgtgcccgggcggtcgtaccggctggagttctccgtcggggacgccggcgacgggtgcgtggggtccatgtccgtgcaggcgtacgtgtcgcacggcagcgtgaaggtgccgtacgagtcgcagggcaggggtgggtacaagcgcggggtgctcgagttcacggcgacggacaagcggacgcgggtggtgttcgtcagcatggcctacaccatgaagcccgacggcacgctctgtgggcccgtcgtcgacgacgcgtcggtcgtcggcgtccacagccatcgccggcttcttctgtaacataggctaacgtcaacgtggcattcattttgtactgcgcctctccggttcgtcggaaattatgtatagttcgatgatacacatatcattgaattgagtttcctgcaccggattttctcagtaggaagacgaacggatttgagattcagatgtagtccttcgcctgtcgagggttaactcagacatctgagcaccagaaaatgttttcgcctgtgctagatttcattacaaattagaagctggatgaatgcattagttttagtagagtgctactgaaaatacactatgttacaccaagatgcattgttttaacattgtactgctatactccatttcagtagtagaaaaaatattgtacttct

SEQ ID NO: 23806 - DNA, 4114 bp, Oryza sativa
  ref <308>: DATABASE ACCESSION NUMBER: AK073893
  ref <309>: DATABASE ENTRY DATE: 2001-12-06
ggttttcagcagttgctcccttcccccttgtacctcacaacagacacattgagcgagcgagcgagagagcaacaatggcagaccttgtgcttgggttggccaaaacgacggtggaggggacggtaaccatggccaggtcggccatggaggaagaggagaagctgcacaagaccgtgcagcgcgatctgttggttatctcggacgagtttgagatgatgcactccttccttaatgatgccaagggccgcgtcacggacaacgtgacgaggaccttggtgaggcaggtccgcaacacggccctagacgtggaggattgcatcgagaccattgtttacctcgacagcaagccgcactggtggcgccgcatgattctgccttggtgcatgccgtctgcggcaccagggaaggacctggacgctgccgttgctaatatagagcagctcaaggctagggtcgaggccatgggtcaccggaacttgcgttacaaccgtattggtgactccggtcataagcctgaggagcaggcgcatcaacaagctgttgccaatgcaatggcaccgacagatgcagcaaagcagagccgtcaagtggatcttgtcatgttgatcaacaggaaggggggccaagcacgccatatgctaggcgggggcggcggcgacgaggacgatgatgatgacgacgacaacaacaacaacgaggacgatgatgataatggtgattgttatcatggttgttgtgaagagcagttgaaggtggagaaagaagtactccaagtcatctcagtgtggggaacaggaagcgatctggagatgatgtccatcaagaaggcctacgacgacacagaaaccatgaaaagtttcaactgccgagcctgggtgaaaatggtgcatcctttccatcccattgagttcatccggagcttgctggctcagttccacaaaaatgtttgtccagaacaagacaacactgtaaaaatcctggacttgatggtggcgacagacgacgtactcattgaggagttcaagcagcaattaagtcagaagttcctagtggtcttggaggacgttaccaccatggttgactgggaggccgtaaggggctacctacctgacaagaaaaatggcagctgcatcgtcgtgcacacgcgacaccatggaattgcatgctcctgcgtcgggcatccataccgagtatcggagctggaaaagttctcggccgattattcagtccgtgtcgttttcaaggaggatgcagccggaaaagtggagggtaccgtgaacgaggaaactgcacatgaacgggagaaaagtggtccatcatgttttggccgtgatacagatctaagctggttgcattcgctcacgcgtctaggcggtgtggtctcagtgtgggggatgtctggtgttggcaaatcatttctcatccgccaattcttcaataattacatgcgccaatcctcaaaaaatacagtgactagaaatccttattatgacaagaagaagtttggttgggtggatgtaccccgtccccgtccattcgatttaagggacttatcgaagagcttgcattcggaattgaatcctgctttcaaagacgaggtgatgtccacgatcaaagatccgattcaacagtgccgtgaatatctgcagagagaagaaaactggccctacctcattgttatcgacggtttgcaatccaaagaagaatgggactccataagacgtaacatggatttcaaatttaataccagttccggcaaatcaaacaggtctggggaaaaagtgggcaacgttgtcataataattacaaatgaagagagtgttgccaattactgtgcaacaaagaacaataacgtgtggaacgtcaaaggtctagaagttaccggagccattaaactcttcgatcaggtagcagctaatcagcggcagcgcttgtggccctgggactgggagtcggaggagaataagatgttggaaataaagcatcggaatgatgaaacaaggcatatcttattgcagaaatgcggtgggcttcccaaggttatttgtgctgtagctgagtcattgagcatggttggcgacataaaagaagaggataaccttgtgtcgaagttagcggcaacacgaagtctagatgacgtgttttcctggttgctttcctactttcgttcttgtccggattccctgaagccatgtatcttgtacctgtcaatcttccctgtgaaccacaccatccggcggaggcgtttggtgaggcggtggatagcggagggatactttagagacaacaaagaaagcaccgcagaggagaatggggaggggtccttttccaagctcatcgatctaagcatgatccaggcgccaagaacaagagttgatggcaggaggaggatgcccttgtgccaagtcaatggtttcgtccgtgaatacatcgtctcacagttagtggaagagaatcttgtctttgaactggagggccattgcagaaagaacatacagcgcacaggacggcaccttgccatagacaatagttgggacagagacagaaatgtgtttgagagcatcgacctttcattgctacggtctttgactgtgtttggtaagtgggaaacattcatcatctctgacaacatgaagttgctccgggtgttggatctggaggacgtgtcttcaggtgttacaaatgttgatgtcgagaagatggtgaagctgctgccccgcctcaagttcctctccctgagaaggtgcaaacaaatcactcgcctgccggattccttgggagatctaaagcagctccaaactctggatatcaggcatacatctgtaatcaagctaccaaagagcatcatcaagctagagaagctgcagtacgttcgtgctggtaccgcaaagcatcagcaagctagtgaagcagcagagaacccttctatggcagcagcacctgcgatgatgagcagaccatgtattgctactccaggatcccgcttctcaaagttgggcttgggcttacactgcaggcatggctctcatagtggcgtcaaggtacctagagggattgggaagctttccagcttgcacacgctgggtgttgttaacatccaagcgtgcggcgaggatggcattctggaggatctcaagaaccttacccaactgcacaagcttggagtgtctggcattaaccgtaagaacagcgagaagttattttcagtcatcttacgtctcgcccatctggaatccttgtcactgaaaatgcaggccaaccaagacaatgaagctgctggttgcatggccgacatctcgtcgcccctggagaagctacagagccttaaattgtacgggttagttgacaggttgccgtcatggatcatgcagatgtgcttgcagcttcctcgacttgagaaattggatttacagatgaaaacgttgcctcagcaggagctggattttattcttactctaaaatatctaagaagtctacgtcttcggttggcggagtttcaagatggtgaactccgttttggttggactattgctcagaggtctactagttggattatcgacatcctcgagattgtgtgcaactccagcttacaggctgtaaagtttggctccaaaatacacgttaaaatcctgaagattcgctgctatagtgtgtcttcatcactacaattctctggtctagagagcatggaaactctcaaggaagtctggcttagcggatcttacgaactaggcttcaagcaacagttggaaacagagcttaaaggcaacgaaaacgaacctattctggagctggagaaaccatcatcgtcaacctaatgggtactgagcagctcctgattgtgtatgccgcttctatcggtccggccaggcgtgttttgtccgagacgtggtgggtgctgtccggccgtttccccccttcttttggtcgtctgctgctcttttccaacttacagtcataagtatgtgtactcgtgtctgtttatttggacaactagcatggtggttcgtgcagattgcgtaggtagcatcgttatattttctttcttatataatagttgaaatatttttatatttcattattgaaatataataaaaatagcaacacaattttg

SEQ ID NO: 23807 - DNA, 3294 bp, Oryza sativa
  ref <308>: DATABASE ACCESSION NUMBER: AK073894
  ref <309>: DATABASE ENTRY DATE: 2001-12-06
tatacgcgtttacccccagcgagctgaggcgcgccatctccatggtccatgctgctacggtggctagctagcttgaccgtttgcgtgcatgcatgcttgaattgttgaataatgcatctgagctaagccgtttctagcttgctgagaagttgggaggaaaatatatggacgcgagcgatcgttttcttgggtatctggaactggaatgattttcattctgcagccattgctcacttcgcaagtagtagtagtagagtagctgagctttttagggtcgttgtccatggaagctggagcaagattagccttcgtaatgccgctcgtcgtcgtcctcttgctgatgatcttctcgttgggcgttcggggagtggatgtggtcgtcgatggaggaggaggaggtgcggcggctgctcggcggaggagggtggaggtgggggtgatcctggacaggaggacgtggctggggaacatcagctgggcgtgcatggagctcgccgtggaggatttctacgccgacgaggagcgcgccagctacaccaccgcgctcaggctccacctccgggacacccgcctcgacgccgtcgacgccgcctccgcaggtgtcgatctactgaaaaatgtccatgtgcaagcaatcgttgggccacagacatcagcacaggccaaatttctcgcggagcttggggaaaaatcatcggttcctgttgtttcattctctgcaaatagcccatgtcgaacggccagccaaactccatacttcatcaggacggcatggaacgactcctcacaagcagaagctatcgcgtcacttgttcaaagattcaattggagggacgtcatccctgtcatcgaagatgatgactccaatacaagattcattcctgaccttgttgatgccctaaggaatgccgagatccgtgttacccacaggtgcaagatacacccgtcagctggagctgatgacataaagaaagtcgtcttaagcttaaaggaaaaatggacaagcgtatttgtcgtgcgcatgtcgtatcagctagctcttagttttttcaagcatgccaaggatgaagggatgatgggccagggctttgtctggattgcagcttatggcttaacagacatctttgatgtagttggttctcctgcatttgatgtgatgcaaggagttattgggatgaaaccttatgttaatgatactaaacaacttcaaaacttcaggcagagatggcgcaagatgtataagtctgaaaatccaggcaccacattgagtgagcccacattatctggtctctacgcatatgacactgtgtgggcattagcgttagcagcagagaaggctggatatgttaactcagactttcttctgtctgaaaaaaacaacgggtcgactgattttgacaggatcaatacttcaaatgctgctaagaagctccagagcacactcttgaatattgatttccaaggcatgagtgggaaatttcagtttcaagacatgcatttgctatcgatgacttatgagataataaatatagttggggaggagcaaagagtagttggtttttggacaccagaatttaacatttccaggggtctaaatacgaaagctgatgttaatgaaatcatatggccaggaggagaaacaactgtaccaagggggtggctctttccaatgaataaaacactcaaaataggcgtgcctgcaaaacctgggttttctggttttataaagaaagaaaaatataatttcacaggactctgcattgaggtattcgaggaagttcttaatggattaccctacaaaataccccatgactatgtggagtttggaaatggaaagggggaaagtaatggaacttacgatgaacttatctacaaagtttatcagaacgacttcgatgcagcagttggtgatataacaatcttggccaaccgatctttatatgtggacttcactcttccttatactgagtcaggagtgcgcatgctagttccagtccaggaccagcgacagaagactgcatggacgtttctgcagccattaacagctgacttatggttaggaactgcggccttctttgtcttaacaggttttgtagtttggtttattgagcacagaacaaatgaagatttcagaggaccaccagtcaatcaaattggatctgtcttctacttcgccttctccacacttgtttttgctcatcggcaaaagattgtgaacaatttatcaagagttttgttagttatttggcttttcgtggtgctgatattgcagcggagttatactgcaagcttgagctcaattctcacagtggaacaacttcagccaacagtcaccaatttagacgaagtcatcaggaaaggggccaacgttggctacctcaatgattctttcatgcctgagcttttgaaaaggttgaaaattgacgaatcaaagttgattgcccttgactctcctgatgaatacaacgaggctctatcaactggtagagttgctgtagttgtcgatgagataccataccttaaggtgtttctttcaaagtattgccacaactatactatggttggcccaacttacaagttcgatggatttggttttgcattccctctaggctccccgctcactgctgagatttcaaggggaatattgaacttcacatcaagcaacagaatggcccaactggagagagaattgtacaacaatagaacatgccctgacaaagatgactcccaaacttcaagcagccttacactacgcagctttcttgggctgttcatcatcactggagcatcttcactgctggcactgttcctacatgttgtcataaccctctataatcatcggcatgatttgagcagcgccagcagtagtcagagttcatggtgtggatggtttgccatcctcctaaagatattccacgagggtgatagacctaatgctccacaattggatgagccagcagtgtcaaatgctaacactacagctgatactccatggagcacacctgatcatcacattatcgaaaatgttgattcaggcagtgatgtggagagcgtaagaaaagaagatagagaagattttgttcagggccctgacccaccatcttttgcatacatgcattcagagagggggcaataatggattagtttctccatctcttgcaaacttgaacaccatccttctgaaacagaagcactcaacaagatcaagaacgagtacataactgatcactgattcactgtaattattgattcatttgattgtcaatatatatctgctgcctgcagtttcatctg

SEQ ID NO: 23808 - DNA, 1202 bp, Oryza sativa
  ref <308>: DATABASE ACCESSION NUMBER: AK073895
  ref <309>: DATABASE ENTRY DATE: 2001-12-06
gagtttgcccaccgccgcctccgccttcgccgccgccatcgatcctcatccatcccgcgagcgagcagagtcgcagtagctcgtcctgctgcttcctccgccgccgccgacccccatccatcccgcgagcgagcagggtcgccgtcgctcgtcctgttgcttccgccgcatccatcctgtaggatcatgccactgcgagaggtcgctgaaccgcaacctgggaattgacctcccgacttggcaggtgttggctccactgccacctattgactcccccacggtgcccctgtcatgggcgacgaggccacgcaggtcagcgcctcaagcgcagtagcggtccatgctctgtgcttcgctgggatcgtggcagcccatcaattgtctggccgcggcatgctcgtctccaatcccgcctacgccctccgcctcctcgtggtcttcgaagcgcctcttgtcatcgcagtgttcagtttgctccgtcgaaatcccaagcgctgctcgtttcttaaggcagctgcgcgaggattgcttggcctccccattggtgcgttcctaaatgcatttggagcaattgttcttggtgcacccattggaatcaagtactgggcagcaacaacttattggtcacttctcatgtccttgttcacatttgttcctgcagcatgcgtatttggagcatccaaagtgaattggcaggctgtgctctctcattccatttattgcggatcaactgattcagtggactacatgatatctgcacctgctcatggagctgtaataggagcatggcttggtgcttggcctatgcctctcgactgggaaagaccttggcaggaatggccaatctctgttacttatggctcagtcgctgggcatttgattggaatggcaatatcactggccctagtagttactcataagagaagaggtcgtgccaaagctgactagctagcctatggatgacaagtgcccttgctttttcctggccatcagtgatttttcccgatagtgtacaagtattctttttttgggaccagagagctttcatattgaatataaggagtgatggcttacgataggatcatccaagttctacgttgttgactcgttcatctggaaccttttgcagctaaatccagatttatgtcatttagctttcatatattgaatataagcagtgatggcttacgataggatcgtcc

SEQ ID NO: 23809 - DNA, 1456 bp, Oryza sativa
  misc_feature (194)..(194): "n"=any one base of a, t, c, or g
  ref <308>: DATABASE ACCESSION NUMBER: AK073896
  ref <309>: DATABASE ENTRY DATE: 2001-12-06
gctccgcgatccgcctccgcctcgagcccaaacccacccaccaacccaacccaatcccatcgagaggaggggacgcggcggcggcggcggatcggcggcgggggaaggaaggggatgggcggcggaggcggggagtaggacggcgtcgtcggcgagcggcagcgcgaggaggacgaggaggaggaggaggcgangggcaccatgtctgcggtagtctgtggcaagaggtcctccgccatcttcgccgacgacctcctcccgccgtcccctccctctcctcactcccaccaccatccggccaagaggtcctgccgctcccctcaccgccgccgggaggcccacctccaccacctctcctccttgttcccgggcatggatccccagttgctcgaaggagctcttgatgcttctggagatgatttggattcagcaataaagagtttaaacaatctgcgcttggagtctacagaggctatcttatcagctactggttgcaaatctgaaaatgggctccccacagcagtttatccgtctgttgaaggtattgttaataatggtggtgtgagtacagctaatgaacacccagctgctgcagatagttgccagacaggtaataatggttctgaatgggttgagctatttgtcagagagatgacaaatgcatctgacatgggcgatgcgcgtgctcgcgcctcaagagctttagaagttttggagaagtcaatcgtggagcgtacaggagctgatgcagcacaaaacttgcaaaaggaaaatatgatgcttaaggagcaattgaccgtcgtgctgcgagagaacgctgtcctcaagcgagcggtcgccattcaacatgagcgccaaaaggagttcgacgagaggagccaggaggttcagagtttgaagcaacttgttgtgcagtaccaggagcaactgaggaccctagagataaacaactatgcgctgacgatgcatctgaagcaggctcagcagaacaactccatccccgggcacttcaatcctgacgtcttctaacttttgccgcaagacggtctgtccagaataataatctctgaagatgtcatgtgttgttggtgggaaatgaataataatctctgaagatgtcatgtgttgtgttgttggtgggaaattgcccactgcctctgcgataggagatcaaaattgtcgtgttattacaccgttgaatttaccatcaaacttgtttagactaaatcaccaggggggagagcttccccacctgaattttgtcattgcatagaggatgaaaagttcattacaacatatttagagtttgtagtggggaggagaaaatttctttccaaacggagactacatgtcggtcttcaatcttaagattctctgcccagagagctgcctcgcggatgcaacgttgcaggcaggatccaatcgagggggtttatttcttgaaaatgacatcatg

SEQ ID NO: 23810 - DNA, 3730 bp, Oryza sativa
  ref <308>: DATABASE ACCESSION NUMBER: AK073897
  ref <309>: DATABASE ENTRY DATE: 2001-12-06
gttaggtgtatcagttgtgtgccattctcgtctcttctccgcgacgcgttcgctttctctcccacccaaaacccccagagagggaagagaaacgcctccctcccctctcctcccccgacccaccctgcacctccttcctcgtcgacgccatggcagcaccggagtgaagcagccagccagccgcccggatttcaccatttggtcccgggtttcgcccggatctgggtctctcttcaacagtcttctccaatctggcggtgctatagctcgccgcgcccggttggggacaaggcccagtaggcgctagccaaacagtgttgagcgcctcctcccctcctcgcgcctcggcgcacggccggcgagaaggttttgaggggcggcgagcttcttcaatctgcctccatctcggtttgaatcgagtggtgtagcaaataacatcattttcggaggcaatggcggcatataagttgggtgtggaggttgcaagtgctcatgacctgatgcccaaggatgggcaaggttcagcaagtgcctgtgtcgagcttacgtttgatggccagcggttccgcacggctatcaaggacaaggatctgaacccagtgtggaatgagcgcttctacttcaacgtttcggatccgtctaatcttcctgagcttgcgcttgaagcgtacgtctacaacatcaacagatccattgatggttcaaggtccttccttggcaaggtcagaattgctggaacctcattcgtgccattccctgatgcggttgtcatgcattatccactggagaagcgtgggatgttctcacgtgtgaaaggggaactgggtctgaaagtatacattaccaatgacccatccatcaaagcttcaaaccctctcccagcaatggatcctgtttcaaacaatcctcccccaacgccagcggagcaaatagcaactgatataaccggtacaaatctcagcacaactcatgagcacagggctgaggtgaaaacattgcacaccatagctaaggaggtgcagcatcagcaccatgggcatggccatctaccagcttcctttcccgaccaaccttccaagtatgctgttgaccagatgaaaccagaacctcaacaacccaagattgtaagaatgtattcagcagcctctcagcaacccatggactatgcactcaaagagactagtccatttcttggtggcggacaggttgttggaggccgggttatacgtgccgagaagcatgccagtacatatgacctagtggagcgaatgcagtatctttttgtacgtgtggttaaggcacgggacttgcctgacatggatgtcactggaagcctagatccttatgttgaagtgagagttggcaactacaggggtataactaggcactttgagaagcagaagaatccagagtggaatgcggtctttgctttttccagagaccgtatgcaggcaactatccttgaagttgttgtcaaagacaaggatttgctaaaagatgactttgttggtctggtgcgatttgatctgaatgatgttccgatgcgtgtgccccctgacagtccattggccccagaatggtaccgcctcgttcataaaactggggataagtcaagaggcgagctgatgcttgcagtttggatcggcacccaagccgatgaggcatttcctgacgcatggcattcagatgctgcaacacttgaggatccatctgctgtaacacacatgaagtctaaagtttaccatgctccaagactctggtacctgcgagtcaatataattgaggcccaagatattgccataactgataagacacgctatccagatgtttttgtaagggcacaagtggggcatcagcacgggaggacaaaacctgttcaagctagaaatttcaacccattctggaatgaggatctaatgtttgtggctgctgaaccttttgaggatcaccttattctttcccttgaagatcgtgtagctcctaacaaagacgaggtgcttggccgtgtaattataccgttgacaatgattgatagaagagccgatgatcgtattgtccatgggaaatggttcaatcttgagaagccggtacttattgatgtggatcaattgaagaaggagaagttctctactcggcttcatcttcgtctctgccttgatggagggtaccatgttctagatgagtccactaactacagcagtgacctcagaccaacagccaagcaactctggaaaccgtccattggtttgcttgagcttggaatcctgggtgctcaagggattgttccaatgaaaacacgggatggaaaaggttcatcagacacttactgtgttgctaagtatggttcaaagtgggtacggacacgtaccatcgtgaacaacccgggccccaaattcaatgaacaatatacctgggaagtttatgatcctgcaacagtcctgactgtcggtgtttttgacaatggccagcttggagagaaaggtggtgagaagacgtccagttctaaagatgcgaaaatcggcaaggttcggattcgtctttccactcttgaaactggccgtgtctacactcactcatatcccctcctggttctacatccatcgggggtaaaaaagatgggtgaattgcacttagccatacgattttcctcaacttcattagtaaacatgatgtacctgtactctcgacctttgctaccaaagatgcactatgtacgcccaataccagtccttcaggttgacatgctgcgccatcaagctgtccagattgtgtctgcccgacttagccggatggaaccacctctgagaaaggaagttgttgagtacatgtcagatgttgattctcacttgtggagcatgagacgaagcaaagccaacttcttcaggctcatgtcagtcttctcaggcttgtttgcagttagcaagtggtttaatggtgtgtgttcatggaggaaccccattaccactgtgctggttcacatcctatttataatgttggtgtgctttccagagctcatactcccaacagtgttcttatacatgtttcttataggggtttggaactatcgttaccgaccttgctatcctccacacatgaacactaagatctctcatgcggaggctgtccacccagatgaacttgacgaagagttcgatacattcccaacaagcaggagtcctgatgttattaggatgaggtatgataggctgaggagtgttgctggaagaatacagactgtggtaggtgatatagcaactcaaggggagagggttcaagcactgcttagctggagggatcctcgggccacagcaatatttgtcctcttttgtctcatagcagcaatagtcctgtatgttacaccactccaagttcttgcagcattggcagggttctatgtcatgaggcacccgaggttcagatataggttgccttcaacgccagtgaatttcttcagacgactgccagcaagggccgacagcatgctataaaatagctgccatctggtggccttatcattgtgataaattggatggagtactccatgccgattactgtagtctggcttcgttttgttgttattgtaactgtgtgttcttagtacttgagagcctgtatatcgtattagcttctgaatgcagggaataatgtgtttaaggcttcttgtgaactatcagattttggagttgtactggtcattttaaatatctagttgcccaatatatagtacttt

SEQ ID NO: 23811 - DNA, 878 bp, Oryza sativa
  ref <308>: DATABASE ACCESSION NUMBER: AK073898
  ref <309>: DATABASE ENTRY DATE: 2001-12-06
gctctctctctctcctactgtaggccaccaccaccgcgaccgcacgagtcaacctcacggcagccaagcgtttggttggggggatcggagcggcggcggcggcgatgcagtcgctgcaggacaaggcgtcggagtggagcggcgtggcggcgggggatgcgttcgccatcgacgatgggaacgtcttcgaggcgctgggcggcaccacgcagccgttcgtcgacctctccaccaacttctacaccagggtttatgaggacgaggaggagtggttccggcagatcttcgcggggtcgaagaaggaggacgcgatccggaaccagtacgagttcttggtgcagcgcatgggcggcccgcagctcttctcccagaggagaggacatcctgccctgatagcacggcatcgaccattccctgttacccaccaggctgcagagcgatggctgcaccatatgcagcaagctgtggatactactgacagcatagacgctgccacaaaaaccaaaatgatgtattttttcaggcacactgcatacttccttgttgccggaaatgagatgacaaggcaaggccatggaacttcctgcaagtgcaaacatggagaaagcaaaccagcagaataacgatcgattcatgcctctggccagtaaggcatctggataataaacgattcgagcctttagcagcctatcctggtgttatagaaaaaaaaaaccatggacgatggaattcagaccatctattcattcacaaaaacagttgagctaactgttgtaggcttacagccactctcgaacacggagcaacccaaaattgatagaacctgcctctggaggaagttgcaaacttgcaatagttatatcatactctctatattg

SEQ ID NO: 23812 - DNA, 3611 bp, Oryza sativa
  ref <308>: DATABASE ACCESSION NUMBER: AK073899
  ref <309>: DATABASE ENTRY DATE: 2001-12-06
ggatatgaaaaacattgtacacaacaattcccaattgattcaaatctctcttcctgctatcttgttctgttctttcttcctcctcaagctgctctttcctccctccaattcctcaaatctccacgaactcgctgaagaattagtgtactcatgacaatttggtatcagagcatcgatcctggagaagccacgctatacatctcgccttcagctgcaggtcgaagcgatggagaagcagaatatcgactttggcaaggtcttaatggagattcaggagtcgcttgtctcgctgaatcgggcgcaaggcgagacgcaaccgccgtcaacaagctggaccaaggcgtgaccaactggagaccgcaagtagaagcggcagtgaaggagttgcgtgaggaggtgggtgatatccgccagcaaatggacctgctcggcaaatcgcagtccgcgccgccggcgacgtcttcccctcgagttccgttgacggacgaggaaaggaaggcgccgttgcttcctacgccaccagcttcgcgcgtggctgcggcgggggacagcggagacaagtgggccagtggccgccaacatccacatgaacaccggggaagggcaccaggtgtggttaccaccgtggtcccgacctcggtcaaggtatctgataagtttgatagagaccagcatgattcgctaattagacagatggatcaaattaaacagacgggttcggtttgggagtattatgaacgattcgatgaattgatgaatcaattgctagtttatgatcctggggtaaatatgtgttacttgacacatagatttattgatgggttgcgtcgggagattagaaatgctgttttacttcagagacccaagaatctcgagtctgctctggctgttgcttccttgcaggaggaagtgttggaatcatctgactccacaccggtgaaggagggcaagaagtttgagagttctgggcagcacaagactggtggaaattttaagggagcttttcctttaccattgcctcctggtcgtcatttgggggtaattcagagtgcaagagtggatgagaagaaggaaggggaaattaaaagattgtctgcatcttcagagaaagtgtcagctcttaaagcacagcgtcgggcacaaggattatgttacatatgtgctgagaaatggtctcccactcataagtgtgctaacactgtgcaattgcatgcagttcaggagctgttttctgttttgcatgaagcttgtgatgaggcagtttgcaatcctgagaattctgttttatcggacagtcaggtgttgatggcaatctctgtacatgcagttcaaggatctgaagctagtggatgcatgaggatgttgggtcagattcaaggcaaggacgtttttattttggtagattctggtagcactgcaagtttcattagtgctcgagtggcagaagggttatcggaactttctcagattgctactaatttgcaagtgaaggtggctgatggagctactttgcactgtcagtctgaaattccggcctgtgaatggagcactcaaggacagaaattttgcactactctcaagatattaccattgggaaattatgacatgatattaggaatggactggctaatgcagcacagcccaatgactgtgaattgggttactaaatctctcacaattgaaggcaggaatccagttgttactttgcagggaattttgtcaaacactgcacagtgcggacttattccttccaaatagttgaatgggttgaaacatagacaggcagtagcaaatcttgttcaactgtgttgtgttacagacctggaaccttcagaagaatttcctcttgcagtacaacaggtgctaaataaatttgcttcagtatttgaggaacctcagggtctgccacctgtgagatcgtttgatcacaccattcctttaatccctggagcaatgcctgtcaacgtgaggccttaccgttatactccatcccagaaagatgagattgagtctcaagtccaagaaatgctgtctaagggattgattcagcccagctcaagtccattctcttcacctgtgctgttggttaatttcttcctcctcaagctgctctttcctccctccaattcctcaaatatccacgaactcgctgaagaattagtatactcgtgacacgcagtcgagccattcgtcgccgcccgccagctgctcgctatcgtcacccagcgcagcttcggccctcaccgcccgccgccggccgaagggggaagaaccgatgagaaagggagagaaagaaagaaggaagagagggaggaggaagaagggatttatgtgggccccacatgtcagtgggcccacaatttcttttttgaatgacaaatgggccccgcatatatatttttaattctaatgccacttaagcgccatgtcaacgccacataggacgaagacctagtcaatactgccacgtagacgctatgtcagcgaaaccatcatccaaaaccgccgagggagtcaaattataccggttttaatagttgaggggtcaagatatccggtattatggtttagagtcatggattagattctggtcacttttaagggagtcaaagtgaacttattcctagtttttattagctgtatagctggccatctaaggtgaaattttttgcttggagattatcactgaattccatcccaactgagaaggtgcctaagcaacgaaatatgagtacaacttgtatatgtaaagtttgtggtgctgcagaggatacttgggatcatgcacttcttcattgtactatgtcaaaatgtgtgtgggctttgatggataatgatcttgcagaactaattgcaaccacgaatattaaagatcccaaggattggctcttttacatgcttgatgttttaaaacctggagacaggacgaagctacttgtatcatgttgggcaatttggcgagctagacggagagttttgcatgacgaattttatgaaagccctttaacaagaatgcattttattaaatcatatttagctgatatggatttgattaatattcctctatgcctacaggataagaagcacttgacttatcctaaagtaccagtatggatgccacctccagaagattgcgtaaagataaatgtggatgcagcaatatcacgatggggtaacaagggagctgttggggcagtgtgtcatactgtatctggtgaatttgtggcagccagtgctatggtctgggaagggctctctgactcggcaactttggaagcacttggatgcaatgaaggcttggcaatagctatgggctgtaatatgtcagaggtctgtatagcctcagactgccttgaggtcattaggagcatctcaaagaaaccaaggtgccaatatttagcagtcctaaatgatattgaggcaagaaggaagcattttgcaaaagtagagtttcgtcatgaaaatcaggcttgtaattttgatgctcacaacttagctaagtttgcttctactttacaggaggggtgttatctttggttttcaaatcctccttgtaatatgaataggaatgtaaatgtggacagtaataaataaattgtccgctctttccc

SEQ ID NO: 23813 - DNA, 1164 bp, Oryza sativa
  ref <308>: DATABASE ACCESSION NUMBER: AK073900
  ref <309>: DATABASE ENTRY DATE: 2001-12-06
gagggtgctgcatcgacgttttcaaatcatagggggtatttggacttaaaaaaaaatgaaaacgcgaatataccagccgaaagtaaagctgcggcggctggggtgaatggctccctcctctccccgccgcgacctcgacggcgaggggaccggcggcgggagctcggcggcgagggagaaggagcggccgaggtccttcgacgagaagacccggtcggcgtgctggcggaaggcggcggtggtgatgggccggcacccggagcggtggcggcaggacgccgccggcaacgtcgtgtgccgccgcttctggagctgccacggctgcctctgctacgagtacgaccacatcgtccccttctccaaaggaggggagtctactgttgacaattgccagattcttcagacaagggtgaatcggtcaaaatctgataaagcatggatagagcaggcagaaatgcagggattttcttgtgatatcaagttcactgataaagaacttgatgtgattgaaatggctgtctatggggatgtcatccgtcctggaaagcaatgtcgctgcaggacagtagctgagatgcttgggaaggtgaagtcaaagaatcagatggctgcttgcgagttgccacataatgatgcctcctagcataagtcatatcgttctgcacaactacaccagattcattatggtccgcacgggcagcaagcctgagatcactaccctgatttcatgctctattgtgataatgaacatatttgactttaggatctcttacattggttgtaacaccgttacaccaacatggtgtgctaggttagatcagttccgtgttgatttgtgcaattggactggctagttcggttcctttcaccctgggtagtttcaacttacatggtactatctatggttcattagctgggttggtttatctatagttgggtctctagagaattttaggacctaatagaaagagagatcgattttgtaattggtagccacttgccagtttgtgaaacaaaactgaagtggtatgtgagcagtaggaactgaacgagaaatgcattgccgaaatgtcgcagtaactgtagcctgcacgctgcagttaattgctctgtgacatttgccattcctatgttcctggaaaatcaaagaggcacacaagtttc

SEQ ID NO: 23814 - DNA, 3187 bp, Oryza sativa
  ref <308>: DATABASE ACCESSION NUMBER: AK073901
  ref <309>: DATABASE ENTRY DATE: 2001-12-06
ggttttcgatgcctttgcagaaatcgccttggtgcagtggagtggaggtgtatgaggtcgcgctcggccagtaggaatgagattggtctgggtatctagggtggacttgctgctgtgaagctgtgattgttctgttagggatttggggcacatggagtcgcggatggatcagtacgagatcatggagcaggttggccggggcgcctttggtgctgcaatccttgtgaatcataagattgagaggaagaagtatgtgttgaagaaaatccggcttgcgaggcagacagagcgttgccgcaagtctgctcaccaagagatggctctgattgctcggttgcaacacccttacattgttgaattcaaagaggcttgggttgagaagggttgctatgtctgcattgtcacgggctattgtgaagatggagatatggatgaattgatgaagaaattaaatggtacttacttcccagaggagaaattgctgaaatggtttgctcaactggtattagccgtggactatttgcattcgaactatgtcttgcatcgggacctgaagtgctccaacatatttctcaccaaagatcaagatatacgcctaggagactttgggcttgctaagaccttaaaggaagatgatttaacttcttcggttgttggaacaccgaattacatgtgtccagagcttctcacagatatcccttatggattcaagtcagacatctggtctcttgggtgctgtatgtatgagatggcagctcatcggcctgccttcaaggcttttgatatggctggattaataagtaagataaataggtcctccattggccccttgcctgcctgttactcttcttctatgaaaactcttatcaaaagcatgttgagaaaaagtcctgagcatcgacctactgcatctgagattctgaagaatccgtatctccaaccttatgttaatcaatgccgccctctttctgatgctccaactcccatacgcatgccagagaatccattatccacttcacggagtaatcagagatgcacgtctgagagccaaagcagtagcatttcttgtagtgatatcgacagtacacaatcaagtgacagaagcacatcagggggcgctcctagcactgacagcaagcttaacgatatcagaagcatccaagatgcagaccgagctgattcagacgaaaaatgtgtaacaccagaagatcttagaggcaacaagaacatttctggtgctgaactgaaaagacaagattcctcaaaaagtgtacatcagcatcacaggggtgagagtaagcagccaaaaataattgagaagataatgacaactcttagagaggagagtaggcttagagaaaacaattctcctgtaagttctagtggtgtaaagttgacttctgcagttagcaataagaatcaagcagagcaatcatcagagagctcaaggcctcacagtggtgtttcatacagttcaaagtttggtgacatttcatctaatggatggaccaatacaagcgatgaatgtgtagatccagtccaggtgccattgcaattgaaacaactgtcaccaactgttgagcattgtccaaagttaaaaaattccgggtcctcaactcctgaacctgccaaacagattgcagaaaatggttcctcagcttcaggaatgagtaaaaccaagtcgtcacctagttctagtagacggcctagtcctcagagacaaacagtagcaggaattccaatcgtgccattcactgtgtcaaaacgagctcatatcaaggcagagagtgagaaaacaccgccgcgacctgcccatagcccaaataattctctacataatctccctcctttgataccgatatctacaaatctgtcagaagagaacatcaagctgggtaattctcaggcaatgccagctcctctggaattcgtgactgcagcatccaaggaggacatcagcttttactcaaattctgtagttgattgtgttgaaaaggccgagccatctgaagtatttgaatctaattctccagcctacctgactccaccgtggacaggcccagtgcttgatgccaaaggagagaatggcctaatagccataccatgttcagaaatacacactggcacattgcagaagagtatggctagtaatgatgattcaagcctgagctctccgttggatacattttatcttagttttgaacaagagtttgtctgcaaggatgattcgcaatccagcaagcatgggcacagtgctgtcacactactaagtggtgaggacaaatttactgtccaagaacttcttgcatcaacaccagttatttctccttttgtttcaagcacaagtaacactctgccagaggataaaagttcttaccagtcattcaagaaacaatcagattcacattcgggccctccagttgatgttcctgcacagactattagactcaacagtttccttgttagtgatgagtggccaacatcagaaacagttcaaggggaagctcgggacacggctgccagcaagcttctgaatgtagtaagagaagattttgatgtaagaagcagttcatgctcaacaagcacgcaaccttctggacaaaccccagttagatccaaactcaacgtgcctgaaactaatcttgccagtaacatatccataccatccatatcagaagcagtgagattatctaccgccatggacgttaaaccgtacacgtccgaggccagcaatggagtcaaggaggaggcatctcctgccaaggaagctcttgatgttacgtcatttaggcagcgagctgaggctctagaaggtctcttggagctttctgcggacttgctggaaaacaacaggttggaggaactcgccattgttctacagcctttcgggaagaacaaggtctccccgcgagagaccgcaatttggttggccagaagtttcaaaggaatgatgaacgaagaaggtggccgcctgtcgatgtgagtatctgtaaccttaaaaggcctttttattgctttcccctttgcttttttgagtagctcaaagtgggcttgatttgctgacagcgtgttgtgtttgtgttgcccggttttgttttttgtttcttttgattcaaaccattctttttggcgcatgttgtaaatagccaagacttgtaaacactaataaaatttgccttcagttccg

SEQ ID NO: 23815 - DNA, 2429 bp, Oryza sativa
  ref <308>: DATABASE ACCESSION NUMBER: AK073902
  ref <309>: DATABASE ENTRY DATE: 2001-12-06
gatagacaccaaagccgtctctgagaagaagagagggagagagagagagagagagagagctcggtcggtggaggcgacgacgacgacgcgcgcactgcggccgccatggaggagagaatacctctgctctcgaaacgattcccggcggacggcaccgccggagtgggaggagggagggaggaggagggcggagataggtggtggagcgggctggcgcgggaggcaggaaaggtggggtccatggcgctgcccatggccgcgatgagcgtggcgcagaacgccgtgcaggtggcgtccaacatgatggtggggcacctccccggcgtcctcccgctctccgcctccgccatcgccacctccctcgccagcgtctccggcttcagcctcctcgttggaatggcaagtggattagaaactctctgcggtcaagcttatggggcaaaacagtatgacaagttaggagtgcaaacctacagagcaatagtcacactaacagtagtcacaattcccatctcacttctatgggtattcataggcaaactcttgaccctaataggtcaggaccccgtgatctcacatgaagctggaagatacatagtgtggttgattccaggactcttcgcatacgcggtctgccagcctctcacaaaatttctgcagtctcagagtctaatatttcccatgctctggtcctccattgcaactctgctcctgcacatccctctgtcttggctgttggtgttcaagaccagcatgggatttactggagctgctttagcaattagcatatcttactggttgaatacattcatgctcgctgcatacatcagattctcatgttcttgtaaggtgactcgctcgcctcctacaatcgaggcattcagaggagtcggtttgtttctgcgaatagcactaccatctgcactaatgttatgttttgaatggtggtcatttgagatccttgttctcctgtcaggacttctacccaacccagagcttgaaagttcagttctttccatatgcttgacgactacctctttgatgtatactataccatatggtcttggaggcgctgcaagcactcgagtagcaaatgagttaggcgctgggaatcctgaaggagctcgatcggctgttcaccttgtaatgtctattgctgggacagaggcagttcttgttactgggatgctgtttgcagcacagcgcatcttgggctatgcttacagcagtgatgaggaggttgtcacatatttcacctcaatggttccttttgtgtgcatctcagttgctgctgatagcctacaaggagttttatcaggttacatttcctaacatttgatttatctgttaattattcattcccttcaaaagaatggaaaaaatggagtattcagctatgcctgaagttttcgaaaatttgatctaactggccttgcctctctcttatttcattttttttatataactggttcttatagttttggggccattacatttacaccattcagtatctttagcctgttagcccaacggtaacttttaccccttagtttgattgcttaattcaatgtgtgcgctgttgtcaaatctctaccaagacctcaggtagcaagttaatttcagtcactccggtatcgtaaagacataccaggtaacttgccgcttcttgtttttcctttgttcaatgaaactaatgctattttgtgttgtggaggccgacattgttactcggggagttacctgtttgttccttcaaacatgtgctcttacgtgaacatggatatggtggtgtttacaatcaacacgcatctatcagcgatgtcgtcttaagtgtggactccacttcactaagtattgctcggggttgcggatggcagcacctgggagcctatgtaaacctcggttcattctacctggttggcattccggtagccctacttcttggctttggtttcaagatggaaggcaaagggctttggctgggcatcgcctgtggttccgtattacaattcttgcttctcgccgtcattgcattcttcagcaactggcaaaagatggccgagaaagcgagggagagaattttcggcgagacaccgtcagagaagcaacatttggtgcttgatgcaacgaattcggtctgattctgcatcctgatccgttgacgcgaactgaagcggatgatcggatcatgtggaggagactggctcctctggatgtgtagggaatctgctgaagaagtaaagcagtgtgcatagttgtactgttgcatttgttggatccgggagaatgtatcaagaactctatgtgaaatgtatgatggcgatatgtatgtacgagatcgaggttccgaatacttccagcctatagaagtatagataaattttccactcttcgtggacagaaagaataaaaggctaatcttctctcgg

SEQ ID NO: 23816 - DNA, 2300 bp, Oryza sativa
  ref <308>: DATABASE ACCESSION NUMBER: AK073903
  ref <309>: DATABASE ENTRY DATE: 2001-12-06
gctttccgccaaatacacaactactactaccccctctctctctctccgttctccttttctcctccacggcagttttatataaaattcgcagctttcaaaagcaaaccaaaacggcaaagtttgaactttgaactctcctcctccccgcaccgccgcatccctttctttcccccaccccttcccgctacgacaaaccatagcatatcctcgtctcaacactctcctctgcctgatcaaaaaagaaaatcaaatgcggtgagatctgcggggtcgtgatcctcaaaccatttggctctggtaactgcaactgcaaaacggcacagccatggagcagtacgaggtactggagcagatcggcaaaggagcatttggttctgccctgcttgtcaggcacaaggtggagaagaagaagtatgtgttgaaaaagatccggcttgccaggcagacagaccgcactcgcaggtctgctcaccaggagatgcagctcattgccacagtgaggaacccattcatcgtggagtacaaggattcatgggtggagaagggttgctatgtttgcatcattataggatactgtgaaggaggagacatggctgaagctattaaaagagctacaggtgatcatttctctgaggagaagctttgcaagtggcttgtgcagctcctcatggcccttgactatttgcatgcaaatcacattcttcaccgtgatgtgaagtgctcaaacatttttcttactagggatcaaagtataagactaggtgactttgggcttgcaaaaatattgacctctgatgatctagcatcctctgtggtaggaacaccaagttatatgtgcccagaactacttgctgatataccttatggtaccaaatctgatatttggtcactaggatgttgtatatatgaaatgactgctctgaggcctgcatttaaagcttttgatatgcaagctcttatcagtaagatcaccaagtcaattgtgtcgccattgccaactagatattctggtgcatttaggggacttattaagagcatgctacgaaaaagtccagaacacaggccaagtgcagctgaactactcaagcatccacatctccaaccctatgtgctgcaagtccatttgaaatcttctcctgctcgcaacataattccttcccatcagtctccgattgacaaggttaagaaaatgacatttcccactgagtccatgtgcagaagcaagggcaggagaaactctttgggtaatgagagaatcgtgaccttcagcaaaccttctcctgaaaggaagtttactagttctattcagagtatcaaggattactcaactactcggagtgtcaaagatttatctatcgatgttagtttggtcgaggaggttagtagtaaaacaacttttaccacaagaacatcgagtattgtgaagactcccaagagaactccaagcaaaacaatcacaactccccagttagaacctccaaaggtatcttacaacagagtaaatcggagcgagctgctttcaagaacaccggtgaacagaagcgctcgggtaatccgcagagcttccctcccactcccactgccatcatccgagacaccgaagcgcggcgtcagcagcatcagcatcctcgagcagctggaatcccccgacgtatccgtgaattcgcctcggatagaccggatcgccgagttcccgctggcctcatccgaagatccaccgttcctcaagctccacggacgccgctctccaactccaacgccacagcattgcgtcatcgaccagtcgatcaccaaggacaaatgcatggtcgaagcgttccacatcatcgacgtcgatgacgacgacgggaggagcgactcgtcgtcgggccgtaacaacgccgcggcggctgcctcgagccgcgccggctcgtcggagtcgacgaggcagcggcggttcgacacgtcgtcgtaccagcagcgcgcggaggcgctggaggggctgctggagttcagcgcgcagctgctgcagcaggagaggtacgacgagctgggcgtcctgctcaagccattcggcccggagaaggtgtccccgagggagacggccatctggctcaccaagagcttcaaggagacagggctgtaagcatatgcgatcactctcaccttgctctagaaaacaaatgagcagaagcaaattaaattgtagctcaggaaagattagttgctgacagtgtgacaccatctcagtgttgcctcccccaactagcttatgaaagattattcagtgatcatctatggattaacaaggaagtagcggc

SEQ ID NO: 23817 - DNA, 2227 bp, Oryza sativa
  ref <308>: DATABASE ACCESSION NUMBER: AK073904
  ref <309>: DATABASE ENTRY DATE: 2001-12-06
ggatcccgatctcccccttccttccctacaccgaaagcccgaaacccaccttgcctcgcctcgcctcgccggatccagatctccaccgcctcgcctcgccgcgccgccaccaacccactcgccgtcgccgtcgccggcggcggatcggccccacatcacctcggcctccccgagcaaaccggcgggggacgccccccgggcaacgggcgggcgaagaggggcgcaatggagcagctgcggacgatcgggcgggagctggcgatggggtcgcagggagggtgggggcagtcgaaggagttcctcgaccttgtcaagtccatcggcgaggcgcggtccaaggcggaggaggaccggatcatctcgcgggagctggatcacctcaagcgccgcctcgccgaccccgacgtgccccgccggaagatgaaggagctcctcctccgcctcgtctacgccgagatgctcggccacgacgcctccttcggccacatccacgccgtcaagatgacccacgacgagtccctcccgctcaagcgcacgggctacctcgccgtctccctcttcctcgacgagcgccacgacctcgtcatcctcgtcgtcaacaccatacagaaggacctcaggtccgacaactacctcgtcgtctgcgccgcgctcaccgccgcctgccgcctcatcggggaggaggccatcccggccgtgctgccccaggtcgtcgagctgctcgcgcatcccaaggaggccgtgcggaagaaggccgtcatggcgctccaccgattctaccagcgatccccctcatccgtctctcaccttgtctccaacttccgcaagaggctctgtgataatgatcctggggtcatgggtgcaactttatgccccctctatgacctgattttggaagatccaaattcgtacaaggatttggttgttagttttgttaacatcctcaaacaagttgcagagaggaggcttccaacttcctatgattaccaccaaatgcctgcaccatttattcagattaaactattgaaaatacttgcggtgctgggtagcggtgataagcaggcaagtggaaatatgtacatggtcttgggtgacatattcaggaagggtgacactgcaagcaacattggcaatgcaatattgtatgagtgcatatgctgtatttcatccatattcccgaacgctaagatgcttgatgctgcagctgaaacaacatcaaagtttctgaagagtgatagccataatcttaagtacatgggcattgatgctcttggccggttaattaaaataaatccagatatcgcagaagagcaccagctggctgttattgattgcttagaggatcctgatgacactttgaaacgcaagaccttcgagcttctttacaagatgacaaaatcaacaaatgttgaagtgattgttgatcgaatgattgagtatatgattaacatcactgatcaccattacaagacagaaattgcatctcgttgtgttgagctagcagaacaatttgcacctagcaatcagtggttcatccagaccatgaacaaagtctttgagcatgctggagatcttgtcaacatccgagttgcacataatttaatgcgacttattgctgaaggctttggagaggaggatgaaggtgctgatagccaactaagatcgtcagctgtagattcctatctacggattgttggggagccaaagcttccttcttcgtttctgcagataatatgctgggttttgggagaatatggaacagcagatgggaaatattcagcttcatatattattgggaagctgtatgatgtggcagaggcccacccaactgatgacactgtcagggcttatgcaatctccgcaattttgaagatctttgcgtttgaaatcgctcttggaaggaagatcgatatgctacccgagtgccaatcgttgatagatgaattgtcagcttcgcattcaacagacttgcagcagcgtgcatatgagctacaggctttgctaggtttggacaaacaggctgttgagaatgtaatgccagccgatgcaagctgcgaagatattgagatcgacagaaacctctcgtttctaaatggttatgtgcagcaagccattgaaaatggtgctgcaccctacattcctgagagtgaacgctcaggagtggtaagtgttggcaactacaaggcccaggatcaacaagagacatctgcccatgctcttagattcg

SEQ ID NO: 23818 - DNA, 2032 bp, Oryza sativa
  ref <308>: DATABASE ACCESSION NUMBER: AK073905
  ref <309>: DATABASE ENTRY DATE: 2001-12-06
gttagtacagttacattttatatgactctaccctggtaatcttgttattagagtaacatttatatttggaccatgtctagaagtagtggagtcattatgtccaaactacaaattatgcactacctgaataacagtgtagcactcttacagctgatcatccgcaaagaatgaaatggtgtggcgtagagtacgttctgaataaatagtgtgacatgacatgatctctgcattttttttataatatccttctgcagatactacaatgacttacatgtttttgatttagataatttcaagtgggaggagatcaagcctcgccctgggtgcttgtggccaagtccaagaagtggctttcagctaatggtataccaagatcagatatatctgtatggcggatattttaaagaagtagtttcttctgacaaatctgcatcagaaaaaggaacagttcatgcagatatgtggactcttgatcctcgtacttgggagtggaataaggttaagaaaactgggatgccacctggccccagagctgggttttctatgtgcgttcacaagaaaagggctgttcttttcggtggtgtggtagatatggaaattgaaggggatgtcattatgagcatgtttatgaatgagctctatggtttccagctggacaaccatcgctggtatcctttagagctcaggaaagacaagcctgctaaaaataagacaaaggacatcaaaagaaaagaaccatcgaacaatgtggaagataatcttggtaatgaggaggatgagatcatggaggactcagaaactactggagggcaatccgaagtccatggggtttcgaatcacttgaccaagagtctaaccttaaataaagctggctcaggcaatagctctgatattctctctgattcgacaacacaagaagtactcccagaggcagtgaaacccggtggtcggatcaatgcatgcttggctgtagggaaagatacactctatttatatggaggaatgatggaattgaaagatagagaaattactcttgatgatatgtattcacttaaccttagcaaactagatgagtggaagtgtatcataccggcatctgaatctgaatggctagaaatttctgaagatgaggatgatgaagatgatgatgatgatgataatgagaatgatagcgaggatgacgctaatcagaccgatgaagatgatgaagagtctgatgaagatgccgagaagaatgtcgatatgtccactgctgtatcgctaataaagggtgaacgtaagaacttgcgaagaaaagagaagcgtgctcggatagagcaaattcgggttatgctcggtctttctgattctcaaaggactccaatggtgatgttgtaatcaacatttttttgttctaaatttgtttgaagttgttccgacaaagtacatatactttgtttactcagaggaactcttggctgataatttgttacacacagttaacaattaaaaccatatatcactaattcccatattcacacttttaaagccaggagagtcactaaaagatttctacaagagaacggatatgtactggcagatggctgcatatgagcacactcaacacactggaaaggagctccgcaaagatggttttgatcttgccgaaactcgatataaggaactgaaacccatactcgacgagctggctgtgctcgaggctgaacagaaagctgaggaagaggctagtgcttccactagttccaagaaagacacgaagaaaagcaagcagaagagtggcatgagatagctttggttcgaaatatcgaaatagagagtggtttaggccaatgctttaagccatctgggattttttcctttctgagccattggtcagctcgatcgattaatccacacgaggtgcctataactacctgtgtaggttggcttaatccatggttaaaattttccaacgtactgtatttgcgattcctcggaagcattcatggagagattgtacacagttctattcatcggaaattcgttactacgt

SEQ ID NO: 23819 - DNA, 1655 bp, Oryza sativa
  ref <308>: DATABASE ACCESSION NUMBER: AK073906
  ref <309>: DATABASE ENTRY DATE: 2001-12-06
ggtctgcctgcctgcctgaacgaggaatcgctcatcgctgcatcactgccgcagacgccggcgtggtcgggatggggcggccaccgagcacggggggcccggcgttccggttcacccaggcggaggtggccgagatggaggcccgcctgcagcagctcaacaacgccatcccgcaccgctccgtcatccaggccctcgccgacaagttcacctcctcccccgcccgctccggcaaggtcgccgtccagcccaagcaggtgtggaactggttccagaaccggaggtactcgcaccgctccaggagctccaggggccccccgacgctgatgcagaccaagatgctgcccacggggtccgacgagcacaagtcgcctcccttcagggctatgccctctgcctctgcgcactccggctcgccctcagggaagggttctttggagagcggccaggttgaatttgaagcaaagtcggctagagatggcgcatggtatgatgttgctgccttcctgtctcatcggttgttcgaatctggtgatccagaagtacgagttcgcttttctggatttggagccgaggaagatgaatggataaatgtccgtaaatgtgtgcggcaacgttctcttccgtgtgaatcaactgaatgtgttgctgttcttcctggagacctcatactttgctttcaggaaggcaaagagcaggctctgtatttcgatacttgtgtccttgatgctcaaaggcgtagacatgatgtacgagggtgtcgctgtagatttcttgttcgctacgatcatgatcactctgaggaaattgttccactgaggaaggtatgtcgccgaccagaaactgactacaggtttcagattctgcatgctgctagagcagcaggtatggctaaagaggctgtggttgatttggtgtcgcacaatgataagagctcagcggagcagaaacccccaaagcagcacaaaatgatggatgtgaacactgatgaggtaaccatggtttctaaccaagaccaagaagagccaacaggcaagcctgctgctaccttgccagcagcaccggtcaaaaccctgaatgattcagcttcagcttcagcttcagatgtccaaatgggcgaggcacaggctgctccaaaagttgaatcttctgatgaagtagaagacaagatgaaagagggatagttggttgcctttgctgagcattatgtttggctggcggctgcagtaaacagcatctggttaaatgcattggcatctgatcacctgttctcctgctaggctgctacacacatgttgtgacttccaacgcaggaatgtatgtcttcagtcttcacaacacatgttgtgacttgtgaagatttagtaattgcttaggaaccctctcaaaagggtaaatatgattgttaggaactttagctccaaacataaattgattgcataggaactttagctccgaagaaaatgtaatgtggttgcggtgggattgacttgattgctgtcacacaaattcggccgaggatccgtgttgaccacaaataggactggcctgccatgccacaactaggatctgtgtttaatatagcgtgccaaataggtgtgaatcggtgcctttgaaggttatcatcaattgttctgaaggtaaaatttctcagg

SEQ ID NO: 23820 - DNA, 1518 bp, Oryza sativa
  ref <308>: DATABASE ACCESSION NUMBER: AK073907
  ref <309>: DATABASE ENTRY DATE: 2001-12-06
gggtcggaagcaaagagaggtaaaacctctcgacccgtctcccccaaaaacccacgggcgccgccgctcctccgaggcggagccaaacgctcgctcgctcgccttgctgcgcactagctgaccaatcccgtctccttctccgatccggcgcgccgccgccgccgccgccgctttgaggtgacaacgatgaggcgcgccccgcgtctccacgcgctcccctcccgcgcgctcgcgttcggcggcctcccccctccaccgctgccccgcgcgcagcttcaggggatcactgagccgggtgccgcatctcggctcggggccgcgttcctagcccgcgcgctcgccaccaccggccttcctgctccgcggcgtcctcgcgcgctgcaggttcagcggatcactgagccgggggctgcatctcggttcggggctgcgttcctggcgcgcgggggcttctccaccgatgcctcggccgcggcgcaggacagcgcgaagcctgccgcggcgaccggcggggaagggggtgatgggaagtcagggaaatctgagcaaggggacgctggaaaatcagtgcgaggagggccggtgtcgtggttgagctttctcctgcttctcgtgactggaggagggataattgtgtactacgacaaggaaaaaaagcgtcacattgaaggtagattactatgaattgaagaatagaacaagtgctgtcaagcaagaaccatcagtaggcactgcagccatcggtggtccattcaatcttttgaaccatgatgggaaacctgtcacgcaaaaggatttctttggcaagtggactctgctatattttggcttcacacactgccctgacatttgtccagatgaacttcaaaagatggctttggcaattgataaaataaaggaaaaggcaaaaatggaagttgtgccagttttcatcacagttgatcctgagagagatactgtagagcaagttcgtgactatgttaatgagtttcatccaaatctaataggactaactggcacaactgatgagataagaaaggttgctcgtgcttatcgagtttactatatgaagacagaggaggagggttctgattatctcgttgatcactcaattgtcatgtacttgatgaatccaaagatggagtttgttaaattttacggcaagaactacgatgcagattctcttgctgatggcatcatcaaagaacttaaagggcaccaataaagatagctgacccacaattaatctggcaaactattttccgaatctctccaaaagatttcatctatgtacacaattgcaaacaatgggtggcgctcaaggtcaacccgtagttcgtagctgttttttctgctcatatcattcataaaaattaggatattcaaattttgaggccttcgacctcatcagattttggtgaaccatgttaaactttgaggcaaaaactctacacatttcataaataatactccatatatcagaactcaattatgcagcatttggttattatgccactc

SEQ ID NO: 23821 - DNA, 2962 bp, Oryza sativa
  ref <308>: DATABASE ACCESSION NUMBER: AK073908
  ref <309>: DATABASE ENTRY DATE: 2001-12-06
gagtcgtcggaaaccctcgaccaatctcacaaccctctccatggccgcctccgtctcgcccgccgcctcccctccccgccgccaccgccaccgccacgacgactcccctccccgccgccgccgccgccacgacgacgactccccgcgccaccgcgacgaccgcaagcgccgcgcctccccgtccccgtccccgtccccctccccctccgaccgcgacgccgaccgccaccgcggcaaatctagggcttccccgccccgccgcccccgcgattccgaccccgccgagagcaacggaggaggagcacccaagcctggcggggacaacggcggcgaccgctccccccgccgcgctagggtgcccgatgcggaggaggagggtggtgaccgcaggaggaggccgtcccgggtttccgacgacgacaaggagggcggccgccgccggaggaggcgctccaccgactccgacgacgagagaggcgaccgccaccggaggcgccaccgccgccggagccccagctcggagtcctctgatggtggccgtagccgtcgccaccgtcgtgacgagagctccaggcggcagagagatgagaggcgccgggacaggggcggtcgcgaggagcgacgcaggagccctgataggaaggagccgactccgccgctgcccccgccaccgccgctcttgccggagttgatacccggccgcacaggaggaatctacatcccgcctttccgcatggcgcagatgatgagggaggtagaggacaagtcgagtcccgagtaccagcgtctcagctgggatgctctcaagaagagtatcaatggtctggtgaacaaggtgaatgccaccaacataaagaatatagtgcccgagctgttcgccgagaacctggttcgtggaagggggctcttctgccaatcgtgcatcaagtcgcagatggcttcgcctggcttcacagatgtgtttgctgcacttgtcgcggttgtaaataccaagttccctgagattggccgcctgcttcttgttcgtgttgtgcttcagctcaagagggcatataagcgaaatgacaagccacaattgcttgcagcaaccaaattcatagcacacttggttaaccaggttgttgctcatgagctcgtggcgctggagcttcttaccgtgctgcttgagaacccaactgatgatagtgttgaggtagcagtggggtttgttaaagagtgtggggcaatgctacaggacttgtctccacaagggcttcatgctattttcgaaagatttcgaggtattcttcatgaaggtgaaatagacaagcgtgtgcaatttttaattgaaggactgtttgcaattagaaaggctaaatttcagggattccctgctatccgtccagagttggatcttgtggagcaggaagaccaatttactcatgagatatcccttgaagatgagctagacccagagactaatctaaatgttttcagggcaaatcctaattttgctgaagatgagaaggcgtatgagaacctaaaaagaagcatcctgggagcagaatcttctgatgatgaagaagggtctgatgatgcttctgatgaggacgctgaagaagaatctgacgatgaagaggatgaagagcagatggagattagggatcaaactgagactaatctcattaaccttcgaagaaccatatatttgacaattatgtcgagtgttgattttgaagaagctggtcacaagcttctaaaaattaaactcgagcctggccaagagatggaattgtgcatcatgcttctcgagtgttgcagtcaggagagaacttatcttcgatattatggattattgggccaacgattttgcatgattaacaaagtttaccaggagaactttgagaagtgttttgtgcagcagtattccatgatacatcgtcttgaaacaaataagctaaggaatgttgctaaattttttgcacatctgttgggtactgatgcacttccttggcacgttttggcctacatcagattgactgaggaggacacaacgtcttcatctcgaattttcattaaaatactcttccaggagttgtctgaacatcttggtattcgtctactcaacgagaaactgaatgatcccaacatgcaagattcatttgattcaatattcccaaaggatcatccaaagaatacaaggttctccataaattttttcacctccattggtcttgggggtatcacagagaccctgagagagtacttgaagaatatgcctcgactgataatgcaacaacagaaacccgcctcttctgagtcgggatcaagtgattcaggatctgcttcagacagctccagctcagagtcagaatcgagctctgatgagagtgacaagaagagaagcaagaggcggaagaggtaagagaatgaagaaaattaattgcactgttgcttctgggatgcaactgttgttagatcagcatcgtcagatttggctgttctgttggatcctcctgtatttgtatccatgtgcaaaatcagatatagctgttggtgcttgttgaattgaggacccaatcataatctgaaccccaatagctgtgaatctgtgatggtgtaagatattaagcgagctagtattggttcctaccttcaaaccatgtgagacaagccaaatcgccagcaatcctcacaggaaactggaattctaattttcctttcatatgctttaggcagtgcaagttttgtatcttgagaaattatcttcttacggtctgtagttttgcaacagtactgagctaagcaggaagcgatcaacagtaatgtatgtgcaagttgtagtgtttctgcccctatgtggtgagccttgctcatctgttggtatactgctgttttcgtggtgttattatgggcatcaccagcatttttgtgtatcattagtatctttgaggaagtattacagaaaaatcattggtttatc

SEQ ID NO: 23822 - DNA, 1318 bp, Oryza sativa
  ref <308>: DATABASE ACCESSION NUMBER: AK073909
  ref <309>: DATABASE ENTRY DATE: 2001-12-06
ggcaaggacgtgtactctacacgatcaatcctcctttgcagtagcaaactgagaagcttgcaagaacaacggattgcaagctgggcgatgaattggtggaaggtggtgtgtggtcacagtgatgttcgaaatctgaagcaatgaattcgacgaagggggagagaaagcgtgcaaggacattggtcggtagaataaattggcttgcagtaaaagaagatcacgtgatggcgcatggccgcatgggagaacttatggtcttttgattccaaaggtttcaagcgctttgttgtgaaaagctgaaaaggtgaggagaacaaagaaaatttagatctggtttagtttccaattttttcttcaaacttttaactttttcatcgcatcaaaattttcctacgcacacaaactttcaatttttccgtcacattgtttcaatttcaatcaaacttctaattttagcgtaaactaaggccgggtttagttacaaatttttttcttcaaacttccaactttttcatcatatcaaaactttcctacacacacaaactttcaacttttccatcacatcatttcaatttcaataaaaattctaattttgacgtgagctaaacatacccttaaaaagatagtcgtcatattacttcaaggagaatatactacagtagtatatataggagtagttttattttagataatgagtatataggagtagtaaattatggaaatggtaagatataaccatgttcagtgttctacttttcagtagcctctcacagggtacacaaaaacaaggaaccaccaacattgtacttgagatggttaatactctaaaatctagataaaacttgggaacaaagagaggcactaacattttctttttgttcttttgataaaactggtgcgtagccattgcacatgaagctcgttttattactactactactactgctactactcaacttgattatagaacttgaatataatgttgggttgttgtgattatctcccgcggtaataatttttttccactgaacgaggcagcgcaagccagaatgcacatgttcatgagataagtgtcagaggggatggatttagtatttggaaaatagcttatgccgatctgaaaactactcagattttcgctcagtggtggtgcacgtcgctggtctttttttcccatttcctcggttcgtggctagcagcctcttgccctcttctagttcacacgaaactggttagtgcactatttttcaatgtatcctccacatgggtttgtcgatggatgtcagatatccctggaataaacttcagagaaaaagtt

SEQ ID NO: 23823 - DNA, 1313 bp, Oryza sativa
  ref <308>: DATABASE ACCESSION NUMBER: AK073910
  ref <309>: DATABASE ENTRY DATE: 2001-12-06
tccccccccccccccccaaacccttcctctcccctcgactccggcgccgacatggccgtcgtgcaccgcatcctccgccgcgggctctccgccgcctctcccctcccttctctccgcggcctcctcctcgtctcccctcaggagctcggcaggcgtccggcgagctcgtcgtcgtcggcggcggcggctgcgggggacgtggaggctgagctgcgcgccgcgcgggaggacgtcaggcagctgctcaagtccaacccctgccatcccatcctggttcggttagggtggcatgacgctggcacttacgataagaacatcactgaatggccaaagtgtggtggtgcgaatggtagcttgagatttggagttgagttagtacatgcagctaacaaaggtcttctgaaggcgttattcttggtcattcccatcaagagcaagtatgcaggtgtcacttatgcagatatatttcaacttgccagtgctacagccattgaggaagccggtggccccaagatccccatgatctatggaagggctgatgttgctgatggtgaagaatgcccacctgaggggagacttcctgctgctgaccaaccttcacctgctgaacacttgcgagaagtattctacagaatgggcctgagtgacaaggaaattgttgcgttgtcaggagctcatacacttggtcgagctagaccagagcgtagtggatggggtaaaccagaaacaaaatacactgaaaatgggcctggtgctcctggagggcaatcttggacatctgagtggctcaagtttgacaacagctacttcaaggaaatcaaagaacgccgagatgaggatcttctagttctccctactgatgctgtgctctttgaggactcatcattcaagatccatgctgaaaagtatgctgaggatcaggatgcatttttcgaagactatgctgaagctcatgccaaactgagcaatcttggggcaaagtttgatcctccaaagggtatttcacttgaatagctggcgtcagctgccgatgaactgcattttggcgagtgataaacaagataataccttgtttgttcttgctactatagagcatattctggttttactacccatccagaaatttaacttattgtaaatgtgatgctggtgctgtgtattgagctgtgttactgcttgccatcttatctattgtactatattataaagatagctcgaaaaagagcaaccaaatttgttcaggtcaacaattagatgcatcacaacctcagttagataatactaggtttttatataacgaagttagtaatgcg

SEQ ID NO: 23824 - DNA, 2586 bp, Oryza sativa
  ref <308>: DATABASE ACCESSION NUMBER: AK073911
  ref <309>: DATABASE ENTRY DATE: 2001-12-06
tagcgtccctgtcgatccagctgcgtctaccaagcattcgggaagtggaggtggaggtggtgcggcaagcaacaatggcggtggtgggagtgcgcctccgcccggcaatttggcaggaagtggcactccacctgcaaagggaagcggcggcgacggcggcggcgctccggcgaataattccacaagtggcggcgccccggcgaacagcgcggtggagcagagtagcccggccggagatgggggtggatccccatccacagccagtagttctgccggaaaatcatcctccgcgaacaccggcgaggagagtgtagataagtccaataagcagtcaggaagtggaggtgaagctcccagcaatggcgatgccgtttctgacaagaagaacagcacggcgaaggccgataccgaagttgctgttaaagcatccagtgataattctactggaactggaagttcagcaaagggtgaatctaatgttggatctaatagcagtgcaggaagtggaaatggtgttgcaagtagtgtttcttctgctgctgtgaatagcactgcggtaaagacagatgcaaaagacgtagtcgttgctacgagtactgattctgccggaagtgtctcagatgtgaaggccgatttgagtaacagatcagatactccgccagcgagtggaagtggacattccaaccatacatcagatgtgactgttagtccggcgaagggaaatgctaaagatggcggagctgatacaaataaagcgagtgggaatgtggcttcaactagtaatcagactgctagtactgcaatggtcgcaaagaaagcgggtggatccccaagcaagaatcagacatctgtagcatcgacaaattcaaagaatcagaaccagactagtgctggagttgcttctggtggaagtagtggtacaacaagtaagcaggaggaaacaacttcgcagggtagtgttggttcatctaaggatcatcctgcccaagcaatcaactcaaaaactagcaactacagcgaagtgctggtgaaggggaatggatcatcaacaaaacaggcatcacaaaaacagcctgataaaaaggttgactggatcaaggagatggccagctgtgatatgttccatgggaattgggttcgggatgagtcgtaccctctctaccctgagggatcatgccctcacattgatgagcccttcgactgttatctcaatggccggccagatcgagcctaccagaagctccggtggcaacctagtagctgcaacatcccgagattgaatccaactgatatgttggagaggctgagggggaaaagactggttttcgttggtgattcacttaataggaacatgtgggaatccctggtctgcatcttaaggaactccgttaaggataagaggaaggtttttgaggcatctggtaggcatgagtttaagactgagggctcatactctttcctgttcacggactataactgcagtgtggagttttttcgctcccctttcctagtccaagaatgggagatgaaagtgagcaatggaaagaaaaaagaaactcttaggcttgatatagtcgagcaatcatcaccaaagtataaggatgcagattttctaattttcaatactggacactggtggacacatgagaagacttctctagggaaggattactatcaggaaggtaatcacgtgtatagtgagctcaatgttgtggatgcctttcacaaagctcttgtcacctggtccaggtggattgatgcgaatgtaaatcccaagaaaaccactgtgttgttcagaggctattcagcatcccatttcagtggtgggcaatggaattcaggtggtagctgtgacaaagagacagaaccaataagaaatgaacagtacctgtcaacctacccaccaaagatgagcattttagaggatgtgatccacaagatgaaaactccagttgtttacttgaatataacaaggatgactgactatagaaaggatgcacatccttcaatctatcgcaaacggaacctgactgaggacgagagaagatcaccagagagataccaggactgcagccactggtgccttcctggagtaccggattcctggaacgagctgctttatgcccaacttttgatcaaacagcatcaaatgctccaacaataaagttcctggcatttattttgtatttaaggatatacaatataatctcatctgtgactttatcatgaacctcatgctgcgtgacaacgaacagccctaacatgcgaggatgacctcatatgccagtacttttgtccaagtgaaaatgaatctttgagtatctcataagcctgcaatggtgtgtcaactgtcaaccaatctgttggtgctggagtcaattaggcccttagcgacctcttgagtttgccgacatttctctatagttaagctgtccatgtgggatccaaaggatttggtccagctttgcagcttttgaggattgaagattgtaaaagatgttcttacaactgtttgttagtcttactgccctgtttgcatcaaccagtttttttatagcaaatatgcaggtgactttctcatttccc

SEQ ID NO: 23825 - DNA, 2655 bp, Oryza sativa
  ref <308>: DATABASE ACCESSION NUMBER: AK073912
  ref <309>: DATABASE ENTRY DATE: 2001-12-06
gacacacactgacctgcaagctcgctgggcagcttacacaggggagtgaagtagagtgagtgtgagagagagtgagtgagaatgggtggcaaggccgctctcctgatggccctggtggccatcagcgtcgtcctggaggccagggcggacgccggtggctacggcggcgggtacacgccgacgccgacgccggtgaaaccggcgccgaagccggagaagccgcccaaggagcacaagccgccgcaccaccacgagcccaagccggagaagccacccaaggagcacaagccaccggcctacacgccgcccaagccgacgcccaccccacccacgtacaccccgacacccaagcctacgccaccgccatacacgcccaagccgacgccgccggctcacacccctactcccccgacgtacacgccgacccccactccacccaagccgtcgctggtgtgccggtcgtggtaccgcgccgaggcgcagacgcggcgggagctgttcatcggcaactgctacgcggtgtcgccgcgccgcgccgtggagcggttcggaggggtgcgcgccgtggtgctcaaggggaagccgcggttcgcggacttcagcctcgtgccctacggctggggcgcctacgtctccccctgggtcgccgcgctcggccccgcctacccgcacctcgagcgcatctgcctcaagcgcatgaccgtctccaacgacgacctcgcgctcatcgccaagtcattcccgctgttcaaggagctgtcgctggtgtgctgcgatgggttcagcacgctaggcctcgccgccatcgccgagcggtgccggcatctccgtgtgctggatctgattgaagactatattgacgaggaggaggatgagctagtggattggatctccaagttcccggagtccaacacgtcgctggagtcacttgtgtttgattgtgttagtgtcccattcaactttgaggccctggaggcgcttgttgcacgctcaccagctatgcgccggttgcgaatgaatcaccatgtgacagtagagcaattgcgccgtctaatggcaagggctccccagctcacacaccttggtactggtgcattccgttctgagccaggccctggtggtgctctgtctgttactgagcttgctacatcttttgcggcatctaggtctctgatttgtttgtcaggtttccgggatgtcaatccagaatacctcccagcaatccacccagtctgcgctaatctcacttcccttaattttagctttgcaaacctaactgctgaggagctcacaccgattattcgcaactgcgtccgtcttcgcactttctgggttctagatacagtgggtgatgaaggccttcgggctgtggctgagacatgctcagatcttcgtgagctgcgagttttttcctttcgatgccactgaggattctgagggatcggtttcagatgttggtcttcaggcaatctcggaagggtgccggaagcttgaatcaattctctacttttgccagcgcatgacaaatgcagcagtaattgctatgtccaagaactgttctgacctggtaacattccgtctttgtattatggggcgacaccgccctgatcggatcactggggagcccatggatgatggttttggggcaattgtgatgaactgcaagaagctaactagactttcggtctctggtctgctcactgataaggcgtttgcatacattggaaaatatgggaaactaataaagacactgtctgttgccttcgctggaaatagtgacatgtctctccaatctgtgtttgaaggatgcactaggttgcaaaagcttgaggtcagagatagtccttttagtgataagggattgctctctggcctgagctatttttacaacatgaggttcttatggatgaattcatgcaggctaaccatgaggggttgtagagatgtagctcagcaaatgcctgacttggtggttgaagtgatgaaggatcatcttgatgatgaaggggagatggagactgttgataaactgtacttgtatcgatcactggcaggagcaaggaatgatgcaccttcatttgtcaacatcttgtagtactgctacaggaagaagtttgttgtactcacaaaacaagtttgttctattaaaccttatcattgctattgtattcctgaaccctgatcagtctatcagaatcagacacagaagcttcccgcagatgattttcaaatgtcgtggggaacttcgattatgcggatctccaaattgttcttttctttgctgacaatgaggcatatgaggctcttcttgatgtatgtattgttgctgaggagaagttcgtcgagtgagctacctgatgcctgatggggatccttcttttccttgctgtgactcgactgatgcctaccattttactgttagatgaagagtaggaactgattccaatcagcagggttagattagccatcttttgatctgctcagacgaaggaatggcaatgctccaatattccatcatccgttgccttatgttttagatctcaaaactcaactatgataattgtttcctttttcatttttttggggttctctcttgagttatttttgtagtccattttaccccccttttacttggtcacgtcgctgttatgaatc

SEQ ID NO: 23826 - DNA, 1594 bp, Oryza sativa
  ref <308>: DATABASE ACCESSION NUMBER: AK073913
  ref <309>: DATABASE ENTRY DATE: 2001-12-06
gagtcacgtcacgtcttcacacacctggtgccactgcccatggcgacgccgacggagacgcgacgccgacggagacgcgccgccgcggtcggcgagggggcaagcttaacaaggcgcggaggaagccgccggtcgacccacccaaggtcgtcgacggcgggacgacgacgacgaccgtggacgacgtccccgaccacctcctccaggacatcctcctctgcctcggctcctccgcctgcctcgtccgcgcggcgtacgcgtgcaagcggtggcgccgcgttgtcaccgccgccggcttcctcgacgccttccgctcactccacggcgcgacccaccacgtcgccgggcactaccacaccgtcgacgacgcgtacgacaggcaggcggcgccgggggcattccctgatggtggcaggagcttcgtcttcgtcccctccgacgagctcgccgacaccgatcgccgccggttctcctccctcgatttcctcccggactgcgagagcggctactcctgggagctcgccgactcccgcggcggccttctcctcctcaccaagatgaagcaacgcaccggcgacggctcaccggcgcggcgccactgcttcaccttccccgacatcgtcgtctgcgagcccctgacgcggtgccaccagggtatcctctgtcctcccgacctcagcggttaccagtgcctcggcgtcttcctcctcgacggcgacggcgacggcggccgcatcggcatgtccaacttcaaggtcatctgcgcactctacgatcgttacctgctgaactatattctccctctcagcgagacattggcctgcacgttcacctccggcagcggcggcggcggctggcgcctaccgcacagcacagccgccggtggcgacgtcacactagagcatgtaaggctcgacgccacgagcttcgtggggcgtgcaaatggccgcgtctactgggaaatcgagggcgacgaaggcggcgacatgctcgtcctcgacgagaccaccgcgggattctccctcgtgacgttcccggagaacgtccgcgagagctacgacaagcggacgttccggatcatcgccggcggcgacggcgtcgccatgcgcgtggtccgtgtgataaacaacgacctcaaggtgttcgcgcagctcgacggcgacggcgagtgggtgctcgagaagcgggtttggttgccggcggcggcacggggcctgccagggtacgacgaggggtacttccaggagcagaacggagaagccatcgttgtcgcggcgagcgcggcgtatgtgctgctgacgccgccggtggaggacacttggctcttctccgtcgagctggagacgatggcggtggagcggtggcatgagaggaacaagtatgccggggtggcttacccctgcgagttgccatggccgcgggctttgcaggctacggatgctgatcagattagtgggaggagacgatgctgatgagatgtggattgattctggctggtccaaaactgtttcgacagttgcatgcattcactttgcgttgcatgatgtttcaagcgcaataatattgctggcggaatattgatgccttaggtcgt

SEQ ID NO: 23827 - DNA, 4575 bp, Oryza sativa
  ref <308>: DATABASE ACCESSION NUMBER: AK099384
  ref <309>: DATABASE ENTRY DATE: 2002-08-28
ggtggccacggccgtgcgccacttctcttcctcgctcactcttccccccctctcgcttccttcccttctgctctgcttcctccgcctctgcttcgtgtcgccgtcgccgccgcagcagccgccgccggcgagcaccgggtgcggatactgggagcgatggcgtccgggaaggtcgtgtccttcgtcggcgccgacgagctgggcgtgtccctcgccgcctccttcgtccggtccggggccatcgtccgctgcttcgtcgctcccgggggtgatggatcggcgacggcgctcgcggagctgggcggcgtccggtgcgcgagccccgcggaagccgcgcgagacgctgagctagtcattgtgctcagtgacacggatggggttgatgagctgttcttcggacctgaggggatagtgaaaggactgtgctcgggtgctgttgtattgattcgatcaacaatgctgcctagtcatctggagaagttgaatcagaagcttgcagatgagaagaagaatgcccttcttgatggatacatttttagtggtttatctgatgaattaaagcaaaagattgttgttgttgcatctgggagacatgatgttacagaaagaaccgggcaattcttctctggtcttgatacagcagtttactttgttgaaggtgaatttggcagtagcagcaaaattaagctggttaatgatttgctggagagcattcattttatagcatctattgaagcaatgtttcttggtgttcgggctgggattcatccatcaattatctatgacataatatcgaatgctgccggaagctcaagaatattcgtggagatcgtaccaaagcttttgagagaggattctttgcttattgattatctagagtcatccaagacaaacgcaggctatgtgatggatatggctaaagcagtaatattccctttgccacttgtagctgtttcttatcaacaattaatacatggttgttcatcagcaaatggagatgcattagtctcaccgttgaaggtttgggaacagtcatttggagtaaacatcatagatgctgccagtcaacaaatccacgatgcaagcaaattagctgaccagcttgttatggcatgtaaaacagcaaaaactatcggctttattggtcttggagctatgggctttggaatggcatctcatttgctaaaatcaggtttctccgttattgcttatgatgtatacaagccaacactggccaggtttactgatttaggtggattgactaaagattctcctgaggaagtatcaaaagatgtggaaatacttgttatcatggttgcaaatgaagttcaagctgaaaatgttctatatggaaatgctggtgctgtatcagtaatggccgctggaacatccatcatcctatcttcaacagtttctcctggatttgtgattaaactcaaggaaagattagaagctgaatgccgagacataaagttggttgatgctccggtgtctggtggtgtcaaaagggcagcagaggggacattaacaataatcgcttcaggaacagatgaagctctgcagtgtactggcagtgttctctcagcactaagtgagaagctttatgtcatcaaaggaggatgtggagctgcaagttctgtaaagatggtaaaccaacttcttgctggggttcatatagcctcagcagctgaagcaatggcatttggtgctcgattaaatttgaggacaaggagactttttgaaattattcaacatgcaagaggttattcatggatgtttggaaatcgtgtgccacacatgcttgataatgattatactccttattctgcagtggacatatttgtcaaggatcttggtatagtatctcatgaaagctccaacgcaaggatcccactgcatgtctctagtattgctcatcaactttttctttcaggttctgcttctggatggggtcgatttgatgatgctgctgttgtgaaggtttatgagacattaactggagtaaaagttgaagggaggcctcccatgcttaacaaagaagatgttctgagttctcttcctgctgaatggccagaagatcccatggatgatcttgtttcatctgcatctcataatagcaaaaaaattcttgtggttttggatgatgatccaactggaacccagacagttcatgatatagaagttttaactgaatggcctgttgaagcccttgcagaacagtttcaaaagctaccagcttgcttttttattttgacaaactcccgttcaatgactgcggaaaaggctacactattagtaaaagatatctgcagaaatcttgaagctgcagctaagtctgtccctggtgttagctatacagtggtattgagaggggattccactttacgtggccatttcccagaggaagccgatgcagtcgtttcagtgttaggtgagatggatgcttggataatatgcccatttttccttcaaggtggccgctacactattgatgacattcactatgttgcagattctgacagattaattcctgctggtgaaactgagtttgcaaaggatgcagcttttggctataaatcttccaatctcagacagtgggttgaagagaagacaaaaggacggatttctgagaaccaagtttcaacaatttctgttaatctcctacgtaaagagggaccgaatgcagtctgccagcatctctgtagtttgaagaagggttctgcatgtattgtcaatgctgctagtgagagggacatgtctgtgtttgctgctggaatgatccaggctgaattgaaaggaaagagatttctgcgccgcacagctgcaagttttgtaagtgctagaattgcaataaagccaaagccacctattcgtccaactgacctaggtttaaaaagagctttaactggaggcctcattgttgttggctcttatgtgccaaaaactacaaagcaggttgatgaacttaggtcacagtgtgagcaatctctccgaataatagaggtatctgttgagatgatttcaatgaaatcggctgaggatagagaccatgaaattagccgagttattgaattgggaaatgcttatatacaatccaggaaagacactctagttgtcaccagccgccaactcatcacaggaaaaactcctgaagaaagcttagaaattaattacaaagtgagctcagccctagtggagattgtgagagggattggcagtcgaccccgttatattcttgcaaagggaggaatcacttcatccgatcttgctacgaaggctttggaagctcggcgtgccaaagtaatgggacaagctttagctggtgtccctttatggcagcttggtcctgagagtagacatcctggtgtcccttacattgtttttcctggtaatgttggtgacaacagtgctcttgcaaaagtggtccagaattgggcttgcccttctagaagttctgcaaaagaacttctccttaacgcagagaatggtggttatgccattggtgctttcaatgtatataaccttgagggaattgatgctgtcgtttcagctgccgaagccgaaaaaagtcctgctattctgcaggttcatcccagtgccctgaagcaaggtggagttccattggtctcatgttgcattgctgctgcagaacacgctagtgtacctatcaccgttcattatgaccatggaacttccaagtctgatttgcttcaagctcttgagatgggttttgattcaatcatggtggacggatcacatctacttttagggaagaacatcttatacacaaggagcatatcttccttggctcattcaaaaggcatgcttgtagaagctgaactggggagactctcaggcactgaagatggcttgacagtcgaagaatacgaagcaagatttactgatgttgctcaggccttggaattcattgatgaaactggtatcgattctctagcagtatgtattggaaatgttcatggaaaatatccccccagtggaccaaatctcagatttgacttgctagaggaccttcgtgcattgacaatgaagaaaggtgttagcttggttctccatggagcatccggactgcctcatgaacttgtaaaggaatgcatagctttgggggtgaggaaattcaacgtgaacacggaggtccgaaacagctaccttgaatcccttaaaaggccagaaaaggacctgattcatgtcatggcatctgctaaggaagcaatgaaagctgttgtggctgagaaaatgcgcctgttcggttcatctgggaaagcttgagttcaagttgcatcgccacttatgaacactccatgaacacttaattctggaggcatgattggtccgtgggattaagacatcttgatagactgcagtggagcccagcccataatctgaagaactcattaccgactcttggctgaagtgcttcggagtgattgatgccattctgtcatgtgatcaagttcatgtccatactacatacgtcgtctggtcctttagagcaacatgacttcaggacgttgctatcaacggctattgatgataaactagtaataaaatttgtcg

SEQ ID NO: 23828 - DNA, 3037 bp, Oryza sativa
  ref <308>: DATABASE ACCESSION NUMBER: AK073914
  ref <309>: DATABASE ENTRY DATE: 2001-12-06
ggaagtaggacggcggcggggagtcgtccggccgggccacgaacgacggcctcccggcggtcagcgacgcggccttcatgaggggctcgacgaccttccacacgtcggtcgcgagatccggccggcgcctccggctcatctcggcgcaccgcaggccgaggtgcgcgagctggttggcctgcacgaacggccagctccccgcggagggatcgaggatggagtgcagcccgccgctctcgatggcgtcctccacaacctcggcgatcttctggggaggcttcccggtcagcagccgcaggatgatgattccgagggagtacacgtcggagcgcggcgtcagctcgccggtggtgaggaactccgggtccatgtacgcgaaggtccccttcggtgtggtcgtccggtacaaccgggtggtggcggcggcggcggcgccggtgttcgtctgtatcaggagccggcagatgccgaagtcgcccagcttgctgacgaagttggcgtcgaggaggatgttcgccggcttcaggtcgccgtggacaatcgggtgcggcttgttcgagtggaggaagctcagcgccgagcacatctcgtagatgatcctggtgcgcacctgccatgtcaatggcggcgtgttgttcaggcaggccaggcggtcctcgaggctgcctttggggaggaattcgtacaccaagccaaatgcctccctgcaagagccgatcaaagtgacgaggtttggatgtcgtactctactgagaacagcaatctgcaataatggtgtcaattgcttggttagccatggttgccaacttgatttgatggagttatgtgagtgatctgatgaactggattacctcctggtcgaattctgattgaccttgcatgctatgtgggtgcagcagcttgatagccacagttgtgttgcggagtgtgcctttgtagacgctcccaaaaccgccctcgccgatcttgagttcttgatcgaagcctctggtcgcttgttcaagctcataagaggagaactcggtgtttagatcttcacccggcatggaaattctctgtttgttcttcaggcgcaagtcttgagattcacttactgcggcatctcgctcttgttgtagcttctctttatctgcttggagcacttggagtagatacttgctctctgcgagcttctcttcgcgttcttttaaaactgaacgaatttcagttatacggtgctccaccatgagtttctgctcttctacatcatgcagcttatctttgtgttcttttaaaactgcctgcatttcagttatgcgctgctccaccgtgaatttctgctcttctacatcatgcagcctatcttcgcgttcttttaaaactgcctccatttcagttatgtgctgctccaccatgagcttctgttcttccacatcatgcagcttgtcatataatgcattgcagtgcctttccgtttcttctgtctcctgtatctgtttctccagtgcctcttcggttattttccgatgcatgacttccttctgatacaggttctccaactctttgacctgtaagataagttctatctttttattttacagtatgaattatggactttgaagcaaaatgacttgccttttgaagagctgaaatcagatttctttcggcgttccgacgtttcgttgattcttcgtatgtctctctcttcaggtcttgagtttcactaagagcctcttggagtctaccatatatgtctgcatcatcgcctgaattctcctgtgttgcacaaaaagttcagttatgtgttacatttcattgagaagagtcctactcttatgtttttcaacttgcacagtacatcaggcgatatgtaccagtttacgaggagatacaaaatggtcatcatcaggttcatacatgggctgctgcattgctgatccagagaccctaactgtatcactatttcttgatgaatcgtagcaggagttttgcgatctctcaaattcatcccaggaatctatagaacccattgctgttcttgttggctggtcattgacatcttgatctgaatgtccaaataactgagatggtgcagtgccagatccttgtgagggatactttgccacttctgttcttgatctgttcagattgtgccttggacttccgcttgagcttgatgcttcactctctgacgggtgcaatgacattgatctcatacggctggaaatgctgcttgatgacaatgttgatgcaactgtgtgtgcaggtgatggtggtattgcaggaacggttgtatttgcttccctgcaatgttgacggatgtcctttacaggtaaaccatatcttacatgaaggatctgctgcttccaatatcttgagtgctgtcttggacttaggtgtgttcattttcctgcatattgggaaaacatccagatcatcaaacaaatgattgaggactggaggcttactcatggggatcatctgcgcggggcagtggacatgagcaatcacgaccttggcgccatccttggccaggttctgcagcgtccactgcaaggcgctcttgccgtacttcacgtccgcggcgactgcgacaaacaccttgtccgccgccgccgccagcggcggcggcggcgggctcacttccacccccacctcggtggatatctccgcgacgctgcttaccgacgtcctgaagctgtactgcgacccgctccccgacgtgtcccaccgcctgtgcacgccgaggccgacgccgtccattgccgccggattgccggtgagacggagacagtcgagtcgagcggggagggaggagatatgttggcattagcggcggttaagaaccagggatgagttcgatgagataattcgaagaataaacggtgcctaaagctaagtcaactctgggtcgctgtttttttaaaattaaaaaaaggtcttgtttcgctgggaccgcggcaatttgcattggatgatagatgactaggaaccgaatttgtctcatgccgaatttgctactacactaaagggattaaaaggtattttagaattgagt

SEQ ID NO: 23829 - DNA, 3528 bp, Oryza sativa
  ref <308>: DATABASE ACCESSION NUMBER: AK073915
  ref <309>: DATABASE ENTRY DATE: 2001-12-06
ggtgtgtagcgaagcactcgacggaatccggaagcgaagcgagcggagaacgccgacgagcacaccaccgccgccgccgccggctcacggtctacccacgcgcgtggaagcggggcgatggaggcgtcgggatccgagccggggcggccatggacggtgtccgccacctgggctccggctggcggcgcggccgtggaggacgccgtctcgttcgagacgtccgccgacgacgcggaggccgtcccctccgccgtcttccttgaacgcccttcccctgatggcgacggcgacgctcctccctgcgaggtcactgttcatttcaggggaaagtatgagattcacagggtgtatgtgcgaagcacagctcggatttatgaaatatactatacaactgaccccaaggatagctctaaggattatctatgcactgtgcgttgtggacctgcagttaaagagccactcccctctgctgaagaaagtatgccccaatggagtagtgatgcctcaactagtgaaaagcatgagcatgaaaccaaaagcgtaagcagtagtattgatgaagatagctgggttgatgtcaaaatcccagagttacatgtggaaaagaacagatctaaatctcaagaacctaatgcaattggagtcaaacaggaaaccactctggcacactatgaagcaactgctgagataactgatgcaagcccatgtgtatctctaactgttcgcctcctttcacttcagtcaaaaacatcagtgcacatcgaggagatttacatatttgctgatcctgttgagccaaccaatgatgaatcagaaacacgtcctggaaacatgggaggtagttctttgttggctatgcttgtccctagcctcatgcaaatgtccaaatcaaggaaccagaaaacggacaataaatatttttctgatgcctcaaggactcagctttcccaaggttgtgcaatggcagtgaataatagtccatgtgaaaatgtagtgcgagatgcagagccgtgtagcacagatgatttaaatttcaagtcagcagggatggaaagcaaactaaatgctatagatggcgatacaataacttatgaaaaaggcaaccattatgagctaaaggattccaagtctattctattgcctatacaaacaacagaaaatacacaagctcctttgacaaagaaccagagtgtgtcaaatacagatcagcctgttactcctctcatggatgaaaatccaaatccttacagtcgcattgagggaaagctggatactcttctctctaagatggagaagatggaactatactgctccaggtttgacgatggtatgatgaggcctatctgtagcatcgagtcaaggcttcagcgattggaacaacagtttgatgtgttctctatggagattaagactttacaagcttcttctgcaagaatgacagccccagatggtttatctgatatgattaatccacaggataaaacagataatgatggtaaggctgaaaattctgcttccacaaccaacaggcagccaggtctggttgtcagagcaccagagttttctttagaagaatccttcagttgcgataagtccaatgaaaatgcagttaccttacgtggaccgagcatggtgccaaggcttcttgttaaggctcctgattttgtttctgaatctgagtttgcttgtgagaagcttcatgatgggtctttctcaccagttgattttgctctgtcttctgagaaagaacctaaaacttccccaggtttagttgtcaaggttccagaatttccaaatgattcagatgatgaattggaggaagagaaagaaacagaagttggtgatcatgatgatggtcatacaaaatctgatgctgctttgagtgaaagcactgttgacagcttcaaaagcaaatctcatgtatctgtcgatggtgctctagcaccagccttggaggcacttcttggttcaaccaagaaaacaccatcttcgcaatctgctgcttgccctgccagtaattcaactgctgaaaatactactgattcttctacctgcccattttcttctgaacaagttgatgagacatccactaatgatggctcggctggccaattatctggtacattcgttgatgcaaataaggtcaataccttcatatcttgtgaggaagcagatgcagttccacaaacttatatctctaaggcaaacttgaaggctgaggtaaacgatctgaataatgttctcgatttgaacatgatggcatttgctgaaagcacagaacccttgtgtgttccacagcttcacacagttgaggaatctaaagatgttggaagccaagcaaatctaaagaataatggctctagttcatacatgatgcaatccattgcaaacactgagcacatcatcgctcattctcagcttcctactgtcttggaatctattaatgatggacaacagttgaatggcaacagatctaccttgtccttggcagagtttcttgtggcaagaaatgctaactttagtaagaatgtgatttctgaagcattatctagtaatggtggtgctgaaatgcataccttcaagagaacatcgatggaatctgctaagaatataaaggatatcaatcaacttctgctgcagaaagctctagaggttaatgaggatgacagtgctaagttttctgtttctggtgggatgaactcttgttgtcttagagcctttactgattccaagaaaagatgcattgagagcagcggcttggaggcaagcctcaatgatagctttacaaaatcagaggtagagcactccttgtcagatttgtgtagtatggaatcatttagtgcagaacctgctagagaagctgtcggctcaggtggtgtcacagctggaaattgtgttgatgatccttttacaggtagttctactgtaaacccaactgcaggcgaagagctgcaaaaggtgtgtgacttgctttacgagtacaatgatgatgttttaggcatggctttcgtggcaaagaaaacaagtaagagcagcccttctctcgaagtcctacttgctgaatcatctgattcggaagcggaaatttctgatgcgaaggacactgacaatgatgctggcttaagttcagctaggttgtttagtacattctcgtcttcagatgatgaagctcctcgcactgatgaacctataattgatgtagttgatctgccaacaccattggatgcatatgcttcttccaagaacgagctggttgatgatgagtctttgcttgatatggatgatccgccaattcctccagagtcgtatgcttctgtcctaagcgacatgcatcatgcatgtctaaatgatcaatcaaaaccttcagggacattcgctggagagggcaatggagagtatcctgacagccttatataggttcaatcaacattgtcccacttgttagaaataagtcgaacatactcaaaaagcctcagctgcactactttttttgttggttttactgtacatatatcaacgtttgcttcc

SEQ ID NO: 23830 - DNA, 1753 bp, Oryza sativa
  ref <308>: DATABASE ACCESSION NUMBER: AK073916
  ref <309>: DATABASE ENTRY DATE: 2001-12-06
gaggagaccacccacaaatcgctcgtcggcgagcgaatccaaaccaaatccttgttctagtcttgtatcacccgcatctgcgcgtccctctgcggcggcggcggcggcgacggcggcgatggggctggagatgaggggatggcggcggcgatcggcgtgtcggtgcccgtgctccgcttcctgctctgcttcgcggccaccatcccgacgggcctcatgtggcgggcggtgcccggcgccgcggggcggcacctctacgcggggctcaccggcgccgcgctttcctacctctcgttcggggccacatccaacctcctcttcgtcgtgcccatggcgttcgggtacctcgccatgctcctctgccgccggctcgcggggctcgtcaccttcctcggcgccttcggcttcctcatcgcatgtcacatgtactacatgagtggagatgcatggaaggagggtggcattgatgcagcaggtgctttaatggttttaacattgaaaatcatttcatgtgcaataaactacagtgacggtatgttgaaggaagagggtttgcgtgatgcccagaaaaagtatcgtttggctaaacttccttctttgatcgaatattttggctactgcctctgctgcggcagccattttgctgggccagtatatgagatgaaagattatcttgaatatactgaacggaaaggattatgggccagcccaactccttcaccactattgcctactttgcgtgctctagttcaagctggcgcatgtatggggttatatttgtatctatcacctcaatttccactttcacggtttagcgagcccttatattatgagtggggtttctggcaccggctcttctatcagtacatgtcaggctttactgctcgttggaaatactactttatatggtcactttcagaagctgcaatcattatatctggtctgggttttagcggctggtctgattcatctcccccgaaagccaaatgggatcgtgcaaaaaatgttgatgttttaggtgtcgaattagctacaagtgcagttcagttgccgcttatgtggaacattcaagtgagcacatggctgcgatactatgtttatgagaggttagttcagaaaggaaagaaacctggtttcctccagttgctgggtacacagacagtcagtgctgtctggcatggtctttatcccggatatatcatattctttgttcaatcagcattgatgataaatggttcaaaagtcatatacagatggcaacaagcagtcagcaatccagtcttccacgctatcctggtttttgtaaatttttcatacaccttgatggtccttaactactcatgtattgggttccaggtactgagcttcaaggaaaccctagcatcctaccagagcgtatattatatcggcacaattgttcccattgtagttgtcttgctgggttatgttatcaagccagccaggccagtgaagccaaaggctcggaaggcagaatgagcaacaagttgacctggtcaagtggtcattacatataggagcgacgaagaacatttaatgacgataatgacgaactagtgtccagctattctactgtggaatttcgcaggagaatgtgatgactcacctcttaaagttctgaactcccttgtgattgatcaaacattaaaacgtggcactcccgttggatttttcttctatgttatgactactactacaactacataggatatcggccttgcgccttcggttgttg

SEQ ID NO: 23831 - DNA, 2713 bp, Oryza sativa
  ref <308>: DATABASE ACCESSION NUMBER: AK073917
  ref <309>: DATABASE ENTRY DATE: 2001-12-06
gactctagccgacgccgccgccgccgcggcgacggcgcgagcgacgcctcgtcgcccttggagaggcctcgacagcgcgcggcgcgggcgcgccacaagctccgctcggcttagccgtcgccgccgcgaagcgaaggccgggggccctcgccgcgctctcctcggcattccgcgcacgccacctgttcgacccaatgcgcagctagaccggctagagattaaggttgcgcgatcccatgtccttcctggcgcccggacgcggccgcctcctccgggtgctccccacaaggcggcaccgtcttccgcctccccaagggtcaggaggctacgcggcgtgcttccggcggtgcaaggcgcacttcttgctcgatggagtcgaggatgcggtggagggagccgccgagccgcagcagccaccggtgtcacttgcgaagagcctggcctctctcaccgaggagtcggccgtggccgctcagaggcagaggaagcccctgctgcggatggagcggaagaggctggctgagctcaggatcaagaagagggtcaaggcgcagtatttgaacggcaagtttcatgatctcatggctaacgtggtggctagcactgatactttggaggatgcttatgacattgttcggctcaattcaaatattgacatgtcatcggtgagggatgatgtttgctttgctacattggcggagctgctcaggactggtgagttcgatgtcagagcgaatgtttatgcggtggttgcaaagaggcgagatggagggaggcttgttctcccacggttgaacttgagaattattcaggaagcagtaagggtggtgcttgaggttgtttacagaccccatttctcaaagatatcacatggctgtcggagcggccgagggcatcagtcggctctgaggttcatttccaatgaaattgggattccagattggtgctttactatccccatgcataaagaagtagatagaaatgttctctctaagattatctgtctaatacaggaaaagatcgatgacaatcagttagttacattcatgcaacacatgtttgatgcagaggtgatcaatttggtatttggaggatttcctaaaggccatgggcttcctcaagaaggagtacttgcgccaatcctaatgaacatatacctcgacagttttgaccacgaggtgttcaggatttgcatgaggcatgaaggccttggttcagaggcagcagatgtttcagacaaccaggagtcaaatttgcgccactggtttcgaagtcaaatttcaggcttgaaggatagggaggaaaacagtgacaatcaaacagactatccactaaaaacaaaactatatgcttgtagatacatggacgagatctttgttgcagttgttggatccagagatattgcagaagatataaaatcggaaatgattacttacttaagaaaaacactattcttggaagttgatgacaggttgtatcttatgccggtcagaagtaattcccggggtttacagtttgctggctctatggtaagagttacaacaaaggaaagtgctgcactgaaagctgtgcataagctgaaggaaaaggttcatttatttgcttctcagaagcaagagatatgggatgctatgaatcttaggttaggaaagaagtggttggcatatggtttgagaagagtaaaggagtctgagatcaagtcacttggtcttagcacgcctttgttggatcacattgcacagtttaggaaagactgtatgaagacagatcattggttcaaaactttactcaaggtatggatgcaggatatcaatgctaaacgcgaagctgatgagagcatactcctgtcaaaatacattgctgaaccatcacttccgcaggacctcaaagacgcgttcaacaactttcagaagcaagccaaagattacatctcatcagaaactgctgccacagaagcattattgtccagcttaaagaataaagaatcagctattacctgcactgatggtgctgtcattaagatccatgctcctattagctatatccataagtgccttaatcgttatggtctaattaatcttgaaggtttccctaagcacgtttcagcccttgttttgcaagacgatgagctaatcataagttggtttgcaggaataattcaacgttggatgagatggttctcagaggttgacaattttaaagaacttaagcttatgttggttgaatgtgtcaggaaatcctgcatcaggacattatcggcaaagtaccgaatgtatgagaaaataacagaaaagcgatttgaacttgatgattatggtattccaatggccgaggactttgaggcaataatggcacctttagaatctagttcgtcggtttgcactgatgaagctctgatgtatggcatttctagtagtggattgtttgtgctcaccctctcaagagttagagttccttctcggcaatttgactgttttgtcatgggatgccaatctgcatcgctgagtatgtatgttcttcatgtcaaagagagacagcggtttccaggatttaggacaggtttctcatcatcaattcatggcagtttggatggtagacgggttgggttgtgcactcaacatgttaaggatttatatctaggacacatctcccttcagtcagttgattttggtgtgctgatagatgactctaataaaataccttaagttcttgt

SEQ ID NO: 23832 - DNA, 2424 bp, Oryza sativa
  ref <308>: DATABASE ACCESSION NUMBER: AK073918
  ref <309>: DATABASE ENTRY DATE: 2001-12-06
ggttcgcatctctcccccattcaaattccaatactccaaagcaccgttaatactactacttctctcacgaatccccaatccctaaaatccccgtacgccgcccgcttctctcctccgattcatccgccgccttcgcgccgccgccctcgcctctcttgcgcctccaccggccaccgccgcggcgtccgatggagaagccggagtggagcatggacgacttcgagatcggcaagtacatcggcgagggcaagttcgggaaggtctacctcgcccgcgagaagcagagcggctacgtggtggcgctcaaggtgacattcaaggcgaagctggacaagtacaggttccacgcgcacctgcggcgggagatcgagatccagcacggcctcgaccaccccaacgtgctccgtctcttcgcctggttccacgacgccgagcgcgtcgtcctcgtgctcgagtacgccgcccgtggggagctttacaagctcctccgcaccgtccgccgcttctctgagcgcaccgctgctacttatgttgccagccttgccggtgcactagcatactgtcataagaagcaagttatccatcgggacatcaagccagagaatttactccttgatattgagggccgacttaaaattgcagattttggatgggcggttagatcaaatgctaaacgacacacactttgtggtacaattgattacctggcacctgaaatgatagagaaaaaggctcatgaccatgctgttgacaactggactttaggaatcttgtgctatgagttcttatatgggtcaccaccttttgaagcagcagaacaggatgatacattgaggaggatagttaaagtggatttgtcgttcccctcaactccttatgtttctgcagatgctaaggatctcatttgcaaggtaaaatttgtggtattgattatacctattgtatatgttacactaaaatgggttgaacttttgagttttgagcttcgagttcgtatgcagcttttggtgaaggattcaaacaagagactttctcttgatgacataatgaaacatccatggattgtgaagaatgcagacccatcagggagttgtagtgaccaaaaggctcgcacataatacctttaagaaacaaggtacattgggaagcataacgtgctaatgaaatacacaccttaccttcccagtcatcaccctagtatgctgagctaaacattaaactttatacacatttgtcaggctacattaaaacgattctgttctgttctcattatggactataataattttcttcatttgtttgtgaagcattttaggcctactttggattgtaggaattctagatgatattcggaggtttcatttcctgtattattgagttactgttcacccctttggattggaggaagaaggcataggaaatttggaggaatttttcctttgcctttgatttcgtaggtagtccaaggcaaatcaatgcatgttactccaaatgatcatagttttaaacacatactaaggaaaataatacacattttatgcttatttaggaagagtcctgtgttttactctatttatgtgttccaaacgatatgtatcatattttcctatgtttttcaatcctatattttgcgtatgcaatcctatcgtattactacatttttttctattcctgtttttccaattcctgcactgcgaatgagcccttgactaccaatagtgtccttcagctttcccaaaccttgtctgagactctactttggaagtggcaggttaagggtttgtcctgtaagatttaggtgctgtgagaagttttgaaattagaccaaagtgtagtctgatgcagcatacgaggagttagtttttccaccttgtgcccgttctgaatttggactcaaatccttgtggctttccctgctctcttatttgtatttattttttggctcttttatgcaggttactccgtgtcattgagggacctggtgaaggctggtgtagtattttggcgaatgcgttgtttgccagtggcccgtatttttttagctaattaagtaattatggatgtctatatgtatccgctaatcccacctcactgggaagccccaagctacctaactacactggctaatgcatgacgtgaagtcctaccatgtttatgtttgctgttgtccgctcctaaaggaagttggctggtgtagccgtaccagtttatgaccctaatcctcatcagtcatcggtgatagcatcttcattaccctaagtgccatgttgttgttgtggataaagttacttaacggaaatataagtataccaagtgcatgtctacctaccttaggaaaattggttcatatcttccccatatttggtctagttcggtgtggttgcgctaatgatttaatctaatgtagcctcatgccgttacacg

SEQ ID NO: 23833 - DNA, 1557 bp, Oryza sativa
  ref <308>: DATABASE ACCESSION NUMBER: AK073919
  ref <309>: DATABASE ENTRY DATE: 2001-12-06
gagttccaaccatttccaccaccatcaccaccctccacctccgcctccgccacagccgcgccgcgccgctcccctccgccgccgcccgcgatggccgcggcggcgatccaccagttcgccgagtgcatcacctgccacgcgtggagccccgaccactcgatgattgccttttgtccaaacaacaatgaagtacatatctataagttttttactgacaagtgggagaaacttcatgttctttcaaagcatgatcaaatagtatctggaatagattggagtagatcttccaacaagatcgtaacggtctcacatgatagaaattcatatgtttggacacaagagggccatgattgggttcctacccttgttattctcaagctaaatcgtgcagctttatgtgtccagtggagcccaaaagaaaacaagtttgccgtaggaagtggtgctaagtctgtgtgcatttgctactatgaacaagacaacaactggtggattagcaaggttgttaggaagaagcatgaatcttctgtcactagtgttgcatggcatccaaacaatatacttcttgcaacaacatcaactgatggtaaatgcagagtgttatccactttcatcaagggtgtcgatacaaggggatcacatgcgagcacttctactgattggaaatttggagagcaaattgctcagcttgacctatcatctatgtgggcatttggtgtaaggtggtcgccaagtggaaagacactagcctatgcagggcacaattccatgatttatttcattgatgatgttgaaacgtctcctgctgcacagaatttagcactgcgtgatctgcctctccgtgatattctttttctttctgaaaggacggtgattggtgttggatttgattgcaatcctatgatcttttctgcagatgagactggactttggagctttgtcagatacttggatgaaagaaaagtaactacatcaacttcaagagcttcacagctatctgaagccttcggaaagctatatggccaatcaaagcaagtggcaagcagtgatactgttgaaccatcaaagcctcgtggtggtgttcatgagaattgcataacttgcatcgtgccattgagaaaaggaaacgacagtattgtcaaacggttcagcacgtcaggattggatggtaagattgtggtatgggatgcagaaaaccacatcgacattaaaaaatagctccagggaaggtttctgatcaatcacatccaatgaacttatattgatgcatggaaacaatggcaacgagccctgcaggttttaaagatccagggctagggaggagaatgcttgttttttgttgtacctgtacacaaaccatttctttagctggctctttagcatagaggctattgggatctctataagttggcttcatttttttggggagtaactcggtcttgaattaatattgtgtaatacctgtaaaatcctagctaggcaattacataaattcgacatctcatcccaagtgtttcgcggtattctgtgtaaaataaccacacgtggaattcaccc

SEQ ID NO: 23834 - DNA, 2320 bp, Oryza sativa
  ref <308>: DATABASE ACCESSION NUMBER: AK073920
  ref <309>: DATABASE ENTRY DATE: 2001-12-06
gcgctttcctttcctttcctttcccttctctgccactttccccttggcgcctactccaccaccgtttctccgcctccttgtcccactcacgcggagaggagaggagaaagccacgcgactcgaggcgaccgtacggcggccgcgacgaggaggaggaggagcaagccacgccgagattttggtggggagggaagaggaggcgggcctccaatttcgcctccgattctgtctccgatcgccggtcgcgggaggagcggcggcggggggagggcggagaggtttggggtggtggtggtgatggagccgtacgcggcggcggaggggggaggaggaggaggaggtggaggcagcaccgacaccgggctcgaagagtcgatgtggaggatggggctgggcggcggcgggggtggcggaggggaggcggtggcggcagggaggctgccggagcggccgggggaggcggactgcgtctactacctccgcacgggggcttgcggctacggggagaactgccgctacaaccacccgcgcgatcgcgccgccgcagcagtgttaaatggaggtgggaagaccacacattcggcagagtatccagaacggccggggcaaccagtttgtgagtactatatgaagaatggaacttgtaagtttggctctaattgcaagtatgatcacccaagggaaggctctgtgcaagcagtcatgttaaattccagtggataccctctacgctcaggtgagaaagattgtacctactatgtcaaaactggccattgcaaatttggatctacatgtaaattccatcacccagaaattggtggagtttcagagacacctaacatgtatccaccagttcagcctcagcctatctcttcctctcatccatatcaacatcttgctggctggcaaatggggaggcctcctgttttgccaggatcatttttatcaggctcatatccaccaatgatgcttccgtccacagtcgtaccaatgcagggatggaacccttacatttcacctgtgaaccaagttgcgtcagctggggggcatcaaactgttcaagcagggccgttttatggcttatcgcaccaagggccttctgctgcagtcacttatggcagtcagtatgcaccgttatcttcttcaaccatgccttcaagtagcagtaaacaagaacctgcctttcctgcgcgacctgggcaacctgaatgccagtattatctgaagacagggagttgtaaatttggatctgcatgcaaatatcatcatcctcagtatttgaatacacctaagtctaactgtatgctgagtcctcttggtcttcctcttcggccgggtagccaaccatgtgcttactatacacagcatggattttgcaaatttggtccgacttgcaagtttgatcacccaatgggtactctaagctatagcccttcagcgtcatcgattactgatttgcctattgctccctatcccctcaattacgctgttgctcctgtggctccaccttcatcttcttctgatttgcggccagaataccttctaaccaaagagttttcagccaaccagtcagcgtcacctggtactacatgcggacctgctggagcaatgttaaaagcgtacgctccacacatgcttatccgacctcaaacttctggagctggtggcatggttacaactcatggtggagagctctaaccaccttcagcaagcttctcgggacttttttggcatatggtgaatgagatctcgtctcctttttttgcgtcagttcgacttaccctctcagcatcagttcacttggacccccactcattgtgaataaggcttcaactgactttgacaaaggcatggccaaggtggtaatcttgccacctgaataaattcatcatagatagataggcagtggcaagctcattcacttgccgtttatctcttcatgtctgaaatggaacaggggtcattctgaagtccagttaactgtttgactgtcattgcactatgattcagagcttcgaatccatctcctcggtacataattttatcggcggagcaggccgttgagtgtgcaccactgcagagagtttcatgtcagaaagttatttggtttggtcgctcttgcccaaatctctgtttatttttaatcatcatatatatatgcaatctcgagttcagctatatgcatattcatatatatactgggatcaagaaactgtaatcacacacttggaaaccctcatctgaatcgccccaagctaacttgctgcatcatcattttgctcatttagtcgattgcatccgacttatgtttgaaccctgc

SEQ ID NO: 23835 - DNA, 1629 bp, Oryza sativa
  ref <308>: DATABASE ACCESSION NUMBER: AK073921
  ref <309>: DATABASE ENTRY DATE: 2001-12-06
gagctccctccatctctctctcccctctctctctctctctctctctctctgatctgcagagccggagcccggaggcgcggctgcggctgccaagcctcctcctcctcctccagcgcgcggccagcgagcagcctcggaggccaccgccgccgcctcctcgcccggacggcgggggagcgggcggtgctccgtccagcggagcgagcccccccaatcttggccggaatcggattgaaggatcttgcgttagttactgtgctgttcgctggatgctggcaatggggtcagaggagtgggagttgtatccatcttccttcattggtgctcaggtcatagattatgggcatgtttctggagacatggatgatgatcagagtggagacttggccgtgtcgatggacgccgttctccctgatgatcttttagaaaaggtcctctccttcttgcctgttgcaagtgtcataagatctggatctgtttgcaagagatggcatgagattgtgcatgcccggaggcagacatggagcaaaatggtgcctcagaagccttggtacttcatgtttacctgcagcgaggaagcggtctcggggttcacctatgacccgagcctgcgtaagtggtatggattcgacttcccttgcattgagaagaccacctggtcgatttcctcatcgtccgggttggtgtgtctgatggacagtgaggataggagccgcatcatcgtgtgcaacccaataactaaggactggaagaggcttgttgatgctcctggtggcaagtcggctgattacagtgctctcgccatttctgtgaccaggacctctcatcagtacaaggtggctgttgcaaggtgcaaccaggtgccatcagggtattatcaatgggagttcaccatccatttgtacgagtcagagataaatacatgggtgtctcccttcactgaactattgattggatggcgaggaggtgatgagtgcgtgatctgtgatggggtcctctactatctggtgtactcaacaggagttttggtgaataacaacgagcatcgccattgtcttctcatgtatgacctatctaccaggcctactcacacttctttgatgagcatggctataccagtgccgtgccctcttacatgtggccgtttgatgaacctcaatgagaggcttgtcttggttgggggcattggcaagcaagataggcctggtatcatcaagggaattggcatctgggagctccggaacaaggagtggcatgaggttgctcgaatgcctcacaagtttttccaaggatttggcgagttcgatgatgtttttgcaagctgtggggcggatgaccttatctatattcagagctatgggtcaccggccctcctcacatttgaattaaaccagaagctgtggaaatggtcactgaagagccctgtgacgaagaggtttcctctgcagctgtttactggtttctcttttgagcctaggctggacattgcttcctagttttattttgtttcacttccacggaattcttgcattatttgcctggtttggagttaccaagtgaagagatgatgtcattggaagccattcgagaaagtgtttcaggttttatagatctattctatttattgcc

SEQ ID NO: 23836 - DNA, 2011 bp, Oryza sativa
  ref <308>: DATABASE ACCESSION NUMBER: AK073922
  ref <309>: DATABASE ENTRY DATE: 2001-12-06
ggctcgccttccccggctttgactcacagactccacgtctccaccccgaatctcacttcccgtctcgcccccgcccccaatcctcaccgccgccgcccgggccagccatggtgggcgccgacgccgagtcctcggcggtggtcgacgccggcgagggccacggagacctggccctcgattcctcctccgctgcctccaccgaccctctgctccacccgccgccgtccccttcctccaccccctcctctcccaccgcgatcgccgaccacgacgcgttcatcgaggaagacggcgaggatgactccgcgccccacgtcccatccgcttccgacgaggcggccccggagttcgtccagatcaccgtctccgagcctaagaagcacgcggagccggccgcgggggcagcgggggtcattcctggctccgggagctacttctcctacctcatcaccaccagggcggccgacggcggcctgttccgcgtgaggcggcgcttccgcgacgtcgtcgccctcgcggaccgcctcgcggcggcctaccgggggctcttcgtcccggcgcgaccagacaagagcatcgtcgaggggcaggtcatgcagcggcatgagttcgtgaaccagcgctgcgccgcgctccagcgctacctcggccgccttgccgcgcaccccaccatcggccgcagcgccgaactccatgacttcctgactgagccaagcggcattcccacctccgcgggcgagtcacccagatcggatcccgcgttgagtgctgccatgtccgcggccgccgttaccgctccaacggcgcctgcaaagcctgggagagatatttttgggatgtttaaggacctgaagcagacggtggcgaatggattggtggcagtgaggccgcctccagtggaggaggaaactgatgcaaagttcgtcatgcacaaggccaagctggagtacttcgagcagcatctcacgacggcatctcagcaggtagaggctcttcttaaagcttatgatgatcttaaagcaactacaggtcaactgggaatgacattcattaagctggcaaagtttgaaaaggagcaggatacatgtaattctcagagaaaaagagctgttgatatgagcaatttcgcaaatgctgttatcaacatgagcagatcacagacaaaactaaatgctaaaattgaaatacatctgggcactatctatgaatacttggagacaatgacttctgttcgtaatgcatttactgatcgcgcaaatgctttgcttcgtgtgcaaagtctgtcaggagatttatttctcttgcatactcaggcagcaaaacttgagtccgtatcatccagaggaatgggccaggaaagattaagataccaaaagattgaagaactgaaagaaacaataagaaaaacagaagatgcaaaaggcaatgcacgccaggaatatgagcttatcaaggaaaacaacatgaatgagatcataaggtttaacaaagaaaaacgccatggtttggttgagatgctgaaaggctttgtaagaaatcaggtttcatactcagagcatatttctagtatatggacaaaggtagcagaagaaaccacaggatatacaggcaagggcagctgaagtaggatgtaaatatgcatgtgaattttagccttttatctgcagatcaacatcagttacagaattcgaaatcgtcttatagctcaacacagtggtatagagtatagactataaacagagatgtcacacttccctccatccaaagggcgtcggatctgtgatttttctggagatggtatctccggctgtttaggcgtatagcagaattttctaggaaagagaatcaaatgatcagcaaaccaacacaactgtttttttttcccagtccttttttttccaccctgggctttacagtaatgtaatgttgagtttctgtacacgaaactagattagctggaattttctggttcctgagagaaccacatacatgaagatttctttttggtccc

SEQ ID NO: 23837 - DNA, 1455 bp, Oryza sativa
  ref <308>: DATABASE ACCESSION NUMBER: AK073923
  ref <309>: DATABASE ENTRY DATE: 2001-12-06
gatcccgacgccgaaagcccgaaacctaaacacctcctcttcctcgcacgcccatctccggattccaaccaaatctccgggatggcctcgacctgcttccgcgccgccgcccgcatggcctcctccgcctgccgctcggcggcctcccgctcaatcccctccgccgcgcggcgcggcgcccctcgcatctccaggctgccggtggagctcgggtgcagcgcggggttgtcgctgctgccgctgcacagcgcggtggcggcggcgaggctgacgtcgcggctgagcacggcgtcgcggagctgctgcgcgctctctcagggtaccctctgtcgcacctatcccggactttaacatcaatcaataccatcgatgagatgcacttgcctgtcttttccgtttgggtgagaaccgtgcccgtgcgtattattgtaccagtacttcattttcttcgcccgctactggcgcaattacttgttcatctgctgctgtttgtttcgtcaatgtaatagttttgccctcaaccaagcgtttttgtgctcagctctcttatttgtgtgattgatgtgtgacataactctgtgccgttgtgaacatataacgatttctatgcatacactaatcattttctcctttagtgcactaaaatagtgttgcatacatgatagtgatacatcaacatttttacagtacaatcctttttttctttgatgatcaacacaccatcacatcaatttcatgttgtatataataagtcaagagattcgcttgttaagttttctttttttttttgatgaattgaggtcaattgagtaagacatctggtttctgcaggcacatgacttgctagttcttgaaagattttaccaggagcttgctgttttgcttcacaatcatcgagaatgagtgccttaacatgtcaaattgtaatcaagactagcgttatgttttttaagctagaatcttagctgcctatgttgaggggcaacatgatggaataaagtaacatcattttacatgttttgcgtaatagttggctgtttgcccaagtctatttgtctgtgagatatttaatacaatctacgtaattttcctatggcatttgcaattttttcctagactttcctgtttgcatggatgcatgctcgtttgattttttctttcaacaaagaattttataacatggttgccattttagtttacaatatgatcattcttctcttctcagatgaaagtgatggtacgtgaaacatttacgcaatgtcttaaaggtggtgcttggctgttatggcaatgctgcacatgtattactgcgacatccgccttagtcatagaatttatggttttgacactccggattttgtaaaagttattttggtagtgtcagggataaacatcaatgctgtatgcttccacacttataaagttataatgaagcaattgagatattcaaagttc

SEQ ID NO: 23838 - DNA, 2090 bp, Oryza sativa
  ref <308>: DATABASE ACCESSION NUMBER: AK073924
  ref <309>: DATABASE ENTRY DATE: 2001-12-06
ggaagatgcgattgccaaaatcaatcattctaacagcgcagatgttaaggataacctggatcatcaagaatccagtattggtgttcgtagggttctttctgatggtcagtttccagtaaatgctgatatttcagacacattggatgcaaaatggagaggtgaaaatggaacagttcctgatacaagtatcctgaaaccattagctctgctagaaggttcagctgatcttaaaaaccaagctaaggcagtgccaaccaatgcttctttatctgtcaggtctggagatacagtagaagacttatcaagctggctcaaaatgccatacatgacattctatgactccttaaacacaaattctgggacagcaccgagatttggggccctggctgactacaatcctgtgtacattacattgttccgtgagttatcacagcaaggtggagcaagactttttctgccaactggagctaatgatgttgttattccagtatttgatgatgaaccgaccagtataatttcttatgcacttgtttcacccatgtactgtcaccaaatgttggatgagaacagcaagaacaaagatggtccagattcttcacttccattgcctgtatatgattctggaaattttaatccttttcatttatttgaggatttcggatccgctgatgatcttgcttcgtcaatatctggaaccagagggtcatttgttcccgatctagttcacctaagagttccctttggggatggtggcccactcgggaaggtgaaatacacagtgacgtgctactatgcgaaaagctttgaagctcttagaaggtcttgctgtccatctgaacttgactttttaagatctatcagtcgatgcaagaaatggggagcacaaggtggcaaaagcaatgtgttttttgcaaaatctctggatgatagatttataataaagcaggtcacaaaaacagaacttgaatcattccttaagtttggactagattattttaaatatttatcagagtctataagcaccggaagccctacatcccttgcaaagattctgggaatctatcaggttacaattaagcatgtgaagggtggcaaggagtcaaaaatggatttacttgtgatggaaaatcttttatttggacggaatattacaaggctctatgatctcaagggatcttcgaggtcaaggtataatgctgattccagcagcaacaaggttcttcttgaccagaacttgattgaggcaatgccaacgtcaccaattttcgttgggaacaaggcaaagaggcttctggaaagagctgtttggaatgatacttcctttctggcaggaattgatgtgatggattactcattgcttgtgggagttgacgaggagaaacatgaattggttctgggaataattgattttatgaggcagtatacatgggacaagcacctcgagacatgggtcaaatcgtccggtattctcggcgggccgaagaatgcccctccaactgtgatttcacccatgcagtataagaagcggtttagaaaagctatgtctgcttattttattgtaattccggagcaatggatgcctgcaataatcaatccgagcaaatcatcatcaaatctttgccaagaagatcctcaaaatgcttcacaagagtagtacaatattcagttcattatgccaggcagagagcacctggttttttgtcttgatccaatcaaaagcgccaaacgatcagtctggatgctgcggcatcaatgtggtattacgactgcaattatcaaaatgcttggactctcatttgcacagatccgattgcagtggagtcgtcttggctcaagaatcatcgggtgtatatatccttgaaactgtaattatgcattagtttttttattttctttttgatttattatgtaataatataatgtcgtcgcttctctctagttcccattccattttggttggatgtaaacaatagaagtggggcattttttttttgtaagtgctcgttgtatattattatatatatatgccatgttatttatttgggggggctattgccgtctgtaataacaaaaataagagtagttcatgc

SEQ ID NO: 23839 - DNA, 714 bp, Oryza sativa
  ref <308>: DATABASE ACCESSION NUMBER: AK073925
  ref <309>: DATABASE ENTRY DATE: 2001-12-06
ggcaggttggtcggaaccctatgcctgacctccgcctccgatcctccgccctgagccgcgcgccgccgccgccgccgctgcaggctccttgttcctcgccggtttgctcgtatcgctccgtacaacgacgcaccggtgctagagaagacaacagcacagggaggcgacaaaggtggcattctgttctccaaagagcagaaaacatggttaatgcaataaaggggttgttcatctcctgcgatgtaccgatggcacagttcattgttaatctgaatgcttcaatgcccgcttcggacaagttcatcctgcacatgcttgacccgacacacatgtttgtgcagcctcatgtggcggagatgatcagaagtaagatttcagagttcagagaccaaaacagctacgagaagccaacatgaaagatcactctaccccacaattcctgtgtgtgcaccattgaaaagataccaacgcttgtctatggtttatagtttttctttagatagtctatggtttagtatagttgtgtgtgatgtgacttgtgagcgtcatgtgccactcatcaatcatgatgatgttcaagaatgataaacttgcagtatcagaaaatgttgtggcttatgacttatttgtcttcagtgatagtattaatcacctgtccatttggtagcgttggaacattgagagacagcctatttctgaagaatcagttaactt

SEQ ID NO: 23840 - DNA, 914 bp, Oryza sativa
  ref <308>: DATABASE ACCESSION NUMBER: AK073926
  ref <309>: DATABASE ENTRY DATE: 2001-12-06
gactagaatcctccaacttccccttctgttgcatccccatgctaaaataagaacagcctagccaaaaccctctattaggaacaacagaaagccttaaccaggagcaacactgatgggctccattggcaacggccggaatggctcggaggttggcatacagatcccagcgatggggaacaaggaagtgctggagcgacctgccataccaagatggccacggctaggcgtcgtcatggtggcaactagagctgttgccctggtgatggcagtgctctcaatggctctaatgatctctgccaagcagcggggtagtctcaagatcttcggcatcgagatcccgctttatgccaattggtctttctctgattccctagaatacttggttgggatgtctgcagtttcagctgcctactgtctcgctcaacttttattgactgcacacaaggccgtgaagaatgcccctgtggttcaatccaggaactatgcctggcttctgtttactggtgatcagatcttcgcatatgcaatgatgagtgctggatcagcagcggcggcagtcgcgaatctgaaccgcaccggcatccggcacacggcgctccccaacttctgcaagccactgccacgtttctgcgacttgtcagcggcctccatcgcgtgtgcctttctcagttgcatcttccttgcggcatctgctgtgatcgatgtcatctggctgtcaaatatgtgagagtttgagaaggtcgtaattccttttcctttgtggaaccatcagggtgcagggtgctgtatgtacttgcaccgtgggtatgtgagataatcaactgaacccaaaatgtgttagaacttagtagaacatatgacgtttgctgcttgtacaaaggaatcccctctcgctgcaatgcacaacatttcct

SEQ ID NO: 23841 - DNA, 1613 bp, Oryza sativa
  ref <308>: DATABASE ACCESSION NUMBER: AK073927
  ref <309>: DATABASE ENTRY DATE: 2001-12-06
gggaccaaactcaaacccgaccccggccccgacgagtcggaactcgaagcatctcgcctcgccgccgccgccgccgcacgcccgacggaagcgagcgcctctctctctctctctcaccggcgacgggatcgacggcggcgggggcggggatggtggctggctgaaggcgctgtgctacggcgcggggggcatggcggtggtggggctcgcggcgctcgtggcgctgcaggagcgcctcgtctacgtgcccgtgctcccggggatcgcgcgggcgtaccccatcacccccgaccgcctccgcctcatctacgaggacgtctggctccgcgccgccgacggcgtccgcctccactcctggttcatccgccactcccccacctgccgaggtccaactattctgttcttccaagaaaatgctggcaatattgcacatcgtttggactttgttcgactaatgatgcaacgactacagtgcaatgtatttatgctttcttacagagggtatggtgagagtgatggttatccttctcagaagggcatcataaatgatgcacaggctgcacttgatcatctagttcagaggaaggatattgacacatccaggatagttgtttttgggagatcgttaggaggtgctgttggagcagtgcttgcgaaaaacaatcctggcaaggtgtcagctctaatactggaaaacacctttacatctatattggatatggctggtatcatgctacccttcttacgatggttcataggtggcagttcttcaaaaggtccaaaacttctgaactgtgttgttcgctccccatggagtacacttgatatcattgcagaggtcaaacaacccattattttcctttctggattacaagatgaattagttcccccttcacacatgaggttactatatgaaaaagcttttgagcataataagaattgtagatttgttgattttcccaatggcatgcatatggatacctggaattctggaggagaccgttactggaggacaatccaactgtttctggaccaatatgctccagaagtacagagttgtaataccagctgcaaaagtgaaattgctaatgatgatgaagctgaagagtgaccagaacatctggagcggccttcttttttttttcttccaggctccagttttctggtgtgatgcgatttaaatcctgatgaactgaagctcactgcaaacaattaattcaggcaattattctccattcaacctgaagaaggcaaagttgtgaataccttgaggttgctctccatcctagcactacatttgtctctggagctatatatagatttctgagaagacctagcctttgaactgatgattccccctcccccccttgatttaatctgtgatgttgctttgttgaagttttttacaatatactgtagcgcattaccatgtcataatctggcctcggtgtataacagtgtaatgcataggtttttaggctctggttcagcaatttggttttgtgttttttattattggtgttatagatctggttgcctgcttcttaagcctgttataccaaaactgttgcaatatcaataggccatgtcttcaccggcagtaattttttagc

SEQ ID NO: 23842 - DNA, 1098 bp, Oryza sativa
  ref <308>: DATABASE ACCESSION NUMBER: AK073928
  ref <309>: DATABASE ENTRY DATE: 2001-12-06
ggtttctgaccaatcccctctgctctctcctctcctctctccctctcccgcgatctgcagagccgcttgtgcccccgcgccgccttcccccccccccccccctccccccgccgtcgccggaggcctccgtcgtgcgcgcggccggcgaggccgctcgagtcgaaccggaagctttcgtgagtgaggatttctcaaacttcatttattttccatcactgggaggtgttgaagcttaatcatgagctctcgtcgtgtgaagtggaatgaagacaacctgtatgagattgaatcaaataaacctgttaggcagaagataactgagcctaagacaccatatcaccctatggtagatgatgatgggtcattgtcaccaacgcgtccttttgacaagtgtctggatgagactgttaatgctgaagctattttaactgctttaaatggtgtggcttcttcaagcaaaactgatccaaaggatgatggttgggcatcctcagatgatgatgcagatgccatggaacaagatgatgatccagaagctgaaaagtcaagactgagtttcaaggaacatcgtcgtgctcactatgatgaattcctcaaggtgaaggagctgatgcgctccggatcgctgattgacgatgaggctgatgaggatgatagaggtgcaaaaggcagccaagccaaagctgtaggaaagaagccagcaggctgtgacagcacacccccaccgcaaacatgaagcaatgaagttaccgttcctttttccctgttgtttgctaagctaggaaaagctcaacatagcagaagcatgtggtttgtctaaattgtgtgaagcatgctttgcctgtgtgttagatccttgtattcaaaatcagatgtgcatcctgtaaacgacgcatgccattcatcttccctttgtgtttaagatcttgatgtacctagaatggctttgatttagtttgagttgcctagctacatttacttgctgaacggtgagctcctttgcatgttcatttgagactatttatcaagagctgatactcaaaccacatattggataaggccagatatggcaagatatggccttgatttgtttcacgc

SEQ ID NO: 23843 - DNA, 938 bp, Oryza sativa
  ref <308>: DATABASE ACCESSION NUMBER: AK073929
  ref <309>: DATABASE ENTRY DATE: 2001-12-06
ggagtgcagtgcagggaatcatttcatttcttcttcttcttcgccgccgccgccaccttccaccccttcagccgccactccaatccaaggaggatgagtgaagaggacaccaatgctgctgctgggcagcccaggcgcgcccctaagctcaacgagaggatcctgtcctccttgtcgaggagatcagtagctgcacatccgtggcatgatcttgagatcggccctggtgctcctgctgtcttcaacgttgttgttgagatcaccaagggaagcaaagtgaaatatgagcttgacaagaaaactggactgattaaggtcgaccgtgtcctatactcatcagttgtgtatccccataattatggtttcattccaaggacactttgtgaagacaatgatccaatggatgttctggtcctgatgcaggagcctgttattcctggttccttcctccgtgctagagcaattggccttatgcccatgattgaccagggtgagaaggatgacaagataatagcagtatgtgctgatgatcctgaataccgtcattacaatgacatcagtgagctgtctcctcaccgcctccaagagattaaacgcttctttgaagactacaagaagaatgagaacaaggaggttgctgttgatgcattcttgcctgccaacactgctcgtgacgccattcagtactccatggacctgtatgcgcaatatatcttgcaaagcttgaggcagtagagtgctacccgatctttatcgtgaaaatattgtatttgtgccaactgcaaaactggagtagagactttgttcacaaaaatggagtgctatggggctggctatgatttcctttaccctccagctgtgtatcaatttgcatgtggtttcatacttacaaattatgaataagtgaagtttgggcagacatgaatttgttctgtgtc

SEQ ID NO: 23844 - DNA, 1016 bp, Oryza sativa
  ref <308>: DATABASE ACCESSION NUMBER: AK073930
  ref <309>: DATABASE ENTRY DATE: 2001-12-06
ggttacggggtttacttggtgacgaatcaatcgaaacccaatttatcaaatccatcgcgaatccccaacccaaccgaatccacccaagaagaagaagaagaagaagaagggttattgcatcgatcgcagcgagggggaaaggggtaatcgcggagcagatcgaaacccgaatccaatcgatcgagccgccatgagcttcatcttcggcaagcggaagaccccagccgagttgctgcgggagaacaagcggatgctggataaatccatcagggagatcgagagggagaggcagggcctgcaggctcaggagaagaagctcatcgccgagatcaagaaggtggccaagcaaggacagatgggagccgtaaaaattatggcaaaggaccttatccgcacaagacatcagatcacaaaattctatgccctcaagtcccagctacagggtgtatctcttcgaattcagacattgaaatcgacacaagctatgggtgaggccatgaagggtgtcacaaaagccatgagacagatgaacaggcagatgaatctaccagctctgcagaagataatgcgggagtttgagatacaaaacgagaagatggagatagtcagtagcacaatgaatgatgccattgacgatgctttggagggcgatgaggaggaggaagaaacagaagaactggtaaaccaggtccttgacgaaattggcatcgacgtcaactcagagcttgtcggggctccttcaaccgctgttgctgcaccggttggagcaggaaaggttgccgctcaagctgaagccgctggaggtggggacggtgggatagatgacgacctacaggcccggcttgataatctgaggaagatgtgagcatatagggcttggaagaaataactatacggtgtcattgtacaatcagcatatagacattttatgccatcatttttcttagattgttgggcacataactgcaggcttcgattttctagcccccttgtatatatagaagctcttattatcc

SEQ ID NO: 23845 - DNA, 2686 bp, Oryza sativa
  ref <308>: DATABASE ACCESSION NUMBER: AK099385
  ref <309>: DATABASE ENTRY DATE: 2002-08-28
gctcgattaaaccctcgcctcccgccgccgcacgccggaggcgaccaccaccaccaccaacccccgccgctcgccgcctcctcctctcccgcggcatggacgccgacttccggttcgacccggacggctccgacgacgacgtggcggcggcctcggcggccgcggggcggaggaagccggcgcagtcgccgtgggagttctcgtcctacgcggagtccgtggcggcggagcacgcgcgccgccgcaccacctccatcgacgagaagatctcccaggccctgagcggtagccgccgcggcgggaagccttctatccccgacggtgactccgagggcgacgaggatgattcggaggtggaggatgatagtgaggaggacgacaaggaggtggtggaaggggagatcgacgacgaggaggacgaggttgaggagagcgaggatgatgacgagggggtagaggtgagcgatgaggaggtggaggagttggaggagggcaaaggggaggagaagagtgacgaagtggaagagggcgaggaagggcaagatggggaagaggaggagaaagaggaaggagatgaggaagctgcagaagaggaagaagaaacggacaagaagagtggtgtagtggacccttctaaattttttgcatcttccgaaggagcgtcgttccatgcaaattcatttcttgagctgaacttgtcaaggccacttcttcgagcctgtgaagcactcggctaccaaaaaccaacgccaatccaggctgcatgcataccattagcattaactggacgggatatatgtggcagtgctataacaggatctgggaagacagctgctttctcattacctgtgctggaacgtctacttttccggcccaaacgtgtacctgcaattagggtgcttatccttactccaacaagagagttggctgctcaggtccatagtatgatcgagaaattagctcaatttactgatatcagatgttgtctgattgttggtggactttcaactaaggtacaagaggtagctttaaggtcaatgcctgacattgttgtagctactcctgggcgtataatagatcatctacgcaattcactttccgttgggcttgaagatcttgcaattttgatccttgatgaggctgatcgtttgctagaactcggtttcagtgctgaaattcaggaactgattcgcatgtgtcctagaagaagacagacaatgctattttctgctacgatgacagaagaaattaatgagcttgtgacactttcactgaacaaaccagtccgtcttgaagctgatccttctctgaaacggcctgcaacattgacagaagaggtggttagaatacgaagagcacgcgaagcaaatcaagaagctgttctgcttgctctctgtttgaagactttcaaggataaagtaatcattttcagtggcacaaagcattctgctcacagattgaaaataatatttggtctctccgggatgaaagctgctgaacttcatggcaaccttacgcaggcccagcggcttgaggctttagagcttttcaaaaagcaagaagtggacttcctgattgcgactgatgttgcagctcgtgggattgacatcgttggtgttcgaactgtaataaatttttcctgcccgcgtgatgccagaacttatctacatcgtgttggacgcactgctcgtgcaggcagagaaggatatgctgtgacatttgttactgacgatgataggtccctcttgaaagctattgcaaagaaagctggttcacagctgaaaagtcgcattgttgcagagaagcctgtggctgagtgtgcaaaattgattgaggaacttgaagatcaaatttctaccataattcaagaagaaagggaggaaagaatattaagaaaagctgaaatggaagctacaaaggcagaaaatatgatagctcataaggatgagatatactcaagaccaaagagaacctggtttgctactgagaaggaaaagaaacttttggcaaaggctgctaaagaatccacgagtcaaggtaagagtaattctggagttattagcgctcagcaagctgaagatcttcgtctgaaggagaaaaagagaagggagcgtgagaaaaatctacctaggaagaaacggagacggttagaggcagaacgggagatgttagaagatgagagcgaagatgaggaagaagctaaggaaagcaaaggtgggaaaaaagaaaagaaaggtcaatcgctagtcgatgtggcttatcgtagagcaaaatcaatgaaggccagcggtaaaaggggtgctggcactggcaaaggaaagaatgataaaaaggcaaaacaacattctggaaagggcccaactaggcaagaggagatgcaagagttgttccagaatgatatgagtgaatggaagcagggccgctccttaaagaaaaataatgttatgcgaaagaaatcgaaaaattcttttaagagcaaatccaggtacaaccgccgaaagtagaagacccgctaacttgtagtagcgtgttttcctcactgggaatttattgcattcccttgtatcaattttgaccgactgatcctgaagaaatgtcaggatatgttgtgcccatcttgtatttactagttatatacaattttctcatatcgtgcattaatcacattcgtcatgatttttaatgt

SEQ ID NO: 23846 - DNA, 1822 bp, Oryza sativa
  ref <308>: DATABASE ACCESSION NUMBER: AK073931
  ref <309>: DATABASE ENTRY DATE: 2001-12-06
gagcggccagccacatcgcataatctcgtcgcgcacacgacacacccccgctgcgcacccacccaaggcgaaatttcgccggcgcgcgggccccacgatcatcggcccaactcaggaagcgcaagaagaagcaaccggagagcctcctccggcggccatggccagggccctcctcctccggcgcggccaccccttcctccgccgcctcctgcggcctcccccgcctcccacctcctctgtactggaatcctgcaatagaaatgtgtcaccaagagttcagttgtggagattctctgcagaagggaaagaccagacaaattcaagtgaagatggttacagtgaggcaaacattaagaagaaggactttgcgctacaacaagctttggaccaaattaagtctgcatttggtgaggagtcaattatgtggctaaatcactcttacggtcctaaagaagttcctgtcatatctactggatcctttgcattggacatggctttaggaattggtgggctcccgaagggaagggttgttgaaatttatggtccagaggcatcaggaaaaaccactttagcacttcatatcatagctgaagcacagaagaatggaggatattgtgcttttattgatgccgagcatgccctggatccaacattagcagaatctataggtgttaaggcagaacacctgttattatctcaaccagactgtggtgaacaggcccttggtcttgctgatatcttaatccgaagtggctctattgatgttgtggttgtggacagtgtagcagctcttgttccaaaaactgaactggatggtgagatgggagatgcccatgttgcacttcaagcaaggcttatgagtcaagcacttcgcaagttgagccattctctttctcgctccaggacaatgttggtgtttattaatcaggtaagatcgaaattaagcacatttagtggattcggagcaccagcagaagtaacctgtggagggaatgccttaaagttctatgcttctgtccgcttgaacaccaaaaggattggtcttataaaaaagtcagaagaggttgtaggcacacaaattcaggtcaagattgtcaagaacaagcatgcacccccatttaagactgtacaccttgagcttgagtttggtaagggcctgagtcgtgaattggagattattgaagtaggcttcaaacacaagttcataacaaaatcaggagtattctatcacttgaacgggcaaaatttccatggaaaggatgctcttaaatgttatctcgctgaaaacaagaatgtcctggaatctctgatgtcaatgataaaggaaagcataatgcaacaggagtcccatccagatagaaacatggaggatgccaacccagatacgagcataacagaagagttcgtttcagcaacagatgaacaagtacctgaagaggttgaggcctgaagcaatatagcagtatcctttttctttttctttttctttttcctgcaagactagtgtacatatgccacgtttcatctcttcttaacttgcaaggtttctagctaagctgtgcgacaataaccaagtaaggataaaatgtaaataacttttcaccattttgctgtgtacatgccattgtacatatttatccaccttaggctgtgtttagttcagcgcaaagtttggattttggttgaaattggagatgatgtgactgaaaagttatgtgtgtatgacaggttgatgtgatggaaaatgactgaattttggatccaaactttggatctaaacacagccttagtttgagaaacagcaaatttatcaaacttcccc

SEQ ID NO: 23847 - DNA, 1567 bp, Oryza sativa
  ref <308>: DATABASE ACCESSION NUMBER: AK073932
  ref <309>: DATABASE ENTRY DATE: 2001-12-06
ggggcagagaggcgagagcatcgcgactcgaggccaatttcttccttcccctttccttttcgctcgcggcgcgaggcgatcggatggcggcgtcgtcgtcgtcgtcgtcgtccgccggccgccgcctcgccggaaacctaagcctgaggcctggcgtggcgtcgattatccctgggctgccggacgacgtggccgccgtcatcctctgcctgctcacgttccccgaccagtcccgactccgggccacctcccgcgcgtggcggctcctcctctcggcggccacgctcctcccgctccgccgcagcctgcggcttccgcggcgccacctcctgtgcctcttccccaccgacccctccctcgcctccccgatcctgctcgaccccgccgcgcccaccgcctggtggtccctcccgccgatcccgtgctcgccgcagcactacggcctcgccaacttcgccgcggtcgcggtcggcggccaaatctacgtcctcggcggctcccgcttcgacgcccggagctatcccctcgacaacccctccccctccgccgccgcctaccggctcgacctcgccctctcccgccaccgctgggagcgcctccccgacatgcgcgtcccgcgagggagcttcgcctgcgcccccgcgcccagcggcggagtcatcgtggccggaggtggctccaggcacccgacgttcccctcctacggcagccgcaccagcggcgtcgagttgtacgacgccgcagcgcgcgcgtggcgcgtcaccgcggcgatgcccagggaccgggccgggtgcgtggggttcgtcgcgcacggggcgggggatgggagggaggatgagttctgggtgatgggcgggtacgacggctacaccacggtggggggagtggtgcctagtgacgtatactgccgggacgcggtggcgctcgggctgtggagcggcaagtggagggagattggggacatgtgggaggaatgggagagagagcgccttgggccggtggctgtcatttctgctgaagatggaagggtcacagaggtgttcatgctcgatggtcatgatatcttcaggtataacttctcttcgaacagttggtcaaaggaagctacattgaggagaaagatcccaagtactcaatcatgtggtttcatagcaatgaatggcgaactttatgttcttacatctgcaaaactccctgtcgaaacctcaagtccatggaagcagtcgaagaagaggttggcgctggagtttcaagtttacaaccctgcagcaaagatgtggagggtgctcaccacacatccccctgttaacgtaccaattgatttcaggactgcagctctctgtacggttgagctgtaggtttcttgatgatcaccattcactgtacagattaaggtagttgatcagacatttgattgcaaatttagatgtaaatgagaacaccatccaatgatgtcagcaaataggcgaagattgttgcgctcgtgagtgctttgcattggtagcttgtgtgtatatgtacaggatgggacattgcacattatctaataaaaaggacggtacattgc

SEQ ID NO: 23848 - DNA, 2599 bp, Oryza sativa
  ref <308>: DATABASE ACCESSION NUMBER: AK073933
  ref <309>: DATABASE ENTRY DATE: 2001-12-06
ggcatcgaatccaatccatggcggcgcacgaccccaaggacgacgtcgaccgcctcttcgcctgcttcaagtgcggcgtctcccctccccagtcggcgttcagggagaggccgcggcgggcgggcaagaggtcgcgggtagcgtccacggcggatggaggcggcggcggcggcggcgggagctcctcctcttctactcctacgccggacgcggcggagaagcatgaggcgccgtcgtcggcggtgatcaaatttactggccgcaagcagatgtccccggttgtgttctacggttccccgcaaggtgtcccggtgaagaagccgctcagcctgttgcggttgttgcgggagatccgaattgatctcaagaagcaaactgatttggtccccagtgccggtgtttgggcaaccttccctaggcaagaggaggcaatcaggttctgtaaagcacatgcttataccaatgtctttagctaccaagatcatttaagtgggcagagaagattcctcgtgtctacatacgatgagttctggaaaaggtacaataatatggatccgcagattcgccatcactatgaagttatacaggatggttcaccttgccatatttactttgatcttgagtttgacccaagattgaacaagatgagagatgcagatgaaatggtggatatattggttgcagccacattcagtgctttgcatgataaatattccattgaaggacaggaggaatggataatagagttagactcgtctactgaagaaaagttctcacgccatttgatcatccgcataccgaagactgcattcaaggacaactcccatgttggtgcatttatctctgagatctgctcacggatcgcatctcagcgtgcagctaatcctaactttgataaactgtacattacgaaagatagcagttgtacaggtcatgctgatcatctctttatggatattgctgtttactcccggaatcgttgttttcgtttagccttctcatcgaagtctgggaagaagtcatttcttgtggctactgagcgtttcaaacataaaaacatgagtgataaggagctctttatggagtcacttatttgcagattagatgatgactgtcataaacttttgacatgcaaacttgatttagattgcaagaaaacattgcattttgactcggaagccagcatgatacgaattcaaggaagaaacagcaaggactccattggtacctatcgaaatgattttcctgtttcaaatacttatgggatatctccttttccagctctggatgtctttattgaatctatagcttcttttggaaatgtctcaggaaaaattagatgctggtactggttttcacattatggtttgatgatttatagtatgtcaaggagtagatactgtgagcatattggaagagaacataaaagcaatcatgtaatgtatattgttgaattccagagagctgcatattaccaaaagtgttatgaccctgactgccaaggttaccgttctccattgcgccctgttccctgggacgtgattcctgagctcagctcgatatccgattcagcccagagggaatatcagggggaagttgtagagatcaacattgaggggaggaacaggaatgatgagtacctttgcaatgggacgaaatcagttacagagagcggtgaggatgatccgagctggtgggaagaagcggtgaaatttgctgacagcatcgagaacaccgatcatggtcctgacacacgtgaccaagacaaggattgtgatgacgcagactggtggatggatgctgaaaggattatggtgcagattgaggaacagatagggtcacagagcaacgcatagccgtcccttcagtgactggctaatcaaaactcaactcactaacagaagagcaaaaggaaatggaaaacacatcaggccagcgatgacttcaacgctcactttgtggatgcatccggcctgccgcttcaagcaaccaggatattacgcactccagcttcagggccttcttttgcttcattagaatcctccactgttataacaaggaaacaagtccataaatcacagttagaggggtcgaaacattcttatctctaatcaatttagttatcttagctctttcagggaatcttctctagagccctacctggagtactaggatctttccttattcctcccagagactgatcatgtcattccagagggacaggggaaagccaaagcatagttaggctattggagcttggctggcgcgaaacatattgcgagattattaccatgaggaatagaaaggtggtctggcgtgcaagcttgtttgtagttagaattgtacagttttttttttccttttctatgtaatttaactcctatcaatgtaacgtcatccaatctgtttggtcgttcgggaaaaaaaaagccaaagattcttagcatgatattggggaatctccttgctattactcaaacaagcatgaaacgtatgcttgcatattcgtccatagggcaaatcggatatgtaattattggaataattgttggaggctcaaatgatggatatgcaagcatgataacttatatgcttttcc

SEQ ID NO: 23849 - DNA, 1282 bp, Oryza sativa
  ref <308>: DATABASE ACCESSION NUMBER: AK073934
  ref <309>: DATABASE ENTRY DATE: 2001-12-06
gctcgaaaaccctcgcgaatctgagatccccaagaattccttctcgaaaaccctagaggagagcgagagagaagaggaggcggcggcggcggcggcggaagcacatggcgatcatctccgacttccaggaggaagaggctccgccgcggcagcagcagcaaccggcttcggtggcggcggcggcggggagcggcgacgaggtcctcgcggcggagctggagcggaggggcggcgcgatccccttcctccaggcggcaatcgacgtggcgaggcggcggtccgacctgttccgcgacccctccgcggtgagcagggtcacatcgatggcgtcggcggcgagggcggtggtggaggcggaggagaggaaggcgagggaggccaagaggaaggcggaggaggcggagaggaaggcggccgaggccgagaggaaggcgaaggcgcccgcggagccgaagccggagagctcggcggggaaggatagcatggaggtggacaagaaggaggagggcaacgtgaggaaaccaaatgctggcaatggtcttgatttggagaagtactcttggattcagcaattgccagaggttaccatcaccgtacctgttcctcaaggaacgaagtcaaggtttgtcgtctgtgatattaagaagaccatctgaaggttgggctgaagggccagcctcctatcattgatggtgagcttttcaaaccagtcaaagttgatgactgcttctggagcatagaggatggaaaatcgctgtccattttgctgacaaagcaaaatcaaatggagtggtggaaatccgtagtgaagggtgaccctgaagttgatacacagaaggtggaaccggagaacagcaaactcgctgatttggatccagagactcgacaaactgtggagaagatgatgtttgatcaacgccagaagcagatgggtcttccaacaagtgatgaaatgcagaagcaagacatgctcaagaaattcatggctcagcacccggagatggacttctccaatgcaaaaatagcttagaacttataaatcgagagtgaccagcagtatggagaaggttggagatgctgaatggagaactacatttcatctcgttcttagtgtctgtcgatggatggtttacgggtagtgtctgtcgatggatggtttacgggtttagccgtgaggtgattggcctcacgtcattttgtgaattttgtgttcttcagaaacgtgaatccgtgctgtttcctgaacctttgaatggatagtaaaatcagttgcaccccagtg

SEQ ID NO: 23850 - DNA, 1880 bp, Oryza sativa
  ref <308>: DATABASE ACCESSION NUMBER: AK073935
  ref <309>: DATABASE ENTRY DATE: 2001-12-06
ggcagaatcgcggatgcggtccacccgcagatctccgaccatcagcccaacccacggtttccccgccctccacaccccaacctcgtccgctccgtcgccgacgacgactgcctcctaccccatgtatataacccccgccactcctctcgatgttgaggtaaatcgagtgagtccgcaagtcgttcgcgattcttgatcgagatctgtcagggtgataaaggtttagaacggtgctgagtttgttaatcttgggagaaaagggaaactgctctcgagtatggagatggtgttgccagtcgcgaacgcgactgctgcagcacttgcgcgggtttctgctatgttcaatgccccgcttgctcgtgctgttgtctttgggattcatatcgatgggcacttggtcgtcgaagggcttctcattgccgcaatactcttccagctctccaggaagagctacaagcctccaaagaagccactcactgagagggaggttgatgagctctgtgatgagtggcaaccagagcctctctgcccacccatcaaggagggagctcggattgaggctcctacattagaaagtgctgctggaccgcatacaattgttgatggaaaagaagttgtaaactttgcgtcagcaaactaccttggtttgattggcaatgaaaagatactcgattcctgtattggttcggtggagaaatatggcgttggatcatgcggacctcgtggcttttatggaacgattgatgttcaccttgactgtgagactaaaattgcaaagttcctgggaacgcaagattcaatcttgtactcctatgggatatcaaccatcttcagtgtgattcctgccttttgtaagaaaggagatataattgtagctgatgagggtgttcattgggcagtacaaaatggtttgcagctttcaagaagcactgttgtttatttcaagcacaatgacatggcttcacttgcgagcactctggaaaaactaactcatggaaacaaacgtacagaaaagattaggcgctatattgttgtggaagctatttaccagaattctggccaaattgcacccttggatgagatagttcgattgaaggagaaataccggtttcgtgttattttggaggagagtcattcttttggcgttcttggcaagtctggacgtggccttgctgaacattatggagttcctattgaaaaaatagacattatcactgctggaatgggaaatgcattagctactgatggtggtttctgtacaggaagtatcagagtggttgatcatcagcgtctaagcagctccggttatgttttctctgcctcgttaccaccatatcttgctagtgcagcaatttctgctgtggaccacctggaggagaacccatcggttcttgccaatctaagatcaaacatcactcttctgcataaagagttgtcagatgtacaggggcttgaaattgctagtaatatattgtcacctattgtcttcctcaaattgaagacatcaacaggctctgctgttgctgacctggagctccttgaggttatttcagagaaggtattgaaggaagattcagtcttcattgcagcgacgaaacgatcgagtttggacaagtgtcgtcttccggttggaatccgcctattcgtatcagctggtcacactgaatctgatatcctcaaagtatctgaatccctgaaaagggttgcagcatcagtgctctagtgacaaactgacaaccttgcatctggcatgatgtgttctacagttacgtacaaatctgtatgctcgttgatctggctcaatttgctgtcgtgtctagcagaattacaaataaaattttgtaaaacagtttgaattaaaatatctggtagttttgttc

SEQ ID NO: 23851 - DNA, 2065 bp, Oryza sativa
  ref <308>: DATABASE ACCESSION NUMBER: AK073936
  ref <309>: DATABASE ENTRY DATE: 2001-12-06
gtttgcatgccctcctcctcttcctcctctcctcccccatccagacctccaagccctgcagtagcagtagcagctgctgtattaatggcgccgtaggcagctcactgcagcatccatcgccccaggcaatggtggtggtagtttgctctcttctccctcctcggctcagcccgagctgcatgccagcttaaatgcttccccagagcgagctcatctcgctctcgcccgatccaacgccgcatagctagctagctagctacctcgtcgctgcgttgtgtttgtgctgctgcattgcgacattccgatcggagcttagcttagctttcgtcgtcgcgaatggcgacgcgagggcggattgtagcggcggtggcgagcgttgtggtggcgtggctggcggtcgccgtcggcgtgaacggcggcgggtgcgaggcggagcgggaccgggtggaggcgctgccggggcagccaccggtggcgttcgcgcagtacgccgggtacgtggcggtgagcgaggcgagcgggcgggcgctcttctactggctcaccgaggccgccgccgccgccgccgccgccaccaagcccctcgtcctctggctcaacggcggtcctggatgctcatcgattgcgtatggagcatctgaagagattggcccatttaggattaagacaaacgggacagggctctatctgaacaagtactcatggaacagagaggcaaacctcctgttcctggaatcacctgccggagttggcttttcatactccaacaccacctctgatctcaagacatctggtgatgagaggacagctcaagatgcgttgcagttcttgatcagttggatgtcccgcttcccacagtatcggcaccgggatttctacattgctggagaaagctatgctggacattacgttccccagttggcaaggaagatcgttgagttcaacaaggcctcaccatatcctttcatcaacctcaaggggatccttgtgggcaatggggtgactgacaactactacgacaacatcggcacggtgacctactggtggacgcacgccatgatctcggacaccacctacaaggccatcatgtcgtcgtgcaacttcaccagcgccaacgtctccaggctctgcaaccgcgccatgagctacgccatgaaccacgagttcggcgacatcgaccagtacagcatctacacgccgtcctgcgccgccgccgccgccgccaacgccaccggccgccgccgcggcaaggccgccgtgctgaggttcaaggacaccttcctacggcgccggtcgttcggctacgacccctgacggagacatacgccgagaagtactacaaccggcaggatgttcagaaggccatgcatgccaacatcactgggattccttacagatggacagcctgcagtgatgtgctcatcaagacgtggcgagattcagagttctccatgctgccgacttacaagttgctgatgaaggccgggctgaggatatgggtgttcaggtgagctggaggacctggaattggtgaatttatccttttggttcagcatggaactagttcttcagagatcatgagctatttgtcacttgatgaaaatgcagtggcgacacggattcagtcgttccggttactgcaacgaggtttgcgcttagccatcttggactgaagacgaagatccgctggtacccttggtactcagctggacaggttggaggatggtctgaggtgtatgaagggctcacatttgcgtcagtgagaggtgctgggcatgaggtgccactgtttcagccaaggagagcattcaggatgtttcagtcgttcttggcaggggagccattgccaaaatcctgatggtttcctgccaacaactgatgtctagctacaaagtctagaaatctgtaaaagatgcttggtagaggtgcagtgtagttgataggtgaggagtgtgattgattggtgttgggaaaaggataataagagaataaggatggttgtgccatggaaaccatgggcatcgcaacaaggagctaataaacttgaagccttccgctctgttcc

SEQ ID NO: 23852 - DNA, 2570 bp, Oryza sativa
  ref <308>: DATABASE ACCESSION NUMBER: AK073937
  ref <309>: DATABASE ENTRY DATE: 2001-12-06
gagtggcacagcagagcggccacaaccgctcacctcaccactccttcctccaatttcgcattcaaggcgactcctttggtcagagtagtagaggtgcacgaaccaagaaccagaagcagaagcggaagcagaggcagcaatgcagggctccaagaccaaatctggccatgccgaggcgaagagcaacggcaaggcggaggcgaagggcacgccgccgacgcccaagagcgccaagattgcgaggaagccggccgtgcccaaggcgccgccgcgcccctccgccgacaagtcccagtcccccggctcggccgaccgcaagaagagcgcctcccggatcaccacccctccagagaagcaagggaaggcgacgaagcccgctcaggagtcggtggccgcgaagccgtcgcctcaagagccggtggccgtgaagccgtcgtcccaggagcaggagcagcaggcgctgctggctgcagttcagcaggagctcgtgaagaccaaggaggagttggtggagaaggagaaggagagggggaaagtcctggatgaactggagcgtgccaagagggcggctgatgaggccaatgcgaagctccaggaggcgctcgctgcgcagagcaaggcggcggaggagtcggcggcggagcagtccggcgatgccgaagcggagcaggcgagcgcgagcatggaggatgagctgcggacgaagctggcgagcatgcagagccagcaggaggctgacatggccgcactgcgttcgacggtggagcagcttgagcaggccaggtatgagctagcggatgcaatcgatgccaagaacgcggcgcttacccaggcagatgatgccatgagggcttcagatgagaatgccgagaagatcaagctcctcgatgcggaggtggcgcatctcaaagggctgcttgattccgaggtagggagctcgtcaaaaggtgctgtggagcacattaggaagcttgaagaagagaactctggattgaagcttgagcttgagaaagcaaatgtcgctgagcagagggcagttgaattggaaggtgtggttgaacagcttgaagttgaaatcgctgatgttaagaaggcgcgcgcgaggtcagaggagttacttggcaaatggaagacaaaagcactggaattggaggtcaggttggaggaagctgatcagtctaacattctcaagggcgagtccttagaatcagcaatgaaagaattggatgcaaaaatgactctgctccaagaaaaagaatctgaaatcgaagcacttcaggataaggtcaggtctttggaggatgaagtagccaagcagaaagaagattttcatactgctgataaggaagctgatgaattaaggttggagatagaagaccttaggttgaagctcgaagcggcggaagaagaccttaacaatgacaagattgccagttcagaaatggaaaccctgattgaacagaagaacatgctagccaaggaacttgaagctagcaaagctgaagttgagaagattaagaaggccatggagggtcaagcctctgctttgcacgaaatgtcagctcaactgagagtggcgcaggagaagtacctagataaacaagaggagattgatcgtgctcgtgcacaggtagaggagctcaatgtaagtctgcagaatacaaaggagagctatgaggtaatgcttgacgaagcaaactatgaaaaagtttgtctcaagaagtcagttgagagaatggaagcagaaaccaagagtgcgtctgaggaatggcagtccaaagagctaagttttgttaactcaattaaaaaatcagaagaagaaatcatcaacgccagagctcagatggacaagaccttggaggctgtaaaaggcaaagaaagtgaaaatgctgagttacaggagaagttgaagcatcttgaagctcagctaatggaagctaacaaaacatgcgaggaagccaaggccgagaccttccagtggaaggaaaagctactagacaaagaaaatgagttgcagaacataaaacaagagaacgatgatttgcaagcaaaggaacttgttgcttctgagaagataaaggagctctccgtgcttgcaaatgcaaaagatggagctacaaatggtagtcacaaggaagaaagtaatgtcaagggggacagcgaggatgatgaaccggtaatggtagttgcaaagatgtgggagaacagcaacgttactgatgatgcctcatctaaggagaagggaaacgatggtgaatcagaagttgatttagagtccaacacgggagattccattgttgatggcaatggtttgcactccacgacggcgagcaatggcaacgcatcaccgcccaagcagcagccgcaaaagaagaagcccttgctgaagaaatttggtggtctgctgaagaagaaaacccaaccttagcataaattctgatgacatttctttgttttgtgctatatggcatctctttctttgactggtcatctagcttctgggtattgcctcatcatggtaaaaaaaaatgttgggtgttttaagagaatacaaatggtcgattgtattt

SEQ ID NO: 23853 - DNA, 881 bp, Oryza sativa
  ref <308>: DATABASE ACCESSION NUMBER: AK073938
  ref <309>: DATABASE ENTRY DATE: 2001-12-06
gagagcgaggagagagagagatagggagagggatttcgatttttttttctccacggcgaaatccgcgaggcggaggaggaggaggagggcgagatgggggcggcggaatccgtgccggagacctccatatacgaattcaccgtcaaggattgcaacggcaaggaggtgagcctggagatgtacaaggggaaggtgctaatcgtcgtcaacgtcgcctccaaatgtgggttcacggagaccaactacacgcagctgacggagctctatcagaaacacagggacaaagattttgagattctagcatttccctgcaatcagttcttgcgacaagagccaggatctgaccagcaaataaaggattttgcttgcacaagatttaaagctgaatatcccgtttttcagaaggtgcgtgtaaatggtcctgatgctgcaccactttacaaatttttgaaagctagcaagcctggcttgtttggatctagaatcaagtggaactttaccaaatttcttattgataagaatggcaaagtcattaacagatactcgactgcgaccagtcccttgtcttttgagaaagacatcctgaaggcgctcgaggattagatctcgtaccctcccccatccttcatttgcagaagtaggcaaagtatctggttgtaatatctagacctatgggatgctcaatagtgaatttttgcaatatattccttcttttgtgtagtgtatttgttgtctttatatattattatattgtaagtagaggttggctggttgggtaggcactgttttgtctatactggttttatatggcttggcttgaaaatttgtttagaaacctaagacattattatcaacgtgtaatatcgacaagttgaaattgt

SEQ ID NO: 23854 - DNA, 1436 bp, Oryza sativa
  ref <308>: DATABASE ACCESSION NUMBER: AK073939
  ref <309>: DATABASE ENTRY DATE: 2001-12-06
gggagtcttgttccctttttattgagaggatcccctccctcgtgtcgacacgatcgtccaaaatagggaagagggagggggttcttcttctcctcgatccggttgaggactttgaggtagagagaggcagaggcgacgaggaaggatctgatctatcgatggcgcgcgtttcgcattccagaaagcggactagggctccctccaactccaactccaagcccacttcacaaacccaaccgccgccgccggagctcaccgaccgccctgtccgcgtctacgccgacggcatcttcgatctcttccacttcggccatgcccgcgccctcgagcaggccaagttgctgttccccaacacgtacctgctagtgggctgctgcaacgacgagctcaccaaccgctacaagggcaagaccgtcatgacccaggatgagcgatacgagtcccttcgccactgcaaatgggttgatgaggtcattcctgatgctccatgggtcctcacgcaagagttcattgacaaacatcagattgactatgttgctcatgatgcactgccttatgccgatactagtggagctgctaatgatgtctatgaatttgttaaaaagattggcaaattcaaggaaacgaaacggacagacggtgtatccacatcagacctcataatgaggatattgaaggactacaatcagtatgtcatgaggaatttagcacgtggatacacaaggaaagatttaggcgtaagctatgttaaggaaaagcaactccaggtcaacatgaagataaataaactgcgagagactgtaaaggcgcatcaagaaaagttgcaaacggtggcgaagacagctggaataaatcatgaagaatggttggccaatgcagatcgctgggttgctggtttcttggagaagtttgaggaacactgccacaacatggaaactgccatcaaggggcgtatccaggagaaattgaggaggcaaacaagcagagggataattgggggtctaatgcagcaaccggtggcagcgtaataagttgtagaggagagatgacgttgagttggagtaagctgccctggggtcaccacggacgagaaatgtagtgaagatgccttcttggttggcggttatagtgtgagtgtgtgcttgtgtcatggaatgtgatgcttgtacgagttgttacagcttaattacatgggagaggctttgtttcttgtttatttttttgcggggggtgggggtgttggtttccttgtatacaaatgtctatagcagaggcgtttggtgcataatccagagtgtgtagtaggtgttggacagatgaagttgagtggtactgtagtgttgttgttctcttcccttgggttttgtctgtaacgtcgagagggagagatgttgacgctggctgaaagcacaacacaagcagagtgatattatact

SEQ ID NO: 23855 - DNA, 1865 bp, Oryza sativa
  ref <308>: DATABASE ACCESSION NUMBER: AK073940
  ref <309>: DATABASE ENTRY DATE: 2001-12-06
gcctcactcccccccaacctccctctccctctctacactactcgcagccgcatcggctgccagccagcccagcgcggtggttgttgggtggttgccttctcccctccccaccaccaccatcttctcactgatctctccacgccgatccatccatccaccgatcgcctcccctctcccgcactgatcagtagtggtagagtgagttgaatcttggccgtgatcgatcttgctgggatctgataggggtgggagtcagtggagggatggagggggaggacgaggtgagggtgaatggggctgtggaggtagcggaggtggtggcggagggggatctcgccagtgggggggaggcggcggcggcgggtggatctgatcaggcggtggtggtggtggcgatggccgcggaggggacgacggccaagaagggcggatcggggggcgcggccgcggcgaggaaggcgaaggtggcggcggcggtggccaacggcaaggtggggaagaagcccgcgctgtcgcagagcgcgtcgttcccggcgagaggggcggctgccaagaaggcggcgacaccaaagcaggccaagacgacggacgggaaaggcgctgtgcccaatggatcggagaaggcggctgggcgagccgtggagaagaaggtgaattcagcccggacgcctgccgcaagccgctccttgcctgttaaatctggatcggtggacgcgcctccaaatgatgcttctcctgaaacccaagagtcaaacgagaacaccacaaatgctttggaacagactctgccagagaaaatggaggatgatgtgcactccaccacatcgagtaccaatactccccgagcagctgctcaacgcaagaatgctgctgctgctgctggttttagtttcaggctgcaggagcgtgctgagaagaggaaggagttctaccaaaaacttgaagagaagatccatgcaaaggagcttgaacaaacaaatttgcaggcaaaatctaaagagagccaagaggctgagatcaaattacttaggaagagcctgacatttaaagcgacacccatgccaagcttttacaaggagcaacctcctaaagttgagttgaaaaagatcccaccaacacgcgctaggtcaccaaagcttggccggcacaagccaaccaattctgctgctgctgcttctgttgatggttctgtatcatgtgagagtcctcggagcataactaatttggccaaattgaccgaaagcacagaaaataacaaacctcatgctactgccagaaagcctgctcaaagatcagtcacaaaaattccttcccaagcatctgccactgcaaagaccgagacaaaaccccttgtgacaaagcagaaaacctcaaacacaaaaccaaaagctccaagagccaaggtagagcaattgcaagacaactcggttgaaatccctcctgctgaaccttctggcccagaggggctcactgttgaacatggtgttgaggatgcaacagggccagaccgggccaccactttggttgcttcgaatgaagttccagtccaaggttgattcgattgcacatttggttatttaatcccttcttgcagtcttgtgaatagtgaggtgtgtgcttcatggaaagttgattcgctcaaagtaccgtggatttgtcatttccggagtagacatcccctttttttcagcttgtcattaagcattccattgtatattgcttgaaaatttgttcatgttaaaattttatttcttgtgtatattggagttatatgtcaatgggcaggctaggactgttgcagaacatcaatgcaacttgtgaattattttgtgttataagttgattctccttggtccttgcccagt

SEQ ID NO: 23856 - DNA, 1638 bp, Oryza sativa
  ref <308>: DATABASE ACCESSION NUMBER: AK073941
  ref <309>: DATABASE ENTRY DATE: 2001-12-06
gactccctcctcctcccccaccactgcctccggcgatttcctcctcctccccgttctcgaagcttcttcgccctcgccgccatgcgccgcccgtggaagcacccgacgaaggccaggcacggcgccgctgacctctgcctccgcgaggtcggcctcctcctcccccgccgcttcgcccgccgcgcggccgcctccgaggatcttgtaatgcgcctgcaggttcacaggaagctcaacaggcatacaggctgcgtgaacacggtaggcttcaacgcggatggcgataccctcatatcggggtccgatgaccagatggtgatgctgtgggactgggacactggtgcaatcaaattacagtttccttcaggccatagcaacaatgtgttccaagcccgtttcatgccatacacgaacgatcaaaccattgtcacttgtgctgctgatggagaggtgagacttgccaagataggggatggtggagatgtacctactacattgctaggcgatcatgatggaagggctcacaagttggccattgagcctggcagtccttatattttctatagctgcggcgaagatgggcttgttcaacattttgatttgaggacaaatacagccacaaaattatttcagtgcagaaactctttgagtaaatcaggacactcttccaatattcatcttaatgcaatcacaatagatccgaggaatccaaatcttcttgcagttggaggaagcaattgttatgctcgtgtctatgacatccgcaaatacaaatgggatggatcttctgattacccatctgactgctactgtccaccacatcttattggcaatagatttgttggaataacaggcttagcattctctcaccagagtgagttgcttatatcttacaacaatgagaatatttatctcttccctaaaaatggaggactgggaccagacccaaagtcatctgtcaagattgaagccaacaaagggtccaaatcaacaatagtttcatctggagaagatgttgatcgacctgcaccactgatgtatgctggacatcgcaattgtgagactgtcaagggagtgacattcattgggccaaatcatgaatatgtcgccagtgggtcagactgtgggcgattatttatttggagaaagaaagatgggaagtttttgcgggcaatggagggtgatgaatgtgttgtaaactgtattgagccccatccgcacactatgacaattgcaagcagcggaatcgataatgacgtaaagatatggactccctctgccactgagcgagcaccagtggtaaacattgaggagttgaagcctcgtaaaagaagaacaaaactctggcacttttctctaccagaggaattgatctttcatgttctggcatcacgacgcagacagcaagcagctggagatgatgattcatctgaggatcttgaggacagcacaggattgcttaatcttgtactccgagctgcggagagagacgtgctatctgatgaggatgaagaatcctccgaggactctggagattgtagtctcaacttatctatggctcaaccctggaaacattgctaaattgtacatatacagtgatgttttatcctgttttcatggacgtgtgtttttcagttg

SEQ ID NO: 23857 - DNA, 3038 bp, Oryza sativa
  ref <308>: DATABASE ACCESSION NUMBER: AK073942
  ref <309>: DATABASE ENTRY DATE: 2001-12-06
gataacaagagagaagaagagaagaaaccggaagagcagcctcctcgcctcgtgtcagggcaaaggcccagtaaaaccactagtggagcagcatcagcatcagcagcagcagcgcactcctcctcctcctactcctcactcgccagcagccgcagccgaggaggaggcggaggcggatgcgggagatcccccgcgtggccgccgccgccgccgccggagatggacacgccggataggcccccccgcgccgccgccaccgcggccgtcgaggactctcctgtcttcaatttcatcaacagcctatctcctataccaccacctaagccttcagactcagcacataatgttcaactattcaagtcatcagacttggctcctgtttcctcaatctttgcctcaccacatgtcaatcctgcaaaggaatctaaacttccaatcagggaagattctgttcaactttctcgagaatcgcactctccgaacagtgtcagaactcgaacaggggccacaagctctattattagaatgatcagatgcaaaaacattgtttcagaaaattgcagtataacttgttacctaaatgattcaacttcaagtaaagcatctcaacccatccagctttgtggcggcagtgcagaaagtgatacgaatcaaaatactgatggtaaaaaggatcccactacagagcaagaccgtacagacatagaattcgtcctacttgatcagtgtggaccagaaaaaatggattcatcacagtcaggtaataatgcttgtgaaaaccaactgtctgaacaacacaaggatgaacttgggtcatttgatgggggttacatgtttgcacatcaaccacatagtgatatgctgagattagctccaccatttgagtcagaaacacagttagtgaatgagacattacaaacagataatgtctactgtgaaaccttgttgaccgatgggccaagtggctcttacacacaaaattctgcacctgatcctcatctttactgggctggggcagttgaagggtgtgcaacagattataccccccaaatgctccctggtgcttgtcaaagccagttggtgccaaatgatcaaatcaataacaagctcaacgagcccagtgattacatgccaatggaccacaatgtgtcatcacagaatttacgtggcatgcgtagacgttgccttttcaatgaaaagagtggagctgctaatgaaggggcaaagaactcctcagctcgtcattctacaaattcaaccacacccagacgcaagattagttccagtgataacaacttaaagactctgaggacccctccatgtgcattgcctggtattggcttgcatttgaatgcccttgccacagtgccaaaggataaaatggttccccataatgacattcaatcctctttgaatcaagccagcaatgttccgtctgctgttggttcttctccaccaacagatgatccacatactataaatgatgactcctcccagacagccgtggttgcatatgttggtgaatcgagtcagggtagtcccaagaagaaaagacacaagttcgacaatggtgatggcacgtcgtgcaagcgttgtagctgtaagaagtcaaaatgcttgaagctgtactgtgagtgttttcatgctggtgtcttttgttcagaaccttgttcgtgtcaaggctgtctgaatatgcctagcaacatggaaacagttctatcgactcgagagcagattgagtctcgtaatccacttgcatttgctcctaaagtaattcgcactgagcctggtcaggaattagctgatgactctaacaaaactcctgcttcttctcgtcacaaaagaggctgcaattgtaagaagtcatcgtgtttgaaaaaatactgcgaatgttatcagggtggtgttggatgctctgtgagttgccgatgtgagggttgtaagaatgcttttgggaggagggagggagttgcactgttaggcatagaggaagctaagcgtggatgcgaagaaaaggatggaggcgtgaaggaagaaaccactgataatgataagcagcttgttatctatcaagatagtatcaaccttactcctgctgagagtgtgctggcaacaccttcagttgtggattacagacccttggttgctcttccacctttgagctccaagaagccaagatcgtcgacgaagcttggtggatattcttctcgacttgaaggacacctgaagtctgacattctactctctccattcgaaagctacgcagaaatgatgctcggggatggtacatcaaatgtcctaaaaggggaatcatcccctcaaacttctgtcaaggtcgtgtcacctaataaaaagagggtctctccccctcgcattggtaccggattgtctccgatctgcaagagtggcaggaagttgattctcaagtccatcccttcattcccttctcttggtgtcgacattactaacgaggatccaaacactagttcgctagctccttgaacacaacaaaatttagtgcttgaggttatatccttgtttatttatggttcctcagaggaccagatcgccaacatctcagtctgcatcagggttggttctatcatgctctaagtttgatgatcaaccaagggagtttagtttcggcaagtttctgttcagaggctgaagttttcccgtgctttctcgagagtgaaatgcccaataataatccagtacgtgtacacgtaccaaaagatgtccaaaaattacgcccccatcaagagcctcctgtgacaggaggtgtgctaataattatgcccggacttgtcgactatctgtcattgtttgagttgcccatccctgttcgtatgtatcatttcacgcttcatctgaaagacatctatcatcaatgtgttgtgttgaaaagaagagatatgtcatctgtgtactttgatattgttatcatctatgtaatgtacttgggatcaggctgttaaaacttttatgaaaactttatgtaattgagaacaagcagttatttatagtacttatgaagc

SEQ ID NO: 23858 - DNA, 1641 bp, Oryza sativa
  ref <308>: DATABASE ACCESSION NUMBER: AK073943
  ref <309>: DATABASE ENTRY DATE: 2001-12-06
ggctctcgcactcgcactcgcgctcgtgtgggttcccttctcggcttctccgaggcgagggcttggctgcaggctaaaaccctctccgcccccaccccccgcgcggtggctagggttttagggcgagggtgggaggaggcaggcaggcgcgcgcgcgcgcgcgggtgttcagatagatggaggaggaccagtcagcaattccggttgctgaaggtgccatcaagagcatcaagcttagcctatccactgaggatgagattcgtacttattctataaatgactgtcctgtcactcatcctagtcagctcggaaatcccttccttgggttacctttggagacaggaaaatgcgagtcctgtggtgcctcagaaaatggaaaatgcgaagggcatttcgggtacattgagctgcctgtgcctatatatcacccttgccatgtaacggaactgaggcagatattaaatgtggtatgtttgaaatgcctccgcgtcaagaaaggaaaggtcaaacagacagagggaaaggataacacatcagcattgtcatgctactattgtcgggatcttccggcattatctttgaaagaaatcaaaacagcagatggtgcatttcgtttagagttgaaaatgcctcctaggaaattcatgacagaaggctcatggaacttccttgacaagtatggatttcaccatggtggaacctcccactgcaggaccttgctcccggaagaggctctcaatatattgaagaaaattcctgaagaaacgaagaggaaactagctgctcgtggttacattgctcaatctggatatgtgatgaaatacctccccgtgccaccaaattgtttatacattccagaatttacagatgggcagagcatcatgtcctatgacatatcaatatctctgctgaagaaggtgcttcagaaaatagagcagataaaaaagtcaagagctggatccccaaactttgaatcacatgaagttgaatcatgtgatctacagctctctattgcccagtacatacatctaaggggcactacaaggggtcctcaagacaacaccaagagatttgcaatcagtactgatccttctgcgttatcaacaaaacaatggctggagaagatgagaacattatttatcagcaaagggtcagggttttcatcacgcagtgtacttactggagatccatatattggagtagatgtgattggactgccttctgaagtggcaaaaagaatcactttcgaagagcaggtaacagacatcaaccttaacaggttgcaagagattgtggataagggattgtgtttgacctacagagatggccaggcaacctatgccatcaccgttggatccaaaggtcacactaccctgaaagtcggacagactatcagtaggagaattgttgatggggatgttgttttccttaaccgtccacccagtacccacaagcattccctccaggcatttcgcgtgtatgtccatgaagaccatacggtcaagatcaatccgctcatatgcgcaccttttgcagcggactttgacggtgattgtgtgcacatctattatccacagtcccttgctgcaaaagctgaagcactggagcttttcagtgtggagaagcagcttaccagttcgc

SEQ ID NO: 23859 - DNA, 928 bp, Oryza sativa
  ref <308>: DATABASE ACCESSION NUMBER: AK073944
  ref <309>: DATABASE ENTRY DATE: 2001-12-06
gaagtgctagctagctagcaaaagacaactcaagccaaaaccatctcagagcttcagagaggaagacaatggccggtggaggagatgagctgaagctgctggggatgtgggcgagcccgttcgcgctgcgagcgaagctcgcgctcagcttcaagggcctgagctacgagtacgtcgaggaggatctcaagaacaagagcgagctgcttctcacctccaacccggtgcacaagaaggtacccgtgctcatccacaacggcaagcccgtctgcgagtcgcaggtcatcgtgcagtacatcgacgaggcgttccccgacgccggcgttcctctcctcccatccgacccctacgaccgtgccgtcgctcgcttctgggccgcctacatcgacgacaagctgttgaagtcatggctgcaggcgtcgatgtgcaagacggagcaggagaaggcggcggcgatgaaggagacgttcgcggcggtggcgaacctggaggcggcgttcaaggagtgctccaaggggaagcccttcttcggcggcgacgccgtcgggtacgtggacgtcacgctcggcgccgtggtcgggtttgtgcgcgtcggtgaagccgtgcacgggatgaggctgttcgatgcgagccggagcccgctccttgacgcgtggctggaccgcttcgccgcgctggacgctgccaaggcggtgttgccggacaccggtaggctggccgagtacgccaagatgaagcaggcagagtgggcagcagctgccaccaactgagccagcatggccacgtctggtactctcgtggggagatgaagttggtgttggtgtgccacccgtaccgtacgtagctagtcctgtcacacgatgtgacgactgtgtgaactttgctactatacgcaataaaattgtgaagtcgttaagttttcgtaagt

SEQ ID NO: 23860 - DNA, 2864 bp, Oryza sativa
  ref <308>: DATABASE ACCESSION NUMBER: AK073945
  ref <309>: DATABASE ENTRY DATE: 2001-12-06
ggcctttccccatccccaaatcaaatccctagcaatcgtcctggggttcctctctcacaagagcgaggatggactgcatcgacgagatgccagacctccgatcttggaatcctgacgatgaggaggaggaggaggagaaggaggagatgcccgccgtcgtcgattactccccgcaccaccgccgccggccgtccaccttcacccgctgcggcgtcatattcgatacggacctcatcgtccgcaagcccgtggaaggcgccgccaccggtggccgggccagccaccggacgagcacggggttccccttctccgtgtcgctgaacctcgccgtgccgccggcgctctcctccatctacctgcactgcgcggaggccgtgatgccccccaccctcgagcacgggtatttcggccggtcctcgctcgtcgccgcggacgccacccacctcctccttcttgtcgtcgtccccgtcaagattcaaggcatgtacgaccacgagtacccggaggagtacttcgtctacacggccgacgccctcaggccttcgctggccgacgcccctctgtcctacgctgacgcgcctccccagattccccgacaaccgccagcgcttggccggcgacattggcatcttgaaccacgccgccgccgcgggtgatggtttcagcttcgccgttgcatctttgcagacgttcatggagtggcaatctggtgaaggatccgcggccatcctgcacctccaggagatggccaagctctccgtgctccaatgttcagttggcagtgatctagatgaggacaacaccaagaacaacgacagcagatgggttgtcaagaacctggccatgccttttgactcgcaaggggattttgggccgcgccaatggaagagcaacatcgccttcgcctatgccggcaaattatattgggctgactacgacgttggccttatctactgtgatgtcctggaatcttcacccaagctccagttgatcaagttccctgttccggtgagaaaatttgagcttggtgtcagtggtccagatgacaactgcgggaactctgagtccttcaggacagccggtgtttctaatgggaagatcaagttcgtcgatgttgacaattgccgcgcccaatccttcgccgtcatcatcaggacatggacactgcaaatgccacagatggtatggaagttggatgatgtgctcaatgtcaaacaactgtgggggtcagcatccttcaagaaatacggtttgcatcagtgggtgccagagtatcctgtggtgagcttgctagacccacacattgtgcactttgtgctgcacaaacatatgtaccatgatcaggtctggatgatcgcagttgacatgagggccaagtcagttaaatcatgcaagaactatccaaagggtgagaaggaggatggatacaaggggctgtcgttcaacattgatttcatatgcagcatgctctcgaagtaattacaatcaggtcgtgatggtaggaaatatgttgaatgaagcaggagcatccaccgatgttacgcctgaccgatcgtccgtccattatcaacacaagattggcatcggtttatgatgttgtggactttggcggggtgtttttggtatagacataaggttttgcatatctttgtgttaaaatggagggtcgttagtttcttgtttgtttggagatgtcttaggtttactgctgattgtgccttctgcttcgataatcatcacaaagctaaacatgttcctagttgcttcgttctccagacaacgttttagaagaaaaattgggatgttgtggccgccgatattggaactagcattgcctgtgttttgagccctgtttgtttctttttctcttctgaacatctgacattgctttgacaagattcaatagctaaagaagggcgagtgggcgaccatcaacattcagaacgatttattgaacaaattcagatactttgtcttctggccttgtaatacttgcattggttatcttccctgttgtcctgatacttcatttatcatagctgcacatcgagattgactggtccgaattctctgatctaggaactctggatgatactggcaggatatctcccggtgacttggatgaggtgcaagtaccatctacatcatcagttaagttgtcaagagtcttctttctgactgaaaccacacagatctgagcagcttaatggcacaaattaatggccagtttctaagtatttcgagtgcttacttcgagtgctacaggatcagtgcttatttcgagtgtgtggagactgatgcggcaatggatcagtgcttacttccccatccctgggagcgaaaacacatgcctgacagagtggtggttgcaggccagaacatgttttcggaagtgctacaggacaaacttcgacagcgcttgtatgctgatttgctggcagatttggaaggaaagaaatgcgcgtgttttcgaccaaagatcgagaagccctaaccagttagcagaggctatcaaagaagagatcttagtgtggaaagaagcaggctatttcgagaattgcagttcttagttttctttctgttgtgttgacgtttccagttctttagtttgccgggctgtggttcctgccacagtctaattcgacagcctcctgtcgttgcaagcgagaactacttgtactttgattttttttcctcccaatcttaatgaaatttggtcgccggttccttcggccgacccggcaaaaaaaaaaaaaaaagtatttcgagtggatcttcattgtaaattctttgggggtaataagtggtggattcgtatatgttttccaaatattcttacaccgttatattggttttatatttcc

SEQ ID NO: 23861 - DNA, 2778 bp, Oryza sativa
  ref <308>: DATABASE ACCESSION NUMBER: AK073946
  ref <309>: DATABASE ENTRY DATE: 2001-12-06
ggcactcttccccccgaatccaacactaaccctaaatcgcagcggcgggcggcggcggcggcggcgcgatggaggaggacgcggaggggatggaccggttcgacatggacggcgacttcgagggcggccggttcggcagggacggcgagttctactacgagcgccgccgcgagcgcgcgccgcagacgcgcgacgacgcgctctacggcgtcttcgccgagggcgactccgactacgactccgacgacggccgccgccgcagccgccgcaagcgccgcagggacgaggccgagcccgacctctcgcgccccgtccacttccagtccgccggcaagttcatgcccagcaaggagcccgagcccgagctcgaggagaggcccggccttggcgccgctgcctccgcctccgcctccgcctccgcggcgggtgaggatgatgcggcggaggaggaggaggatctcgacctgcccacggcgttcgggcagcggatcgcggagggcgcgagggcgaggcgggaggagagggcgcgggagcgggagacggccgcgcggcgcaggcaggcgtcgggggtggcctccgggaagccggcgccggctctggggagcctggggtccaacacgaaggtggccaagatgatggccatgatggggtacaaggatgggatggggctcggcaagaacgagcaaggtatagtcgcgccggtggagaccactctgcgccccaagaacgccggtctcggaagcgtcgaggggttcaaggagcccaagccattctttactaaggagaatttgccgcctccgcctccaccggcgcccgccaagaaggaacagcagaggtggtcgaagaaggccggtgcgaagaaaggccccgtgctgacgaagaacgagttgctggcgatgcgcagcgagcaggagcaggacgagcagcctacggttgtgcagaaggtgatcgacatgcgagggcctcaggcacgcgtgctaacggacttgaaggggctcaacgtggagcaggagatggaggcgaacgatgtgccgatgccagagttgcaatacaatgtgaggctgcttgtcgatgaggccaaggctgatattgtgaggctggatgggcagctgcgacgggagcaggagaaggtggcaagcttagtgcgggagaaggagaaagtggcaaaacaggaggctttgcagaaacgccaactacaagttatggagaagattgcaggagtgctggagcaggtccgagtggatgatactgcaggtattctctctctggaagggttgcttaagacctttcaggaattgaaggcatgctacgtggaggaattcaagatgtgcagtgttgcatggattgcctgccggtttgctcatccgctactaatccgagtcttccaggggtggcaaccactgcaaaatccgttgtttggcttggagatcatgtcatcatggaaagatttgctgcagggggatcaagcatatgacttctcaggtgatgttgaatcgatggctccatatgcacaattggtttgcgaggtcatcctacccgctgtgaggatatcaggaaccaattcatgggaggctagggatccagaaccaatgcttcggtttcttgaatcatgggaacggttgctgccccctatcgtgctccagtcaatattggagcatgtcataatgccaaagctttcagctgcagtagattcttgggacccacgcagggagaaggtaccaatccatgtatgggtgcatccatggttgccaatgctaggacagaggatagataccttgtgccattctattcgatacaaactgagtagtgttctccatgtttggcaagctcacgatgcatcagcctatgctgtgttgtctccatggaaggatgtatttgatgccgcaagctgggaagacttgattgtgcgttatatcgtaccaaaattgaaaatggcacttcaagaatttcagatcaaccctgcaaaccagaaactcgaccagttcaactgggtaatgatttgggcttctgcaattccagtacaccatatggtccatatgttggaagtagatttcttcagcaagtggcagcaggtcctgtaccattggctgtgttcaccaaatcctgatttcaatgaaatcatgaactggtacaagggctggaagggccttttcccaccagaattgcttgccaatgagcgcatacggatgcttttaacggctggccttgacatgatgaaccgagctgctgaaggccttgaggtggtgcaacctggcgctagggaaaatgtgggctacttgagagcaacagagaagaggcaatttgatgcagcacagcaagcatcacaatacatgactcaccatgcggtgccaggagcagccatggcggatatgagctttaaggagtctatccaggcatatgcaatggaccaaggcttattgtttatgcccagagttggtaaattctacaatggtatgccagtgtatgagtttggcaccgtaagtatttgcatcgactctgtgaagcgcctactctacgcacaacttcaagaaggaattgagagatggagtgctgtctctcttacacaattgatagaaatgaaccggaaggcgaggcaacgctagttgatcatcctattgtgtactattactaaaaggtgtcagttttgatcatcattgtagaatatttctaaagagcagatggtttaatgatgtatctgaacaggttgttgtttggcctagtaactttgtagtatttatattcatgctttaatatgcaccgtggtgcctttttcttgcc

SEQ ID NO: 23862 - DNA, 2869 bp, Oryza sativa
  ref <308>: DATABASE ACCESSION NUMBER: AK073947
  ref <309>: DATABASE ENTRY DATE: 2001-12-06
gaccgcctcaacttgtcatcagtctgccgctccctcttcctctctctctctctctctctctatctctctcgcccgcttcctccccatttttctcgcgcggaacccaacccaaacccacgcggcggcgtctctcccctagggtttggtccgcgcggcctccgttcaccggcggcggcggcggcggctgcggcgatggcggggcaggagcggaggacgatcgatctggaggagggtgggcgttcatgcagaagggcatcaccaagctgaagaacatcctcgagggcaagcccgagccacagttcagctccgaggactacatgatgctctacacgtacgtcccccgccgccgccgccgcctcctcctgggacgatatacaacatgtgcacgcagaagccgccgcacgactactcgcagcagctctacgacaagtaccgggagtcattcgaggagtacatcacctccatggtcttaccttcattaagagataaacatgacgagtttatgctgagggaactagtaaagaggtggtcaaaccataaaatcatggttcggtggctgtcacgtttcttcttttatcttgatcgatacttcatctcacggaggtcgcttataccacttgaacaagttgggcttacttgcttccgagatttgatataccaagaaatcaaaggacaagttaaaggtgcagtgatagctctgattgacaaagagcgtgaaggcgaacagatagacagggccctgctgaagaatgtcctgggcatatttgttgaaattggactaggcagtatggaatgttatgagaatgactttgaagatttcttgcttaaggatactacagattactactctctcaaggctcaaagctggattctcgaggactcttgtcctgattacatgataaaggctgaggagtgcttgaagaaagagaaggagcgagttggtcactacttgcatattagtagtgaacagaagttactggagaaagtgcaaaatgaattgcttgcacaatatgcaactcccctgttggagaaggagcattctgggtgttttgcattgcttcgtgatgacaaggaggaagacctttctagggtgtacaggctcttctccaaaattaaccgcggtctagaacctattgctaacatgtttaaaacgcatgttacaaatgagggcacagccttggtcaagcaagcagaagattctgctagtaataagaagcccgagaaaaaggacatggttggtatgcaggaacaggtttttgtctggaaaatcattgagctccatgacaagtatgtagcttatgtcacagaatgtttccagggtcacaccctctttcataaggcccttaaagaagcattcgaggtcttctgtaacaagggtgtctctggcagttcaagtgctgaactgcttgccaccttctgtgacaatattctgaagaaaggttgcagtgaaaagctcagtgatgaagccatcgaagatgctcttgagaaggtggtgcgattgcttgcatacatcagcgataaagacctctttgctgagttttacaggaaaaaacttgcaaggagattgctttttgataagagtgccaatgatgaacatgaaagaagcatacttaccaaactcaagcagcagtgtggtggacaatttacttctaaaatggagggaatggttactgatcttactgttgcaagggaccatcaaactaagtttgaagagtttgtggctgcacatcaggagttgaatcctgggatagacttggctgtcactgttttgacaacaggattctggccaagttacaagactttcgatattaaccttcctgctgagatggtgaaatgcgtggaggttttcaaggagttttaccaaacaagaacaaaacacagaaagcttacctggatatattccttgggaacctgcaatatcaatgcaaagtttgaggcaaaaactattgagctcattgtcacaacatatcaggctgcgttgctgctgctattcaacggatctgacaggcttacttattctgagattgtaacacagctaaacttatcagatgatgatgtagtgcgtttgctccattctctctcctgtgcaaaatacaagattcttaacaaggaaccagctaatagatctatttctcccaacgatgtttttgagttcaattcaaaattcactgacaggatgagaagaattaagatacccctacctcctgttgatgaaaagaaaaaggttgtcgaagatgttgacaaggacaggcggtatgcaattgatgcatcgattgtgcgcattatgaagagtcgcaaagttatgggccatcagcagctagttgcggaatgtgtggagcagctcagccgcatgttcaagcctgacttcaaagccatcaagaagcgaatcgaggacctcatcacaagggattacctggaacgcgagaaggacaacgctaatgtgtacagatacctggcttgattggtggttgatgctaagtcaagaaacagctaagctttgctgactcgcgagcttcgctgcagcggtgtcatgatgcttcatcaacgatttcgtggtcatgcggtgtttttttgggcatttctatgttacgatgtaccgcggtcttccctggctgcagcactggctggtctggtctcattttgtacatgcgtcatcggataggagaatgatgataatctcaaagataaaacggtagcagggcatatcggctggataagtgaggcacttggtcactgttaagcgcaggtgctaaccatgccgttattatgcatatcatcagtatgcttttatgtatgtccttggcactcctgagttaacctggatgctaaatgggtatttatttgctctatgaaatagtagtattaagcg

SEQ ID NO: 23863 - DNA, 961 bp, Oryza sativa
  ref <308>: DATABASE ACCESSION NUMBER: AK099386
  ref <309>: DATABASE ENTRY DATE: 2002-08-28
ggtgtgcctcgaagctctcgtctcccacatccccccttcgcctcgcggggcgggggccggaggaggaggaggagggcggcccgacgcgacggcgtacgggcggaggaggacggagagggaggggccgacggctcgccgccgtcatggagaaggttagccatctgatgaacggcggctgcggcggcgtggggaagaggaggggccttccggcggcgggggtggggctagggctgcagaagcagaactcgtggtcgccggacatggagagggacgaggcgtgggagcggcggcgcgggatgaacaagggatcgtcgtcgtcgtcggcgctgcggcgggtgaggagcgtcacggacgacgacctcgacgagctgcgcgggtgcatggatctcgggttcgggttcgaggcggccgggtgcccgctgtgcggcgccgggaggagccgcctggtggagacgctccccgcgctggacctctactacgccgttcacggcaacgccggcggcggcggcggcggcgcgggcgaggtttgcgccgccgcgagcccctgctcgtgcggcgcctcctcgtcggatgtgtccgaggagtcgccgctcgggagccccatgtccatactctctccaggagacacgccggagacggtgaagatgaggctgaagcagtgggcgcaggtggtggcgttgtccgtgcgcaaccgttgctgaactcgtcggcgacgccacgccattgacatcttctcttgcatcgagaagaatgcaagaacgaaaacttagaaggataagaaaagaatatcccctgcctcgatgcgtcggatgcgaaaaaaaaaaaaggaaaatgaaaggaatttagggtttggtgggccgccgccttccaccctccggccggctcccctcctcctatctatcctatcttgaacagttcaagttcatttaacattatcataatatcattcagtcattcagcc

SEQ ID NO: 23864 - DNA, 1555 bp, Oryza sativa
  ref <308>: DATABASE ACCESSION NUMBER: AK073948
  ref <309>: DATABASE ENTRY DATE: 2001-12-06
gactccgtctccacccaacggcggaggcgacgacccgatattccgatccgccggcgccggcgccgccagtcgccgactttatcggccgtgcggctcactccactccgggcgccgccgccgctgatcgccggcttcatcaaggattcctcctctcctattgggaagcttcgggctcctctttttttcctcaaggaggagatcccctgcggcggcgccgtcgagccggtgggggaagggagagcttgaggcggaggcggaggcagagcgtgagctccgaaccaccaccatggggacctctgcgcaggagccaaatctctggaagcaaatcgacgacgccgagcactatctggtcagcggattgttcgagcaggccgtatccactgccttatctgtatccagtcaagtacattcggctgccatggagaattcatgcgaccatgatgagcttctggaaatgcttgaattagctgggatggtacttgttcaggcgcttaaagaacttaagaggacatctgagatgtttatccagctcaagacaatctacggttcagtggcatcaataccattgaaaattttcattacaggggctacgatgcacatggcaggaggatctggatctgatcttagaccaatcttcgatgaataccttgctaaatggagatatactgatgatcaagtttatgttttagatgaaggaaagaacagctcctcaaatgggttggttgttacatcggttatgtcacctgaacaatattttgaggtggcagagttgtacacggtaacattccttagtgttgtctcccatgagactgcaactgctatctcatggactgaaaaggctgagttgactgaacaagatcggcaggacctattgagaaaacttcatgcgttacaatctgcagctaataagaagtccaccaatcagggtgcaaaactatcagaatcagcagaaagaaacctttccacttctcagaatggctcaatatcaccagcacatgaggatgctactaaaagctcagcacctacgcacaatgggaatatacagggacttagaaaggctttgccgaaatccattcaaccttcttttcaacgcgtcacaaatcaatttgatccattgttctggtggtttcattcatttcgcataaaatttggaaaggtgcatgtggttctaccaagtggtaaagtgatgtttctattttcactgctgttctcgacattatacatccttaggaggaaaggtgctgcgttgaagaggactgcattccaacaaatttcatctctgcgacggggcttccttgatgccctgcaactcgccttctccacccagataaatccactcgcagctgttcaacaggtgccacaagccccgcgtgctagctggtgatgtagtgtaattattttacatatttatgccgacatcagacttgagatatgagtgtatgacaaatgtgatacctgattttgtgccattgaaaatgtaaggcaatggtaagagagctgcttaatacttccttgtaaggatccagattgagactaatatatatgtttttttatg

SEQ ID NO: 23865 - DNA, 1468 bp, Oryza sativa
  misc_feature (272)..(272): "n"=any one base of a, t, c, or g
  misc_feature (275)..(275): "n"=any one base of a, t, c, or g
  ref <308>: DATABASE ACCESSION NUMBER: AK073949
  ref <309>: DATABASE ENTRY DATE: 2001-12-06
gagagccagagtgagccaccaccagaggcgtgaccgaatcggctagcgagtgagagaggaggagcagttcacagttgcagttccacgctcgcagtagtgtccagagcagagcgcgagggaagagggcgcagagagcaggaggagaggcagccatgggcgaggaggagaaggtgaaggaggaggcggcggcggagaaggggaaggaggcggcggtagcggaggagaaggaggcggcggcggcaggggaggagaagaaggagaacgcgccgccnccnccgccaccgccggaggaggtggtgatgcgggtcttcatgcactgcgaagggtgcgctcgcaaggtcaagaagatactcaggggatttgatggagtggaagatgttgtcgcggactcgaaagctcacaaggtgatcgtgaagggaaagaaggctgctgctgacccaatgaaggtggtgcaccgtgtgcagaagaagacaggccgcaaggttgagcttctatcaccgatgccacctccggtggaggagaagaaggaagaggagaaaaaggaagagcccgagccaccaaaacctgaagagaaggagccaacggtgatagcggtggtcctgaaggtgcatatgcattgtgaggcctgtgcgcaagttatcaggaagaaaatcctcaagatgaaaggagtgcaatcagcagagccagacatgaaggcatcacaagtgacggtgaagggtgtgtttgaggagtcaaagctcaccgattacgtgcataaacgcattggtaagaatgccgccgttgtaaaatctgaaccagcccctccccctgagaatgctggcgatgcaaatgcaaaggatgacaagaaggcggccgaaggtggcgaggagaaggacgagagcaaggaggaaaagaaggaaggtgatgatgagaaagaaaaggagaaagagaaggatgatagcaatgctgccgaggttgaagagaaggacaaagagaaagatccttcagccttggctgctgctaatctgtatatgcattacccaagattcagcaaccctggtggatatggtgttcctggctacgcatacccgtatgcgccgcagctcttcagtgacgagaatccaaacgcctgtgttgtgatgtgagaaggtgagaacaatgaggtccaaattgggggaaataagagtgagactacgcatcccctaacttctggggggtgaaatcggctgttcgaagataggatcaagcaagccattttggtttctaactgttctcatgtaattaaaatgtgaactgttggcctcgtctctattgtcggccttcatggacattatattatgtaagctaaaaatgtaggattttgctttgagctttctctctattggctttccttttgtaaaaattgtataatatatatattgttagtgttgaaatagcttgtgtatccttgttattgtctcaggaggagcaccctctagtcattattgcc

SEQ ID NO: 23866 - DNA, 1881 bp, Oryza sativa
  ref <308>: DATABASE ACCESSION NUMBER: AK073950
  ref <309>: DATABASE ENTRY DATE: 2001-12-06
ggggcagcacgatcagacaagtggtgagccaaagctgcttcacatttttcttccttttgatcgaattggtctctcgcttgcatttcactccatggatagacgtgcatgaggtttagtgtggtgattagttcttggatcttgaatcggcagctgatcaaatccgcgccgaaaggcggtggtcggcagcaacgccgggcgaaggggatggagaaggtcgcggttggcttgttgccgccgctgcggttcatcgccgtcctcgccgtcgtgtcgtggacgtcgttcatctactgccatttctccttgctcagcggcgggttgctgctgggccacggcggcggcgacgacggcgccgacccgtgccgggggaggtacatctacgtgcacgacctgccgcgccggttcaacgacgacatcctccgcgactgccggaagacgagagaccactggccggacatgtgcgggttcgtcagcaacgccggtctcggccggccgctcgtcgaccgggccgacggcgtgctgacgggcgaggccgggtggtacggcacgcaccagttcgcgctggacgccatcttccacaaccggatgaagcagtacgagtgcctgaccaaccaatcggcggtggctgacgcggtgttcgtcccgttctacgccggcttcgacttcgtccgctaccactggggttacgacaacgcgacgagggacgccgcgtcggtcgacctcacgcagtggctcatgcggcggccggagtggaggcgcatgggcggccgcgaccacttcctcgtcgccgggaggacggggtgggacttccggagggacaccaacatcaacccaaactggggcaccaacctcctcgtcatgccgggcggccgggacatgtcggtgctcgtgctggagtcctcgctgctcaacggcagcgactacgccgtgccgtacccgacctacttccacccgaggtccgacgccgacgtgttccggtggcaggacagggtgcgcggcatgcagcgtcggtggctcatggcgttcgtcggcgcgccgcggccggacgacccgaagaacatccgcgcccagatcatcgcgcagtgcaacgcgacgagcgcgtgcagccagctcggctgcgcgttcggcagcagccagtgccactccccgggcaacatcatgcggctgttccagaaggccaccttctgcctgcagccgccgggggactcctacacgcggcggtcggtgttcgactcgatggtcgccgggtcatcccggtgttcttccacaacgcgacggcgtacctgcagtatgcgtggcacctcccccgggagcacgccaagtactcggtgttcatctccgagcacgacgtgcgcgccggcaacgtgagcatcgaggcgacgctccgggcgatccccgccgccaccgtggagcggatgcgggaggaggtgatccggctcatcccgtcggtgatctacgccgacccgaggtcgaagctggagacggtgagggacgccttcgacgtcgccgtcgaggggatcatcgacagaatcgccatgaccaggggaggctacgcgagatcgtggctccggcctaaacaatctaggcaagcactagacgctcgacgacgcagactaagttaatgaattaaatgtaggatactcgatcaatttacagcatgtagaacgagttgatatcaatcatcagtttcgctagttgatactatcatatagatctttgtatacttctgtttgttccaaaattcgtttacatcaagatttgcacctgtacgccccacggccacagttgttgcagtttgcagattctgatccacggctgtacatgtacggaccgaatacgatcggttggaaaacacgtgccttagcacaataaatctcactttgt

SEQ ID NO: 23867 - DNA, 641 bp, Oryza sativa
  ref <308>: DATABASE ACCESSION NUMBER: AK073951
  ref <309>: DATABASE ENTRY DATE: 2001-12-06
gcctctcacccccaagctcggcgcaacctctctcgacgtgctaatggcggcggcggcggcggacttcgcggcgagcaagcgggccatggcctacgcgctctgcaagcacctcagcctcgatccgaatacaatatccagtacaagtattgaagagagtgatattgccaccctgttctcacatattgtgaaatcgagtgaagatgaggtactgaaatgggttgaattttccagcaattttgttggaaaatgtggagaacagcatgcattgcttggtaatctgaatcaagacttgtcccagaaatcagttctgttgggtaatggttttaaaccatcagttgctgatattgttgtgtttgcaaccatacaagtttttgtgagtcatcttggtgaaaacgagttgcagaaatatccacatgtattgcggtggatggactatatccagaacatcgttgattttggcacaacagtacaaaaggttaacttgaccaaatctgtcttcgatccaccttctcatccaaagaaggcagataaaggtgacactgatccaagttcaaagaaagttgtttcaggacagaagaatgtgggcaaatcggatgcaaatgttgattccaagaaagctgcaccagagaataaagctcctg

SEQ ID NO: 23868 - DNA, 1343 bp, Oryza sativa
  ref <308>: DATABASE ACCESSION NUMBER: AK073952
  ref <309>: DATABASE ENTRY DATE: 2001-12-06
gaccatcctgttgcttaccttgaaagggtcacatactacctatttgcatcaaaggataggaagaaccaaccaaatcttagctttgttcctagaattgatcgtcttctcttcttgctaagtggttagtaatatggcgcaatgcggcggcggcgacgtttcacgacaccggaagggtcaccttgacaccgtcgagagcctctgccaggggctactcgacgacgtcatgctcgacgacgacaagtgccgcgccatgttcggctacctccaggagtggcaggacctggcaagcatgtgttacgggagcttaggcggcgagccgccgctggcgccggaggccagcaacggcagcggcagcagcggcggcggaggcagcttccggaagaggagaccggacgacgcaaagggtgagagcaacagcatctgcaagaggcagagagggaagcagcaacagcagcagcagccgtgtcatcccgatcagatggcggcggcggtggggaaaggaaggccggagagggcacggccaggagccaagaagaaggcggaggtggcgtcacccaaggattccccggcgacctcggcgtcgacggtgaccgccggccagaagaccgactacatccacgtcagagcccgccgtgggcaggccacggacagccacagcctcgccgaacgggtgaggagggagaggatcagcgagaggatgaggtacctgcaggagctggtgcccggttgcaacaaggtcaccggcaaggccggcatgctcgacgagatcatcaactacgtgcagtccctgcagaagcaagtcgagttcttgtccatgaagatcgcggcatcaaacccggtggtgaacttcaacatcgtcgaggacctcttcggccggcagctcagccaggcggcgtgcaaccctgcggctctgccggccatggcgctgccgatggcgcaggtcgagccttcctgcctccagatgagccccttgcagcagaaaacttctgcaggatcctctggctatgggctggagatggtcgtcagtaaccagtactcaccaccgggcgggccgatgtcggtgccggccggtgcatcggtggagccatgcctcaacgtgaatggagctgcaggttgggacattggctctcacggtttgttcagtggatttgatgcaccgtttcagtcagtacagagtgattgtttgctagacaatctcaaaatggaaatgtaagaaggaatgaaggaaggagaagtccgcattccaagagttttaaccacatcaatatttgtggctgaagattctttattcatagaaactgtactaatgtcatcaatggcaatacaagtacatttgtgtgttt

SEQ ID NO: 23869 - DNA, 1380 bp, Oryza sativa
  ref <308>: DATABASE ACCESSION NUMBER: AK073953
  ref <309>: DATABASE ENTRY DATE: 2001-12-06
gtgttttttgggggtcaactgtgctgtgctcttccatctttcctttctcctcctcctctgcttctttgattgctttgcactgtttcagctgggtgtgtgcttctcctccattccttggctcctgcaacttttcactgttcttggcaggttcctgtgttgctttgtgttgttgctcttgttctttctgactgttctcttgttcttccataggatcggatcggtacaatacagccattccatccataaaggtggccaaacctcatctttcagattcagcttggttgttttgctgcgtgtgagcaagttttctgagcttttcttttgtgcaagaagcaaagaacaagacaagaatctggcttgcttgttctttatcgttagaaggaatctccgcttgctgctgcttcgtttctgcatctgtttctgttcttctaatggtgaatgaataatccctagagcgagagagagaaagctgtagatagagttaaagatgagagctctactacctcttcgtctacaagcgccgccgctccgccgccatctccgacgccgcctcctcgccctcctcttcttctcgcgagctgctccagcttttctgcttcaagaagccgcccgcgctcgcctcgacctacgcgcaggagccgcacgccggcgaggcggtggtggccgtggccgtcgacgacgacgacgacacggtggaggcgcagctgatgcggctgggcagcctcgtcggccccacgcggctgctcttcaccatcaaggaggagaccaagtaggacctcgagtccgaggacggccggagccggtgcgggaggagccggagcctcgccgagctgctgcattcgtcggagacgccgttcatgacgccggcgtcatcgccgctgccgatggacaagtccttcaaccctctgttcgagcccacggtggcggcggccgtgacggtgtcgccgccgcccaagtttcagttcttgaaggacgccgaggagaagatgtatcggcgggtgctcgccgaggaggccatgagggcgcggaggtcgccgcagacgaggtcaccggcggcggccggagaggaggacggcgggtacatcaccatcatggtggggaagaacaacaaggtcatccccttgccgtcgcctcccagcaatggtgatggtgatctgcagtagtgagttctttgcaaaattttaattaagaaggccttaattaactttgttcatccagtgttctagtgtagctctttgcctgtaattttctctctctctctctctctcttttctttttggtttatggtcttctgatcatgccaaattggatggttggatgtacataacatgaatattatcagcagccaagaacttcagatcaatatatttttcttcttcc

SEQ ID NO: 23870 - DNA, 1477 bp, Oryza sativa
  ref <308>: DATABASE ACCESSION NUMBER: AK099387
  ref <309>: DATABASE ENTRY DATE: 2002-08-28
gaaacacgccgcaaagcgaagaagcgatcgcacgttcgcacgcagacgcagccgcggcggatcaatggcgatgctgacggccaagctcacctccccccccgccgccaccacctggctccccggcggcggccgccgatccgcgccgccccgccgtgctacggtgatccgcgccgccgccgtctcctacgccgacgagctcgtctccaccgcgaaatctgttgcttccccagggcgtggtatcctggcaattgatgagtcgaatgccacatgcggaaagagattagcatccattggtttggacaacacagaagttaaccgccaggcttacaggcagcttttactgaccactgctggtcttggtgaatatatttctggtgctatcctttttgaggaaactctttatcagtcaaccactgatggtaagaagtttgttgactgcttgaaggatcagaatatcatgcccggtatcaaggtcgacaagggcttggttccattgcctgggtccaacaatgaatcttggtgccaaggcctagatggtttggcttcaaggtgtgctgagtactacaagcagggggcacgcttcgctaagtggcggactgttgttagcatcccttgtggtccctcagcattagcagtcaaggaagcggcatggggacttgctcgatatgctgccattgctcaggacaatggcttagtgccaattgttgagccagagatccttcttgatggtgaccatgcgatcgagagaactcttgaagtggcagagaaagtgtggtctgaggtattcttctacctggcccaaaacaatgttctttttgagggtatcctgctgaaacccagcatggtgacccctggagctgaacacaagcagaaggccactccagaagccattgcgaagcacacccttacaatgctgaggaggagagtgccgcctgctgtccctggaatcatgttcctttctggtgggcaatctgaggtggaggcaaccctgaacctgaacgcgatgaaccaagaaccaaacccatggcatgtgtccttctcatacgcccgggctctccagaactcggtgctgaagacatggcaggggcgccccgagaacgtggaggcagcgcagaaggcactgctggtccgtgccaaggcgaactcgctggctcagctcggtcgctacaccggcgagggcgagagcgatgaggccaagaagggaatgttccagaagggctacacttactgatgcggcagaagagacttccgtgatatacaacatgccatttcgtgtcactgttttttgaacaccggagtgaataatcaccagagtatgtttggtgccaccgattgttgttagcttcgttagcacgggagaaaccttagagagctgtatctgactctgaaacacactattttgatagcacgcttttactgtaagcatatgcctttcggccatgagactgtgagagagatgtttcatttgtgttggggt

SEQ ID NO: 23871 - DNA, 2134 bp, Oryza sativa
  ref <308>: DATABASE ACCESSION NUMBER: AK073954
  ref <309>: DATABASE ENTRY DATE: 2001-12-06
agaaagattcctagtcctcctctcctcctcccctgagtcccctcccctccccagctcccctcccctcccgtcacatctccgcccaatgtggcatataaaatcccccagatccagccctccccacctccactcccttcctcattgcacacacgagaaacacagattcacacccacgagtgttcgttcgtgcccgatcttgcaggtggctctgtgttccgttcttgttttgttccggtttcttgcgctaatccatcatgttcgcaggtgggggtggggggttggtggtgatgcctgggcgcagtggtttatcgatcccttccctgccttgtggcgctgatccaggagcggcgaatttctttgagagggtgttctttttttttcttccttttggtccttgttgcagccaacgacaacgcgggaatcgatcgataaacctctgcatccagttctcgcctttttgtgttcaagggcttgaggcagtagtactggctattgcttcttgcttcttggctgctcatggggtgtaaacatgtttactacttgtttaggcttgatatatatgtttatgtaggatatgtctctttttaatgacatgactatggtgatagaactgtaaaaatcttttattctgatggttgcatgatttgatatgtgcttctgataggttcttttattctgatggttgcatgatttccatgtttacatggtagctgtaggttttgcactacaaatttcccctggatatattgtctgagacttagcatcagccatactttgaccatgccattgctaatgtgtaaggataatgagatgatgcattgatgcttgatgtaatttgtgggctttggcctattttatgcttccaaagtattttgcaggtgattgtgtggttttgttttgtcttctaatagtgggaataagttccttgctctagagagattagttctcaattgcaatttgtatccattaatggaactacgcgaggtggattcttgttggatcttgcttgctgccgtcatgagtcatgactggaacaggttccagttcatgtggagtgaatcaaatgcagaatacgttctaatgccaatgggtcttcccttgtattcccaatattcttttgcctattgctatggtaaaaaaaaagttgtttgcaataataatctttaaaaaccttttaatttgtacttctattgaatattattgtaggtagtgaatccatctcttgtctctacaatataacccctccccccccccccccctccttgtcttctgtaattatatgaagattagccagcaaagttagatgtaaaataagatactttctagctaatgactgctagaatggagtaaatcggtaaatgctcataatgcattaggatttttaactttgaattttcttcatgaatacctttcaaatctaggaaagctcaggtgattgttgacattattcgatgcttcctacaggaatcaaaaaatgaaggtagccgtccttgattctgtcaattagatccctttattctaacagcgttgcctctaacctaaagaatgaactgagtgcacaatgtctctattgctgaggactcgttctgttcaccaaatgaaaccttttttttgtggttttgtagattttcagagactcagaccgatgcttgttcatcgccaggtgcccaggttttccgttcttcttggtgaagttaagtggatctgccgtttggtggctggtaatattgatctgaatctgatacatatcaattatatgctcggtgcttgttgattgccatcaataataccttgtgttcatctggaaaatatcatgtatagtgtatttaagaactctgtatcagagcagttcggagattgaagatttcggcaggctactgtggcttgcccaaccttgctgtatcactgttttacaacttcctaataggagatgtgtttatgtaactctgattagataccgttttatttggagggattatataacttactactctctccattttaaaatggacgacgttattgacttaagacatgtcttttgatcatgtgttttatttaaaaatttagtgtaactttgcaaaaaaatgtaagtcatgcttaaagctttaaattacttctaatgataaaacaagtc

SEQ ID NO: 23872 - DNA, 1022 bp, Oryza sativa
  ref <308>: DATABASE ACCESSION NUMBER: AK073955
  ref <309>: DATABASE ENTRY DATE: 2001-12-06
gagttcgtgtgcttctctcatttgttccttgatatatttgctacgtcgtcagagaactcgtgcagatagcttctttggctgagttgttggagatggcggaggtggcgccgccggcgccggcgccggagccgaccaaggacatcgccgaggagagggccgccgtgccggcgccggaggagtcgaaggccatgaccgtcgtcgatgatgctgagaaagctgcagcaacaggtggctcacacgaaagagacgctctcctgacgacggtcgccacggagaagaggatatcgctgatcaaggcgtgggaggagaacgaaaaggccaaggccgacaacaaggcggccaagaagttggccgacatcgcctcatgggagaactccaaggtggccgagatcgaggccgagattaagaagtaccaagtaagttcagctcagctaagttcatcaacaagcagaacaaggagagatcaattatgtgtgtgtgaatcattgagttgatcgatcggttcatatatatgcaggagtacctggagaggaagaaggcggagcaggtggagaagttgatgaacggcgtggcgaaggtgcacagggcggcggaggagaagcgagcggcgacggaggcgcggcgaggggaggaggtggtgaaggccgaggaggccgcagcaaagtaccgcgccaagggagagccgcccaagaagttgctcttcggttgaatctcttctcggtcatctccattgatcgtcgtcgtcgtcgtcgttgttgtaaatgtgtgtgcgacagtgtgagtgtaccggtgtcaagttcagatagctagtggttggatgtattttctcagttgtttgttttcgtttaatttcatgtacagggcagctattgcagtctcatgtgaaaaagggaacatttattatgtacagacatgatgttttggggtctttattcggattcggcggtgaaattgtaacatttttgtgcctgtggtacttggctagtactcatgtataagaggcttacccatttgacattatt

SEQ ID NO: 23873 - DNA, 3179 bp, Oryza sativa
  ref <308>: DATABASE ACCESSION NUMBER: AK073956
  ref <309>: DATABASE ENTRY DATE: 2001-12-06
gatttttattttttttgaaaccgagccagactttgctgatgttttaagcagagagaaagttatttacagatctcgaattctcgattccctgctgaaatagtctaggcaatttgatggagtactagtaacttcaccggatactctcaccaatacggcaaagttttgtacggtcgcccgtttcgtttgcaagtactccgcttgtcgcctagtatatgttttctgccgggtcggccgaaaggaacggcgaccaaatttcattaagatggggacgcctagtatatgtgaagcagtcatttttcaccaagtattagcatcccctagtcctctctagtccttgaaatgcgtatttgaatgtgtggttgcccttccgcttgattgtgaagcttttccgtgtttggaaaaaaaaatacatgttgaaatttgttgatcattctgattttctcaacctaactcttatgcaattgcccgtatgaactgcaaggtttagtcagggcgcctgcgcctcgtttccctgttagttacaccggcccacaacttgcttagtttccatgtgagaatttgcttgcgaaaaagtgaaagtccttttcctccctgcttttgcctttcatttccttgtgacgatagacatgattttttccagtcgtgtgcttgttttggattattgcaacttttgtggataataaagccgctacttgtaagtaaacgaaaaaaaaatgttggctcagcatgaacacacgtttgttgttccttcaattttctttttgtaccaagatgtttcctgaagttagcatggcaagtaggaaatactgatctgtcttgacgttgattcttctatgaacattgtatcgatgaacatccaggttgcctccaatctgtcgcctctaatctgtatgcatcatcttaagcaaactatcacttctaatctttagctaaaatcgttaaaacgaccttttgttttctgtgttctgtggaggcttcaggcttgtatagttgtatttaggaccactgatcttaaaatcttcataacatatgtttatgagtacatttccttcattggaccaccaagcattaattttgataagcttttgcaatgcagtttttccatcactgtttctctataatttcattctcctatactacagaaactaccagctcattgagacaatgctaaagttatcctaaggagttgactgactagaaatttgtaatgtactacagttcgtgtagatttctattgggggatgcagaaccactattcctttcctctatggtactggcctgctcatatttgtaagtatgctacaattcttagactagaagacatgtgcctttcaacattctcgtggcattgaagaatacttgtttcacaatatcaacatctaacaaactgtctaacaactcaaggaaagggtaaagcatttggctacgagaagtttctgtttggagggtaatgtataagtgattctgtactaaaagaaaatagatcgtcgcgttgtttttctttaaagttgctagagagtgactgaagatttagagatcctctcattaatgtggaaaaatgagtagcaaagttagatggattaacaagggctcagtagttcgttttcatctgcgactctgcgtcgggtggagtaatactaatagatatgcgtaggcactatggaggggtcaaaaagtactattattaggacctccaatataacgccaaatagactcattactcctaaggacaaatgaacatacaaaagggataagcaaagcagaaatgatgggaaaaattacagtgagtgcgtaactcctgtatgtactcagaatttaatccttgctcagggttgagtcatttaattatgcatccttttgtgttgcagattcaccctgaacctgcaagttttcagtaatcagtttgcacgattactaagacttgttttaattgttatgctggtgcaacctagacctggtatatatgttgcccaacaatcatgtcataactgtgacatgtaaagagtgtccattatgaactgcttaatttgtcagcatgataacgaaattttgttttcttcccaacaaaaagttgggggcgtcactctttttccagtttcttcactgccaaggagcagagttaaaggtagacttggaaattgacagtgacatatcagaattcagagcataaatccaaacagcaatatttattatggttgttgaatgggtgctgatgtggaactaaagcaaacgatgccattagaagaactacaaaaatatctattagtttcttttcaaagaattcacaatactgttgctgcggtgattgagaattggggcaatgttcagaacagatggccttgatcatgtttgaatggagacgtcgattcatctcccagcttctcaactgactacatggcttcgataatgttcgaagatgggatccatagaggcgcaccatcgtgtatcagacatggtggatattactaagaagataataggagcagtattgcaaatttgccacatcgaaccaagtactgctgtaaaatttctatcttcattctgccgtatgttaaaaaatactctatcttgcagaataaacacaaatacgcaactcaagcaggtaagttgtaagagtttccctttctggtggagagtaaacttttgcagaggttcaactataccatattttctatcatgcggttcttcagatttcagtacagttgaaagttgccaaaacaccaccagaacatcagaaacaacgacggttgttgaatgagacgttgaagtttgcctttgtgcacattctgccgcaaaggatctgttcagccgcgagacctgtatgttttacttatttcagcttatggaggcctattcttttgagctaatcgttgacggattcccaagatcctaaatggtatgttttttgcaaaagactttcttcatcataatttctttgagaaatttttgcaacaaaatttccactttctaatattaaattcatttgtttgtgccccaaataattgtcataaactcagtttcatccatcatctatatagaaatggcctagtacagatacagttgctgtaatgcgctgcgcttgattttaagttgcttggaaaactaaaacttgtattcattataacttgttccattgttatggttaaggaaacatgttatctaactgtcatgcttctctc

SEQ ID NO: 23874 - DNA, 1621 bp, Oryza sativa
  ref <308>: DATABASE ACCESSION NUMBER: AK073957
  ref <309>: DATABASE ENTRY DATE: 2001-12-06
gatccgcatttccccttctccgcatctcgcctttttcctcctccgggctgcggcaatggccgaaaccctagtcccgccgccgccgccaccctctgatccccaccagatctaggatttgtttgttgtttcacggtgctccatgcccttctccttcctttccaccacaactccgcccaccgctctcaaatccaccgcgtccacccccgcccgcctctgctcctcgtcagatccgacgcttaagcacctttccgaggtgtgatttttccccccgatggacaattgatgacttctgaaataaagcacggtggaaagctatcctgtagcggcatggattctgatggcccccatacttcacttatacatggtcttcctgatgagattgctattctttgcttagcgagagttccacggcgatatcataatgctctcaggtgtgtctcaaagagatggagggcactgctttccagtgaagagtggcactcttgccgcaagaggaacaatttggatgagccttgggtatatgtgatttgtaggagtacgggcatcaaatgctatgtacttgctcctgatcctacaacccgctccttgaaaattatgcaagtcatcgaacccccatgctcgtctagggaaggcatttccattgagaccttagacaagagattatttcttttgggtggttgtagctggctaaaagatgctaatgatgaagtattttgttatgatgcctcatcaaattgctggagcagtgtagctccaatgcctactgctaggtgctattttgtttctgcagctctggacaagaaactatacattactggtggactaggtttgacagacaagtcgccaaattcatgggacatctatgatccagtcacaaactcttggtgtgtgcacaagaatccaatgctcacccctgacattgtaaaattcgtggcattggatggggagttggtaactgttcacaaggctgcctggaacagaatgtactttgcaggtatatatgatccattgtgccgcacttggaggggcactgagaatgaaattgccctatgttggtctggatcaacagtcgtcatggacggaacgctctacatgctggagcagtcgctcggcacaaagctgatgatgtggcagaaggagacgaaggagtggatcatgcttggtaggctgtctgacaagcttacaaggcctccttgtgagctcgtaggcattgggagaaagatttacattattggaagagggctgagtatagtgacaattgacctggatactgtcagggcagatggattcttggtgtcctcttccacaggcccattggtggagcatgacttcccacctgagagatgccgggttatcagcatctgaaggcatcagcttaactgtatattgtccggagaaaatgtcacacatgtgaaggtgacatgggttgattgatgcacatatgaaataaggcaatcctccaggcattgtttactcgagagagtgcccgttgctaattggtgtttaattgtttgtagtatttttgctgtatctccgacttgtgcccgtttgctgtaacaaacgaagtctgaggttcagttgtttatttcacacctatacatattgagataataacttgttc

SEQ ID NO: 23875 - DNA, 1637 bp, Oryza sativa
  ref <308>: DATABASE ACCESSION NUMBER: AK073958
  ref <309>: DATABASE ENTRY DATE: 2001-12-06
gagggtgctaagggagttgctttgagagccatccatatatactttgcttgatgccccgttactgtcggcaccctgctctctcctccctcccctttattgcttcctccctccctccctccctcttcacagcacaacacgctgccaccatttatgccactccctccctcccagctgtggtgacaggacgagcgtctcattctcaacctgaggctcaccttctctcagtcatattctccgtcttcttctccagtacgctcgcaatggctgcttcgtccggcgaatggctgagccgggcagctatggtgttggtgctaggtctcgtggtggcgtcgtcagctaaggcgggcgatgtggacatggtgttcctgaagagtgcagtgagcacgggagcagtttgcctggatgggagcccaccggtttaccacttctctcctggttctggctctggtgccaacaactggctggttcatatggagggaggaggttggtgcaggaatgcccaagagtgttctgtcaggcagggtaacttcaggggctcttccaaatttatgaggccactatcgttttcagggataataggtggcaaccagagaaacaatcctgatttctataactggaacaggataaaggtcagatattgtgatggctcatcatttactggcgacgttgaaacagtagaaacttcgacgaacctccatttcagaggggccagagtttggaatgccatcattgaagatctactagcaaaggggatgagcaaagcacaaaatgctcttctttctggttgttcggctggaggtctggctgccatactgcactgtgaccaattccgagatctgcttccagcaactgcaaatgtgaagtgcttttctgatgctggtttttttgttgatggaaaggatatcaccgggaatgattttgtcagaacattctacaaggatgtcgtaaatctacatggatcggctaaaaatttaccatcttcatgtacgtcaaagatgtcccctgatctgtgtttcttcccgcagaatgtagtgccaacattgcgcacaccgttgttcatacttaatgcagcatatgatgcatggcagatcaagaacgtcctagcacctagtgccgctgacaaaaagaagacttgggccaaatgcaagcttgatataacagcttgctcctcaagccagctcacaaccttgcaaaatttcaggacagattttctggcagctcttcctaaaccagagcagtccccagccaatttgagcatattcatagactcatgctatgcccactgccaatctgggtcccaggatacatggctcgctcaaggttctcctgtagttgagaagacgcaaattggtaaagcagtaggagactggttccacgatcgggaagtatcccggaggattgattgcccttatccctgcaacccaacctgcaagaaccgtgatgatgattaagcaattcgacctgaaaacttctgttaaattctagtactgtgttgttaaatatcaagtgaagcaataagggattagtctatagatagagccatagagaggtgttactgttacccacgatttcttcaattcttctccattctgtttctatgcctttgtcgacgatgaatcatgaacatatagttcagt

SEQ ID NO: 23876 - DNA, 473 bp, Oryza sativa
  ref <308>: DATABASE ACCESSION NUMBER: AK099388
  ref <309>: DATABASE ENTRY DATE: 2002-08-28
ggcatcgcatcccgatctgattgaatccgagcagcacaagcggcggcggcgatgggcggcgaccatggcgggcacggccacggaggcggcgacttccggcagaaggtatggagcatgacgggcgggccctactgccggcccgtgcactggcgccgcaacaccgccatcgccatgttcggcgtcttcctcgtctgcatccccatcgccatgaagtccgccgagctcgagcaacgcccacatcacccggtccggccgatcccatctcaactttggtgcaaaaactttggcaagaaagagtattgaaggatgtctgaacttgcaaggaggactcctgtttttatcttgttttgtcataatttgttctcagcgatcaatgcttgaagaagtatgctcctacgagtatgcacttgatgcttcatgtaactctttcgacttatattatgtcatacaaggagtttgcctgttggtaactc

SEQ ID NO: 23877 - DNA, 2425 bp, Oryza sativa
  ref <308>: DATABASE ACCESSION NUMBER: AK073959
  ref <309>: DATABASE ENTRY DATE: 2001-12-06
ggacgttgccgcctccgcctcctccccctccatcgccggcggccgcttctagccggagagaagaaggcatgccgcggacgagcgtggtcgagagccccggctgcccgccgctccgggccctcaccaccgacatcctcggcctcatcaaagtcgtggaggcccgcacgaagccggcgggcgtcgccaaggtcgtcgagacgtggggcgcgcccgacgcgccccgcgccgtcctcgccgcctcgctcgccgaccgcgccgtcgaccccgttttggccgtggcgcggaagaacggcgtggttgagctgctgaatccactgaatggggagactctcgcaggcgtcaacgctgctgctgggcgggcggcaccggctgatagttctgcagaagaggaccccttagccacgctgcatctcttcagaagacatgcgctggactcatccatgttaggcacatttcttgcttgtacagagaaggggaaagcatatgtcaagtctgtcgcaaaggaaaatgcatcctcggacatggctgttgggccatcaagctcatgggatgtgagcaattcgggtacagtgcaattttcttcagtggatgctggtgaaagctacgcgatgttcggagggaaaggaatagaagtcaatttgtgggatatcacatcttgtagtaagatatggtctgccaagtctcctcgaggcaacagtcttcagatattcactgcaccttggttcactgctggaacttttttgtgcaaggatgaccatcgtaaaattgtagcctgcacaaataatcatcaggttcgcttatatgacactgcttcccaaagaaggcctgtaatttcagttgattttagggagtcaccaatcaaggcagttgctgaggacccaaatggacatgctgtctacattggtacaggaagaggggaccttgcttcctttgacatgagaacaggtattatatgatagtagctggtgtgtgataattcttgctgatggcacttggaagtcaaaatacattctgaattatattttcagagttgtagcttagtttgaattttgtatctagtatactatagttcaaataaaaatctcttttcattttcgtactctaaagttcactctggcatgtgtatttcattgtactattttttggctaccatgctctgatgcttacataggtggtacaacattggttgtttatttattttcctgatcgattcatagttagttcatcatgtgctatatggatacatttaactgcctggagaagttttatttaaatttaacttaatattctgcaatgagcttatgcatcatgcacttttttggaggaacagagaaaacaaatatgcatctctgtgggtttccaggaacatcaactgtgaatcaaaaccttcggttgaatattcttgctaaaaatgcacctcctcaattgattcctgtgtacatccctcaactatagcatgaataaagttgtgctgttatggttcttgtactaacctgagcaaatatgccaacaaattttcaggggatttgagactactaaactatctgtgagtgatattgaaataccagataaattggtttcaattcaggcgttagaaagatatcttgttcatgtcccttatcagatatcaaaagatgtttgattattgtatgcttacaacattctagattatattctatgtaaattccttacactttgcaatcggtattcactttttagttctttttaatgtatctatttacagaattaactttagcttgcacccttttcccaggaaaactacttggttgctttgctggtaaatgcagtggaagtattagatctatagttagacatccagagctacctttgatagcatcttgtggactggacagttacttacgcatctgggacacaaatacaaggcagctgctctctgcggtcttcctcaagcagcacctgacagctgtggttattgattcacatttctccactgaagaactcgaggagactaaatccaagcagccagatccagttggggcagaagttagaaaggaaagaaaggaaaagaagaatagaacgagtgaaatggatgaagacgaaactagaatgctcgaccatgatgacagtgattctgaaatgcacacctcaaagagaaaaaaatctggtgaaaaaagcaaaggaatgaaaaagaaaagcaagaagcagcaagtcgcatagataggacacacaacactggagtcagtgttgaccagttttgactttttgactaaggtgctttgcccttcactcgattttgtacaatgaatatcatttgtattagagtttattcgaactcgaacaatagcacttatctggattctcaattcttcaaatacttgccgggccaattaagtattttactatgccttctgagcaatataaaagaaatggcgtattatcaccc

SEQ ID NO: 23878 - DNA, 2133 bp, Oryza sativa
  ref <308>: DATABASE ACCESSION NUMBER: AK073960
  ref <309>: DATABASE ENTRY DATE: 2001-12-06
gggaagaaaaaaacacaaaaaccgaaaagaaaagaaaaaaaaaacaacaacaacaagattttttttttccgcaaaccctctcgaaccaaaatcgcggcggctttatccacgaatcaaaaaaaatccccgcgacaatgtctccgcccaatctttcctcctcctcctagagccggagaatccacccgccatcaccatcgtgctcgcaatcgcatcgcctgtggcgggatcgccggcggcggcggcggagatgattcggctgcagacgtacgcggcgttcagcctgatggcgacggcgacggcggtgtactacgcgttcagcagcagggagcagttctacccggcgatggtgtacctctccacctccaagatctgcttcgtgctgctcctcaacacgggcctcgtcgccatgtgcgtcgcctggcagctcgtcaagcggctcttcctggggacgctccgggaggccgaggtggagcggctcaacgagcaggcgtggcgggaggtggtggagatcctcttcgcggtcaccatcttcaggcaggacttctccgtctccttcctcgccatggtcgccgcgctgctgctcgtcaaggcgctgcactggctcgcgcagaagagggtcgagtacatcgagaccacgccctccgtgcccatgctgtcgcacgccaggatcgtctccttcatgctgttcctgctcgtcgtcgactgcctcttcctgtccaactcgctcaggtcgctcatacacaagcgggaggcgtctgttgcaatcttcttttcgtttgagtacatgatactagcaacatccacagtatcgacattcgtgaaatatatattctatgtcagtgacatgctaatggaaggtcaatgggagaaaaaggcagtgtatacattttacttggagctcatcagtgaccttgtacacttgtctttgtatatgctcttcttcatagctatcttcctgaactatggtgtcccactgcacttgatacgtgagctgtatgagacatttcgcaacttcagaatccgtatcgcggattatgtacgctacagaaagataacttccaacatgaatgaaagatttccagatgccacagcagatgagctcaatgcgagtgatgctacatgtattatttgccgtgaggagatgaccacagcaaaaaagctgctttgtgggcacctgttccatgtccattgtttgaggtcatggttagaacgccaacacacttgccctacatgtagagctccaattctgcccccagataatgggcgtactgcagcacgtccgcatggagttcatcctggagttcagcctgttccaggtaatggcacaccaggttcagaacgagcagcaggtgagaacataagcaggcgccaagcaaaacttgaagcagctgcttcggctgcttccctatatgggagatcctttgcttatcctccagcgaacaatttgaacaggtattcaactcctccacagtctacatcaaatggtccacaatcaggagaagcaagtacttccaatcaatcgccaaaaggccatgcaactgccgatccttcagcgcctactttttatgcacgtggtgctgttagttcagtgacaactaccagggaacttgaaagttcactgcagaaggcatatgaaaatgctataaagagccagatagagatgttgcaaatccagctgcaaatgtttcagcatggggctacttcatcagcgactaacaatgaaaacggtgagcacacaaaaagcgactgaagttgtaaataaggggaaggtgagggctgaacaaacaaaggatatatagatggtgacttggcaaatacccgaggagaaactcccatgccatgctttatttcgattttggtaggctcgttcatttgtatgtccatgttagaggcctcctatcaacatcagatatttatttgcttaatgtggtcatttgagtagagatgcagtgttgtaactacgactaatttcagattagcacatctgggaaaaagcaacatgattcttcaatctgaaccatcagtatgctccctcttttttctggcatttttgtttgtacgctatagttggatttatactgtccagacattcaatactgaatttaataaatgtgaatatggtttaagtcgctc

SEQ ID NO: 23879 - DNA, 1129 bp, Oryza sativa
  ref <308>: DATABASE ACCESSION NUMBER: AK099389
  ref <309>: DATABASE ENTRY DATE: 2002-08-28
ggctgccgccatcgaaaccgctcttcttccctgctgcggggtgagggatggagcgcgtgaggagggcttcgcacgccggctcttggtacaccaacaatgccaggaaactggatgaggaacttgatggttggctgagggctgctggtctcaccaagtcccctgatgtgagggcagtaattgcgccccatgctggctattcatactcagggcggtgtgcggcttatgcttttggcaacattgatccaactaacatttctcgggtcttcctgttaggcccttcacatcactactatactccaaaatgtgcattaacaagagctactatttatagcaccccaattggggatttgccagtagaccatgaagtaattgaggaactcaacgctacaggaaaatttgattttatggaccttagtgtggatgaagctgaacatagcatggaaatgcatttaccctatctttctaaagtttttcagggacataacgtaaaagttgtccctatccttgttggtgcccttaactcccaaaatgaagccatgtatgggcagttgctctctaaatatcttgacgatccgaagaacttcttttctatctcctcagatttctgccactggggaacccggtttagttacacatactacgataagagccatggtgctatacataaatcgatagaggccttggaccgcatgggcatggagataatagagactggtaatccagatgcattcaagcagtacctgcaagagtatgagaataccatatgtggacgccaccccatcagcgttttcctcagcatgctgaaacattgtttgacaaagatcaagatcggatttgttcggtatgagcagtcaagccagtgcaagagcatgagggacagcagcgtgagctacgcttctgcggcagccaaggtggatactccagccgaagaagagaaggattagattgtggattttgcacggatcacttgtacaacccccgcctgcagctagcatgatcggtttgcaatccattgtatctgcctgccaaactctataaagtaataacaggttcttgttgaagaccgatcgttgcagcaaggtgaacaccaggtaacaacaatgaataaggaatactcatatttctggat

SEQ ID NO: 23880 - DNA, 1212 bp, Oryza sativa
  ref <308>: DATABASE ACCESSION NUMBER: AK073961
  ref <309>: DATABASE ENTRY DATE: 2001-12-06
gaaggcaagcgagttgggaggaggaccagcgagcaaccagccccccgcccccaatggcggcagcagcagctttgcccaccgctgccgcttttgcccacctctcctccgattaatcccctcccctcctcttcctcccacttctccgcctcctcttcctcccctcgccgaccctacctactcgcgccgccgccgtcgcattgggcggcaaacggagggggggttaaccctgatggagcagtacgagaaggaggagaagattggggagggcacgtacggggtggtgtacagggcgcgggacaaggtcaccaacgagacgatcgcgctcaagaagatccggcttgagcaggaggatgagggcgtcccctccaccgcaatccgcgagatctcgctcctcaaggagatgcatcacggcaacatcgtcaggttacacgatgttatccacagtgagaagcgcatatatcttgtctttgagtatctggatctggacctaaagaagttcatggactcttgtccagagtttgcgaaaaaccccactttaattaagactttggtttagccagggcatttggaattcctgtccgcacgtttactcacgaggttgtaaccttgtggtatagagctccagagatccttcttggatcaaggcagtattctacaccagttgatatgtggtcagttggttgtatctttgcagaaatggtgaaccagaaaccactgttccctggtgattctgagattgatgaattatttaagatattcagggtactaggaactccaaatgaacaaagttggccaggagttagctcattacctgactacaagtctgctttccccaagtggcaagcacaggatcttgcaactattgtccctactcttgaccctgctggtttggaccttctctctaaaatgcttcggtacgagccaaacaaaaggatcacagctagacaggctcttgagcatgaatacttcaaggaccttgagatggtacaatgaccctgctatggctttacattggattggcatatgtatgggctgggctcctcatttcattccttctgtgaacgctgtgcccttcgtttgggcatttttgtcattcagctggatatttcaaatcttgtgtgtttgatatgtattcaggaacgctaaatagatcaccatcttggtctctatttgttcagagtaaatatcttccaatgctgcctttcagtttcc

SEQ ID NO: 23881 - DNA, 2773 bp, Oryza sativa
  ref <308>: DATABASE ACCESSION NUMBER: AK073962
  ref <309>: DATABASE ENTRY DATE: 2001-12-06
gatcccatcccacgctgtcgacacagcttccgccgcatccctcccctcgccgtcgcaaaatcccccccgccgctcgcgccgccgccgccgagagcgagacccgcacgaggagccaagcatctctgcgttctacagctccgggccaccggcgatgaagctcgtctaccgcaacctcgcccgcaacggccccggctccgtcaagctggtgccggaggaggaggacgacctgtggcatgcctacaaccttattgttccgggggataccctccagtccgtcactgtgaggaaagttctgagagagatggcatctggaggacgtgatgctgagcgtgtgaggttaaagttggaaattgtagtcgagtctgtagattatgataaggagggatctgtcttgcgtgtacgtggaaaaaatataactgagaacgatcatgtgaagattggacagtttcatactgtggagcttgagctgaagagacaatttactttgacgaaggaactttgggattggttagctcttgataccatccaacaagcatgtggtatgtgagaactgaaatgttactatcttctaattctgtacattccatctgtcttttcctgtcttattgctcttatattctatgatggattgatctgaatggttacatggttatcacattaggaatgctacctgtacctcaaattttagcctgctaatgcttgatatgcccattcatctagattacttaagccactgggaaaaaaacatgtggttgttttttttcagtcctgatgaattatccaacaaagttggcactatgttgattgtacaatgatacttagttactcactgaaactcataatctgttttttttttctggagaatttgtgggaagaggcctaagcttacaaataggaccttaagtttagcaggaaagcccatccgggtcctgcctgttaggagggcctaaatatctcgaagtattaaccctaatttcaagctgtcttccaaccataataatcagtataaactgattgcacatatctccattttttctgccatcacctctgagatattttgattatcagagattttgaacatattgctccccttcttatgaatagattttaatgcagagaaactcactcataaatagagtatctcttttctttcaaacctgatgtgccattatgtccagtgtttatatattgtttgcgttccatcttctgctctgcaaatttattggtatggttgtaccgcggataccaggagtgcttgacaacctttgcaaacttgttactttgacctattaatgagaactattgataattaatcaatttatcatccatcatcttgaatatgcattgagacccctagtgatatctatcttgtgatttctattgagacataaacttctacttttgttttatcaacttatcatattttctgttattattctttcttgagaaatgcaatgttctaactgagtgcatctaaacctctattagacccaactgcaagtgctgatctagcagttattctcatgcaagaaggacttgcacatttgttcctcattggtagaaggtaagttgagtcattgactcattgtgccatggcacgaccaagataatttttattgtacttcccatgatagcatgctaattgtgatgatgaaagagtattatcttaatagtagccctgtttgattccctattcttttaaaggcttgagttacctcttgcggtgattgtatttgacttattagctatggttatctaaacagcataacagtaaccagagcacgtattgaaacatctattcctcggaagcatggccctgcgattgctggttatgagtcggtatggaaactggttctgatattgtgtaatctaattgttctatctattcccaactgactttgttttgctcttttgtaggccctcaagaagttctttgaacatgttttgcaagtaaatgaaaaatgtttcctcaaggaaatgataatattaatgaaaccaatttggactgatgcattacttaatttgcctacaggctttcctgaagcatattgattttgaagtagtccaatgtgctgtaattgcaagcccaggttttactaaggatcagttccgcgattatatgcatcttgaagctgcacggcgagacttaagattaataattgagaacaaacagcgcattgttcttgcacatgcaccttcaggttacaagcatagcctgaaggaagttttggatagcccaagtgtgatgacactaataaaagatacaaaggcggcgcaggaggtccaagctttgaaggacttcttcaacatgcttacaaatgattcagctcgagcttgttatggacctaagcatgttgagattgcaaatgaacgtcttgctatccaaactcttttaataacagataatttgtttcggaactctgacattgcaacgaggcaaaattatgtgcgcttggttgaatcggtaaaaaaattcggtggcacagtgcacatcttttcttcaatgcatgtctctggtgaacagttggcgcagttgacaggaatcgcagctatacttcgatttcccttgccagatttagaggacattgagatgtgataattccaccgttcagaattggcaatatgctaacttgtaattcatgtgtaatcctattcagttgatttgatataggtaactcttaagaaatctgaaccacagtatatcctagctgtaaatggtttgcatgccatatttgttgattgtttttttacttaacaaagtgctactccctcc

SEQ ID NO: 23882 - DNA, 1050 bp, Oryza sativa
  ref <308>: DATABASE ACCESSION NUMBER: AK073963
  ref <309>: DATABASE ENTRY DATE: 2001-12-06
gggtttgggttgggggaagaaaggggaaaggcgagcgactagttcgcgagacgcgacgcgagagcgcaacccaacccaacccaacccgcggcgaagaaagcgaggagcgccgccgcagcgggagttcgccgccggcgacgcgctccttgcctcctataccgaagggtttcatggagcgtgccgctgctgatcggagtggcgcggaggagggggagagcgaatggagggaggagctgcggcagcagcagtcgcaggtcgacgcactgcgggagaggctcgtggaggtcaaggtcgggatgaagtgctccgaggaggactcgaggaaggagctggatcacctctgccgcagggtgaagaccatcgccacgctgctggcctacctcaaatccaaggccaggatcatggcgataccgcacctcgcgcacacgtcctgcgggattaggcaccaggatggcgtggggtacgtcgacaggaacggggtgccactggctgattggtccaagggcggcgagtccgcttcctgcgagggtttagatgatgaaacgtcggcggatagtagtcgtgttgccgaacatggcgatgccaatgagggggatgtagatgtcgaagacattctgaagtcgatacatgtggtgaccgatgtcatggagacccttgtgaagagagtgattgttgctgaatcggaagccgctaacgagaaagagaaggtgaggatgggtctggaagagattaggaggaagaccatacaggttgagtccatgtcggccaaagttgaggaaatggagaaatttgcagtgggtacgaatggtatgctgaatgagatgaggcagagggttgaagacatggtgttggagaccactcgacaaaggcaacgtgcggctgaaaatgagcaggagcttagtcgtgtgaagcatgacttcgagtctctcagaacctatgtcggcactctcgttaatgtcagagaaactcttctttcatcagagaagcagtttgaaacaatggagaaactcttcgacaggctagttgcaagaaccaaccaacttgagagtg

SEQ ID NO: 23883 - DNA, 2314 bp, Oryza sativa
  ref <308>: DATABASE ACCESSION NUMBER: AK073964
  ref <309>: DATABASE ENTRY DATE: 2001-12-06
gaccggttttgatttgatctgtgtgatttgagtgagtgagtgagattctttggaggagggattttggtttggtttggtttggtggtttgtgcgggattttgtggggaggagagtaatggcgaccgcagggaaggtgatcaagtgcaaagcggcggtggcatgggaggccgcgaagccgctggtgatcgaggaggtggaggtggcgccgccgcaggccatggaggtgcgcgtcaagatcctcttcacctcgctctgccacaccgacgtctacttctgggaggccaagggacagactcccgtgttccctcggatcttcggccatgaagctggaggtattgtggagagtgttggagagggtgtgactgatcttgcccctggtgaccatgttctccctgtgttcactggggagtgcaaggagtgtccccactgcaagtcagcagagagcaacatgtgtgatctgctcaggatcaacactgacaggggtgtgatgattggtgatggcaaatcacgcttttccatcaacgggaagcccatttaccatttcgtcgggacttcgaccttcagcgagtacactgtcatgcatgttggttgcgttgcgaagatcaacccggcagctccacttgataaagtttgcgttcttagctgtggtatttctactggtcttggtgctacaatcaatgtggcaaagccaccaaagggttcgacggtggcgatatttggtctaggagctgtaggccttgctgccgcagaaggtgcaaggattgcaggagcgtcaaggatcattggcattgacctgaacgccaacagatttgaagaagctaggaaatttggttgcactgaatttgtgaacccaaaggaccatgacaagccagttcagcaggtacttgctgagatgaccaatggcggagttgaccgcagcgttgaatgcactggcaacatcaacgccatgatccaagcatttgaatgtgttcatgatggctggggtgttgctgttttggtcggcgtgccacacaaggacgccgagttcaagacccacccgatgaacttcctgaacgagaggactctcaagggaaccttcttcggcaactacaagccacgcaccgatctgcccaacgtcgtcgagctctacatgaagaaggagctggaggtggagaagttcatcacacacagcgtgccgttctcggagatcaacacggcgttcgacctgatgcacaagggcgagggcatccgctgcatcatccgcatggagaactgaggtttttcaggggattatggtgttgggtaataagattgggcagcttgagcagcctgccttgggtgaatgatgatatacggttcttctgtgtatcctgggcaaatttctggctttgtcaatcagtaatagtacggtatgaattccagtgtctgtagctgcaaagagtttgttaagaatcagtgatcttttggcgtacttggaagggtttactccagtgaagtctattgggtcaatgtcagcatcatatctcctagttccctcaccaagcatgcgatacctttcgccagcaacattacagcttccaacatgccttacatcagagtctccacctcttgcacacttactgcacagcaaagggacagcgattcccctagcaatgggctatgtagtctccaaagccgtcccaccggtaagaaaggactccgcacgccttgccgatgaggacagaccctccgtcctctcggttagcatcattgatcactatggaggcagcattgctgctgttcaagagaagatgagccgaggttctggcaagcagacgaggaactttactcaggaagcagcaggtcgtgatcatgagacggagatgcacaacgtgttggaagcagtggctgccgagctccactccctttcatggatgacagtgagcccggtgtacatggagagacgaagcgccctgccgtcccactgtgatatggtccttcgcttgaggagacttctgcattacgctgatcggcatctctcccaatcgacagagaaaggagatgtagcttagagactactagagaggacaactaattctcatgtagctttcaccacaggaaaaataagggcttagatgatgctgaaaccgttgtctgtatgtatattaggcaggtagatgagggtcacattgacgagctctctagcccgattttgccttgttagtggattgaagagaatgctaatttcttgggctgaggatgtaattacgtgcgcatcgacacctctcccagggccaggaccaagttgtaatattgtagagctaactggtttataatttggtggtatttgttattg

SEQ ID NO: 23884 - DNA, 3102 bp, Oryza sativa
  ref <308>: DATABASE ACCESSION NUMBER: AK073965
  ref <309>: DATABASE ENTRY DATE: 2001-12-06
gctgaatcctcctctccttcccctcgacacctcccgattcaaatcgatacccaaaaaaaaaaaaaaattcacgcgagagctctcgatctagggatccctcgtgttgccgcagagtcgccgcctccgccgcacaaaaccctaggtctagcggcggagccccctcctccaccccttcgctcccatggaggacggcatctactcgtcctccgcgccgccgtcgacggcgacggcggccgcggcggcggcggcggtggggtcgtcggtgatcccgatcgtgaacaagctgcaggacatcttctcgcagctggggagcagctccacgatcgacctgccgcaggtcgccgtcgtgtggagccagagcagcggcaagtccagcgtcctcgaggcgctcgtcggccgcgacttcctgccccggggctccgacatatgcacgcggcgacccctcgtgctgcagctcgtgcaccagccccgccgccccgccgacgccgaggcggatgagtggggcgagttcctccacctccccggccgccgcttctatgacttccgcgaaatccgccgcgagatccaggccgaaacagacagagaggcgggtggtaacaaaggtgtgtcagataagcagatacgactgaagatctactcaccaaatgttctaaacattacgttggttgacttgcctgggataactaaggtgccagttggtgaccaaccaactgacattgaggccagaataaggaccatgatattgtcgtatatcaagcacaagacatgtatcatcttggctgtttcgccagcaaatgcagacttatcgaattctgatgctcttcaaattgctcgaaatgctgaccctgatggttctcgaacaattggtgttataacaaagctggacataatggacaggggcacagatgctcgtaactttctgttgggaaatgtgattccattacgactaggctatgttggtgtggtaaaccgcagtcaacaggatatcaaatcagatctcagtatcaaggaagctctggcgcgcgaagaaagtttcttccgtaatcatccagcgtataatggtcttgctcagtactgtggtataccacaattagcaaagaagttaaaccagattttggtccagcatataaagactgttctgccaggattgaagtcacgtataagttctcaattgacaactactgctaaggagctttccttttatggtgatccagtcgagtccaaggctggtcaaggtgctaagcttttgaacattctggcaaagtactgtgaagctttctcctcaatggtggagggaaaaaatgaggacatatcaacaattgagctttgtggtggagcaaggatccattatatttttcaatctatatatgtaaaaagcttagaggatgttgacccttgtgaagatgttaccgatgaagacatccgtatggctatacagaacgcaactggtcctaggagtgctttgttcgtacctgaggtaccttttgaggtccttgtacgcaggcagatcagcagattgcttgatccaagccttcagtgtgcaggtttcatatacgatgagctagtcaagatgagccatcgctgtcttgctgttgagctgcagcagtttcctctgctccgtaggagcatggatgaagtcatcgggaggtttttacgggatgggcttaagcctgcgcaggatatgatagcacatatcattgagatggaggcggattacataaacacatctcatccaaatttcatcggcggcagcaaggctgttgagcaagcacagcagcaagttaggtcttctagactggcagctgtggctagaagagagggagtagatgctgataagtcacaagcttctgataaaactcaaaagccgcgtgcgcttttgggtaggactggtgtaaatggagtagtcacagatcatctccagggtttacggcctgctgctgaggctgagaggccaggatcttcaggtagtggaagcacatctttctggggatcaatatcaatattttcttctactagtgatgatcgtacacattcttctgcaaaagacaactcatcgaacaaatcttatacagcttctacttcccacctggagcattcactctctacgatacagttgagagagccaccagttgtcttgaaaccttcagaaagccagtctgagcaggaggcgcttgaaatagcaataactaagttgctactgaagtcatattacaatatagtgcggaaaaatgttgaggacttcgttccaaaggcaatcatgcattttctggttaaccacacaaaacgggagctgcataattaccttataactaagctttatagagacgacctctttgcggacatgctcagagaacccgatgaaataaccataaagaggaggcaaatacgtgacaccctcaaggtccttcagcaagcatacaagactttggatgagataccacttgaagcggacacagttgagagaggctattccctggatgccgatgcaacaggtctaccaagggctcatgggctttcttcatccttccaagatggaagctcgccatattcgaccccaaagcaaccaaggtcaaggaaatctagccactcaggggagcagctgccattcaatcccgatgcaagcggtaacggattttgatctcgccattcacgaccgtcacccgaacgaaccagtggttgaaccaggcgatgtaccgtggttgcacgcattctgcattcagtttgtttgcaccagatagatgtatgcttttctagttctactactattcttttcactcagtgttgcgccccaatgaagccatgacatggagcgagttttgcccgtttgccccctttgtacagtatatttcgctgcccaatcgtttcatcataaaatgatatatcagtgatgggtatagttttagtttaagcccagggaagagtctatggttgctcggtgttagtatcgagcgtccgaatgcctgtatcctaaaagacggttttgccttgcaaaatctgacaaggttggttggtaaggatacgcaaaacaaatttgtgttgcataaagttggtggtctgtaccagtataagtttggtgatttcagtcgatcactggtgatttgc

SEQ ID NO: 23885 - DNA, 1801 bp, Oryza sativa
  ref <308>: DATABASE ACCESSION NUMBER: AK073966
  ref <309>: DATABASE ENTRY DATE: 2001-12-06
gtccgccaccgcgtccttccccgtctccggccacacctcgccgccggccacctccgccgccgccgcctcatgctaccccttcacaccgcgtccggagccggcctgccaccgtcgtgtccgccgcctccggtgtcaccgacggctaccactccaccatccgctccctcaactcccgcggccgccacgtcccccgcaaatccctcggccagaactacatgctgaactcgaaggtgaacgaggagctggtggcggcggcgggggtggaggagggggacgtcgtgctcgagatcggcccggggactgggtctcttacggccgctctcctcgatgccggcgccaccgtcttcgccgtagagaaggtcggcggcattgctagtcattggcttgaattgggctaagagctgctgagaccgtgtcattgttccttttcactagtttatttggtccataatctgcaatgccatatatcatgtttgctttggtaacaggataagcatatggccacccttgtgaatgataggtttggatccacagaacaattgaaggtagtttcatgttcttagaccaacacgttggattgtttcatccatttctttgactattggtgtttctagaattggttacatggtaatccatgatgttgcttatttgttcctcagaataaccacccttagtttataactctgatttttttccccaagtccaagtgcaggaccactcttatgctgtgctgagataaaaataatgctacttatctacacatgctgcattatggaaaagctctgaagtgtgaattcttctagtttcaatatttccctgtccagcatttgttgtacacagtttccttctgctatagcataatgctcttatgaccaaattgcacgctagcttaacctgctttacattctaataaccaaatcaggcatgtcccatacatggtaataagattcacatattatggcttctcgtgacttatggacaaaataaacttaaaacgggttttactacatagtctagttgggtctcaggacttgagcatatgaacaagtatacgttgtaacagatggttgtagtaagatctaagctcttaagattctaatagcactttgctcttgtcatggtcagtaagcatttttttttatgtttccgtgtttctatagttgctcttcttgacatccaatatgaccaatactgccatttaaactatccactcttcttccagtcattgaagattgatatgtggataatcctattgcatattttatgaaactagaaatgcgaatgtgatatggacaatatgctgttgcctttaccaaaatctagtcttcatctgatgtgtaatgattttaagaatataatgcagatcattgaagaagatatcacaaaatttaatgtccgctcccattttcttcctttcctggaggaaaaatcccatcacacgagaaaatatgccaaggtggtgtcaaatttaccattcaatgtaagtactgaagttgtcaaacttcttctcccaatgggagatgtcttttctgtcatggtgcttttgcttcaggatgaaacggcattgcgctttgcagatgcttcaatacaaacaccagagtaccgacctatcaatgtgtttgtgaatttctactcagaaccagaatacaagttcaaagttgagaggacaaattttttccctcaaccgaaggttgatggtgctgttataagctttaagctaaagaattcaggggattatccaccagttggttctcacaaaggtttcttttcaatggtgaactctgctttcagtgggaagcgc

SEQ ID NO: 23886 - DNA, 2196 bp, Oryza sativa
  ref <308>: DATABASE ACCESSION NUMBER: AK073967
  ref <309>: DATABASE ENTRY DATE: 2001-12-06
tgaggaaccaacagaagcaaaggtggcattcgttcgtcgcacgagagcaccacagcctcacgacacgagctcatcccccgccatctccgctccgctcctctcctctcctctccgtgctacgccaccaaacccactccccccgagatagagagagagagagagagagatccacagcctcacagcatcaaatcacctcccctttctcccagatccaagccgccgccaccaccccctcgccgtcgccgtcgccccctccggccgatctgatgcccgcgcacgcggcggtggtggtcagcgccgatgcggtggaagcttaagtcgtcggcgtacaagcgcgtgccgtccagggacgccgccatggatctcgacgtcgagacgccagcgaaaatggcggacggcggggccccgtcgtggcgcatgtcgctgccgcacgtgtgcgtcgccacgctcacctccttcctcttcggctaccactccggggtcgtgaacgagccgctcgagagcatctccaccgacctcggcttcgccgggaacaccctcgccgaaggccttgtggtgagcatctgcctgggtggtgcgtttgttgggtgcctgttcagtggatccatcgctgacggaatcggcaggcgtcgcgcgtttcagctcagtgcgctgcccatgatcatcggcgctgccgtaagcgctctcaccaatagtctggagggtatgcttcttggaagatttttggttggaacagggatgggattaggtccaccagtagcttcactgtacataacagaggtttctcctccttcagtgaggggcacatatgggagctttgttcagattgcaacctgccttggaatcgtagtatctctcctaattggtacacctgtgaaggatattgatagatggtggagggtgtgtttctgggttgcagctgttccagcaactttacaagctcttggaatggagttctgtgctgagagcccccagtggctgtataagtgtggaagaacgactgaagcagagatacaatttgaaaaacttctaggtcctcttcatgttaagtctgctatggcagaactctcccgatctgaaagaggcgatgatggagaaaatgtgaagtattcggaattgttttatggtcgcaactttaatgttgtttttattggcacaacgctctttgctttacaacagttatccggcataaattctgtgttctatttctcatcaactgtgttcagaagtgtgggtgtgccccctaaccttgcgaacatatgcatggggatagcaaatttatcaggctcaattgtagctatgcttctaatggacaaactaggaaggaaagtacttctttcagggagcttccttggcatggcctttgcaatgggacttcaggctgttggagcaaatcgtcaccaccttggttctgcaagcgtatatctttcagttggtggcatgctattgtttgtcttgacattttcgttaggagcaggtccagtgccaggacttcttttgcctgagattttcccaaacaaaatacgggccaaggctatggctctgtgcatgtccgtgcattgggtggtaaatttttttgtcagtttgttgttcttgcggcttctggagcaacttggtccacaagttctgtacacaatgttttcctcagcttgtgtggtagcagcaatatttgtgcggcgccatgtggttgaaacaaagggaaagactttgcaagagatagaagtttcgcttctacaaacacaataaagatttcatcagcgagtttgaggcaacaacaacctacatgattagcatctgacactatacttgttgctgaatacctgctgggaaagtctaccgtgaaagttgatcactgaaccaagccaacataccacggacaggcagcgccctacactggaccagggaagtacccagacatgcacctgtgaccagtaagggcgacctagctcgtgcataaaccatccatgtagtgaggttgcatctgtatagttggtcttctgctagatgtatctggtaatctgtgttgtcttcatcatttgtcatttgtacactgtcagtatggagaaaaaaagacgggaagtgtggttactgatggccatagtttgaaccgtggatacgttttttttactgtttaaagaggaataacagcactggctctgccagctacatgaaaataaagtgcgttctgcctgagcc

SEQ ID NO: 23887 - DNA, 2596 bp, Oryza sativa
  ref <308>: DATABASE ACCESSION NUMBER: AK073968
  ref <309>: DATABASE ENTRY DATE: 2001-12-06
gacctcctcctcctccatctccctctcctagccaagaactcctcctcccctcccccagcattgccgtgggatgtggcggcggcggcggcggagttgaggcgatcaacaatggctgcggcgatggcggagtcggataataacggcagcgaggtcagccccggcggcggcgggagggactcggcgtcggcggcggcggcggtagcttcgccggtgaaggcgaaggcgagggcgttgctggagctggagacggccagcgcggcggcggcggcgtcggagtcgtcggaggcgagggtcgacgacggcaacatccaggaggccgagtcgtcgctccgcgagggcctctccctcaactacgaggaagcgagggctctcctagggagactggaataccagagaggcaatgtagaagctgcactgcgagtatttgatgggatagatcttcaagctgctatccagcgctttcaaccatcgctttcagaaaagccaccctcaaaacgaagtaacaaattacgttcagattcatcgaattcaggatcgcagcatgctgccagtcttgttcttgaagccatttacttgaagtcaatgtctcttcagaagttagggaaagcagtggaggctgctcaacagtgtagaagtgtccttgatgctgttgaaagtattttccaacgtggcatacccgatgtcatggttgaacaaaagcttcaggaaaccgttagtaaatctgtcgagcttctcccagaactttggaagcaagctggagcctatcaagaggcgctcgcttcttaccggcgtgctcttcttagtcagtggaatctcgatgatgactgctgcacaaggattcagaagagatttgctgtttttctgttgtatggtggcgtagaggctagccccccaagcttggcttcacaaactgaaggatcatatgttcctaagaataacttggaagaggcaatccttttgctcatgataatattgaaaaagtggtaccttgggaagactcactgggatccatcagtgatggagcatctaacatttgcattgtcactttgtggtcagacatctgttcttgccaagcatcttgaagaggttttacctggaatataccctcgaactggaagatggtatagtctagctctttgcaattatgcagcttcacataatgaagctgcattaaatttgttaaggaagttgttgaataagaacgagagtcctggtgacataatggccctcctgttagctgctaagttatgcagctcagattattctcttgcttctgaaggagtagagtatgcaagaagagctgttacaaatgttgattcatcagatggtcatttaaagagcgctgcgctccacttcttggggagttgcctggctaagaagtctagaatcgctacatctgatcaccaaagatctctcttgcagactgagtctttgaagtcacttagtgaagcgatttctcttgatcgtcacaacccagatttaatatatgacatgggtattgaatatgctgagcaacgaaacatgcaggctgctttgaaatgtgcaaaggagttcattgatgcaactggtgggtctgtttctaaaggttggagattgctatctttggttctttctgcacaacaaaggtattcagaagcagaggtggtgactgatgctgcattagatgaaactacaaagtgggaacaagggccattacttagaataaaggctaaactgaaggttgctcaatcgttgccaatggaagcagttgaagcataccgtgcccttcttgctcttgttcaggcacaacgaaaggcttatggtaccgtaaaaaatggcacagaggaggttgataataaagtgagcgagtttgaagtttggcaaggtcttgccaacttgtatgctagtctttcctattggagagacgccgagatatgtttacagaaggctaaagccctcaaatcattctcggccataacgcttcatgcagaaggttacacgcgtgaggtgcgtgagcagacacaggacgcactggctgcatacttcaatgcggtctcgaccgaggtggagcacgtaccatcaaaggtatccatcggcgccctcctgtccaaacaaggccccaagtatctccccgtcgcaaggagcttcctctcggacgccctaaggcacgagccgacgaaccggatggcatggttctacctagggaaggtccacaagcatgatggcaggctagctgatgctgctgactgcttccaggcagcctcaatgcttgaggaatcagacccaatagaaagcttcagatcactctgatggctcatcatcttactgcagcaacattgaggttttcttttttcgcgggttaatttttcttctctcctcttcttctcctcctagctttttttggtacatagctgggtggaatctggataccagctacatgtaacttttgtatccgtaggtgccagcgtgctcgtcacgctgttgtcggatattttgacaaaatgatgtaatttggctgctaaatggtaatagccgtatatataagttgcactagaactgtcgtactgtactgttgatttttacagatattagtattgaatataatccattgctatgt

SEQ ID NO: 23888 - DNA, 2336 bp, Oryza sativa
  ref <308>: DATABASE ACCESSION NUMBER: AK073969
  ref <309>: DATABASE ENTRY DATE: 2001-12-06
gacgcacgaaatatcccactcgcttcgacactctcttccccttcttctcccggagaaaacctcgagccaaggccccgactccgactccggtgatgtcggcggcggtggggggagccgagttccacgggttccgtgggggtggcggcggcgcggcgcagctgcagaggtcgcggatgctcggaaggccgctccgtgtggcgacccctcacgcggcggcccccgctggcggcggcgggtcgtcgtcggccagcatacgcgccgtctccgcgccactcaagaaggatgcatctgaagttaagaggagcaaggttgagatcatcaaggagaagagcaattttcttcggtaccctttgaatgaggaactggtctcagaggctccaaatattaatgacagcgctgtccagcttattaaatttcatggaagctatcaacagacggaccgtgatgttcgtgggcaggagaattactcgtttatgctccgaacaaagaatccttgtggaaaagttccaaaccagctttacttggctatggatacgctagctgatgaatttggtattggaacactccgattgacgaccagacaaacatttcagctgcatggcgttcttaagaagaacctgaagactgtcatcagcactgttataaagaatatgggttcattattaggtgcctgtggagatctcaacagaaatgtacttgcacctgcagcaccttatgtcaggaaggatattctttttgctcaagaaacagcagagaatatcgcagctcttcttacaccacaatctggggcttattatgacctgtgggtggatggagaaaagataatgtcagccgaagaacctcctgaggtcacgaaagctcgcaatgacaacacatatggaacaaatttccccgattcccctgaaccaatatatggcacacagtatctgccaagaaagttcaagattgctgtcactgtcgctggagataactctgttgatattctgaccaatgacatcggtgttgttgttgtttcagatagtgcaggagagcctgttggcttcaacatttatgttggtggtggcatgggtaggacacaccgagtggagaccacattccctcgattggctgatccactgggttatgttcctaaggaagatatattgtatgctataaaagcaatagtcgtcacacagagggaaaatgggagaagggatgaccgccgatatagcaggatgaagtatctgattgataactggggaattgagaagtttcgggctgaagtcgaaaaatactatggaaagaagtttgaagattctcgtcctttgcccgaatggcagttcaacagctacctaggatggcaggaacagggtgatggaaaattattctacggagtgcatgttgataatggtcgtgtcgcagggcaagcaaagaaaactctacgagagattattgagaagtacaatttggaagttagcattactccaaaccagaatcttatcttatgtgggattgatcaagcatggaaagatcccatcacagcagctcttgctcaatctggcctgctggaaccaaaggatgttgatcccctgaatattacttccatggcatgtcctgccttaccactgtgccctctagcacaaacagaagctgaacgagggattctgccgattcttaaacgaattagagcagtttttgataaggttggcatcaaggaccatgagtcggtagtggtgaggataacaggctgccctaatggatgcgctagaccatatatggcagaggttggctttgttggtgatggcccaaacagttaccagatatggcttggaggaacaccaaaccagagtaccctagctgaaacctttatgaataaagtgaagcttcaagatattgagaaggttttggaaccattgttttcctattggaacagcacacgtcaggaaggtgaatcttttggtagcttcacacgccggacgggatttgacaaattgaaagaggtagtgaacaagtgggcagagtcagcatcagctgcatgatggactgctttcgctgaacaagttgataacaattctgaccacgggtccaatgcgggcatcgtcaagggctctcaacataactatgtgagcattgcaggagaaaattttgtcaatttcgttgacaagattgaggactcgccgactcgggtttggaatcgttcgttcaggtaattaatcaaaatttttcgtgtactctggtttgagaaaaaaaaatgtgcttatgagaaaacaaaaggaaccctggctgtttactttggaataaattgcttggaaagtgtactgaataaatttttccattgtggtgtttgtttttttttc

SEQ ID NO: 23889 - DNA, 2039 bp, Oryza sativa
  ref <308>: DATABASE ACCESSION NUMBER: AK073970
  ref <309>: DATABASE ENTRY DATE: 2001-12-06
ggagagctcgccatttcttcgatctcctctcctcttctcctccacctcctcctcgtggcttcgcatcgcgtggagctcgtagtgtgctagatctaggaggaggcggcgatgagggcgcggagggttgtcgcggcggcggcggtgctgctgctgttcgccgttgtggcggtggcgcggctcgacctggacgacgacggggacgactcggaggtgctggacgagctgctcgcggtggacgaggaggaggagagaggggagctcggtggaggaggggaggcggcggcggcggaggcggtgcggcgggcgcagtcgatggtgctggtgctcgacaacgacaacgcgcggcgcgccgtggaggagaacgcggaggtgctcctgctgggctacgcgccgtggtgcgagcgcagcgcgcagctcatgccgcggttcgccgaggccgccgcggcgctgcgcgccatggggagcgccgtcgcgttcgccaagctcgacggggagaggtaccccaaggccgcctccgccgtcggggtcaaggggttccccaccgtcctcctcttcgtcaacggcaccgagcaccaattcactggcctccacaccaaggacgcgatagttacttgggtaagaaagaagactggtgcaccagctagtaggattcagtcaaaggattccgctgaggaatttctgaaaaaggatcaaacttttgctgttggtcttttcaaaaattttgagggaacagaatatgaagaattcgtgaaagcagcaacctcagaaaatgaagtgcaatttgtcgaaaccaatgataggaatgtggccaaaattctttttcctggtattgcatctgaagagcaattcctgggccttgtgaaaagcgagccagaaaagtttgagaagttcaacggggcatttgaagaaaaggagataattcaatttgtggagcttaacaagttcccacttattactgtattcactgatctcaactctggtaaagtttatgggagccctattaagctacaggtcttcacctttgcagaggcttatgatttcgaagatcttgaatctatgatccaagaggttgccagaggattcaaaacaaagataatgcttatatatgtggatactgctgaagaaaagcttgctaaaccattcctgactctctatggactcgaaccagaaaaacctactgtgacagcatttgataccagcaaaggtaccaaatatctgatggaggcagaaattaacgcgaagaacctacaggacttctgcttaagccttctggagggtacacttccgccatacttccgatcagaaccagtaccagaagaaaagggacctattgaaaaggttgttggccgtacatttgattcttcagttctagaaagtcctcaaaatgtgttccttgaggttcatgcaccttggtgtgttgactgtgaggccataagtaaaaacgtggagaagttggccaaacatttcaatgatttgggccagactaatcttaaatttgcacgcatagatgcttctgtgaatgaacatcccaaattgcagataaacaactaccctacactgttgctatatcctgcccaagacaaaagcaacccgataaaactttcaaagaaatcaaatctgaaggacatggcaaaattcgtcaaggagaagctgcaaattgcggatgtcgaaacagtagccgctggtgacattgtcaaggatgagctatagtagatttctcacagctttcgggcatgctttgtgcagtgaatgaaagtaacagcatgcttgcattttgctggaatgctttcacaccatgcttgtcttgggttgcaatgtaccatttgagataaggaaatagaataggaaatgatcaaacgggtatttaagttgaactatatgaccttccagatttacttaccgtcgcagcatcagctgttccttttaaagatgtgatttactatacatgttattagttgttgataacaagctacatttgtttgtttgttgagctgtgacttgtagcattgttctgtaacataaaactacaaattctgtcc

SEQ ID NO: 23890 - DNA, 1214 bp, Oryza sativa
  ref <308>: DATABASE ACCESSION NUMBER: AK073971
  ref <309>: DATABASE ENTRY DATE: 2001-12-06
gccagtgtagtagtatactagtatgagtaggcttggtaggtcgcccggcccggcggcgccgactcgatttcctcccctcgcgtctcgtttgattcagaaagaaattgtaagcgagcgcagcattgggttcaaataatcagagaatcgagaggagaaagacattagatcagtagaggaagcgggagagaaggcaagtctgaggtgcccccgacccgatgcctccgatttctcgactagatccgagatatcatcgcgccaggggactacatgagctgaatcggttaatgtccctaaggcgggagcagcgccgtctccaaatcgaaacctatcaatttcttgctcaatgtgctaaaagaaaggaatctccctgccaacaagataattctcaatgtgtgaagagaatgagatattcaggtccggaccttccagaggacatatggcaccatatacattccttgttgccactgcaagatgctgcccgtgctgcttgcgtgtctcaggcttttctacgtttctggagatggtggatacaccaactggccctggcaaattcctccaccttagatacttgaggattacttttgcaacatggagattttcctgggcttatgattatttttctcttgcatcttttcttgatgcttctccttccttggagactttcatcctatgtatttcacagaaagagaagcatgacttgacatttaaggatcccatatgtctaaggcaaatccccgaacatcggcacgacaagcttaagaatgtgaagatcactggtttcagtgccacaagaagcttggctgagctaatatgtcatattatggaaaatacaacgtcccttgagtgccttacattggacactctttgcactcaacttcggtgttctgacggcaacatcgatgtctgcctcccattggatcaggatgttatcaagggagtgcataattcgctcttggctatccgaacatacatcgaggggaaaattccctctacagtcaagttcaatgtccgggagccttgcagccgttgccatggttggtaacttggatgtcggatcattattacccagtatttaattttgtaacttaaggtgtgttgtcctttatgttttaagttatttgttgtgtccattgtttaggtatgtgccttggttaatttattaataacagacttgtgtaacttgagatgtgtcgtgctttacgttttgagttatt

SEQ ID NO: 23891 - DNA, 2639 bp, Oryza sativa
  ref <308>: DATABASE ACCESSION NUMBER: AK073972
  ref <309>: DATABASE ENTRY DATE: 2001-12-06
gaattgtgagaagagaaggctgcatgcttcttttccttggcctcacccttcctccatgtttgaacacaccaccacaagcgattagcccttcctctcctgcttccgcccttccatggcaatggaggtggctcttgcggtttactcactggtgttgcttgcctccttctccttcccttgcaggcttgcaagtgccctcctctctcccaagggtgtaaactatgaagtgcaagctctcatgatgatcaagacttccctcaaggatcctcacggtgtgctcaagaactgggaccaagactccgtggatccttgcagctggaccatggtcacttgctcacctgagaaccttgtcactggcctggaggctccaagccagaatctttctggcctgctctccgcaagcataggcaacttgaccaatcttgagatagttcttctgcagaacaacaacatcaatggtccaattccagaagagattggcaggctaacaaaactcaaaacacttgatctctccagtaaccacttctctggtggaatcccaaactcagtaggccacctcgaaagcctccagtacttgaggctcaacaacaacaccctgtctggtgcatacccttcatcatcagctaatttatcacagcttgttttcctggacctttcgtataataatctgagtggtccagtacctggttctttggcaagaacgttcaatatagtggggaatccgttgatctgtgctgcgggtacggaacatgattgttatggaactttaccaatgccgatgtcctacagcctgaataatacacagggtactctgatgccagcaaaatctaaaagccacaaggttgcaattgcatttggttctacaattggctgcatcagcttccttatccctgttatgggattgctgttctggtggaggcataggcgaaaccatcaaattctttttgatgttgatggtaagcaaaaagccaaactactatccataatgcctcaatgctcgtcaaacttgggggcatactggcatgcgatggttgttttcattgtaacgcattggctattgcagagcaacacacagagaatgtcaacctaggaaatgtgaagaggtttcagttcagagagcttcaggttgcaacagagaacttcagcaataagaacatcttaggaaaaggcggctttggaaacgtttaccggggaaagctaccagatggaactgttgtagctgtcaagaggctgaaagatggtaatgctgcaggcgggcaggcacagtttcagactgaagttgagatgatcagcttggcgcttcaccggaacctcctcaggctttatgggttctgcatgactgctactgagaggcttctggtatatccatacatgtcaaatgggagtgtcgcattgcgtctgaaagggaagccaccattggactggatcaccagacagaggatagcactcggtgcagcaagaggcctactgtacctgcacgagcagtgtgaccccaagattattcatagggacgtaaaggcagccaacatattgcttgatgactactgtgaagccattgttggagattttgggcttgccaagctcctagatcatcgtgactcacatgtcaccacagctgtcaggggtaccgttgggcacattgccccggaatacctctccaccggccagtcatctgagaagaccgacgtctttggttttggaattctgctgcttgaattgatcactggtcaaactgcacttgaatttgggaagtcatcaaatcagaagggagccatgctggactgggtaagttcattaccatttccaaagagtttggagcatgggaaaattatcgctagaataaggctagcatatctgtctaccaaatcttgtctcttgccttgacattggcttgtgttcaggtgaagaagatgcaccaggagaagaagctcgacgtgcttgtcgacaagggcctgagaagcaactacgaccgtgtcgagctggaggagatggtgcaggtggcactgctgtgcacccaatatctccctggtcacaggcccaggatgtcagaggtggtcaggatgctggagggagatggactggcagagcggtgggaagcatcccagcgcgctgactcacacaagttcaaagtgcctgagttcaccttcggtcgctgctactctgacctgacggatgactcgtcattgctggtccaggcagtcgagctctctgggccgagatgacacgataacaaatagtggaaggcaaaccatcattagttgtttgcagcaggatctgtacagcaagagacaccactgtacaatggaaaaatagccaaaaaaaaaaatttaaagcaagcaactgcatgccaatgcaaaatcacaaatcgaagcaggtatcagatcagctgtacaaagattaaaagaagagcacttcctaggcataggatatttctacttttacagattctgtaactattggtagaataagtttgcagagcaatatttttcaagatgtaacattttgtttatgcttttttcctcccttgtaccttttgccttagctagtgttagttaaaaaagaaactgttgtcattggattataaagacttggcaatgacatttttgtgcattgatgcaaagcttgaaaatgcatcaaatagc

SEQ ID NO: 23892 - DNA, 2952 bp, Oryza sativa
  ref <308>: DATABASE ACCESSION NUMBER: AK073973
  ref <309>: DATABASE ENTRY DATE: 2001-12-06
gaccggccaccgcccgcaagcaccgacgcgacgcggcctcggcggcctctccatcaccggcggccaccgcgccacagcaagggtgaaattgtaaaggagtttttttttacagttcttgatctgaaacggagacaatggcgagagaggatgagaaggctgacgcaatggagattgatgggcagcatcagcaagtggccaacaccgccgtaccagatggcttcaatgctgattacctcaggatctactatgaaagctgcgatcttgaagcaaaatatttttctagaacacactggagcaaaatattttggcatatatatacactgtaatagtggttgtaggtaatctatatgctttctccatggaaaaatgtcgcaacttcttgcaactgcagtccagaataatagttattggtctgtgcagttcaaatggttttaactaaaagatgcttaatttaatatcacagttgatctgccatataatttccacttaaacaattgtgatggccaactgccagtgctaatggttttgtatgtatgctacaattgcaggaaagctcttccctcatgttgatttcttcaagtggctttcatatggaaatggtctgttgttgttggttcaggatctagttgtttactaattgtttcatctatataatacgaatttgtccttttttagacgggaaacatccaggatgtgatcagtcgtatgttggacgtcgagagttctcatttacactagagaatgacatctacgttcgtttccagtcctttgatagcgtggctgaaatggagaactctatcaaggaaaagtgccctttcaagattgatattggacctgtatatagtgtagatcctgcaaagcggcatgcctatgctcaatcaggcaacaacgtctttgtgccagttgagagagaacttattttcgatatagtaagaaacctgcaaaatttctcctgtggattttatttgtatttttcatcaagcatctgttccaagctgtgaggcatttcaacatcacaggatatatcagattacgatgatgttcgctattgctgctctggagctgatgtctgcatggagtgctggcctttaatgaccattgctatcaaaatcttggatgcttcacttagaggcatgttgttttgcaatgcaattaattaaacacacatgcaaacactcgcttttatttcagtttaattgacttgaattgcagatctttagtcaactattttcttggttagtttgacttgtaacaattgaaagtatgtgtttacagatgattttggtttcaatcacatattgtgggtatatagtggtcgtcgtggtgtccattgctgggtttgtgatagtagagcaagaaagtatgcatgatgtttttccctttttcatttctccatttagtttggtgatcctaaaatgctctggtactttcctgttaggctcaacaacgaacaaagggctgcaattgctgattattttcgcgtctacaagggtggtgaaaatacgatgaagaaagtttcattgactggagctgttctccatcctttccttgcacggtcatacactgatgttctgaaaggcttctttgaagataagctactacttagccaacaactatttgcatctgaggagagatatcagaaaatacttgatcttatccctgatgaaaatgttgctagtgagctccatgataagtggcaaggaaacagacgatcttctatttcaaaggaagatgtaaatgctaccaggtgggagcaactaaagtcaaccttgcagtcaggaaaacacaaggggcttcgaagatgtatagaagagattgtcttctcatacacatatcctagacttgatatggaggtttctaagcacatgaatcatttgctgaaagcacccttttgcatacacccgaagacaggttagacccaagtatatttcctattttttcatctaatgaatgaagatacttgtttgcactagaaactgtttttgttggctgtccgtgtgtatacacttcgtgtatccgttggaaatctctaatgcaaatgttccttgagtgacacatttttcacatttatatgcattcatttcatgcttacacttatacgtaaaatatgttctgcctaatgagttctaagttctaacaattgttttgaaatctttccctaggccgtgtttgtgttccaatcgatccaaataactgtgatgattttgatcctacgacagttccaactctgtcacagcttttgggtgagctcaatgcagctggtcttcgtactgattctgaaaacgattgggaaagaacatctcttgaaaaatctatcaggtttttcagggcatcgtttctgcaaccattgctgaaagcctgcaaggaggaattagaaagctcatacaatgccaagctccagcagtccaagaataccttgacttggtaaaattcactcaacttccagctgatcttaccaacctagtgccccatgaaaagcttcttctccatgagacgaaccactgaacccggcattggctgtgttaactggttaaccacaacgctctatgaatgaggagcaaaatactctccgatgctgctgtcatgttagctttgctccaaggaagttgcaattgtagaatatccagtgaccgtcttagaggcagcttggtgctggcttgaaccttttgatctttcatgttgctgacttgatgttattaggataaattcctttaattgttgtgaaatgaattttataggattcctataagtcgctgaaaagaatgattgttaaatgcttcataccaagctagtagccgctataagatctagactagaattagtaaaattaaccatcaagattgcttagagcaatgctcggtttgtggttgatgactgttgagaatttctgtaagatgctgtaaaaataaaagtttcatcgtagtttattttacatatagaatttaatatgcc

SEQ ID NO: 23893 - DNA, 1359 bp, Oryza sativa
  ref <308>: DATABASE ACCESSION NUMBER: AK073974
  ref <309>: DATABASE ENTRY DATE: 2001-12-06
gaccatacaccagcagcgccctgcagctgcaagcctgcaactagtcgctggccggccggccggccatgtactactgcctcgccgcgccgccggccgctgcggcaccggcagcgccagcggcgaggcgcgcgtcctctttcctcttcgtggtgtcggtccctcctccgactttatgggggagggtgacgggaggcgccgtgtccgcccagcggctggtgcggcggcggtgctcctccgccggcgagcccagggcggccggcgacggtggcctatccagtttttgcataattgaaggcccagagactatacaagactttgttcaaatgcaatcacaagagattcaagacaacatcaggagccgccgtaacaaaattttccttttgatggaagaggttagacgattgcgggtgcagcagcgaatcagaacttctgaaagcagaggtgcaagcagtgaagaaagtgaaatgcctgaaatccagtctagtattccctttttgcctaatacgtcaccgaagacaatgaaacaactctatttgacatcattctcattcataactgggataatcttttttggaggcttgatagccccagtacttgagctgaaattagggctaggtggtacatcttatgaagattttataaggaccatgcacttgcctcttcaattaagtcaggtagatcccattgtggcatccttttcaggtggtgcagttggtgtaatctcggcattaatgttggttgaaattagaaacgtcaggcagcaagagaagaaaaggtgtacatattgccatgggactggatacttgccatgcgctcgctgttctgcaagtggaatgctattgaacagcaagagtttttcactttcatgtgacaacggccataatatgtggtctacaaccgaaaggtgccccaattgttcaggagctggaaaggtgatgtgcccaacttgcttgtgcacaggaacggcaatggcaagcgagcatgacccacggatagaccccttcgattagtgatgagcaattggaatctggaagtgtgtattctagctgtactgttggctgccccccctttttgtttgtgttgctgtgataggcctgaatacctgaagaatgaagttcagatcacacaacgaaagccaaaagctgtaaccgtacgatgaatgaactctgtgactagtatagaactctcgtctgtggaactttttccgaattatttttgtaaagatttaaggaattacttatcgcacgtcgaacacaacgcgacggtttggccgagtggtctaaggcgccagatttaggctctggtccgaatgggcgtgggttcaaatcccacagctgtcaattctatttttaatttcct

SEQ ID NO: 23894 - DNA, 1377 bp, Oryza sativa
  ref <308>: DATABASE ACCESSION NUMBER: AK073975
  ref <309>: DATABASE ENTRY DATE: 2001-12-06
gacgcgcccctcctcttgcgttctcgcctcggtctccaactctgcaaccaccgccgtctcttctccagatctccaccgcgccatggacgccgcacccaccgcgccgccggcggcgtcggccgacgacgagatcgtgtacgagtcgatgccctgcatccgcatctacaagaaccgcgtggagcgctacttcggctccgagttcgtcgccgcgtccaccgacgccgccaccggcgtcgcctcccacgaccgcgtcatctcctccaacgtctccgcgcgcctctacctcccccgcctcgacgactccgctgccgccaaggccaagctccccgtgctcgtctactaccacggcggcgggttctgcctcggctcggccttcaaccccacgttccacgcctacttcaacaccttcgccgcgctcgccaacgccctcgtcgtctccgtcgagtaccgcctcgcgccggagcaccccgtcccggcggcctacgcggactcgtgggaggcgctcgcgtgggtcgccggacacgccgcgggggatggcgacgaggcgtggctcgtcgaccacgccgacttctcccgcctctacctcggcggcgagagcgccggctccaacatcgcgcaccacatagcgatgcgggtggccgaggaggggctcccccacggcgccaagatccggggcctcgtcatgatccacccctacttcctcggcactaacagggtggcctccgacgacctggaccccgccgtgcgcgagagcctcgggagcctgtggcgcgtcatgtgcccggccaccacgggcgaggacgacccgctcatcaacccgctcgtggacggcgcgccggcgctcgacgcgctggcgtgcgaccgcgtgctcgtgtgcatcggcgagggcgacgtgctccgcgaccgcggccgcgcctactacgaccggctcacgtcgagcgggtggcgcggcgaggcggagatatggcaggcgccggagaaggggcacacgttccacctcctcgagccgcactgcgacgcggccatcgcgcaggacaaggtcatcagtggcttcctcaaccgttgactcgccgtcgccggcgatgacaccgtcgtcgtcggaatcggagattaccaagattagcatcggttcatacccagaataactgcagctacgtcgccgacggatgccgctgccgcgccatacttactactccactactacattttacattttggattcaggattgtgttgcatcttttgcaattgggtgtatggatggaaggaaatcgccattgatttaggtgagggtattgtagtatcaggaagttgggggagataaatgataatactacagtcatagacttcatacagatgaaattattctgctttgtttg

SEQ ID NO: 23895 - DNA, 1853 bp, Oryza sativa
  ref <308>: DATABASE ACCESSION NUMBER: AK073976
  ref <309>: DATABASE ENTRY DATE: 2001-12-06
gactcttccccttgcttcgcttcgctcatcagcttgaccgcctcacctcaccaccccaagctagacgacctcgtcttcctcctccacctcctcgcgacctcgcattgttagatcagcctcgattcatctccaatctttcggcgccgctcccggagagagggacagcggcgcaggcggtgagcacgaggaggagcagagctaatcaaaagccctctcgccgctcgagctctcgtgcaccgtgccgccgccgccgacgccgacgctgacgccgacggcttaattcagtcttgtcggctacatctcttggcgtgctgaaattggtgggagcacgagagcggcgccaatggggacgaggccgtgcgccggcgtggcgtcggcggtggcggcggcggtggccgttctgctgctcgccgtgtcttgcttcgccgcggcggcgacgacgacgcagaagcatggcaggatgtcagggaagggcggcgacgtgctggaggacgacccgacggggaagctgaaggtgttcgtgtacgagatgccacgcaagtacaacctgaacctgctggccaaggacagccggtgcctgcagcacatgttcgcggcggagatcttcatgcaccagttcctcctctccagccccgtgcgcaccctcgacccggaggaggccgactggttctacacacccgcctacaccacctgcgacctcaccccgcagggcttcccgctccccttccgcgccccgcgcatcatgcgcagcgccgtccgctacgtcgccgccacgtggccctactggaaccgcaccgacggcgccgaccacttcttcctcgcgccgcacgacttcggcgcctgcttccactaccaggaggagcgcgccatcgagcgcggcatcctcccggtgctccggcgcgccacgctggtgcagacgttcggccagcgccaccacccctgcctccagccggggtcgatcaccgtgccgccgtacgccgatccccgcaagatggaggcgcaccgcatcagccccgcgacgccgcgctcgatcttcgtgtattttcgggggcttttctacgacatggggaatgatcccgagggcgggtactacgcccgcggcgcgagggcgtcggtgtgggagaacttcaaggacaacccgctgttcgacatctcgacggagcacccggcgacgtactacgaggacatgcagcgggccatcttctgcctgtgcccgctggggtgggcgccgtggagcccccggctggtggaggcggtggtgttcgggtgcatcccggtgatcatcgccgacgacatcgtgctccccttcgcggacgccatcccgtggggggagatcagcgtgttcgtggcggaggaggacgtgccgaggctggacaccatcctggcgtccgtcccgctcgacgaggtcatccggaagcagcggctgctggcgtccccggcgatgaagcaggccgtgctgttccaccagccggcgaggcccggcgacgcgttccaccagatactcaacgggctcgcgcgcaagctgccgcaccccaagggcgtcttcctcgagcccggcgagaagggcatcgactgggaccagggcctcgagaacgacctcaagccatggtagccgccatggatgatgagctatatacacacagattatagagacgagacatggattggatcgcgagagatgtacattgattggttcgtttcttctgattaagccgctgttaatttcttcttctttctttcttttttctagttttttttccttgttgttttttctttcaaggaggcgatccgtgttcatgtattgtgcaattgtgcgtgcttaattaatcgttgcaatgtgcacgatttcttct

SEQ ID NO: 23896 - DNA, 848 bp, Oryza sativa
  ref <308>: DATABASE ACCESSION NUMBER: AK073977
  ref <309>: DATABASE ENTRY DATE: 2001-12-06
ggaccccgattcacaaagccaagcccgacacaaacaccaagccaccgccgcctccgcctccgccgccgagagagagagaggaccagccagcgattcgccgccgtcatctccagcttctgcgggagcaacaccgccagcgcgctctcccctccccgccacgcctcgcccattgggattcgccgccctcaccgcgagctcccacgtcgaggtcacacctagggttccatcgccgccgccgctgccgccagcgaaggaagaggaggatacagcgagatggctgctaggcttctcgcgaatctcctcgtcatcggcggcaccgtgctgggcagggccgcggtccaggcgtatcgccaagccatcgtcaatgcaaacaaaactggagctgcccaggaagctataaatggtattcgaagggccagcaaggccatgactgagcaagaagcccggcaaatactaggtatcagcgaaaagtcgacttgggaagagatcgtccagaaatacgatactatgtttgagaggaatgctaagaatgggagcttctatctccagtcgaaagttcatcgggctaaagaatgtctagaagctgtatatcaaaagcccgacgtgcctagctgaggtcgagtagcttgcatttgaagcgtttgagatctatctaattgatcaacctgccagtgtggctgaagatcgcgattattgttaattggttgtaacgggatgtcacttaacttggcaataagtactgttcgacaaaaaaaagaacacaagttccaccgatttccatccgctgtaccttttgtggttctcttaggttggaatatataatggatgaatcatgactgcgtttcatg

SEQ ID NO: 23897 - DNA, 1345 bp, Oryza sativa
  ref <308>: DATABASE ACCESSION NUMBER: AK073978
  ref <309>: DATABASE ENTRY DATE: 2001-12-06
ggtctcctctccctccgtgttgctcccttcttcttcttcttcttcttcttccccctctcatgttctcatcgtcggccatggagagaaggagaagaagcccgtgcgccgccgtcgtgatggcggcggtggcaatgctcgccgtaatgccggcgttccccggcgtggcggcggacttgtcggcggggtactacagctcgtcgtgccccaagctggagtccatcgtgcggtatgaggtgtcgaggaagatcaacgagacggtcgtcaccatcccggccgtcctcaggctcttcttccacgactgcctcgtcacggggtgtgacgcttcggccttgatttcgtccccaaatgacgacgccgagaaggacgcgccggacaacatgtccctcgccggcgacggcttcgacaccgtgaaccgtgtcaagaccgccgtcgagaaggcctgccccggcgtggtctcctgcgccgacatcctcgccctcgctgccagagacgtcgtctccctcgcgtccgggccatggtggtccgtggagctcggccggctggacggcctcgtgtccaaggcgagcgacgtcgacggcaagctgcccgggccggacatgcgcgtgacgaagctcgccgccgtgttcgacaagcacgggctgtcgatgcgcgacatggtggcgctctccggcgcgcacaccgtcggcttcgcgcactgcacccgcttcaccggccggctgtacaactacagcgccggcgagcagacggacccgtccatgaacaaggactacgcggcgcagctgatggaggcgtgcccgcgcgacgtcggcaagaccatcgccgtcaacatggaccccgtcagccccatcgtcttcgacaacgtctactactccaacctcgtcaatggcctcggcctcttcacctccgaccaggtgctctacaccgacggcgcgtcgcggcgcaccgtcgaggagttcgccgtcaaccagaccgccttcttcgatgccttcgtgagctccatggtcaggctggggaggctaggggtcaaggccggcaaggatggagaggtcaggagagactgcactgcattcaaccactagatggaaagcagcggcagattgtaattcagaaatgtgttgctctgatgagtttgatacatataatgagcttgattcttttgcatacagttttccaaaagtttgagtgtgttttcttacttctttttttctttctatgtgcttatttttttcgatgaatttttgtacagactgaagagtgtaatacgtacaatggatacattgaggattctctattgaaatgattaacaagatggatagggctaataaaaaggaaattagtttgactt

SEQ ID NO: 23898 - DNA, 679 bp, Oryza sativa
  ref <308>: DATABASE ACCESSION NUMBER: AK073979
  ref <309>: DATABASE ENTRY DATE: 2001-12-06
ggtcccccggcaaaatcccccgtgctagggtttccgcaaccgcctccgctgctacccacccaacctgcattgcgacagcgacgcggcgcggccatggcgacggcggcgaagggcggagagaagccggcgctgaggaagccggtgttcgtcaaggtggaccagctcaagccgggcacctgcggccacaccctcaccgtcaaggtcgtcagcgctaaccccgttcctgcccgtggccgtgccggagggggcggcccggccgtcggatctcgccccgcgcgcatcgccgagtgcctcgtcggcgacgagaccggggtcatcgtcttcaccgcccgcaacgagcaagtggacatgctgatgccaggaaatacagcaatcttgcggaatgcgagaatcgatatgttcaagggctcaatgaggcttgctgtcgacaagtggggacgtgtggaggttacagagcctgccagtttcgccgtgaaagaagacaataacctatcgcttgttgagtatgaattggttaacgtgccagagtgattgttccatcaaagtttctactgctagcataaaaagggaatgccaaacttgtagtgatttttgtttaaaagatcgtaggaggggctatggcgttttgttaagagttctcaatcagtgaaattcatataaaatccttgtgtgtgcaccc

SEQ ID NO: 23899 - DNA, 2597 bp, Oryza sativa
  ref <308>: DATABASE ACCESSION NUMBER: AK073980
  ref <309>: DATABASE ENTRY DATE: 2001-12-06
ggtcttcccccctttccccgccgcccgcgcacccacgcgtctctctccctctctctccgccgccgccgccgccgcagccagccagccatccagccatgtcgggttgggacgagggcgccgtcttctacagcgaccaggcgcagttcccgcgcggcggccccggcggcgacccctccgccgacctcacccgccactccgccctccgcaagttcaaggagttcctccgcggcttcaccggcccaaccggcgacttcccctaccgcgagagcctggtgcacaaccgcgaccatgtcaccgtcgccatcgaggacctcgacgccttcgacgccgagctgtccgacaagatccggaagtctcccgctgattacctaccgctgtttgagacggctgcgtccgaggtcctcgcgagccttcggtccaaggtcgctggagagaccggcgagatggaggagcccgccaccggcgacgtgcagatcttcttgtcctcaaaggagaactgcctgtccatgaggtctattggggcggattacatgtccaagctggtgaagattgccgggatcacaatcgccgcgtcgagggtgaaagctaaggccactcatgtcacgctgctctgcaagaactgcagaagtgtgaaaacggtgccgtgtaggcctggccttggtggggctattgtcccacgatcgtgcgaccatgttcctcagcctggagaagagccttgccccttggacccctggattgcagttccagataagagcaagtatgtggatctccagaccctcaaattgcaggaaaatcctgaggatgttccaactggtgagctcccgaggaatatgctgctgtccgtagacaggcatcttgttcagaccattgttcctggaactagattaactgtaattggtatctacagtgtctaccaagcatctgcaaaccaaaagggtgctgttggagtcaaacagccttacattagagttgtggggttggagcagtcccgagatgccaactcgaatggtccctcaaattttacacttgatgaggaaatggaattcaaagaatttgcacagaggccagatgcatatgtcaagatttgctcaatgattggcccttcaatttatggccattctgatgtcaagaaagctattgcatgcttgctgtttggtggctcaaagaagaggctaccggatggtgtccgtttgagaggggacattcatgtcttgctgctgggtgatccatcaacagcaaaatcacagttcctcaagtttgtggagaagacagcgccgattgctgtctatacatctgggaaaggttcatcagcagctggtctcacagcgtcagtaattcgggacggtagctctcgagagttttatttggaaggaggggccatggttttggctgatggtggagttgtttgtattgatgagtttgacaaaatgaggcctgaggaccgagttgcaattcacgaagcaatggaacagcagaccatctcgattgccaaagctggcattacaacagtactcaattcaaggacctcggtactagcagctgccaatccaattgcagggcgctacgatgatcttaagactgcacaagataacattgatctgcagacaaccatcctttctagatttgatctaatctttattgttaaagatgtcagaatgtatgatcaagacaagcgaattgcaagccacatcattaaggtgcatgccagtggtgctgctgcttcatccaagaatacagatgctagtgaaggagagaattggctaaaaaggtacattgagtattgccgtgttacttgtaaaccacgactctcagaaaaggcagcagagatgcttcagaacaaatatgtggagattagacagaaaatgagacaacaagctcatgaaacagggagggctgcagctatacccatcactgtgcggcagcttgaagccattatacgtttgagtgaatctcttgcaaagatgagattgacaagtgtggctacaccagagcatgttgaagaggcatttaggctgttcaatgtctccactgttgatgccgcaagatctggaatcaatgagcatttgaacctatcaccagatattgcaaatgagatcaagcaagctgaggcacaaataaagagaaggatgggaattggaagccacatatccgagcgacgcctgatcgatgaactaaataggatggggatgaatgaatccattgtgcgaagagcccttctgatcatgcaccaaagggatgaagtggagtacaagagagagcgccatgtcattgtccggaaggcttgaggtgaactgtggagtatttataaatcgaggacaacttctattcagactgtataaggctatgagttcactgaaactgtaatctctgggagaagacaaggacatgtttgagtttcggttgatcactgacatgaccattgtaatctgcaagagtagaagaaatgcactccgtccttgatgaaactgtagttaaactacagtattaaagatgtaactgtagtgaaaccatgtaaccagggttctgaaatggctaatgtattaaactacagtattaattcatggatataaatggctaatattctgcagtgcccagac

SEQ ID NO: 23900 - DNA, 4184 bp, Oryza sativa
  ref <308>: DATABASE ACCESSION NUMBER: AK073981
  ref <309>: DATABASE ENTRY DATE: 2001-12-06
ggagcgccgacgccgagacgccgagagcccaaggccggctagtcggagagtgcggccgcgtgcgggtggctgctgcgctgcgcgaactcccccgccgccaaagatgttctccccggcgatcaagaagccccacctgctccaccgcagggacaaggaggaggcgtccccctcaccccctcccgctcccgcgcacacgcccgcgcctcgtggatttgccgtccacgaccgccccgccaccggcaccccggcgccgtggacctcctcctccctgctcgccaggatttcaacatcaacacgaacagacaggacaggggattctggccagatccaaccggtgcatgtatccgaatttccccaaatagttcgaaatgctcaagccaaccttctgcaaaagagtttttccggcaaaaacatgcttgctggtggcattgataaagaaacatcccttgcatggatgttatgtggaaatgagctttttatctggagttacctggcttctgttgcaaaagactgtcttgtacttgaggtcccttcttctcttatggggaacaaagaagaaaaatctctatgtggtaatcagtgggcagtttgcatagtgagatggggtagtagtggtgcatcaacacggagcagtggagatatattgcatcgaagaagttcgactggttttatcctgtgcaacaaaagaacacaagctatagcttattggtctgatatctatgctgaaagcagtaagagttcagttcttgatttaattggatatggtgatacatcttcaggtgatggcacatctggaaactgcaggattaattctcttattgcagtggcagttccaggaggtattaatgaatgcattgtgattgcttctcagccaacaggcacattatggatgttctggtgttcaccagctgcagttcgtcgaagagaaattcataagggtacattaggagtttataatgctgatcattctcagaaaaatagtggtggaaggtccttggcttggctaccaagtaaagcatcatctaaggctgctgaacggacgttctttttattgactagtcatgagctgcaatgctggagcatctcattcgggcatgatatcaactgcaaaaaaatagggtctcaggaaattgttggtagtgatggtgatatgggaataaagaaagacatagctggacagaaaaacatatggcttttggacatgcagatagatgatcatgggaaagaaattatcattcttgttgctaccttctgcaaagatcgggtgagtgggtcgaactacactcagtattctcttctgacgatgctgtacagacctaaccaaaagttttcatctgaagataatgtgattaaaactgaaaggtttttggagaaaaaagctccttctcaggtgataatccctaaggctagagtagaggatgaagagttcttgttttctatgaggctaaaaactggtggtaagccttctggttctgtaatcatactgtcaggtgatggaacagcaacaatagccatatactggagaggttcaacccgtctctatcaatttgatctgccttgggatgctggaaaggttctcgatgcttcagttatcccatcttccgaggacagagatgaaggagcttgggttgttcttacagaaaaggcaggagtgtgggcaattcctgagaaagctgtgttagttggtggggttgagccaccagagcggagcttgtcaagaaaaggaagttgcaatgaagcagttgctgaagagaaaagaagaaatcaggcattcaatgctagtgttgtacccagaagagctagttctgaggcttggagtgctggagagaggcaaagaccagcattaactggtatagctcagcaggctgtggttgatgaggagtctgaaatgttattaaaccggttatttcatgattttgttttgtccggtacagttcatgaagcacttcaaaagcttagagcagcaggcgcatttgacaaagagggtgagatgaacatatttgttcgaataagcaaatccatcgtaaacactctatctaagcattggacaacaactagagaagctgaatttcttgcttcaacaattgtttcatccctaactgagaagcagcaaaaacacaagaaattccttcagtttcttgtcttgtctaagtgccatgaggaactctcttcaaagcaaagaactgcgatgctaactgtcatggagcatggagaaaagctctctggaatgatccagctcagagaattacaaaatgctcttagccatcaacgctcaagcatacatttatcacctcagtcaaaaaaccaaacaactggtgcattgtggaaccttattcaattggttggtgagcaatctcgaagaaacactgttctcttaatggaccgtgataatgctgaagtgttctacagcagagtttcagatatagaagatctatttaattgcatatctcatcagcttcaatacattataaccggaggagaaaacccttctgttcagatgcaacgtgcacttgagttatcaaatgcttgcatgaccctagttcaggcagcattgcgctacagagaggagcacaaggactggtatccttctcctgaaggactgataacatggaacagccagcctgttgtacgatctggaatctggcgagtagcatcctttgccatggagcttttgagagaaccaggggctgcggacatgtcaatgaagtcaaacctatggtctcagttggaacgactcacagatatcctactggatgcatatattgggttgttaactgctaaattcgagcgtggggatgagcatggtgtgctaatccaagaatactgtgacagaagagatgaacttcttgggtccctctatgacctcgcaaaacaaattgtagatgcaaaatatcaggagacgacagaagtcactgacaatctggaactgaaagaatctatattcagagaagtcacttctccaattttggcaacagctaaacggcatgaagggtaccaaacattgtggcagacttgctatgatctcagtgatacaggccttcttcgcagtcttatgcatgatagtgtaggacctcacgggggattcagtttctttgttttcaaacaactagtcaacaggcgtcaacatgctaagctattaagattaggtgaagaattcccggaagagctagccaattttctgaaagagcgggatgatcttctgtggcttcatgagatatgcttaaatcggttctcttctgcttcgaagactcttcatactctcgtgagtcctgaggaagatgctaaccttacaagcaacaggaaatcactgtcctttgttgaaagaagacgctttctctatctctccaaaattgcagcagcagcaggtaaggatgttgattatgaagtgaaggttgcccatatagatgcagatatccgaattctaaatctgcaggaagagattgttcagcatgacccagagtatgcaccagataaatatactaccaagccatttcgtccattggaactgatcgagatgtgcctgaagggagatcgagagctctctcttaaagcttttgaagtatttgcttggacgagggcctcgttccggagctccaacaaaggccttctagaggcttgctggatgaatgcagccgaccaggacgactgggttagccttcaagaggaatcttcaggaggttggagcgatgaagtcatccaagaatctcttcagggcactgtcctgttcaatgcctccaggctgtgttatagcccagacgccgtggtgtatgacggttcgtttgaggacgtgctgcctgtgaagaaagaagacgtgcatctgagaggcttggagggcagatgtctctcagtggaggaagtgctgatgcagcacaaggatttccctgatgcgggtaaattgatgatgaccgcggtgataatgggcaaggagctaccttatactgtttccacagctgaacctgttgacatggactcttgatactgtcacattctgtcagggagaaagacctgcaggttgggacctccaaatctgaaatcagagtcaattttctcttctttgcagcacggaatgtgtgcagttccagatgtattcatattgcgggcgaaactatttgtagagactgcaagattttgtcagttcgtgcccttttttagcatgagctgtggcttgaaacgagtttttctcc

SEQ ID NO: 23901 - DNA, 1186 bp, Oryza sativa
  ref <308>: DATABASE ACCESSION NUMBER: AK073982
  ref <309>: DATABASE ENTRY DATE: 2001-12-06
ggcatgaatggaagaaaggaattattggaagagagggttaggatcgagcggaggctgtgcttacgtaaacgaagctagctgtacgtggttcttctgtgatgatctgattaagcatcgagatcagctcagctgcagtgtagcacaacgtacatactcatctaagtgcagtattaggctattattagctatacctagcctgggcgcgcgtgttcgatccgattccgatcgatccgaagcgagcgatggccctcaactatgtgggcttggcggccatcaacctggtggctgcgctgctctccatccctgtcatcgccgccggtatctggctctccgcacaggtggacagcgcctgcgtccaactgctccagtggccgctgatcggcctcggcgtcgccgtcctcgccgtcggtctcgccggcttcgtcgccgccttctggcgcctgccctggcttctcctcgcctacttggtcggcatgctcctcctcgtggtggcgctcgcctgcctcgctgtcttcgtcttcgtcgtcaccggcggcgcgtcgtcgggtggtcacaccgtgcccagccgggccttcctcgagtacgagctcgacgatttctcgggcagctggctacgcggccgcgtggacgatcctgcaggcagatgggagcagatcaagacgtgcctggccgccacgcccatctgctccgacgtcaaccagacatacgccacggcgcaggatttcttctccgcctcctggctcaccccgctgcagtccgggtgctgcaagcctcccaccaggtgtggctacaccttcgtcaccccgatctcgtggattagccccatcagcgccgccgccgacccggattgcggcgcctggagcaacgacccttctcagctctgctactcctgctcctcctgcaaggctggccttctccacaacctcagcagggagtggcgccgagctgatctcatcctcctcgtcgccaccgtcgcgctcctcgccgtctacgcattcgcctgctacgccttccgtaccgccaagaccgacgacctcttccgccgctacaggcagggctacacgtaacgtagctcgatcgtgcatatatatactggagtactagtgctttaagtaatttccaactctcatcctttttactttgattttacatgcgttttcgtttggaaatctttttttgttctgtc

SEQ ID NO: 23902 - DNA, 2811 bp, Oryza sativa
  ref <308>: DATABASE ACCESSION NUMBER: AK073983
  ref <309>: DATABASE ENTRY DATE: 2001-12-06
ggcagtcacgcgcactctcactcacacggagagagagagagagagagactagactagtagtaccaattaatggcggcgctctcctcctgcttactcgccgccgtccgacctcatcctccacctccacctcgaccgctctccccttccttcatcccctctgccctccgccaccgccaccgcctcagccaagcgccgcccctcgccacctctctcccacgaccacgaccaccatggtgccgcttctccgcctcctcgccgccaccgccacccgacgaccctgacgactacgagctgttggacacgacaggaaattgtgatcctttatgctccgttgatgaagttagctcacagtattttgaagctaactacaagccaaaaaatgatcttcttaaagctttaactataatagcaacagctttggctggggcagctgcaataaaccattcctgggttgctgaacatcaggacattgcaatggtgctagtgtttgctctcggttatgcaggtatcatatttgaggaatcactagcgtttaacaaaagtggagttggattgctcatggccgtttgcctatgggttatcagaagtatcggggctccatctactgatgtagcagttcaagagttgagtcatacaaccgccgaagttagtgaaatagtctttttcttgctcggtgcaatgaccattgttgagattgttgatgcacatcaaggatttaagctagtgactgacaatatatctactcgaaatccaagaactcttctctgggtgatagggtttgtaactttcttcttgagttctatccttgacaatttgacttccactattgtgatggtttcattgcttcggaaactagtacctccatcagagtacagaaaattgttaggcgctgttgttgtgatatctgcaaatgctgggggtgcatggacaccaattggtgatgtgacgaccactatgttgtggattcatggtcagattacaacgttgaacacaatgcagggcttgtttcttccctcagttgtttcattggcagttccactggctctgatgtccctcacgagtgaagcaaatggatcttctcagaaatcttccagcttgctgtcatcagagcagatggctcctcgaggacaacttgtatttgctgttggccttggagccttagtgtttgttccagtgtttaaagctctcactgggctgccacctttcatgggcatgatgcttggtcttgcaattctttggatcctgacagatgcgatacattatggggactctggaaggcagagattgaaagttccacaagcgctgtcacggattgatacacaaggagttctatttttcttaggaattcttatgtcagttggcagcttggaatctgctggcattttgaggcagttggcgaactatctcgatgccaatattccgaatgccgaccttattgcaagcgctatcggtgtagcatcagcaattatagacaatgttccacttgttgctgcaacaatggggatgtatgacctgacttcatttcctcaagatgcggacttttggcagcttattgcgttctgtgctggtacgggtggttctatgcttatcattggctctgcagcaggtgtggctttcatgggaatggaaaaggtggatttcttttggtatttccgcaaggtaaattgaacttttactctaataataagtggagctgtggaacaacttacacaatacagaatcgtatgttacagaacaagaaacttattcggtgtggttgatatttccctgtcgaactgttaaatccaatccatatatgctcatcatatctttcagtaattctgataagggctgggaacagggaaaaaaattgattttggactgcagcttggtttagcttctctataggaaaacaattgtgatatcatgcattgatggtacgtacgtaagggcaagattgtgcttttctgtaagggatgaaataccatgctttcattaattagttatagttttatgttttaaaccaagctcgcttatttgtttacggcataactttgtttatagatttgcacaagtgtcttctcaatgatttggatgtaaagtagattgcccacctttcttcaactatttgtgcttttcggagaattgcaacactaatttataagtccatcgtgctgttagtgtcatctcagaacctcaaatccttaacgattggtagtaagttgtgtgtacttgtacggaattagcaactacaagtgactaggcccgtagaatatatgtaaacattgaaatgatctatgtcttttgagtccacattgtatttataccgcttggttttgcaggtgagtggttttgcccttgcaggttatgcagctggtatcatcacttatctagctgcacaaaatctccctctatcccttcccacttcactagccgagatcccatttatctcggggtcatgaaagggtgaccagattcaggtatggaaatggacatattttattgtctggccagcttatgtaagcataatcaggatgtgttggcaaagaaaagatgtcccatgattacatgggatggaataaacgaaaaataaatatatgccctgatctccaacctccaagtttcccaacattgaccggaaggctttggggtgctggtgaactatggtatgctaagagaggagcgattttgataacacaagcttagaggctagagctgcacgcttgtaattcacgaattctattctatcttgttgagaagaaaagaggagctgcaccttgtgtaaaatttgaagatcctgaaatcatatcatcactgggtttatttttgccc

SEQ ID NO: 23903 - DNA, 3048 bp, Oryza sativa
  ref <308>: DATABASE ACCESSION NUMBER: AK073984
  ref <309>: DATABASE ENTRY DATE: 2001-12-06
ttgtgtgtgcgcgaagcagccgccgccgcgcggatgttgtgtgctgttcgcgtactctcccatccgtggccgtaatggctcgatgtggtttggaattcgaggagttggttcttgccaacaagatcaaagtcggatttcgagttgtcgatggggatggggatttagagtaagatttgaattcaatgatgcggtgggcgtgttcctgctgctgctgcatgcttgaatgtttggaatatttccaggggcacctgaccgcgctcttggtaatttctagaagaaggtgcccttttaggtagacaggttttgcggtgtgtcagggtaacgaactaaagatgggcatgttgcgatgggcattgacgctaatggtgatgtatgctgcgcgcgatttttcttttctttttctttttccttttcgggtgtgagattcctgaaaagttcaggaatgcttttggctgagttcctgcgtctctgaggaagataaattagtttatttttttctgctattacttggatttatgtgctgctatcactgttggttcgtgaagggtaagtttttgtgttgttggctctgcatgttggatcatgcgtgcaaaattaggtcgtcacaaggattatgccgttttcaagttaccttttgagtaaagtctgttgttgcaaaggttctgttttatttggccagcatggccttacattactttggagtttggagaacaagaggttacaagttgtcgaatttttatgctctttttgtttggtgcaatttgttagtgtttatttttttaaaaaaattctggtagtgagaaggttctttcataaaatgtttttgcagggtcatatttttattcagcaacagagactaagctagtggttgacacatcaagaggggaaaggctacgagttaattttgacgtaacttttccgagtgttccctgcacccttctcagtgttgataccatggatattagtggagagcagcatcatgacattaggcatgatatagaaaagaggcgattagacgcacatggtaatgtcattgaggctagaaaagaaggcattggtggagcaaagatagagagtccattgcaaaaacatggaggaagactcagcaaaggtgaagaatactgtggcacgtgttatggtgctgaggagtcggatgaacaatgctgtaattcttgtgaagaagttagggaagcatataagaagaaaggatgggcccttacaaatcctgatctgattgaccagtgcaccagagaagattttgtggaaagagttaaaactcaacaaggtgaaggttgtaatgtacatggctttttagatgtcagcaaagttgcagggaacttacactttgctccaggcaaaggattttatgagtcaaatataaatgtgcctgagctgtcggcacttgagcatggtttcaacatcacacacaaaataaataaactgtcttttgggacagaattccctggtgttgttaatccacttgatggtgctcagtggacacaaccagcatcagatgggacataccaatacttcataaaagttgttcctacaatttacactgatctaagagggcgcaagattcattccaaccaattctcagtaacagagcattttagagatgggaatattcgccccaaaccccagcctggagtatttttcttctatgatttctcacccataaaggtagtaacaatggagagaaattcgtatgtagtcatgttcatttttctctttttatgattctatcttagcttgctctactcatcttctcaacctgtggatatgtgttgccaagctcatctgttgaatggctggctgtgttggtgtgaccattcttgctgcacatgcagaatgctccaaattcaccatctgttattattcagtactatttaattactttggacacaagagaagtctacaatacctttgtttcacctttatctattctgacactgcaggaccaaactggaatttgtaggctttaggtcatggagagtttctaaagttagttattatactagtcagtagctaaaagaatcagttcattgatgagatatatctgttaggagtatcctagcataaaatttggtattatccttttattatttttattatttgctgaatggctccaaaaatgtctgcatatgcatcgtaacactttgaatacaaaattgacagtgcatgtctatactcattcaaaagcctctagtggtggtggcagggaatttgccaccccactattgctttttgcagtttttacaaattgtcccctgatatttttctaatattgtggaatagttcaatatttggttcaaacaagtgaatagcagataatgaaataaacaaacaattgatactaagatatttgataaaatatatatttttcttacatattatgatattgtttttcttctgcccatagcaaagcttgggcattttgctagtactcaaaagtcaaaacttatacatgtggataacatacagtttcgtatcaatataacgattaactaattctcatattctcttatcagattgaaaggtactcctttaagttttaactctttagttctgtgacccactaaaatcttagttctccaccttatgtttttgcaggtaatatttacagaagaaaatagttccctgctccactatctgacgaacctatgtgctatagtgggaggggttttcaccgtctccggcatcattgactcgttcatatatcacgggcagaaggcactcaagaaaaaaatggagctaggcaagtacagatgatttacctgaaacatggactggccctcatgttccccaagttcccaagttccgtggcttgtaaaggatccattgcttaagacctgaagacgttgctttgctggaaggttttgctaaggccatcagaattgacgatattgcacattagttgatcaaaaactcgtttacatgtaaaaaaagacaatatcatagcgttgggcctgggggagtgctttgatgtctcagtgagactctttttgagtggccaaaactggcgaaatgagatggatagattaaatc

SEQ ID NO: 23904 - DNA, 1871 bp, Oryza sativa
  ref <308>: DATABASE ACCESSION NUMBER: AK073985
  ref <309>: DATABASE ENTRY DATE: 2001-12-06
gacccgcctccgccgatccccattccaacccgcgactgcgagcgaggcgagtagggcggcttcgtcgttcgtcctgctgcttccgccgcatccatcctgatatgacttgttgagtggaaagaatcaatatagtacaatctattttcttctcaatgtgtagaagaaacagtctgtaaccatacatacttattaatacgactagtgaaatctagacatggacgatgagaatggccttgagcttagcttgggtctctctttgggtgggacatcaggaaagtctaaggctagagatgctcctctagaacctaaagcagagcctcaagtggaagagagcagtagcaaaggtgtttcacaaactcctgaggctccttttgtgcattactatcaaacaaatgcagagaaccaagaacacagtagcaagcagagacacagccctgctgcaccaccgtttgggaacttttggggacagccagggagttcttctgttcctgtggcagatggatccaatgaacagaagccagtctctagtaaacggaaattactttctgaggagataagttttcagaagaaacctaatacagctgctgagcaacctgatgcatttagtaagagctctgacggtggtgtaaaaaacgctcctatttcaattagcacggatgatggttcaacaggtgaaaacgaggatgttgcagaatcagaagcagaaggctcaaactcttggttggttgcacagcgtgaagacagtgctaagggatctgttgtcaatagaggatctgacagaaaacgatccagtgatgatgctgcagttggttttcaaggaaagaggcagccaagtttctcaggaagtgaatccagctctggaaaattgccacaaggaaatcctttgtcattgcaagcatcaaatgttgttgctgtgccatatcaagtcccgtctcaggtttcagctcctcccagtattaccaatgcatcaaatttcactccagtatgtacagtgcagttgaggccacctacaaacaatggactagctgttacaatgggcagtacctctcaggtagcttttggttatccagctgtccagctaccaacacttgaaacaagctcttcatgggcttttggtgctccacctcaggctatgtcctcttttactgcaaaagacaaagttgaacgagcaggaatcagtcaagctgacgatggcaagaaaactcaagaggctggtgcttcctcttctgctcttgtggaggatgacaagaagtctgatagggcattacctctcatgggttctgctataaggccaggcattgcaccaaatgtcaaattcggaggatctggatcgtatcctgaccttccctgggtttctaccactggtactgggccaaatggcagaaccatatcaggtgtaacatataagtttggcagaaacgaggtgaagatagtctgtgcctgccatggcacccacatgacgccggaggaatttatgcggcacgcaagtgcagatgctccgggccaagaaaatagtgcaactttgccggcatttcctgtcgggaaccaagcagcctcagcccaaaactaattcaccgatctgtatgacggtttcaatgagtgctggactaatacctgttgcgccctttgtgtttatatcctccattccttatactattattattatgtattggtgctcatatgatatttatcttgtaagtttagacacgtcatgttttatgcttgatgttgaggataaatttgttgtatgtctttaacttattattatgcatctttttaggaggatcaaacaagtcggagctttaaataacctgaattccgctgtagccatatggaatcatgtggattttttgccaattgatgttgtggtg

SEQ ID NO: 23905 - DNA, 1585 bp, Oryza sativa
  ref <308>: DATABASE ACCESSION NUMBER: AK073986
  ref <309>: DATABASE ENTRY DATE: 2001-12-06
ggcttcttggttcttggcacctctctgtcctttttagatttccttggattccattcaggcctcaccccccccccccccatagatagatacatctcctctctgatagcttcctggttgttttgctcttcttggttttcttgatttcttgggttcttggctactggggctgtctctctatctttcttgatcctggtttgcgccgaaagactgcaattttcttgagttcttgttgctgctggatgccatggatgagaggatcccaccaccggccttcttccagttcttgccatccggtgctcattcttctccccatcatcagagccccttgaggtctcctgcctctgagagggagagatatcttgctgagttacttgctgagaggcagaagttagccccgttcatgcaagttcttccgttttgtaacaggcttttaaaccaagagattttgagggcatcttctttgccacctaacccaaattttgttgaacctgagagagtcaatcatggtagcccattaaggttaactggccaccctatgaatggtcaaccaatggatctggagggatggtcaggaatgcaaacagagatgggggtactccaatcgccctccatgggctggaatgttgctccaggagttgctggaagccctgttgttaagaaagttgtcaggattgatgttcctgtcgacaagtatcccaattacaattttgttggtcgattgttgggaccacgaggaaactccctgaaaagagttgaagctaccacccaatgtagagtctatattcgtggacggggttcagtgaaagattctgttaaggaagacaagcttagggataagcctggctatgagcacttaaatgatccactgcatgtacttgtggaagctgagtttccgtctgatatcgttgatgtgcgactaaaccaagccgtggcaatcctggaggatcttctcaaaccagttgatgaatccatggactactacaagaagcaacagctgcgagaactggcaattttgaatggcactctaagggaggagagcccaagcccccaccttagtcccagtcccagtgtatcccccttcaactcaactgggatgaaacgcgctaagacaggacggtgatcggagatcgcgacatctggaaattcgatgcctgagctgatgatgagctgaacatactgcaaacctgttctactgctggagatgattgctgatgcaaacaaaggaaggaacagcacggctggcattaggccttgccttgattttgtgcgcttgaccgcagatatgttgttggatggaagaaaggaaatctatgtgaaagtgatatgtctgctcgtgggcttgttgcttgctcatattgttgtttattctttgtgtacctggctcctaaatattaacattattttgttttggattagttaatgcagttgatgggtggttcttagatattgggattcaagtggtggacaataatcaggtctggtctgtacaaggagtaggttgtggggtgtcaaaaggttgctgttccagtggacaactgtgattgatacagttctcaataatattatttgcattggttattctttt

SEQ ID NO: 23906 - DNA, 1602 bp, Oryza sativa
  ref <308>: DATABASE ACCESSION NUMBER: AK073987
  ref <309>: DATABASE ENTRY DATE: 2001-12-06
gggaatagcccatctgacatctttgccaaaccctaaccgcctctggctcggcggcggcggcggcggctcgtccccgaagagcagccggagttggagaggatcggtgttcccgctacgcggcggcaaagatcgatggtggacacggatgagcggtggcgcgctgcggtgattggcggtggtggagatgctgctactgcgacggagcctagtctgcccgccgcgataacgcggcgtctgcgggagctcgcatgggaggacaaggacaaggagaaggctcgcacggtcgttgatctagtcgactccgaaacccctatcgaatgcgatcacgaagagggtcatctttgccctagtccctgctccgacattccttctatggttgcagctagcggtggtggtggtggcaatgaagagatgggcaaggtgaattgtaatgagaagcacacatatggtgaggagaaggagaaggagaaggagaaggtggtggagactaagtcggagctgaagcctaaaccgaggaggaagaattgggaggaggaggagctcacatgggaggagaaggtgttgaaggttcttcacatggttcgtatatgggaggtgactgaattcgaccccaagatggagtggtttgagcctacccgcctttgcctcttcaacaccgccttcttcgacctcgacaaagagtctaaggctgggcttgggccaccgattcactcgctcacttcctctgattatcgccatttggagacctccatgaatatcatttcaatcaaggttgtcgaatctgacgtgggttaccctatcagcatcttcggcaccgtgttagcgagagatcagtatgactataggtgtgtgtatttgttcaggcgtagcagggacgatccccagatcatcacctcaccggaggacatgctaactttgacaggcccaaagcgaggtcttggtgcaaaagattatatgtttttcgagttcaatttaaagatgaagggcgatgatggagttgacaaagattttagcaaaggtttgctgccatacaatgtcgtctgtcgaacagggagactcgagactttacatctcaggagctggctaagtgtagtggaatttgcattcgtgactgttcaatatgccgttgaagctacccttgcggtgaaaatgttagggggggcatctgttttcactggtagagtgactgcttggactactggaaatgatgaagatgaaatagttctctatgacagtgaagttgcagacactcggacagagattacagctgatggatctgttcagctaaatcgtggtttagtagttgtcccattggataaggagctggtgctcaatatttgtgtgtttgagggtgaagatgaagctcaaagctttgagttcattctagggcactatgatgaagaatttacctgcaagcaaggctgttatgagtttcaagttaatattatttggacggcagtaaagactcggcgacggcccaatatgtggaagcgcattggttgcattgtactgttactttgaaggctgtaaaaagggtgcacttatcagagtcatatatgatcggtgcactcaaaacatatctatctatccataaaatttccc

SEQ ID NO: 23907 - DNA, 1156 bp, Oryza sativa
  ref <308>: DATABASE ACCESSION NUMBER: AK073988
  ref <309>: DATABASE ENTRY DATE: 2001-12-06
ggcttgaagggaaagtaagaaagaaagaaaagaaaaaaaaaaggaaaatcgtgtctcgtctcgtctcgtcttcgtctcccccgattcccgagcagcttctcgaaaccctcgcggcctcgattccggcgatggcggagcccaacccgcaagtggagagggaggtggaggtggaggaggtgaggaggccgaagctgaggtacttggagttcgtgcaggtggcggcagcgcaggcgacgatctgcctcgcggggctctacgcgcttgccaaggaccacgccggcccgctccgccccggcgtcgacgccgtcgagtccgccgtcaagggcgtcgtcggccccgtctacggccgcttccatggcgtccccctcgacgtcctcgccttcgtcgaccgcaaggtggatgacacggtgcaagagctggaccgacacctcccgccgacgctgaaggccgcctccgccaaggcttgcgcggtggcccgcggcgtgccggacgtggcgagggagctcaccgcggaggtgcagcagtcgggcgtcaccggcgccgcgcgcgtcgcgtacgccaaggtcgagcccgtggccaagggcgtgtacggcaggatccagccggcggccaaggacctctacgtgcgctacgagccggcggcggagcacctcgccgtctccacctggcgctcgctcaacaacctgccgctgttcccgcaggtggcgcagatcgccgtgcccaccgccgcctactgggccgagaagtacaacaaggtgatcgccgccgcggccgacaagggttacaccggagcacagtacctccccgccatccccaccgagcgcatcgccaaggttttcggcgagttatcgccggaggcccagccgtcgaagagcgagtcggcgaagacccagtaggtgaggtcaccgcgcctgaaggtgagaggtagccttcgcctgaagtcctgaactgaataagtaagagtggggcgcttatggcagcagaaaaatggtgttttagatgtatgcatgtgacgacattttcgtggatgatgatgttctacttagctcttttactttgtgttgtggcgtacgtttaatcctcctggttttgtataaaagctgtggttgatgtcgcaatcttttagctaatccagtgcaattaggcttgaacttcc

SEQ ID NO: 23908 - DNA, 1564 bp, Oryza sativa
  ref <308>: DATABASE ACCESSION NUMBER: AK073989
  ref <309>: DATABASE ENTRY DATE: 2001-12-06
ggaatgacaaagcaaggaggtatctgagtagcatgagaaagaaggagccaatcctattttcgcagaagtttcctagtgcagatcctttggcgttggatcttctacaaaaactattagcattcgatccaaaggaccgtccaactgccgaagaggcattggctcatccatacttcaaagggctcgcaaaagttgagagagaaccatcctgtcaacctatcacaaaaatggagtttgagtttgagcgtagaagagtgacaaaggaagatataagagagttgatattccgtgaaatactggaataccatccacaattgctcaaagactatatcaatggcaccgagagaacaacctttctatacccaagtgctgttgatcaatttagaaagcaatttgcccatcttgaagaaaatggtggaaatggcccggtaattccaatggatagaaagcacacttctcttcccaggtctactattgttcactcaactccaattcctgccaaggaacagccccgcattggcccatcaagggataaaccatctgatgaaccctatagcaatccccgggaatttgacagattttctggcaatgccccgaggacctcacaagctccacaaagagtgccaacagcaagaccaggaagagttgttggtccagtattgccttatgaaaatggtgccacaaaggattcctatgacgcacggagattggcaatgaactcagggtatcctccccagcaacaaatacctcaagcttatggttattatcagatacccggtaagtcagcttgttctgagctgtcgcaggccgaaaggtatacgctgcaccagcaggcctacacttgcgcaaacagtgccactgtgactgatgttgctctggacatgagagcacccccgttccatctatcaggagggccgaaaagcgattcgtccgaaaggttagcagcagagacaaacctatacacgagatctctcaatggcctcgctgctactgctgcgggagtggcagcaagtgcgcacagaaaggtcggtgttgttccctacggcatgtcgaggatgtattagtgcccaaccatggcacatcctgcatgcccaatgggagctctgatgctagcttgcggcgaagcattgggaacaaagtggcagttcaagctagtttgggcaccaagagcacagggcaatccaaggttgacgacgatgcctaagaagttgcattggtgccctgctgctcctgttcctgcttgatcaggaaccaccaccggaggtgtcaaaagcttttcaactctctattcgctttaggcaaatcagcttgtatctgcctgtgtgtgtgtaagaaaatgtgcccttcgttgcacacttgaagggggtagtccagtggcttgtaatctgagcatattttaggcgccaattgtatttctagggtgaggggacaaaagggaaaggaaggaccactaaccttttcctcttttttttttctttttccaatgttgtatagagatgtttctcatatcaaaagtgctacatcagaatgacttgagaaagatataaagcagacaattgcgcggttt

SEQ ID NO: 23909 - DNA, 2475 bp, Oryza sativa
  ref <308>: DATABASE ACCESSION NUMBER: AK073990
  ref <309>: DATABASE ENTRY DATE: 2001-12-06
gatcaaaaaaaaaaaaaaaaactattgcgttacgtccaactcccccggcgacggtggaagcgggagcagcccgacgtcctcgtccgactccccggcgacggtggaagcgggagcagcagcagcccggcgttgcttccggcggcattacctcctcgtcctcgtccgactccctgccgagatcccggcctttccgtcccgaccgcaccggcggcggcggcggagcatcgggccccttcggcttcagatccggcggacgaggtcgcggtcgaggggatctactgcggcggtggggtcgagcgagggaccggcggccgcgacgggcatcgaccactgggagttcgcctgcagcttgagcaggaccttgtcctgcgccacgtggaagagcgctcccacctccgccccgtcgccgccgccgctcgtcgtggtgggtaggggattcactgatttgctgcactctgtttgctcgggggatcgagagggataggaggaagaggagtggagaggaagaaggtagaagatgagggacaatttggtccataaagatagaagataaaaggaatttcgtcgaagtaaagccctcgcaccaacttagccatcgtcgccttcccgtaggccggccggccggcgaccaccgccttccgaaaccgatggctgcagagacgcgtcctagccgctaccgtcggcttcggaaggcctcggatctctctaccgccaccaccgcttccccactctccaaacggatttgtatgggcaagaaatgcaccagttatgaggacaggatcagcagcttacctgaagagatactactcatgatccttggcaagctagacacacggacgacagtaacaaccaccatcctttcaaagagatggcgtgatcttcctcgatgtttgcccacatcctataaccttgctgtcgatgacatcctcccaccacggtatcaccgcctcaaacgccttaacatggaggctaaggcggcctatgaaacagagaagattgtacacaaactgaccgacatctatgccatcaaggctcggcatgagcgttggatgaccactatcagaccactcacggccatcctagaacgctacgagcgccgggccatgagacgctatgtcaagcaggtgaatgcatttcttctagctccaaagaatgtgcgtcaacgctggcctgtccagaagctgaggctccaaacgctagggcgttggcatgagaatattgatgaatggatcaccacagccattgccaagtggggtgtcgaggattttgagcttgttgtcgatggcttttgcctgggctatgacctctagcagctggatacataccggagcttgcggctggagcggcttgcgttgtccaattgcgaggctgtttgtgcatggaactgcttgacagtaaagaggctcaccaaactctcattgagtgaaggttcatttatgggattgctcaatgatatccttgcaaactgcgtgcagctaacagatttcagggtcgcattttcaagttattaccgagccaaagtccgtatctatgccccatcatcgaaattaaagaatctgcaagtggacaggtgcaactttgggaaaatctatctgatatgtctgccttgtcttgaaacttttgtttgccgcggtcgcccgaccaagttatcctatggtgaggtgcctcagctcaggcatgtgaggttggactacattcaaactgaagataacgacatagatgatgaatctggtactaagaggacatatccaccgagcaaattcttcaaaaagatcccaaaactagattcccttgttcttcagttcaaagggacacagatgtggatcgaaccatttgttgttctcagtgagttcagtcagctcaagaagctcttcatcgcaaatgtcccagtgaactgggatatactgtggattctcctactgctcgatgcaacgccagccttggagtcattacatgttcatattgacaacaactcagaagacagaactgcaggtgatctctgcgccagcctcgacgtcggtgtgcagcaggatcgataccgtcacctgaaggagctcgtcgtggccggcttcgacggactgggctggcaagctggctttgtcaggctgataatgaagaggtcgccgttgctgagacgcgttcacctgcttgacggggaggtcagggatgacgagggggagctgggggatctgcagatcgtcccacgccaccgggagtggcacgagtgtgagcgagctgaggtgctcgatgacctcaccactgggtttcgctggcctcctcaaataattctggaataagcgtgtcctttcagttaacttgtttagattaggaaaataataataatatgtgtgccttgtgactttgcttgacgatgcaaatgacgcagagctgaagtgctccggttccatgtctgtccctttacaaaaccgtgtcttatagtagacattttggaagaaccagtgcggttgttgtacc

SEQ ID NO: 23910 - DNA, 1516 bp, Oryza sativa
  ref <308>: DATABASE ACCESSION NUMBER: AK073991
  ref <309>: DATABASE ENTRY DATE: 2001-12-06
gtggagactccgccgccgtttatcgcctcggcggcgcggaatcctctctcttggttcgcaaatggcagccgcacggggtagcttatagggatcttcttgggagttaccctggttgactggtccgctcattcatcgaatcaacgcatcctgcgccgtcgcctcgcctgttcttcaatttgccgccggcgccggcttcggcttggccatggtgctccggcctcacgggagttcttgctgaatgtttatcatggaatcaggataatcatccaagacaagatcccaagagcaagcggttgtcatagctttagggagcaatgtaggtcacagaatcagtaactttatacatccctacagctcatgagagattcatgcattatcattacaccacatgcctgcttgtataaaactgcacttgcatgtgtcactgatgaaccattgtttcaaaactccgttgttaagagggacaataaagcttggaccacatgaattactcaggaagctgctaagatatgggccacattaaacaaagcttgagacagcaaagaaattgagaaggagttgggccactgatggaataagatatagtcctggccaattgatttggatattattttctatggtaagcaccagataaagaaatggtgaaagaatagttcactttgtgctcaacatcacagttgcatatggttagcgctagacaaactctgaagttttgatagacatgagaggctattgttatggctctggtgatgagtcttccaagtttgaatactgaaactgatattggtgcaagttggcatccactctcaaaatgcagagatgtcttcgaactcttggagaatcttggacgacagcccttgattaaaaggcaaatactaagacggggttgcccatcggtagtgcgttgtttgattggcaaagagaagtttcatagcctcatgggtatacttaatatgaacctgatagttcaagtgatcgagcgaagtttcaagaagtagacgatgctattctcaggtcaagttgctattatgtgatgatgccccttgcatagtaatacatctgagagaggatccctccacaatacatattatcaaattttgaattaaggagatgtttgcaagcaggtggccatggaacgatactcaagggtgtaatggcacagaaatgacacacctccctttgtggagaatgattgttgacaccggaattggtttctcaaaaggttctgaatgtttctcaaaagatgagtaaaagaagcatcggtgcttcacaagtgccaatgttagttgaatgaccatccatgaaaatatttctaggtgaaatatgtgaccacaccgatcccatcgaaagaatttcagctcatgctgcctcatctgcaacattggttggtcaacataatcaaagtgcacaatgccagatttggtgttggttctgcaaaaatatgtgacacgttgctaaagcagagtaaaactttggactttctaataacaagattaagcataagatcttttgaatt

SEQ ID NO: 23911 - DNA, 3216 bp, Oryza sativa
  ref <308>: DATABASE ACCESSION NUMBER: AK073992
  ref <309>: DATABASE ENTRY DATE: 2001-12-06
gaggcttcgcttccgtctcgcccaaatcggcgcaccaccaccgccccgccgtccacgaatcgaactgaccggagagatctcgcgatcccctccccaccccttcctgcgccggtggcgaccatgtccacggcggcgcggcgcggccacccgccgccgcacgagaacggcgtgggcgggcacgccgacgacgagccagacgaggacggcgaggaggaggaggaggagggggagggggaggtggaggatgatgaggaggaggagccgcggctcaagtaccagcggctgggcgggagcgtccccgcgatcgtctccaccgacgccgccgcggccatcgccgtcgccgaccgcatggtcgcgctcggcacgcacaacggcaccctccacatcctcgacttccagggtaatcaggtaaaggaaattgctgctcacacagcaactatcaacgacatcagttttgatgcagacggtgaatatataggaagctgctctgatgatgggactgtagtaataagcagcctcttcactgatgaaaaactgaagtttgagtaccatcaacccatgaaagcaattgccttagaccctaattattacaacaactatagaaggttcgctacagggggtttagcaggtcaagtacttgtgctgacaaaaaagtcgtggggaggtggctaccataaaaaggttctgcgtgatggcgaaggaccaatccattctatgaaatggaggacagacctccttgcctgggctaacgatgcaggggtaaaagtgcatgatatgaagacagacaaaggaatcgcgtttatagagaggccaaaaggaattcctcggccagagtttttacttcctcagttggtctggcaggatgataccatcttagttattggatggggaacaagtgtcaagattgcagcaattcgaacagattcatctcaaggactcaatggcatacagaggagtatcactgcaagtaatgagaagtacgtggatattgtgggttcgttccaaacaggctatcacatatccgggattgctccatttggtgatcttttagttgtgcttgcatattccagaggaggaagacagagaaaacagttttagcaattctgttccttcacgtcagggaactgcccagcgtccagaaatacatcttgtatcatggaaaaatgatgaacttaccacagatgctcttcctattcatggttatgagcattataaggcaaaggattatgctcttgctcatgctcctttctcaggaagcagcaatgcaggtggacagtgggctgctggtgatgaacctttgtattacattgtatctcctaaagatatagtggtcgcaaagccaagagatgctgaagaccatatttcttggcttcttcaacatggttggcatgaaaaggcattggctgcagttgaagcaggacaaggacgaaccgagcttcttgatgaggtgggttcgagataccttgatcatttgataattgaaagaaaatatgctgaagctgcacgcctctgtccaaaattgttgcgaggatctccttcagcatgggagaggtgggtctttcactttgcccatcttcgccaacttgctgtattagttccttacatacctacagagaatcctcagctgagtgatacagcttacgaggttgctcttgtagctttaactaccaatccttcttttcatgaacttctcttgacaactgtaaaaaaatggccacctacattatactccgcttcacctgtcatatctgcaattgagccacagctaaattcctcttcaatgactgattcattaaaagaggctttagctgaattgtatgtcatcaacagtcaatatgacaaggccctttctctgtatgctgaactcttgaagccagaagtattcgaatttattgagaagcacaacttgcatgatgccattcatgacaaggttgtcaatcttatgatattggatagtaaaagaactgtaaacctattgatccagcatcgtgatacgatccccccgaatgaagttgtaggacagttgttgcatgctagtaaaagttgtgacaaaagacatttgttgcatctgtatttacatgctctgtttgagacagacatgaatgctggaaaagactatcatgacatgcaggtggagctttatgcagagtatgagccaaggatgctaatacccttcctccgtaccagtcagcattacaggcttgacaaggcatatgaaatctttgcacaaaaagagcttgtacgggagcaagtttttgtgcttggtcgtatgggaaatgcaaaggaagctctctctacaattataaacaaattggaagatattcaggaggccgttgaatttgtgatggagcaacacgatgatgagttatgggaggaattgataagacagtgcctccaaaaacctgagatggttggaatgctgttggaacatactgttggcaatcttgatcctttgtacattgttagtttggttcctgatgggctagaaataccaaggttgcgggatcgccttgtgaaaattgtgacagactatcgaacagaaacttcattaagacatgggtgcaatgatatacttaaggctgattgcgtaaaccttttggtaaaatattatcacgaggctcggcgtggagtctacatggctagtatggacgaggaggtgacaggaactagggttgctgaaggatcttcacgagcaaacgagagatcatcaagtttacgagctttagagatcaaatccagaacaaggtgtggtgctcggtgttgcttgtgctttgatcctttgtcgattcaggacatctctgtcatcgtgttctactgctgccacgcatatcacacgtcttgcctcgaaggcgggttggacttgatgaaatcgaacagtagtactcaggacagcgacgaggatgatgaaggtaccccatcaggcgagtctcgaatgcgctgtgtattgtgtactacagctgctgcataataacttatttcgtaacgagtagtccatatccatgtgttgtgttgtaagtttgagccttgtaattagcgtgttattctggcgtgataaatatgtacaataggttaattctttggggggaagccatatcctcagcaagaggagttttgtgtagatttgacagatatgttgattacttgagcaaagttgtacggcatttttcttaatgccacgagtgccagaccatcggaagttcattccgattcttatcc

SEQ ID NO: 23912 - DNA, 905 bp, Oryza sativa
  ref <308>: DATABASE ACCESSION NUMBER: AK073993
  ref <309>: DATABASE ENTRY DATE: 2001-12-06
gaaccgtcgacgaaccaccacatcatcttcttagccaccagttagcccagtccaccaccccacagttcctccccacgcacaccaccaggccgggcggagagaggcaggagcacgccgccaacgggcggcagtcctcccctcgccggcacgcggccctcgcgccaccgtcgccgccgcaacacggccctcgaactgcaccgccaccaccgcagcgcggccctcgcgccgctgtcgtcgtcgaagcacggcccaccctccgccgccgtcgtggcagtgcggccctcgctccgccgctgctgccgccgccaacggccttcggccgcagcactccgtgcccacgacggagccgtcgccctgcaccgcgcggccagatccggccgcgggagcaccggatctggccaccgcggtgccggatccccagcctccctcgccgtcgagcgcgcctccctccgcctggctcgccacgctccgccccgtctccctcgcgccagagacgacgcgtcgccgtggttacgcctcgccgccgccatcccagctccccgcacggttgtccagcgactaactccgacggcggcgagacagagagaggggaggagggtgggtggcggcggcggcggctagggtttgcccctgagcctctgctgttggctacagattggctctccagactccacttctttctgaatccacgccggtcaatgatatgcaaaccttggatgattgaatacagtttggtacagattctcattctgccaagctcaagctcagcatgtacttcacctgctatgctattgtaccttgttcacgacttcatgtgataggctagctagtttagctagatatgatattgcagttttggcaagggataccaaactagtaacagcagaataattatgacataggcg

SEQ ID NO: 23913 - DNA, 1662 bp, Oryza sativa
  ref <308>: DATABASE ACCESSION NUMBER: AK073994
  ref <309>: DATABASE ENTRY DATE: 2001-12-06
gggtgactctctccccatctccttcccctaggccgccgctatgaaacctccggtcgccatggattctgccggaggaaactcaggtgagagctacccatctcacctcggcctgttcgcgcatctcacagtgcggaggcttggatctgatctgatccaccggtggctgttgtgcaggcaagctgttcgacgaaatgcctccccgttcgtcggatcgaggatgcccccggagcccgtcaccggcggcgatggaacacggcttcgacagacactgtgtggtgctcggcggaatgcccaagaagagatcaaggttggagttggacgcgggggtgtcactgtgggcaggccttcaaccggacattctgggaatcgtgctccacttccttccatgccttgccgaccgtgcgaggatgcggtccgtgtgccgtcactggcgagccagcgcgaacggccacgtcctgccaccgccgctgcccctgctgatgcttcctggtttcaagttctcgagcctatcagacaagggggatttgatgcctgtgcggtgcgtgccggtgcctaaggaagttgcagctgatgatctccgatgtgtgggttattttgatggatggcttgtaggtgtgactcctaacaaggatcgcagcgacgagtacaacagagatgccgatggtgactgcttcctggtgaatgttttctctcgcaaggtcatccgcctaccgcagctgtgccatatgcgttacaattttcctgcttactccagtaagaccctccgcatcatcaatggttctggtgaggtctattttcgtgtcaatgatatatacacaatgtcactatgcaatgtggcactatctgcttcacctgactcaagaggcaagtacattgtagctgcttcctctgaccacaagtgtgcatcaaaacttgctctctggcagcctgggatgatttcatggcatatttgcgctggcgttgacattgatggcccaagagatctcactttttaccttgggaagctgtatgtgctccaaagatataagatacgcctctttgcttttgaagttggggaggacaatggtgggctcatggtctctcgcgttaagcgttgtctgagtgcgctgcctctccatcatccctaccagggaggtggtgcaataagttgtaatatggttgtgtggcgtggagagctattattaatcatcagacactacagcgacaattaccgtgaccgagaagttcttaaagttgaagtgtttgcactggatgttaacacaaacccttatggactaactgagattcacagcttgaatggtgactgtatctttgttggcttaggtggctgcaagtcctttcctgctggtctacatcatggagttgaaggtgaccatatctactttgtccctgatgattggaagccttatgatacatttgtgtatagcatgagagatggtaagatgaggtcctttgccgtcaaactattagcttccgactttgatgtggaccagttgagtcgtgatttcccggtgtggttacttcctaccgaatgatgctgcacagcaaaactgatctaactggttgttttgtgccgctagttgctcttatcaagacagagcttacttgtcattagactctttggtcatgactataacatgtataatctgctatgctcttgtc

SEQ ID NO: 23914 - DNA, 2888 bp, Oryza sativa
  ref <308>: DATABASE ACCESSION NUMBER: AK073995
  ref <309>: DATABASE ENTRY DATE: 2001-12-06
ggaaggcaagaggggaagctttgcatttgcccggccgactctcttcttggttcttggttgtggcgtcggcgtctccgtgttgtttgggctggccaccgttgctcgccgttcttgggggcaggcaaacggcaccggcggtatggaggcattgggagatatggagggggaggaggggcagcggcggcagcagcagatacgggtggtgcggtgccccaagtgcgagaagttcttgccggagctccccaactactccgtctacgtctgcggcggatgcggcgccactctccaagcaaagaagaactcagcatctgagaattcctcagagaaatctgatggtggacatgtgaagtaccttgaagtgctggagagttcaccagataacaaaggagctgcatctaaagacacttgtgaggctgcccaagaaggagaagccaaaaatggagaagctaaagcagaagagagacaggtacttcttgacagaatggcagcttgtgatgatagccgaattccaagagaaccaaatgccttgaagcttgaggcttcacttagagatgacagcagggaaattcgggaggccaagtaccggcgcatccgcagtgaggacaaaggagaagcaaaacacacagtgagagccagagacagatcgccaagatcagttgttgatgccatccctccgaatgcatatcctgcagaaggcccgtctgactaccatattaagtcaagattcagacataccaatggtgagcaagctgatatgagaaatttggagggcctaaacagagtcaatggtcttgaaaaagaccgtgctgatctgttacggatgcttgatgagctgaggggtcaggtgcagagatcctgtgagatcaccaacaagccaagtggaagtacttctacagataaagcggtggatgcctcagggttatataatcctcgtgagcggttgagtcggttacgacatggttcacctcagttgcagcggagtggttctcagcagtcaccatccttgaatgggcaagctccttgcattccgcaagcttatgctccaggaactgctcagcaagatcttcatggatacggggagccaatggcacacatgggggctccaagctatcctgttggcacatatccatggagaaattttgataattatttttatggacagtatgatcctgaccctctgatctcttaccaccatgatggcttctaccatcagcctgcctgttcttgtctacattgctaccaccgtgagttcttacctgttcaggggcctcctctgggtttcaaccatcgcagggtaccaccgtatgttatgaataatcctagagtttacccggttgatggtcctgcaatgtttggcacacagaattacaattcaagagtcaacgcttcaatgcagcgcaatcacatgagggccgctatgagtaaaaaacctgcacagacttgtgaaccgattgcatgtggtgccccattcactatatgctacaactgctatgaagtactgcaacttccgaagaaatcccccgtgccagggaaggatgagtacaaattacgttgcgggtcatgctcacatgcgcttgtggtcaagcttgatggaagcaggcttgatgtttcagcaccttcacctatttcacacatatctggcggcagcaaaattagttccaatgatggccaaggaagcaatgcgaattctgctccacatgagagggtgcttccactttatagtttttctgcagcaagtcatggttctcaagacctaccctcgaactcaagtgaagctgaaaaaatgcaagggatatcgtcttcttgcagcatttctgaagatgagaacagccctgcgagatctaattcccagagggacacccctgggtctagggatcttcatcctgaagctgaggtgtctacccgtgttccaagtttacatcttcgtgatcattttggatactcgccatctgagaaggtagttgatggatcagggaaaggaagcagaagtactcgatctgaacatgagaaggctgtgttgacagaaagtttcaagcagaacactgtaaaagatgtatcagtagtgaacataatggacttgtcggatgatgagtatgatgatcctgactacatgcaagatcgaggtgatgtggcacaacctgtagatcaccctcgggccgtgaaaacgggtgattcatttttcaccaatctcataaagaagagcttcaaaattaacaacggaatgggcaatggcagagcaaaggttttcattaatggctatcccatctctgatcgggcggtcaggaaggctgagaagatagctggaccaatctatcctggtgaatactggtatgattaccgtgctggtttctggggtgtaatgggacagtcttgcctcggcatgataccgccatatattccagaactcaattatcctatgcccaagaaatgcgctgctggaaatacaggtgtatttgttaatgggagagaacttcaccagaaggatttggatttacttgtgggtcgaggactcccagattctcccggtagatcatacagagttgagatgtccggtaaagtgtcggatgaagtctctggtgaggagctgtattgtctcggcaaacttgcaccaaccgtcgagaaaatgaagcgcggatttggcatgagagtccccagaatcatcccttgagatcagtgattcttcggcacaactgtagaattcaagaccccattttggatgctgtttcggttcttctgcgaaatgctttgatgcttgttggttgttgattgtccagccgtctgtttgcgtggtctcatgatctgagatgtataatctgtggttgctttgactggtgcttgtctgaaaaattatccaatggaaattttgcaatgtgaagtttgttttgtgc

SEQ ID NO: 23915 - DNA, 1236 bp, Oryza sativa
  ref <308>: DATABASE ACCESSION NUMBER: AK073996
  ref <309>: DATABASE ENTRY DATE: 2001-12-06
gtggtccttccttcctcccctacctcccctttgcgcttgacatcgccgggtggatcagcggcggaggctgccagcgatgtcgtccctcaactcgctcttcaaccgctccaccttcggtaccaaatgcaaaacatgcttgaatttagtcatttcgaggatcaagctgctgcgcaacaggagggagttgcagctaataaatatgcgcaaagagatggttcagtatcttcagacaggccaggaatcgatagcaaggattcgggtggagcacattattcgagagcaaaatatattggctgcatatgagattgttgagcttttctgcgaatttgtgctggcaagggtccctattgttgaggtccaaaaggaatgccccttcgaactacgggaagcaatagctagtataatatttgcatcagggagatgttcagacttgcctgagctaatgcatctccgtactttgttcaccaccaaatatggcaaggaatttgttgctgcagctatggaattgcgtcctgacagcggtgttaatcgtacaataatcgagaagctctcagtgaaggccccatcagctgaatcaaagctgaaggttctgaaagctattgctcaagagtatggccttgaatgggactcatcgaatactgaagcagagcttaacaagaaatacgaagatctgctggatggatcaggatcctcagcacgccagggccagttacctataatcgagaactctccagttgcttccatttccagagatatgccatcgttgtccatttcacctgtcgaggacactggaaaatatcaagctgctccccagtccccaagctcacctgctgggtctgcagtaatgcatgcggctaccaagagtaacatggtgagccaggagcatcatcgctcccctgctgatgagatatcgtgcgcaaccccaagttcgtcggacgttcttgaaaaagcccgagctgccattgctgcagccaaccgcgcctccgccgctgcccgtgcagccgcggaccttgtaaaggtcaaaattacaagctagtgacgcactgacgcctgctgttgtggcgaaccaaggcaagttgcgtggtttgagattgtggcaactcgggtttattactgactatacacatgcttaatttgaatgacaaagtgtggcttaaacaaacgagaaagtgtattactgtataccactctcttggcatttcaactgagttagtgtggctttttgcctttctgttc

SEQ ID NO: 23916 - DNA, 2112 bp, Oryza sativa
  ref <308>: DATABASE ACCESSION NUMBER: AK073997
  ref <309>: DATABASE ENTRY DATE: 2001-12-06
gtaatgttaggcattcaaattatttttggtcccgtcccgcttcgcgattcttgttgatttgtggctgaaatccccccaagaatcaatgtcgggagtaggttttagtaaaattgacgggaattcgcagcaggaggaggaggagaaagaggctgacgatttggaccgggatttggggatgatgagggaggaattggagcgtgaggtgctcaacacttggctctggggcaaggacatggactctattctgaatgaagaatctgaatggcaagggacacttccaggctgggcctgccctcgagaagataattaccagtccgaaagtgaattctcggttgatccagatgaatgcgattctttcgacggatactggtatgaattccgctacgaggatggaaatccttactacgctgctgagagggaggagagatgggagaatcaggttatggagcaaatgaagttcacagtatcaattgcaaagcaacgacaaaatgatttcttttgtcctatttttgaggggtctctacatgttgaagggccatgtcatttggatccagatatcctgtcgacggagcatctattgccccagctgccaaagtggaaaaatcgttgggtaaatggatacaaccacaggaatgaaccttgtcggcgtgcaatccaggtgtatgatttggatgtatcgtccccccatgatgaaccaatggagatctacggtatatttgcatttagagatgtacgaaacaaccaacaacgtaatcatgtctttcaatactcgagggacaaaccatataagcttcggccggtgagagatttcatgactaagtttgttttgtttataccttttgtcttaaaagggtcccctccttttctgtagttgtgctctttaaactttgacataaatctatctcctttttgaaataactgacattgggaattattcattttttaactttgtccacttgtcgcaaaaagaaaaaaaaaagtacaccatattttcgtagtgtatggcatcttaaatatatacaaacgtgaagctctcattcatcaaactctaatcatttaagagtaatttgcggtcagagtcaaaatagtaatagacaccaacagttatattcataaatggagggattagtggttaaaacaccaatatattatctctgggacaagtgttttatgtaccagatgattaggcactagaattaatacttcattttattcttgtaacatttgatgcacgtatgtctaataactttgatgtttctttcacaaattactgcacagggctctaataagatacggcctctaatttggccacctagaggcatatatgcagttgggcctatgttgatcgaatactaccttgtcattaagggtcaagaaaggaaagacgataaagtgttgatagacgggcattctatgtatgccccatcgttctattcagaacttcatagataccgttggcacatcgacactggtcattgtggcactgttgctctggagatggttgcccttgataaggcagtactgggcacattggagcttgaggtactcgatctcggagagaactgttttgattcacttacagttgttgcaggttactgcgtacagtggggacaattcatgatatttgacggcaagttgagcgttggcaagttgcccccggtcacattatgcgtggacggtgatggaattctgttgcttcgcttcttcacgtataacagcccttcaaatgataagagctttagtcatggtggtggtgttaatgatctccttgagcatgtcactgaggatgtgttgtttgggagtatgtcgtttgtaccacagaacgaggggagttctactgcaagtggaggctgttctagttgtatggacggtcttgagatttcggccactgccaagtggtcgccattatttgaacaatcagattagctatgcttcccctttcaaaaaggaagaagattagctatgcttcgtattatacacaaatggtttgatcatctctgtatttagtaatgaaggcctaaaaggacaagaatgaccaagtttgtaacagacgataatagtgtatctctccgcaatatgtatattaatgtggtgttttctttgttttctttg

SEQ ID NO: 23917 - DNA, 1666 bp, Oryza sativa
  ref <308>: DATABASE ACCESSION NUMBER: AK073998
  ref <309>: DATABASE ENTRY DATE: 2001-12-06
gaatccccattttcatttctcctcttctctctgatctctcccccgatctaatctcccggcgagcgagcgagtggaatcggcggcgatcttggcggtgacggcgttccggcgaggtggagcacgcgtgcgacgacgagcaccgagcggcttccatttgcgccggctggggggagcacgcacgagggcggcggcaagccgtgccgggtgtcggcggtccggcgaggcgggcgcacaagcggcggcgagcaccgatgcggcccggacctcgtcggcgggggggcggagcccgaaggcagccgccaagccgacgcttcccgtccccggcgagggaaagtgaggaggtgaagtggcggcgatgccgcttcccggagaaattccggtgggtttagaggcttcgaaatccggcgttgaacaccggcggccacggcagctcatacgggaacgcgacgccggcgtgcgcgttccgctggtgctcccgttccaccgccatggtccggagccacgcttcctccgacggcgacagacagcatgaggtaccccctttccgcccccgacgattacgccagcgatgccgcagccgaagtacacatctccttgcggcccggcagcccgcgggtggccacggacaaattcagggtgttcttgactgagcagtgagcacccagtcgccgttgctgggtagccaggaaaatactctcaggtggtcgtcgttgctcacgccgatgatacggagctcgccgccgccatcgtcgtcaccggcgacgaccctgaacttgcacttgcgggaccactccctcatgtggtctgggaatacgacgatggagaacctcgccgtgagctcgtcaagggctaggcggctaggaaggcaccgaggctgccgcggcgtctcatctccgacgtggggacggcgaccatctggtagcgccgcgtaagtggctcgcagacgatgaggccatcagggcagcagcggctgtcggagtctcggcgatcgtccaggaggcggtgtccgggacgaagtcgagtgagaggcggcagccgtagacgagaaccggcctggagacgtggacgaacgccgcatgggagaccgcgccgccaacggcgtggtattggccgacgaggtcgggcccgtggtggacacggaagcggcggaggaagacactgcaccgtcggcggcatcaacgacgacgacgcggcgctagcgcttgcagacggacgcggcgcggatgaggcaggcggcggatcggagtggaggcgcagcaggacgagctcgaggactttgtcggagatgtcgtcgaccacccacgtagccacgtaggcctcgccgtcgccggcagcaacaagacggtcttcttcctccgcgccgccgtgctccggttcttgcaagttgcgacggctcattctcggatccattaaccttgatcttcttctcgcgtttgtttatggcttgttatagagtataccatatcgtgcatcatggtagtattttatactcactccgtttcaggttataagactttctagcattacccacgttcatatgaactaggaaggtagtccgcgcattcgcgtgggcatatattttaagatgtgtttgagatatttacagttataaggatggaatattaactgtagaacacctctcatgcttcaaaaaacaaatctccgt

SEQ ID NO: 23918 - DNA, 2223 bp, Oryza sativa
  ref <308>: DATABASE ACCESSION NUMBER: AK073999
  ref <309>: DATABASE ENTRY DATE: 2001-12-06
ggcgtttctttccccctccacaagtagctctctccccgccggtctccgggtagccgcctccgaacccagccgagagctcgaagcctttccttactctcttgccatgtaccgcgcggcggccagcctcgcctccaaggcccgtcaagccgggagcagcgctcgtcagattgggagtaggctcgccttgcatagaaactatgctgccaaggacatcaagtttggtgtcgaggcccgggccttgatgttgaggggtgttgaggagttggctgatgcggtcaaagtgacaatgggtcctaagggacgcactgttgttattgagcaaagctttggtgctcctaaagttacaaaggatggagttactgttgccaagagcattgaattcagtaacagggttaagaatgttggtgcaagccttgtgaagcaggttgctaatgcgactaacgacactgctggggatgggacaacatgtgctactgttcttacaaaagctatattcgctgagggatgcaagtctgtagcagctggaatgaatgcgatggatttgagacgtggtatctcgatggctgttgatgaagtagtgacaaatttaaaaggcatggccagaatgattagcacatcagaggaaatagcacaggttggtactatatcagctaatggggaaagggaaattggtgagctcattgcaaaagctatggagaaggttggcaaagagggagtcatcactattacggatggtaacaccctctacaatgagcttgaagttgtagaaggcatgaaacttgacagaggttatatctctccttacttcattaccaaccaaaagaaccagaaatgtgaactagacgatccactgatcttgatacatgacaagaaagtgtccaaccttcatgctgtggtgaaagtgttggagttagctctgaagaagcaaaggcctctgcttattgttgcagaggatgtagaaagtgaagcattgggtactctgattattaacaagcttcgtgcaggcattaaggtttgtgcagtcaaagctcctgggtttggggagagcaggaaagccaacttacaggacctcgctatccttactgggggagaagtcataactgaagaacttggaatgaaccttgagaattttgagcctcagatgctggggacttgcaagaaggttacagtatctaaggatgacacagtcatccttgatggagctggagataagaaggccattgaagagagagctgagcagctgagatctgcaattgagctaagcacttctgactatgataaagagaagcttcaggagcggttagcaaagctttctggtggtgttgctgttctaaagattggtggagctagtgaagcggaggttggtgagaagaaggatagagtgactgatgcactaaatgctaccaaagctgctgtagaggagggtattgtaccaggtggtggagttgcccttctgtatgcatcaaaagacctggataaattgcagactgcgaactttgaccaaaagattggtgtccagatcattcaaaatgctttgaagaccccagtgcacacaattgcttcgaatgcgggtgtagaaggatctgtcattattggcaagcttttggaacaggataatactgatctaggttatgatgctgctaaaggtgaatacgttgacatggtgaagtctggtatcattgacccactaaaagttatcagaacagctctggtggatgctgcaagtgtgtcctctctaatgactaccacagaatctattattgttgagatccccaaggaagaggaggcagcagccgcagcacccgcaatgggtggcatgggcgggatgggtttctagcttactctccggctcatgcaaagttattgtgtgataaatttattcactagattagattatttttgcggtgcggacatctttaactgatgaggtggctgtcagattttgattctgctgcaagaggattgtaacttgaagtagtagaattgaactttggaatttgggatgcataaaatccttctatataggtggtgcaagttggattttgtgatttgctctgggtttgcctattttcgcttttgctcgagcaatccaagaacagtactacttcgataaatgtgcgagttccctgtgactggtccgtttagaattagtttaatcttaactttcagccacttctaactcaaagcaaagaatgaagctactgtggcaatttttccggattt

SEQ ID NO: 23919 - DNA, 3630 bp, Oryza sativa
  ref <308>: DATABASE ACCESSION NUMBER: AK074000
  ref <309>: DATABASE ENTRY DATE: 2001-12-06
ggtgctacttgcaccaccttcttcttcttctctctccctcacacgcttcacactcctctcgctgttcttctctcctcctcctgtggctggctgcttgctctactgcaattatttattgccacctccaattcttagtactgcgagattaattactcattcctccccgcagtgccatgttcttgagtttctttcggtttttttaatccattttgcaacactctctgtcctgcagccagagctgcatttgctggggatttatactagtaggcggcttcagctttactctctcccctttctgcttctgctgcttctccctttccctctcaacttctcaagtggcagtggtgggagggtagcatctggcccaagcaaagcgccgggttcttggctctgctcgctttttttcgtggtaaatctgtgtgcaagatctggggtacaaaaggaggggacagcagcacaagggaggaggaggagttcttgcgttgggattctctcttcggcaatgaggcccgacgcgaggctggatgcggccgtgttccagctcaccccgacccggaccaggttcgatttggtggtgatagtgaatggccggaaggagaagatagcctctggcctgctaaacccgttcctggcacacctgaaggtcgcccaggatcagattgcaaagggaggatactcaattacgcttgagccgagctcaggggttggcgcgccatggtttacaagaggcaccgtggagagattcgtgcgcttcgtgagtactccggaggtgcttgagcgagtgacgacgatagaatccgagatcttgcagctcgaggacgccatctctattcagagcaacgataatcttgggctaagatctgtagaagatcatggaggaaaattgactgaaagcaacgaaggtacacgagcgaatcacagccctgatgcagataaggctattgttatataccagcctggatcacagcctacaccagcagtgcatgatgagactacaacacatgaagagaattcaaaagtccaactgctgagagtgcttgaaacccgaaaaaatgtcttaaggaaagagcaggctatggcttttgcacgtgctgtggcagctgggtttgacatcgacaatctgggttacttgattgcgtttgcagagcgctttggtgcttcacgtttgatgagggcatgttcgcagttcatcgaactgtggaagcgaaagcatgaaactggacaatggattgaagttgaaccagaagcaatgtctacacactctgaatttcctccttttaatccatcgggtattgtttttgttggagacaacatgaagcaaaacacggaaactatgtctgtttccaatggagaggcaaatggcgaggatgcttctaaagctgagcataagtctggtcaacagatggggtatcaggctgcatatcctccatgggcaatgcatcctccaccttaccatatgcaaggaatgccttactatcctgggccgtactaccctccatatcctccagtggatgaccccaggtatcactactcgggaaggaaatcatcgaggaagcactcttcagacagtaaagagtcagaagtacttgacgaaggaagtgatggtagcagttctgaaagagggagttctcatggtcacaagtcacataaaaagggtaagcgatcagggaaaaagaaacctagtgtagttgtcataaaaaatgtaaatgtaacatccaaaaagcatggctcgtcggaaagtgagtcgcagtcaagttctgaagatgggtctcaagacagtgatgacacacactacaaaaagagacatgggaagcataagagctcaggttcaaagaaaaaggagggtgcaaaaactaactttgactctggagacgactataataacaaggatgaatcatcttatgggcaagatgctgaccaagggaactggaatgcattccagagtttcctgatgagagcagaagaaaaaaaaacaagatctaatgatgcagatatgttttctggtgaaaaagcacctccatcaaggaaaaagaacaatgtaaacactgctgatcctattcttttggctgggggagattctggtgatgtatatgaacagagaggagcaggctttgatccagtcaatgggaggagtagagctattcggctgcaatccaatgatgaactgatgatgtctggggaagggggaagatatatggatggtgaaattaaggagatagaagctggtggtggaagatacaggagagggacaagtgaggacttcatgctctatggccaggaaaggtccatggataggaggagtgctttggatcctcttgcagaggcccggtacaggaatcctaatcaggtggacaagaatggatatgccgcggctgatgagtcctttataattcctcttagatctggttcacaagataatgttgggccggaataccgagccacgattgacattgatgttgagcttcctacaaacactaagaaaacttcagatgggaaggctggaactcaactcttctatgagccggatgaattgatgccagagcgtggatctgaagatgcttcatttggatatgatccggcaatggattacgaaagcaacatgatggtcagagccgtcaaggttgaagacagtaatgacgaggatgtctcacatagtaatgatggcgatgtaaagaaaccagagaaggagaagataaggggtacaaaggatggttcggataaaagaaagaaggatgcaatactcaggaggctctctgctccaaagaccccactcaatgatgcacagaaacgtgcacagaacatgcgagcatataaagctgatctccagaaactgaagaaagagcagaccatcctgtttagggaccggggtggcacaactgaacaagttggtggatctaaacgagtgatttgcaagtttagggaccgggatgacacagtcgaacaagtttgaagacctgaacgatcgatttgcgagtttaggggccgggatgacacagcggaggaagaacaaatgaagcgactggagaggcttaaactagagaggcaaaagagaatagccgcaagaagtaatgggaagagtgatcctcctaaagcaagcagagagcatgccaatggactaagtatatcagttccatctctaactggtctgaagaaagaaaagagtggatcgaccgaatcattcagcgagcgactgaagaggctggctgaacccaagagcatcggtggtgctgaccatctttcaaatccaaagtcagttaccacagaccactcaaggagaagaagcatggtatgagctcatctgatatcggcagcgaaaaattccgagtatttatcatgtaatttcacaacccagaaaaacaggacgaaaataacagccagatctccaaaagctgtacagggaaaagtttggtgttgattattaagtggtggtgccttgcatctgagattgcggatgagaaatttgagaattattacaatgggtctggcattttaatttttcggtttcatatattgtattcattcttttgattgaaggtggcttgtaatagctgtaaacctgtttttgttcatggcacatactactatattgtggatgtatttagtggagaaatcgatcagtgtgtttgggtg

SEQ ID NO: 23920 - DNA, 1643 bp, Oryza sativa
  ref <308>: DATABASE ACCESSION NUMBER: AK074001
  ref <309>: DATABASE ENTRY DATE: 2001-12-06
gtgagtccccccaagcaaacccttcttctctctctctctctctcctctcacgcttcgctcgcggccgctcctctctctctccatccatccatggcgcaggacgacgccccggactccaccacctcctcctcatccgcctcatccgcctccgcccccgccccctccgccgcccgcctcaacgccgccgccccggagttcacccctcgatccgccgcccaccaccaccaccaccacgccaaccctcgccgccagcaccgcgggggcgggggtggggcctaccaccaccaccagcagcactaccagccgcaccaccaccaccagcaccaccagcactggcaacactacggggaggatgagggggacgccgcggcggccggggcggtgggagaaggagggatcccggaggatgtggctcgtcgggtcgtcaagcaggtggaattttacttcagtgatgtcaatctggctacaacagaacatttgatgaaattcatgattagagatccagagggatttgtgccaatgtctgtagttgcatcttttaggaagatccgggagttagttagtgagagatccgcattggctgcagtattgcggacgtcagcagagctggttgtttcagatgatggaaaaagggttagacgtcgagtgctctttactgaggcggatgctgaagaagttcagtcacgcattgttgttgctgaaaatttgcgtgaagagcaccgctatccaaatcttatgaagattttctcagcttttgggagtgtgaaatcaattcgtacttgctatccacaaggtgggattgatggtgctggaacttctactggcaaagcatcaaagattgagatgttgtttgctaataaggtgcatgcttttgtggagtatgaaactgttgaagatgctgaaaaggcagtttctgaattcagtagtgggagaagctggagagatgggattagagtccgctcactgcttggttgcctgaaacaagccatgggtcaaggaagaagaggtggagatgaggtggatgctgcagacgaagatgaccctgaaacaactgaccatccacaagactacgaaacagaggatgcttcccagatttcagaagcacatcttgatcatcaggctgatgatggctaccatgacaaaggcgggatgaggcacgggagagggagaggacgtggtggaagagggcgtggccgtggtcagtactatggccatagccgggatgccaatcatccaattggcactcctccatcgaatcacagtgctcttgctgatcatccttcaaagccaccccctggtcctcgtatgccagatggcacaagaggatttaccatggggcgaggaaagccactcaatcctaccaatgctgtttaatggcagtggccatgccggtggcagcctgttgccctgttccctcttgcaaatctgatacttgcctcaggttccaaaccgatgaacgccgattaccgttgatactatagttagatacaacatgtgttggttcgttttggtgcaagattctgcagagaaaagttttacctggtacatgcatgtatactggtacagcagtggtgctggcaatgtgaacatgtcttttgatatctggatgctagttaatttagcaaaatatgtagatatagatg

SEQ ID NO: 23921 - DNA, 3255 bp, Oryza sativa
  ref <308>: DATABASE ACCESSION NUMBER: AK074002
  ref <309>: DATABASE ENTRY DATE: 2001-12-06
ggtcagatttctagtagtatactttccccctctccagttgcacttgcacctgttcaggttgagttcatccttcccacttagctgccagtagtggccatggtgtgtgtctgatgagcgagctgagtgagggagatcccggatatggacgggtttggcctgagctccacccactccgccgtgaagtcgctcgtcggccggctgaccgacgtcctctccgaccaagtgcagctgctaggcgggctgaggcgcgaggtgcagttcatccgggacgagatggagagcatgaacggcttcctcctcaatcatgcccgcaggggccgcatggaccaccagctccaggcgtggatgaaccaggtcaaggacctcgccaaccattcccagtactgcgtcgaccagtacttgcggtgcctcggcaccaccagccaccgctcgccgggtggcctctggggctccgtgcgccgtctcccccggttcgtcagcacgttgccggcgcgctaccggttggctatccaaatccaggacatcaagatccgggtagtggaggttagccagaggcagcagaggtatcctctccatggcacggctaccgagcaggagccgcagtctggcatggccagcgatcatagccagcaagctttccttaccggtgacagtgaagccgatcagcaggagcatcttcggaggcgtatcttggccgtagacgactctggcctgttcaaggaggctgctgatgagctcaccagctggctgacagtggaaggagatggcagatcagatctcagaatcatccccattgtcggctcccgtggcatgggcaaaaccactcttgctgagcaagtgtacaaaggttattcctcaaggttggcagaccacaaggcatggatctcggttggctccaaccaatctccacagcaagtactccgggacatactcgcgcagattgtagggcttcatgctaacaatctgcaggacatgggaacatggggaaacagccaaatcgcactgatgattcaggagcagctggaaggtaaaaggttccttattgttcttgatgatgtctgctccgagtcgctctggaaagatatcgaagcttctctccactgcggtaattctgctcccagtgctatacttgtcaccacaagcttgcctgaagtggcacagtcattttgtccttacagaatatatgatctaaggtatatccaggaggagcataaccgctccttagttgatttcttcctcgtgagagcagctaactttataagtgacaatggtcatggcaaagctagtctcaaggaggaggttcttcgcagcattttagtaaaatgttccccctgtatctttagcatgaagatgcttctccgattcctttatgcgaatcctaacaagaccctacaggaactgcatgacttcagcaacagcctgtgcttctgcagccctctgcatctgtcttcatggctgtccaatgccgagaaaatgctcacattctgctacaacgccttgccttgtgattacaggagctgcttgctgtatcttaccattttccccaatgaccacaatatcaggagaacgagcctgctcagaaaatggatcgcggaaggcctaatagctgaaagagatggactgagtgcatttgatgttgccaaccgatgttttgatgctcttctcgctcaaagatttgttcttcctggtgatgttggaaattcaggcaaggtaaacagctgcagagtgcacaatctagtccgtgacttcattgcctgggtcatcagagatgacaactttgtgtacacaaagctaccagtcgacttggctcaccgtcttcccatccacaatggagaaagactgcagcaggtctcgcggatcaaacttcgtgcttctcatttcgacgattgttggagcatgacaaggtgttgcttcacaacgaagtcagtggatcccttggctggcatatccatgttacttagatcaattcaggaatctgctcaactaggattacgcctcaatgtacttgatctagaaggctgcaaaggattggagaagtatcacctgaacagcgtttgcaagatatttcaactcaagtatttgagcctcaggaatacagatgtttcccacttgcccaagaagatcgacaagctacagtacctggagacacttgacatccggcaaacccagataaaggcattcccaggaaagcattttatccttcctgggctgaagcacctacttgctggttgcaccaattgtcctagcaagaaaaataatctcatggaaaaggaatcttgctcgttttccactgtgctcatgcctcaaaaaattgtgaggatgggaaagttggagatactatgctatgctgaggtttccagtggcctcactgggctaatgggcatttgtcagttacgacgactcagaaaattgggagtactcttgcaaggtaatgcagcttgtaatctggattacttgttccgacaaatcgatatgttggatagaagcctgcactctttgtcaatccggatggaacgactgaagttagccaaagacgatgctcgcaaaagggatgacatggtacccgcgtcatttcccttctcacctccaaagtttgttcagaagctaaacatcagtggcatcagaagtgcattgcttggttggattggtgacctccaccaactttccaagataactctgcatgagacttcactcacggaacatgttctcggtatcctgggacagcttggcagcctgcggtgcctcaagctccagtgcaattcaaccatgggtagcagtctatcgttcaggagtggagcgtttcggaacctcgtagctcttgttgtccaggacaataacctccttgacattatctttgattacggagcagctccaaggcttgagagagtgatattgtctatcgccgccattgactctctgtctggagtacagcaccttcagcagctgaaagagctcgagctccatggaagtgcaagaaacataggcgaggtcgaacaggccatagcaggacaccataataatccagttttcagacacgagcaatggaatgatcttcactgaagcttccgaaattctgaatgtctggtgcttgcatctgtgttctacaatgaagatagtaataagtggacgcaaagcaaacctcttttttcttgatgcatccatgttaaattttacttgtgttggattttcagtttgtttgatttatatgtatcctccacagttgccactattaagcttgttgcaactatatcttcc

SEQ ID NO: 23922 - DNA, 865 bp, Oryza sativa
  ref <308>: DATABASE ACCESSION NUMBER: AK074003
  ref <309>: DATABASE ENTRY DATE: 2001-12-06
gaacgcaaaatccaaaagataagcacagttacgcagcgagagcgagagaggagtggagagccatggcttccatcgtggcatcgaagaggatcccactgttccgcctcgtggagcagctcctcgccgcgtcgccggcccaaggcgccgcctccgctctcaggccggtggccgtcgccggcgggtcccgtgcatacaacaccggcgcgcagctccgccggcacgagagggacgagtcggacgacgacagcggccgtgggtacgacaccaggcgccccacacgcgacgccaccatgcccgccttcttctcagatgtgttccgtgatccgttcagcgcgccgcagagcctcgggcggctgctgagcctcatggacgacctggcgacgccggccgggcgcgccggcgccgcgacgctgcggcgcgggtggaacgcgaaggagagcgaggaggcgctgcacctgagggtggacatgccgggcctggggaaggagcacgtgaaggtgtgggcggagcagaacagcctcgtgatcaagggcgagggggagaaggaggccggcgaggacgagggcgccgccccggcgaggtacagcggccgcatcgagctcgcgccggaggtgtacaggatggaccagatcaaggcggagatgaagaacggcgtgctcaaggtggtcgtgcccaaggtgaaggaggagcagcgcagggacgtcttccaggtcaacgtcgagtaggagctcaatccgcgcgcgttcggcgtgcgaagttgcaggatgcggatggatcgtctccttttatccaataagaaatgcggcgtgctgtagctttgttttgttttcgaagttatggagataaaagttttggtttacttatg

SEQ ID NO: 23923 - DNA, 3468 bp, Oryza sativa
  ref <308>: DATABASE ACCESSION NUMBER: AK074004
  ref <309>: DATABASE ENTRY DATE: 2001-12-06
gatagaaggagctggtttctcatttttaccctgcctttttttttccttctcttttggctcgattcagtttatcctctgctggtttaagagaaatatattttctccttgttggaatgggccatctttttgtacatgaagttgatgaaaggggccaaaagtttgagagattgaggcggtgaagaaaccacaaaaacaggaatcccaaagtgacccaaggcaggaaaaaaaaaagggctcttccattgcacctatggtgatagcttctggagccattgacaggaggcacctgtcgccattcaccccaacttcagacgactcctcatcttcattcttctctcaggaccttgtccctacagagaggcaagttggattttggaattcagagtcaatggtggatcacaaagggagcaagtcagtttttgcttctccacttgaaaagatccaacccaatggagcaaatcatgcaggagatccggaaactccaggaggtcaagccttcaagggcctggacatccttagcctcagcaatttgatgcggcaagaaaatgcttcaggttcaccgtcactttcttggggtgagatcctcacaaaccccatatcgaggcttggcttgtctacaagagaaacagcttttgttgaaccaactactgctgatcaacatgtgcctggttatgggaagggactttcatccagctccctctctgaagtattcagtggcaaatcgagagaaatagtaagtggtgttctttgtcaatctactgggacacatacctccatctacgacagtgatgaacctctagagtccatggaagcgatagaagctcaaactattggagatctccttcctgatgatgatgatgatttaatatcaggtattgccgatggatttgaatttactggcatgtcgaccaaccaggatgatgccgatgaagatatattctgcactggaggaggaatggaacttgaaaacaatgattccgtaaaaggtgacaaagttcaggatggatccttcaagagccaaatttcttcaggacactccatcaataaacaaccttcccgaactcttgtagtcagaaatattactgctaacatcgaggattctgatctgacggttctgtttcagcaatacggggacattcgcatgctctatacctccttcaagcaccatgggtttgtaactgtttcttattatgacataagagcagcccaaaatgcaatgagagcgctgcatagcaagcctctggggctgatgaaacttgatgtgcaattttcttttcctaaggaaaatgttccaggcaaggatattgataagggaatgttggtggtatctaacattgattcttccatctccaatgatgatcttctccaaatgctcagtgtttatggtgatgtaaaggagatttccagctctcctataagctgcaccaagaagtttgtagagttctatgatgttagagcagcagaagaagcactacatgaccttaataagggtggaatttcaggcccaaagttcaaggttgaacttagccaacatggagaggcaggatcttgcttgaggcagcaacattctagagaatggaagcaagacagtttgcctcaccaacctaaaaactcttcacctgggaccattggaaagttgggcaccaaatgtcaggacaacagcactgttcataatttattttctccagttaaccaacaattggagagcccaacccagtgcatctctacgactggtcctcaaattttatcttcacctatcagaattaaatctacacttcagcacaataatcaagcctctgttggcgatcttagtggacctcttggtcaaggaaactttggacgtggaatacaaaccctccacccacgctcattgccagagcatcacaaccgcatttgtaataactctaagtccatgacagtaagtggtaggaatgctagctctagacaagacggagtggatcacaatatccaaaaagtgggccctgctggtttttgcggtcattcttttgatcaaaataatgaagcatttggctttactgaaattggaagttgcccccttcatggatatcactacacctggaaccacacaaatgtttttccacaaagtccctcagccccaatactgtggtcgaacttgcagcacccaatgcacgtgcatagttatcctggtgtgccgcctcacatgctgaacacaggttcttatcccatggaccagcatcacttgggttcagctcctgacaatggaggcagttttggaaatgtgcactctgttcatccaggatctctcggaagcataggtttgcatggtagccctcagttatatccatcagaattatctgcctttgcatccagcagaggaaattttagggaggccttgttctccccagttggcggtggatttcaatcccttcagcaaatgtgcaatgcaatcaatggtcggaatcctatgatccatgtttccacttcatacgatgctactaatgatcggatgaggagtcgcagacatgatggaaatcctgcacagtctgaaaacaaacggcaatttgagcttgacattgatcgcatagcaaagggtgaagattcacgcaccaccctgatgatcaagaacataccaaacaagtacaactgtaagctgcttttggctgtcattgatgagaaccaccgtggaacctacgatttcatctatctcccaattgattttaagaacaaatgtaatgtggggtatgcttttatcaatatgactgatccgcagcacataatcccattctataagacatttaatggcaagaaatgggagaaattcaatagtgaaaaggtggcgtcgctcgcatacgcccggattcaaggaaggagtgctttgattgctcattttcagaattctagcctgatgaatgaagacaaatggtgtcgacctatgcttttccacaaagatggtccaaatgcaggagatcaggagccttttcctgtggggaacaatgtccggtctagggctgggagaaataggtcgctcatcagcttggacactaaagatgcaagtccatcaagctccccagaccaagaaagcaattctgtcggcaccgcgaactcaacttgccgtacgaccttggagcaaacctaatcactaactggagggcacaagaagctgtaatgataaactagggaattcccagttttgctaagtatttatttgactatcagggagccaaagtttgtgacctgtgagtgtaatgatgagtgaaaggctctgccaggcaaggcatcacctccactaaaattatgagagggatcatcagttttgccctgtgtatggatggagctgtgaactggttggtattgtaacggtactactacttcagtagagcaacaagtgtgtgcgtgtgaatgtgattgactctctgagagatgagaactggaagctgtacagttgatgagttgagtagtcgagtctttggttgagattgaccaccg

SEQ ID NO: 23924 - DNA, 1174 bp, Oryza sativa
  ref <308>: DATABASE ACCESSION NUMBER: AK074005
  ref <309>: DATABASE ENTRY DATE: 2001-12-06
gggtcggtgagccgctgccgccgtgctccttgctagatttggcctgaggctgccaccgcctgtgacgggcggcgcagctcgatcgagccaccaccggcggctaatctgcacacccttctcaccgatatgggcattgggaggcaatggcggtagctcgaaggtggcaatggtggctcaagcttgacggcggcaaactcatgcctctcgtatctctggcgacatccaacgatgacgtgaagctgattgggagcgcatgcaacgaatcatgccatgcgtggacgaagattgaaaccgctcctcttggtccaatgcgatacactgacagaatctacaatgagcatgaggcactgcggatgcgcaactctgtaaacattctttcagtgaagatactaagctcagatgtaggcttcccgattaatgtttatggcactgtaattgctagagacagcctcgatgagaagtgcatttatctcttccgtcgccctagagatgattgccaactcatcaactcaaaggacgattcgttgatcttgactggcccaactcgaggactcgtgttacaagacgctgtatattttgaggttgatctcagaattaaggatgaccgattaagagggaagaaaaaagagcatagcaagggattgcttatgattgatggcatccgaagaacaataaaggtcaaaactgaggtcgaaaatgacacttttgtcggtaagctcggcaccgtggagttgagatatgcagttattaaagacgcagtggaggctactgttgaaatcaaggttgtggagggatatttctgtggagaagtcgcagcttgcaccaccaacattcaagataaagttgttcttcttgatagcagaacatgctgtgtgatggccgacaatcttgatgtccagttatctcgacgtgtcatggctgtccacaacaaggagaagcttctgttgaccgttgttaatcaggatgacgaagttccaactggctgtgttacgcaaaccattgattttactccaaaattcaatggttcagatgtgactgaagttacttgtggtagtgttaagatgcttgtgaaggttacttggtctcttatggtctgatgacaaatgaggcgcagtacaccgtacttgtgaagcctgtggcgccttacttaatcatatattgttaataatgcaat

SEQ ID NO: 23925 - DNA, 550 bp, Oryza sativa; identical to SEQ ID NO: 23731
  ref <308>: DATABASE ACCESSION NUMBER: AK099390
  ref <309>: DATABASE ENTRY DATE: 2002-08-28

SEQ ID NO: 23926 - DNA, 794 bp, Oryza sativa
  ref <308>: DATABASE ACCESSION NUMBER: AK074006
  ref <309>: DATABASE ENTRY DATE: 2001-12-06
gagcctgagctgatcgctggagtagacggtcaggggtggcaccgtgcgtgagctggtccctggagttgccactcggggggcagttcgctttgtccgctcgctctgttcttgcttactgctgcttcggtgtcttctgagcctcctgacagtatgccatccctcggtgtgtcttccatcggtgtgtcctctgtgtcgctgttgaacgctgtggctagccattgccagctgccgttggtttcatacctgtgggaaatggggagtgatggtgttcttcttgctggagtggagcttgtgcttgtgagcggggaacattcaggccagagagggtgtcgcttcttttggtgtgttgcattcgagccgtacgagacagcacacgaacctgctgctagggaggctgtcaggttccttcagtccatttatggatttgttgttcatgactacaatttcagatatatggtgtcttacagagagatagccgcgtctgcgattgatttggcgatagctgcttcaacctgtttagctcatatgagagcaccacatgacctccactgttttaggtttgagtcgctctttagagagttctgctcagtgtggtttgcttttgtggcagaagagcacaaccttaatcattttggttggatgtaggtggtttttaggttgttttcggctactatcgttttctgagatttggtgtttgttccgggttgccctttgcattgcccttgtgtaataggattgtttgtgttgctgttaaattatttgtcgggttactgtatctcatttattctacttcc

SEQ ID NO: 23927 - DNA, 3522 bp, Oryza sativa
  ref <308>: DATABASE ACCESSION NUMBER: AK074007
  ref <309>: DATABASE ENTRY DATE: 2001-12-06
ggccgccgccgcctcctcctcctctacactgcttcttcctctctcactcgcactcccccacttttcccaacccaagaagctaatcctcctccaactccaaggggaaacggaaacctagccgccacgctaagcatctcgtctcgtctcctctccgcggaggaggaagatcccttcctttccctcgccggtgaggtcgccgcccgccacaggggcttgctctccatgcttcccaccaacaagagagccgccggcacggacgacgaccgccccaccgaccccaagagacccaaggtcgcccaaaacgggagcacgaatggagtggtggtgccggagattgacgaggacctgcacagcaggcagctcgccgtctacgggagggagaccatgcgccgcctcttcgcctcccatgtcctcgtctctggcctcaatggcctcggtgcagagattgccaagaaccttgctcttgctggggtcaagtccgtcaccctacatgatgtgaaaaacgttgagatgtgggatttgtatgccaatttctttttatctgaaaatgatattggcaaaaacagggctgctgcttgtgtatccaagctgcaagagctcaacaatgctgttcttgtctctgctctaacagaggaactgaccacagaccacctgtctaaattccaggctgttgttttcaccgatataggtttagacaaggcctacgaatttgatgactactgtcacagccactgccctcctatttccttcatcaaagctgaagtttgtggtctctttggtactgtcttttgtgactttggaccagagtttaccgttcttgatgttgatggtgaagacccacatactggtataattgcatccatcagcaatgacaaccctgcgttggtgtcctgtgtagatgatgaacggcttgagtttcaggacggtgattttgtggttttctctgaggtccatggtatggctgagttaaatgatggaaaaccaaggaaggttaaaaatgcaaggcccattttcattttgcattgaggaagatacaactaaatatgacatgtatataaaaggtggaatcgttacacagatcaaggagccaaagatactacgattcaagtcactaagagatgctatgagagatcctggagatttccttctgagtgacttctctaagtttgaacgttcccccgtgcttcacctagcatttcaagctctggataagtttaagaaagaatatggacgctaccctgctcctggttgtgagcaggatgctcaaagtttccttaagtgtgctgctgatattaacgaagccttaactgatcacaagctggatacaattgatgagaagttattcagacatttcgcaagtggttctcgagctgttttgaaccctatggctgcaatgtttggtggtattgttggtcaagaagttgtgaaggcatgttcaggaaaattccatcctctctaccagttcttctactttgattctgtcgaatccctgccaacgtatccacttgactctgaagacatcaaaccgtcaaacagccgctatgatgctcagatctctgtatttggttccaaacttcagaagaaactggaagaggcaaatacttttgttgtggggtctggtgcccttggatgtgaatttttgaagaaccttgctttaatgggagtgtcttgcagccctaagggaaagctaactataacagatgatgatgtcattgagaaaagtaatttaagccgccaatttctgttccgtgactggaatatcaggcaggcaaagtctactgtggccgctgcagctgccagtgctatcaaccccaacctctgtattgatgctctccagaaccggcttgtccagatacagagaatgtgttccatgacacgttctgggagggtttagatgttgtcatcaatgcgcttgataatgttaatgccaggatgtatatggacatgagatgcctgtacttccagaaggcattgttggagtcaggaacattgggtgcaaagtgcaatacgcaaatggtgattcctcaccttactgaaaattatggggcttcaagagatcctccagagaagcaggcaccaatgtgcacagtccattcttttccgcacaatattgatcattgcttgacttgggcacgctctgagtttgagggtttgctagagaagacaccaggtgaagtaaattcatttctctctaatccggctcaatatgctgctgccatgaggaaggcaggtgatgcccaagctagagaattgctcgagcgtgtttctgaatgtcttggcaaagagcgttgcagtttgtttgaggattgcataagatgggccagactgaaatttgaggactatttctcaaaccgtgtgaagcagctcacatttacctttcctgaagatgctgccactagtacgggtgctcctttctggtctgcccccaagcgcttccctcgcccactgcaattttcagtctctgatccctcccacattcactttattatgtctgcttcaatactgagagctgagtcatttggaattgctataccggactgggcaaagaacacaagtaagctggctgatgcagtaagtgaagttgccgttcctcaatttgagccaaagaaaggggtcagtattgtgacagatgagaaagctactagcctttccagtgcctcagttgatgatgttagtgttattgatgaccttcttgctaagttggaagaatgtgccaagaggttacctccaggattccaaatgaaacctatccaatttgagaaggatgatgacaccaactttcacatggatctgatctctggatttgcaaatatgcgcgcaaggaactacagcattccagaggttgacaaattgaaggctaagttcattgctggaagaatcatcccagctattgcaacttcaacagcgatggcgacaggactggtctgtcttgagctatacaaggttattgctggcgagcaccccattgaagactaccgcaatacatttgcgaacctggcactgccactattctcaatggctgaacctgttccacccaaggtgatgaagcatcaagacatgagctggactgtatgggacagatggtccatcaagggcaatctgactgttgctgagctcctgcaatggttcagcgacaagggccttaccgcttacagcatttcctgtggcacttcgctgctgcacaacaacatgttcgcaagacacaaggagagattgaacaagaaggtggtagacgtggccagagaagtcgccaaggtggatgttcctgaatacaggaagcatttggatcttgtggcggcctgcgaggatgatgatggaaacgacatcgatattcctcttgtctcagtttacttccgatagctggtcaaacctcccctagcagctgagctgatcagaggagaacaaaaaagaagaaaagaaaacatcgctactcttaagattagttcggtcatagactcattaagattagttcacttatagactcgcaaaaaatgaaaaatatgatataagttgcttatttgg

SEQ ID NO: 23928 - DNA, 2599 bp, Oryza sativa
  ref <308>: DATABASE ACCESSION NUMBER: AK074008
  ref <309>: DATABASE ENTRY DATE: 2001-12-06
ggtaggcccgtagcatcacaaattcacaattcacacacaaagcacacagcgccgcacgccaatgcctcctaccatgcttgcatcggtgccgacgaggccgcgctcccatcccttccgccggcggcgaggcgcggcggcggcggctcctcctctgctccctgatcagatcgcggcggcggcggcggcggcagccaagcgacccgcggagtcgtccacctcggcctcctcctgcttccacagcgaggtcatctccgccacctccaccacctgccccacctccctcgccgcagctcagcgcccggagaagcggcctcggtaccaggatgtggacgaggagcagcccgccgcctccgagtgctccgagatcatcggtggcgcgaggccgcgcgccgccgaggtcgaggtctccgagtcgtcgtgcctcgcctccgtcctcgagtcctacctcgcctgccccgagcagctcgccaacgacgccgagacgaccgcctactcctcagcccgcgaggacctcacgctgtcggagaccgaggaggaggaggaggaggaggaggtgcgcagtggtccctgcatctgcaccgattgctcgtttagcccccttcatgagtcgtcctcgtcgtccgacgacgacaacgccgtgccctcccccaccttctccctgttcctcgccttggcggagcagttcgtccccttcacgcatcccaaaacgcccaccgccacggatgtcgctctacaagcgggagaggggaagagatttgaggacttggacaatgaggtgagctacgagcggttccggcggcgcgagcggcgaggggtggtagcccgcgactacattgaggtgtactcctccatgctcggcagctacggccgcgccgtcgtggagcagcgcgttgtcatggtgaactggatcatggagcattcacaagcgatgaagctgcagccagagaccgtgttcatggggatagggctgatggaccgcttcttgacacgtggatatgtaaagggctctaggaacctgcagttgctgggaatcgcctgcaccaccttggcaacccgcattgaagagaatcaaccctataattgcatccttcaaaaagctttcaaagtagggatcaatacttacagccgaagtgaggtcgtcgccatggagtggctggttcaggaggtccttgacttccagtgctttgtcacaacaacccatcatttcctctggttctatctgaaggctgcgaatgcagatgacagagtcgaggacctggcgaagtacttggccttgctctcacttctggaccacaaacatctctccttctggccctccactgtggcagccgcagtggtagcccttgcttgccttgccacaaacaatgagtcatcatgccatttggttatggagactcacatgagaacgaagaatgatgatctgcctgaatgcctaatgagtctcgaatggttgaccaattatgcttcctgatttgaacaaacccaggtgatatgccgacccaatcttctgcccattcccagaaacacagtgtagtacgtacagagtcgcttaggaggaggtgtatatagtacacgtgcactgtagctaattcttcgtgcatagcattagtttgacagcagggtagaaaagagggcaaagaagccggctaaacgtggttgtgatggcaccagacttatagggagcatcgcaaccacgaaattttgctactactgccggcttcagtgactacgactaacctcctgttgtaagctgtcttaaaatcagccttcgttgtgttaagggcaaccaaaggttgagactttgttgttctaatcaaacatcctgtttacaaattgcaactggtgccagaatgaaatttgttctccgggtggtattgcactgcacgaggttcgattctgtgaccctgaaagacgcatactcagatactctgatgctcaggtttcagattctgggatgaataaaatgctactagtagtatcatcttcttctggatctgcaaacagatgttcagttagctgaagatccagagtaccacctcgtttgctcaggatgcaacaggaagggtctgcatccaggtgggctacctgaagtggacgaagcggtcatcttcgtgccgctgctcgagtggcctagtggggaccccggctgcgcccgatgcctcggccactttaaaaactcggatcgcgagagttcctgcacgccataaaaatgaggaaaacgagaaagaagggagggcgttcgcgtacacccccctttcagccccacttgcgcccgcgctctcgttgagccgtctgccttttggggttctagagtgaatagggtcggcacgttagcggcgagccggcgacgggtaatgtggtgtgccaacaactttcagctgctgctgaagtgaagagcaggtggcgatcaaccagtcccggcactgaactactgaacctgaagtggttactccattcatcgacagagatatttaattatttgtcacttttagatgtaatattttaccacataaacctacaaatcataaacatataagtgacaaattatttaacgccacatcgaaaaatggtaaatgcttatttgccccttcccactctc

SEQ ID NO: 23929 - DNA, 822 bp, Oryza sativa
  ref <308>: DATABASE ACCESSION NUMBER: AK074009
  ref <309>: DATABASE ENTRY DATE: 2001-12-06
gagggatttctgaattgtgaggagcaagttgcaaaaatagcttcgtctccgaaggaggaaagggtcctccactcgatgtgcagattcctcatcagtacgcctttctctcggaggagaggggaaaggaaggcggaggcggggaggatggcgcggagcgtgtcgtacgtgtcggcggcgaagctcctggccatggcgcgcagcaacccccgcgtcgccatcatcgacgtcagggacgaggagaggagctaccaggcgcacatcggggggtcgcaccacttctccagccgcagcttcgcggcgcggctgccggagctcgcgcgtgccaccggcgacaaggacaccgtcgtctttcactgcgccctcagcaaggtgcgaggtccatcgtgtgccaagatgttctccgactatctatctgagaccaaggaagaatcaggaacaaagaacatcatggtgctggaacgtgggttcaatggatgggagctttcgggacaacccgtttgccggtgcactgatgccccttgcaaaggcacatgctcacctgaagaacctgagttgtaactctactcgcttcctgaatgatcagcaatgttggcagtcgatctccaatgctgaatttggtctattttgcctcatgagatcattcgtcacagtgtattggactgaaatgccactttgtggacaatttcatcagatatagcataagttaactaccccactgtagtgtcaggcacaccacggggtactgaattattactgattactaaaaactctttacatcttggctgaagaaatgttcagcttcttcatgtgctatgtgttatc

SEQ ID NO: 23930 - DNA, 1007 bp, Oryza sativa
  ref <308>: DATABASE ACCESSION NUMBER: AK074010
  ref <309>: DATABASE ENTRY DATE: 2001-12-06
gagccgcggaaaggcagcgaaagagggcgcgaaaccgtagaggcgggcggcgagcggcggcggcggcggcgcggagatgagctcgtcgacgtccgcccgcgacgacgaggcgccggacctcgtctgccagatcgactgcgtccacggcatggtcgacgcgctctcctgcgtccgctggaagcgccaccaggacgcggtgctggagctgtcggagcacggcatcgtgctcatcgtcgaggagagtggctgcctccaggccaaggtctacctcaagcgtgagctgttcatggaatatgagtacgcggcagaggggcggccgcggtttggcctcagcctggggctcctcgtcgattgcctcaacacgttctcggccccggggcactcctctcctgtcgagatccgctaccctgggcctgatatgcagcttcttctcaagtcagtgggctccccagattcatgtatgtatgcagaaattagaaccaggattccagatacaatctcctgggattaccattttgagcatgctgggaatacaccagtcacttttactgtcaagtctgctgtcctgaaagaatcgatcgaggaccttgagtggccaggttccagcattcagattcaaatgcaaccagaccccccttcggtactattcaaaggtgaaggtcatggtgacttgcagattgagttcccctactatgcaaatacagatcttctcattgcattccaatgtgaccatgaaacatcatacaggtataagtacaaatttcttcgtgcaacaacttcgaatttcccaaacagtattgtgaaggagaatcgtgggagcaaggtgacaattggtaggggtgggatgcttaaaatccagcacctggtttcagttgcaaggccaggtatgcagaacttccgtaatgttgctggaggggctcaacagccaagccgaattgcttatatagagttctttgtaaagccagaggaatatgagataaatgatgcgtagggattgtggtatgact

SEQ ID NO: 23931 - DNA, 2283 bp, Oryza sativa
  ref <308>: DATABASE ACCESSION NUMBER: AK074011
  ref <309>: DATABASE ENTRY DATE: 2001-12-06
ggtagctagcttggtagcctacactagaatggaagcagctgctttgtcgaccgtcctgtgtgtgctcgcacttgtggtagcggatgcagatcatcacgtcgtccatgtccaaggacgacggcatcgtcagtgccaacctttctcctgcggccatctctcaaacataactcatccttttcgccggcgaggcgaccctcgcaggtgcggcgtctcgtcgtacgagctagactgcagcagcgatgatggcaaggccaccattcggatcaacacagggaaatactatgtgagtagcatcgactacactgcttccatcttttgggtcgtcgacgccaacctgcaggatgatgcaaacagcagctgccctcttcctcgctcggaccagctgccttacgttggtctgggtatcccaggatcacacgacagctgggacttgggccttgatgatatgattacttgggtcggctttgtcaattgttcgcaggaactaattacgaacagtagtagcaaataccagcccatgaattgcctgaccacgacttcgtcctacgtttattatatgctcccatcgtttggagcaccatctatccaagacatcgaaccttcttgtggatacttggccatgactcctatcggcggtggcagtaacggtaacagcattaatctgtccgaatatgaagatgttgtaaaatccatgaggggtggatttgccgtcaaatttcctacatatggaggaccttggactacttggtatggtctcatcaaagattgcctcaacgagtctgttagcttagctgatagccatgacaatccattacccagagtaggcatcaaagaccggatcattgacatcctttctattgacctccgtttctggggatgcatgataggcatatccagacggtattacctcgacatgcgtctttccatcagcgacatgatccgcggcgttgatcattctctttaccataagctcttcataatatacaccttgtgtcttgtcaagtggattgctgtgctatgcaggtttgtgttcgcaccgttggtcgtgatgatttttcttactcgcaagtactggaaaacaaggattgcaattgatgcagtcgaaaagttccttcggatgcaagatatgctaggccccaagaggtacgcctacacggacatcatagcaatcacaagccatttcagagacaagctgggccaaggaggatatgggtctgtgtacaagggtgtgtttctcccgggtgatgttcatgtcgccatcaagatgttggatggcaactccaattgcaatggagaagacttcattagtgaagttgccaccataggcaggatccatcacatcaacgtggtgcgtcttgtggggttctgctccgaagaaatgagaagggccttggtttacgaatacatgcctagaggatctctaaacaagtatatcttctcatccgagagaagcttctcttgggacaagctcaatgagattgctctgggcattgctagagggatcaactacctgcatcaggggtgcgagatgcagattctacactttgatatcaagccagacaacatccttcttgatgataactttgttccaaaggttgctgatttcggcctcgcaaaactgtacccaagggagaagagctttgtgtcagatagggctttacggggaacagtaggttatatggctcctgagatggtatcccggagctttggcgttatatctgacaaatccgatgtttatagctttggaatgttgttgcttgagatggctggaggtagaaggaatgcagatccaaatgcaaactcaaatgcaagcagggcatactacccagcatgggtgtatgaccagctgatagcagatcaacaagttgatgagatatccaatgttgctgacatgcatgagctggagaggaagctatgccttgttgggctgtggtgcattcagatgaaatcacacgatcgcctgacgatgagcgaggcaatagagatgctcgaagggggtgtggatgcgctgcaagtgcctccgagaccatttttctgcgatggggatggcattggcaatggcatgccacctccacaagtcatggattcttactttcactcctccgagcttactgcaatttcagaagaggacgatggaatatctgaattagccagtagctaggctgtgatgacaatgatgaatctagctagcaattagcgttcataaataatggttgttattattccatattcatcgatccaacaattgatatttactaatgcttaaaattttttccgtgtatg

SEQ ID NO: 23932 - DNA, 1102 bp, Oryza sativa
  ref <308>: DATABASE ACCESSION NUMBER: AK074012
  ref <309>: DATABASE ENTRY DATE: 2001-12-06
ggcgagagagagaccattcccccccgtctcggcctcggaagtcgcgcgcacccccaaaccctagccgcgcctccacctcccgattcgccgccttttcgttccaggtgtgtgttgattagtagaagagaagcggcggctgcgacgaggcggaatcgaccatggcgacccgtattcagtttgagaacaattgtgaagttggtgttttctccaagttgacaaatgcctattgtcttgttgcaattggaggatcagagaacttctacagtgcctttgaatctgagctcgcagatgttattcctgttgtcaagacctccataggtggtactagaataattggtcgtctctgtgtcggaaacaagaatggacttctcttgcctcacactaccaccgatcaagagcttcagcatctgaggaactgcttgcctgatcaagtggttgttcagcgtattgatgaaaggctatctgcgcttggcaattgtgtagcttgcaatgaccatgtcgcgcttacacaccctgacctcgacaaggccactgaggaacttattgcagatgtgcttggggttgaggtgttccggcagacaattgcaggaaacatccttgtgggaagctactgtgcgattacaaacaggggtggcctagtccatcctcatacatccattgaagatcttgatgagctgtccacgctcctgcaagtccctcttgttgctggaaccgtgaaccgaggcagcgaggtcattgctgcgggcatgacagtgaatgactggactgctttctgtggctcagacactacggctactgagctatcggtcattgagagcgtcttcaagctgagagaagggcagcctgccgcgattgttgatgacatgaggaagtctttgatcgacagttatgtgtaaaagaccaaagttagtgaatgtgtggttgtgggagtattaactgtgctaaaatcgacacaaactgtactcgtgtaatcagtagcagaaacataccgtcctggtggtgaatttctgtcttctgaattacagacttatcttttacctttgtctccttgaagcctacaatatattttgcagcttaagatttattgattgagcaacacagc

SEQ ID NO: 23933 - DNA, 1706 bp, Oryza sativa
  ref <308>: DATABASE ACCESSION NUMBER: AK074013
  ref <309>: DATABASE ENTRY DATE: 2001-12-06
gggaagtgcgaagcttaacggaccaagcgagagcgagagcgagagagatgatggtgctgttgttgctgatggcgctggtttactgctcctgaggggtagggagggaggggaaggagcacgttcgcttgtggagcggttgggtgggtggtgattcttcttggcgcagccggccaggtgaaaacggccgcccaccggctttgctctgtagtgtccgctgctgattgctgaggctcccgctgctccgttcttcgccggtggtgttcttgatttcgtcggggggaaagattccaggttaacaggcgtggatttgattggggggaaatcttgggatatcgagcgcaaagatgcggatttgatgcatcgttttttcctcacttcttttcagccgtcagtcggagcaagcagatgttttgaatccagattccaaccgaggggaacagcctgctcggagtgtgcgtgtgacggtgtgagtgataagtagggcggttgcgcacgaggtgttcgtcagaaagccgcaaaggagaaggtgggcgtgcaacttgcaaccgtcgccatcgtcacgatgagagactttgcatcttgcttaagtcaaagcggcgtccaggtcgcccattcctcttctccaggtggccagaacatggtgcagtgcacctacctagcccgcctccgtggcaaatcttgcagcgtgaccgtcacctggagcaagatgaccatggggcaggctctgtccgtcgcagtcgacgactcctcgaatcgttgcctttgcaaggcagagataaagccatggctgttctccaagaggaaaggttccaaggccatggaggtcgatggtggagcactggatatcgtctgggacctgtcctctgcgaagtttgcggccgggccagaacccgtcgaaggcttctatgttgccctggtctgtgatcttgaagctgttcttgtgctcggcgacatgcgcaaggatggggatcacagggtttcgtcagatgtattggcctccaatgctgtcatgatagccaggaaggaacatgtttatgggaagaaggtgtattcagcgaaggcccggtttttggacattggtcagctccaccatatcacgatagagtgtgacacatcggggttgaaggatccaagcctagaaatcaggattggcaagaagagagtcatgcaggtgaagagacttgcatggaagttcaggggaaaccagacagtctatgttgatggacttccagtagaggtcctatgggatgttcatgactggctatttggttcatcgaataaatgtgccgtgttcttgtttcagtcaggccaatccatggaaaaattgctgtcaaggtcatgctctcagaatgaaaaggagcttcaagcgcatcgttttggcttcactttgatacttaatgcatggaagaccgaataggcagaaacatgatgacaagtttcttcggccattctaccgtaaattaatgaatcctaacagtaagaatatgcaagcctgacaaaaccttgtgcaaggatttcatgcttcttaactattgtgttctagtgatgattagcaagttgagaatttgagtacccatataattttttctagataggtagttagacagaatgtcagattctagtgccccatttgtattatcatgtctttgacatatacattctgatcacaaatccaagaagcaaagcaaaaaaatgatgcttttccg

SEQ ID NO: 23934 - DNA, 1507 bp, Oryza sativa
  ref <308>: DATABASE ACCESSION NUMBER: AK074014
  ref <309>: DATABASE ENTRY DATE: 2001-12-06
gggcttctctctctctctctctcggtctcccacctcctcatcccgctcgcccgctcgccgacacggcgcaaatccaagaaccccccacgccgtgcgtggacacctcgcctcgcctcgtcctcgcccatctctctccttttgcccgcatccgcggcctcgcctcgtagtccccgccgcatctcgccattccgctacgcgcccaagctactgctagtagtactatctgctcccccgtgcgtggtcgggtcaggtgggtcggccgcgagatcccgccatggaggtcaggacagtaaaagttagcaacatttcattgaatgcttcaaaaagggagatcacagagttcttctctttctctggagatatagaatatgttgagatgcaaagtgaatctgaaaggtcacagcttgcttatgttacatttaaggactcacaaggagcagatactgctgtgcttctctcaggggcaacaattgttgaccgttctgtcgtcataactccagttgtgaactatcaactgcctcctgatgcacgcaaacaatccgcaggagagaaatcttcctctgctgaatctgtagtcaggaaggcagaggatgttgtgagcagcatgttggcaaagggctttgtcctcagcaaggatgctctgaacgtagcaagatcttttgacgagcgtcacaacatactgtccaatgctacagctactgtcgcatctctagaccgccagtatggcgtgagtgaaaagatcagtttgggccgtgcaattgttggtagcaaggtcaaggaggtggatgatcgttatcaggtgtcagaactcacaaagtccgctttagcggctgcggagcagaaagccagcattgcaagctctgctatcatgaataaccagtatgtctcagctggtgcttcctggttaacaagcgcatttggcatggtaaccaaggcggcaggtgacatgagctccatgaccaaagataaggtagacagggccgaagaggagaggaaagcgatcatgtgggaagagaggaatgggcttgtaagtgattatgccaagatccatcttgatgaaccctcttcatgggagcctgcagttcttccgttggaatctgtggatgagcagaagctccaggctgtgtgatctgcacaatccaatggtggtcgtttctctgcacgtcattcttttgttcatgtccaatatagaagattgtttttcaccgctgcacggtagcaaaaatattgagcttattgcctatagtatgatgtaaattttagaaattccccatgtgttttcttccagctttgttatagaccactgaaaggcttacttgttcagtgttagacatggaaatgaaagttgttccagacttccaggcatacctcttgttatggtagaacatgtttctgtgagttatctcagaactatttgtgctctgatattctgaagctacatgtgtaaggcccaaatctgggaaataatcaaggtcaaaatgaaatgcagacaatatttcctaatcct

SEQ ID NO: 23935 - DNA, 3305 bp, Oryza sativa
  ref <308>: DATABASE ACCESSION NUMBER: AK074015
  ref <309>: DATABASE ENTRY DATE: 2001-12-06
gggtttggtttggcttggcttggcggctggttctgctgaggctgacgtggcggcgggtggggcccatctcatggctgctgcctctgtggcggcgaggagcggcggcggcggggttaggattccggcgaggaggggcggcgggctccgcgcgaagcaggccgggcgcgccagcttccgcggcggctaagagaggaggaggagaaagagaaagcagggttctttgctgcttttggtcttccctttcttttcttcttcttcttcttctttatttactcctcctgggaggaagggagggagcttagctagggtttccgaggaggaggatggccgtcggtgatgcgctgcggcggctgtgcgaggaggcccggtggtcgtacgccgtcttctggaaggccatcggcgccgccgaccccgtgcatttggtgtgggaggatggcttctgcggccacgcatcgtgctctgctggatctgaggcttctgaggctgggtgcgagtccggcggcgccgtctgcacgcttgttaggaagatcatggcctcgcaggttcatgttgttggagaaggtaccattggccgtgctgcattcactgggaatcatcaatggattgtccatgaaactgccaatgatcacgggctcagatccgaggttgctgctgagatgaacaatcagttcagagctggcattaagaccattgcaattatacctgtgttaccacgtggtgtgctgcagctaggctctactagtgtgattctggaaaacataagctctgtgcaacaatataagaagctgtgctgtcagctaaacaaccggtcgagtatggtcgcatctgcttcagccaaaaatgatttgagccagaaagttcagtcacgatctttacatggtctcccaagtatacacccttatgaacagtgctatggtcatgatgcccgagccttgtcaagtagcacatcagcaaacacgggcaggaacacttccttacttaaggttgcacagagaaatgatcaagccattagagagcaagtcttatatgctcctgatatgaggttcagacagcagctcccttatagtgacaggagagttgatattaacacacacagtagtgctatgagctcaggttttatctcgtctatctcagcatcagtggaaaagtatccattgttgacgaacaacattggacaagtagaacacgggaacatggaagagtcatcagggcccagaaatgttctgttaaaatccctttcatgccggaaccctgttgtccatgaaaatactaacacgagtctatttcatggaggggatgaggtgcgggcttttctgaatagtcatgggagttttgattttctccaagcaggtcctagagtagttgaggctaacttgtataacaatggtacgtctagtcaagttttagaccaaagatgcagttccacttctgggatggcagggtataaaccatctgtttcatataaattcccccactctgctcaattcattgtgaaaatggagaatcccagaagacaatcatttcaagaccccgcagctccatcctctggttctgatgtccaagtttcgagtggtttgaaaacaaccactcgtcagtttaacccagagcatatgtgccaaaacaagaagacaaatgaagtcaatgactccagtgctgctgtaagcacgcaggatgtgaaaaatatggaccgacacaagatcctagacatttctaatgagagaacctcctcatttgttatggatcctagtacagaaaatgatttgtttgatatatttggtactgattttcatcaattgcaccgcagtttggatggtgacctctcctggaacactgcaaagcctcagagttcagacagagatgcacctgaatcctcaatttatcttgacagttcaccagccttcggtgcacaggaggatgaattttcttattctgggattttttcgctcactgatactgaccaactattggatgcggttatctcgaatgttaatcctggtggcaagcagatctctggtgacagtgcctcgtgcaagacttcgttgacagacattcctagcacttcttactgtggctcaaaagaaacgaagcaatgcaagtcatctggtgctccacctttgctaatcaagaatgagttggcagtttcaaattttgtcaaacaaccatgtttcctagaaaaggctgaagatggttgtctttcccaaaacaatggagtgcagaaatctcagatacgcctctggattgagagtggacagaacatgaaatgtgaaagcgtgtctgcctcaaacagcaaaggtctggatacagcaaacaaggcaaatcggaagagatctagaccaggagagagtcctaagccacggccaaaggaccgccagcttattcaagatcgtataaaggagctgcgggaactagtacctaatggggcaaagtgtagcattgatgcattattggaaaagaccattaagcacatggttttcttgcaaagtgtgacgaagcatgcagacaacctcaaggattctaacgaatcaaagatacatggtggtggtgagaatggcccgcttctgaaagattactttgaaggtggtgctacttgggcttttgatgttggcagtcaatctatgacatgcccaatcattgttgaagatcttgatcggcctcgtcagatgcttgtggagatgctctgtgaggatagagggatcttcttggagatagctgacttcatcaaaggacttggattaactatcttgaggggtgtgatggaagcacgcaaaaataaaatctgggctcgcttcaccgttgaggccaacagggatgtgactagaatggaaatcttcctctcgcttatgcgcttgttggaaccgagctgtgatggcggcggaggaggcgtgggagataatcctaacaatgtaaaaatacctcctgggattgtgcaacatccggttataccagcaacaggccatcttaggtgagaaaacgagtaggggaaacattatcagaggcatctgaatctctgaacttctgaagtgctaagagtgggagcttcagttcactctcctgccatgactagcattgtcagtgtgcactaagagctggatccttgtcgaaaatacagtgctcttcctgttcagtaggcaacacacccgtagaaagaaaagcctgacggtagatgatgatgcatcgagacatggacaatcagtcagaatgatccttgggccatgttttgcttgtataatcttgtttcagtttgctactgatgtgtttgttggcgttattagtgaattttgtcttgttgatgatctactgaatgc

SEQ ID NO: 23936 - DNA, 2946 bp, Oryza sativa
  ref <308>: DATABASE ACCESSION NUMBER: AK074016
  ref <309>: DATABASE ENTRY DATE: 2001-12-06
ggtcgttccggcgctaagcacatgcatctccccgtcttcctcgacgacccgcgccgcctcctctcctcctccgccgccgcctccgcctccgcccggaccctcgcccgcctccacgccctcctcatcgtctcctcctccgcctcccacaccctcatctcctcgctcgccgccgcctacgcccgcgctggcgacctcgccgccgcggagtccaccctcaccgcaaccgccgcctcatcctccatcgccgcgtggaacgccatcatcgccgcgcactcccgccgcggctccccggcatccgcgctccgcgtcttccgcgcgctcccgcccgccgcgcgccccgacagcaccaccttcacgctcgcgctctccgcgtgcgcgcgcctcggggaccttcgcggcggggagtccgtcagggaccgcgcgttcgacgccgggtacaaggacgacgtcttcgtctgctcgtcgctgctccacctctacgcgagatggggcgccatgggcgacgcggtcaaggtgttcgtccgaatgccgaggagggaccgcgtcacctggagcaccatggttgctggtttcgtgagtgctggacagccactggatgcgattcagatgtacaggaggatgagggaggatggtgtgaagggagatgaggtggtcatgattggggttatacaagcgtgcacagcagccagaaatgtccgaatgggagcttcagttcatgggcatctcttacggcatggaatgaggatggatgttgttactgcaacaagcctcgtggatatgtatgcaaagaatggactacttgatgtggcgtgccgagtttttggtctgatggtgcaccggaatgatgtctcatggagcgcgatgatctcaggttttgcacagaatgggcaatcggatgaggcacttcggttgttcagaaatatgcaggcttctggtattcagcctgactcaggagcacttgttagtgctctgctagcttgctcaaatattggattcttgaagctagggaggtcagtacatggtttcatcgtgaggaggtttgattttaattgtatcctcggtacagcagccattgatatgtactcaaaatgcggctccctagcaagtgcacagatgcttttcaacatgatcagtgatagagacttgatcttgtggaatgccatgattgcgtgttgtggtgctcatggacgaggccaggatgcgctcactttgttccaagaaatgaacgaaactggaatgagaccagatcatgccacatttgcttctcttttgtctgctctaagccattctggtcttgtggaggaagggaaactatggtttggtcgcatggttaatcacttcaagatcacacctgctgagaaacactatgtctgtctagttgatcttttagcacgttccggtcttgtggaagaagccagtgacctgctcacatcaatgaaagctgagccaaccgttgccatttgggttgctctactttcaggctgtctgaataacaagaagctggagcttggagaaagtatagcagacaatatccttgaattgcaacctgacgatgttggcgttcttgcgttggtctcaaatctctatgctgctacaaagaaatgggacaaagtcagacaagttagaaagctaatgaaagattctggaagcaagaagatgcctggctgtagctcaatagagatacgcggaacacgccacgtgttcgtgatggaagaccagagccatcctcagcgtgaagagatcgtaagtaaggtggcaaagcttgatttagagatgaggaagatgggctacattccgagaacagagtttgtgtaccacgatctggaggaggaagtgaaggaacagcagctcagctaccacagcgagaggctggccatcgccttcggtttgctgaacacaggcccaggaacaaggcttgtgatcataaagaacctcagggtctgtggtgattgccatgatgccatcaagtacatctcgaagatcgcggaccgggagatcgtagtgcgagacgccaaacgcttccaccatttcaaagacggagtctgctcctgcagagattactggtgatgaaggctaccgagaaccagcatggcaagaggatgcgtgttgctgtatgtatacccaactgatccccctaggcggggaccatcagaagaagttcagccacgcaaggcggccacgtccgtccgtccgtcacgggggacccggcggcgtggtagtggtgcggtgcccgtcgccttcgccattcccggccgcgggcgtcatctgtcgcggcgaaaacgacccgggaggtggcggcaaaggcttttgcttcctacccgctggggcgcgcgcgtcgccgtgatcggtacgaatctcgcggggggaagtggtggtggcccagacagatcgtgataacgttggactttgcgcgcaggtcgcgttggttggagtggtttgcggtctaggacacttgcttttttccccagtaggatgatcacccaagaccgctgcactgcacctgccccatgtgggagcagcatccagcatggccagttcgcaacgctacaccgggaggaagcaaaaaggtttcttcgccgttgacttattacgggtgtggccagaagaaattcggcgtttggtttgctgtgcatatgtgtgagccatggtagttacatgctgtttctgtttccactggtatagtggtattgcccgtttcggtcccaggtgagtctgaactctgaagaccattttatctttcacaagattctgtaataatctggttggtggatgaaggcagtgttttcataaaagattcattaatttcgtggtgggatttagtgtgtccagtgtaatcatacagggttcatctcactgtctgccaacctttgtgttctaatttgaaaagaaacgaattgatattaggttttttttttccttaacaaaaaagtaccgaattggttgtcc

SEQ ID NO: 23937 - DNA, 2009 bp, Oryza sativa
  ref <308>: DATABASE ACCESSION NUMBER: AK074017
  ref <309>: DATABASE ENTRY DATE: 2001-12-06
gagagtactcgagtatcttccccgttccttcccttggcgtaagagaacgagaaatctcccatctctcagtcgtctcccccgcttccttgcgccaagacgagtcgcggctgagcaggagaggggcgccgatctccatccggcgagcagagcaggggaggggatcctggtatagattgttgattgcttgtgcgtgaacacaactaaagcagtaattcttaccgtgtcagcgtgatctgggactgtggccaattgtaccataagtggaaacacagctgcgaagattgtcggtggtcttcgctgataatatattgggcaggctaagtttcaagttcagtttgctgaattcagcgagcctagatgtcgtttcgcagcattgttcgtgatgttagggatagttttggtagcctgtcgaggcgaagctttgaggtcaccctggctggtctatcggggcttaccggccaccatagaggcaagtctcagagtacggttcacgagctccgtgatgcagatctcataatccaggagagtcgttgggctagcctccctcctgagctcctccgcgatgtgatccggaggctggaggctagtgagagcacctggccgtcacgcaaggatgtcgtgtcctgtgctgccgtctgtaaggcatggagggagatgtgtaaagagattgtgctgagcccggagttttgcgggaagcttaccttcccgctctctctctaaagcagcctggccctcgagatggaatgattcaatgtttcataaagcgggataaatctaaatcaacttatcatctctacttgtgcctgagtactgctgtacttgcggatagtggcaagttcctcttgtccgctaaaaggcaccgcaaaacaacctgcacagaatatgttatctcaatggatgcagacaacatttcaagatcaagcagcacctatattggaaaactaaggtcaaacttccttggcacaaaatttataatctatgacacacagccctcttataatggggctgtaatccctcctgttggacggagcagccgaagattcaactccaagaaagtgtctcctaagatgccgtctggtagttataacatagctcaggtgacatatgagcttaatgttcttggcaccaggggccctaggcggatgcactgtgtcatgcactccatacctgcctcctcagtcgagcctggtggcattgtccctggccagcccgagcagattgttccccgagctttcgaggagtcatttcgcagcaccacctccttttctaagtcatccatcatggatcggtccatggatttcagtagttcccgtgatttcagcagtgctcgcttttcagacattgctggaggcaccataaatggtgatgaagaggggcaaaataaggagaggccactagtgcttcgcaacaaggcccctaggtggcatgagcagctccaatgctggtgccttaatttccgtgggcgtgtaaccattgcgtcggtaaagaatttccagttgattgctgcaccagcacagcctcccgcagggggctccaactccgtcacaacctgctccaccagagcaggacaagattattctacagtttggtaaggtagcaaaagatatgttcacaatggattaccgctatccgctctcagctttccaggcatttgcaatatgtttaagtagcttcgacacaaaactggcctgcgaatgagggaaacagtgagctctaatggaggcagaactggaaatgcaacagagagcaacttgagaaatgtaatgcccaagggctctagatcatgtttgcattttgttgtgtcgtcttggctgtatttctgcttgtagcctggaactggatttctcagcctgtatgtttcacctggtagcaccatgataggtttcctttgggacagcggttcatgcattgcatttttccatttgtgtggtgtacatgcggttccggatttaagctgaaaggatccgttcatgtctttgttaagctttgcatggatgccgtgttctggt

SEQ ID NO: 23938 - DNA, 797 bp, Oryza sativa
  ref <308>: DATABASE ACCESSION NUMBER: AK074018
  ref <309>: DATABASE ENTRY DATE: 2001-12-06
aatgtccaaatcggcgccggaaatcccttcaaatcccccccgaattccgctccatttcaccctcacgtttcccggagatggacgtcggcgtcggcggcaaggcggcgaagaaggcggtggggcggaagctgggcgggccgaagaagaagccggtgtcgcgctccgtcaaggccgggctccagttccccgtcggccgcatcggccgctacctcaagaagggccgctacgcccagcgcgtcggcaccggcgcccccgtctacctcgccgccgtcctcgagtacctcgccgcagaggtgctggagctcgccgggaacgcggcgcgggacaacaagaagaaccggatcatcccgaggcacgtgctgctggcgatccgcaacgacgaggagctcgggaagctgctcgccggggtcaccatcgcgcacggcggcgtgctgccgaacatcaacccggtgctgctcccgaagaagaccgcggagaaggccgacaagccggccaaggcgtccaaggacaaagccgccaagtcccccaagaagcaggcgcgctcctagcttcatgtccttccattcattggtcactgtatatgcagtacttagtttgttcgattcgagattagttcgtatcactaggcatttaactggatgttttcgattttagcttgcaagacactagggtagttctaatgagaagatgaagtgtctcgctttgtcttctggatcccatgtgcttcaatatgtggtttctcaattgaaatttgtttgtgttcagtaagtttaatagcctgattgtgaatctgatct

SEQ ID NO: 23939 - DNA, 811 bp, Oryza sativa
  ref <308>: DATABASE ACCESSION NUMBER: AK074019
  ref <309>: DATABASE ENTRY DATE: 2001-12-06
gggcgctctgcaacgccaccgctcccccgctcgtcgccggcgccgccgccggaggagaagccgacgagatcggcgacgcgcgcaaccatcccgccggtctcccgcgaccccggatctctccaacatgtctactgtcaagggacagaccaggagggagaggcctagaggagctcgccctcatggattgacgaagcagaagaggcaggaaataaaggaggcgtttgatctgttcgacacagataactctggaaccattgatgccaaagagttgaatgttgccatgagagccttgggatttgagatgacagaagaacaaattaaccagatgattgctgatgtggacaaagatggtagtggatccatagattatgaggagtttgagcatatgatgactgctaagattggagagagagacagtaaagaagaacttacgaaagcattcagtattatcgaccaagataaaaatgggaagatatcagatgttgatattcagcgaattgccaaggaattaggtgaaaacttcacttatcaagagattcaagaaatggtgcaagaggcagatcgaaatggtgatggtgagatagattttgatgagttcattaggatgatgaggaggactggatatggttactagatggatggacaggatggtgcagcgagtgtatgatcttgtgcagttgttttatgaccaccaccgtgtctctccctaatgtatttaccgctgtagtttactctgaacaagaacaaccatgctgtgtactgtgtactttaactatggtaacatatttatgcacatgttttctattcgacg

SEQ ID NO: 23940 - DNA, 3312 bp, Oryza sativa
  ref <308>: DATABASE ACCESSION NUMBER: AK074020
  ref <309>: DATABASE ENTRY DATE: 2001-12-06
ggggagtgtggagtctctgataataagtgtcgatttttgttgttccgggagaaattccgggagatttggggcggcggcggcgatgaggattcggggagacggcggaggtgatgaggaggaggcggcgatggcggtggtgtcggcgccgccgcagcatctggtcttcgcgtactacatcaccggccatggcttcggccacgccacccgcgcgctcgaggtggtgaggcacctgatcgcggcggggcacgacgtgcacgtggtcaccggcgcgccggagttcgtcttcaccaccgagatcagctcgcccaacctccacatccgcaaggtgctcctcgactgcggcgccgtccaggccgacgccctcaccgtcgatcgcctcgcctccctcgagaagtatcatcagacggccgtgattgccacgcgaatcgattctgaggactgaggtggaatggctcaacacgatcaaggccgacctagtggtttcagatgtcgtccccgtcgcgtgcagggcggctgcggatgctggcattcgatcggtgtgcgtcaccaatttcagctgggacttcatttatgcagagtatgtcgtagtagctggacatcatcatcgctcaattgtgtggcagatagcagaagattattcacattgtgaattcttactacgactccctggatactgccctatgcctgctttccgtgatgtcattgatgttcctcttgtggtgagaagattgcataaatctagatctgaggtgaggaaggaattaggaattaaagatgatgttaaggtggtcattttcaactttggaggacagcctgcaggatggaaactgaagaaagaatggctgcctgatggttggctctgtttggtatgtggtgcatctgaaactcaagagcttccaccaaatttcattaaacttgcaaaggacgcctatacacctgatttgatggcagcatctgactgcatgcttgggaaaattggatatggcactgtgagtgaggctttggcttacaagctgccatttgtatttgttcgtagagattatttcaatgaagagccgtttttgaggaatatgcttgagcattatcaatgtggcgttgagatggtacggaaggatttacttactggacactggaaaccttatctgcaacgtgctatgacacttcatccatgctatgatggtccaataaatggtggtgaggtggctgcacatatcctccaggacactgctgttggcaagaagtatatttctggcaagttgagcggagcaagacgtttgcgtgatgccatagtgctaggatatcaactacaaagggctccagggagagatgtcggaattcctgactggtattctgtgtctgagaaagaaatcggtgttcgtccagcaccaacatatcatgaggttaatggaagtgcagagtcatcttttgaggacttcgagatactccatggggacatacaaggattaactgatacaatggcatttttaactagtttatcaggacttgttggaaatgatccaaggagccctgagaagcaatctcgagagagggttgctgcttctgttttctttgattgggaggaggaaatatatgttgcaagagcacctggacgtttagatgtcatgggtggcatcgcagattattcaggaagtcttgtattacagatgcccattcgagaggcttgtcatgttgctattcagagaagtaatcctatgaagcagaagctatggaagcatacacaagctaggcaactagcaaatggcagagcagtgccgttgttacaaattgtatcatttggttctgaattgagtaatcgtgcaccaacctttgatatggacctgtctgattttatggatggtgacaaaccaatatcctatgataaggccaaagaatatttctctcaggacccatcccaaaaatgggctgcatatgttgctggaacaatccttgtgttgatgaccgagctaggtgtggtcttcacagacagcatgagcattctggtttcttcatcagttcctgaaggtaaaggtgtctcctcttctgcatcagtggaggttgccagtatgtctgctattgctgctgcctatggtctaaatatccctccacgggatcttgccatactctgccaaaaggttgagaatcgcattgttggagcaccttgtggtgtaatggatcaaatgacatctgcttgtggagaagctaacaaacttcttgcaatgatttgtcagcctgcagaagtgaaagagttggtcagcattccaactcacattcgattttggggtcttgactctgggatacgacatagtgttggtgggactgattatggctctgtaagggtaggcacttacatgggacgcaagatgatcaagtgtgctgcatctgatcttctttcagaatcattaccctcctgtcctcctattcaatcaggcaacacaaattctgatgaatacgaagaacatggtgtagatcttttgaaatctgaagcgtcgctggagtatttatgcaacctaccacctcatagatatgaagctgtttacgcgagagatattccagagatcataaccggggatgcatttttggagaagtatggagatcataatgatgcagtaacaactgttgacccaaaacgatcttactgtgtgaaggctcctactagacatcctatatacgagaacttccgagttgaggccttcaaagcattgctaacagcagccaaaacagttgagcaactttcggcccttggagaattgatgtatcagtgccactacagctacaatgcttgtgggcttggttctgatggaaccgacaggcttgttaatatggtacaagaagtccagcacaggaagacctcacaggatggtggtcctagtttatttggtgcaaagataactggtggaggatctgggggctcggtttgtgtcattgggaaaaattgcttgaaaagcagtgaagagatttttgagattcagaagagatacaaagctgctaccgggtacctaccaattgttttcgagggctcatctccaggtgcaggcaagtttggatacctgaagattcgacggcgatccacatagccatcaatcagcctaactgaagatttggctgtattttaggtccacacaaacatttgtcaggaacctgaatattacctgttcatatggaacacatatcacatcatcccattatgtagtagtaataagctctctagttcatgcaataattctagtgattagtgcacctctggtgcagacttccattgtgtaagtgcagtatccagataataaaatggaagtctttagattgatgttctgc

SEQ ID NO: 23941 - DNA, 1910 bp, Oryza sativa
  ref <308>: DATABASE ACCESSION NUMBER: AK074021
  ref <309>: DATABASE ENTRY DATE: 2001-12-06
ggagagagagagattgagagagcgctgcagccgccacctattctcgccttggccatgggaggatcacgattcacgagctggagctggagctcgagcagtcaacagaagaagggaggaaaggaatcctccctcaccccacccgagcaggtattgggctcggaatcggaaggggaattggaagcggaagcggaagcggagccgattctgatgatctgatctgatcgaggccaggggactaatatcttgttgtaaggaacctagtggagtagtatttgatttgcctgctgcatcgacaccaatcaatctccccactactatggcttcttcgcgcgctatcgaggaggaactcgaaactgtaggagatgacaggatcagcgcgcttcctgacgatattctgctgcaaatccttgagagacttgacctgcctatggcaattcggaccagcacgctctccaggagatggctgcaactccctcgcttactctcccatctcatcatagatatcacccacttcatgcctgctcctcctcgccgcgctgtgaatttcaatgtagatcagatcatggctgcctacacggctgcagtcaacaacctgctcttgtcatccccctccagcagtaacagcaacacgagaagaattatcaagtgaatgcagctcagtttcttcctctctgaagacccttcctacctatgctctgttggccatgccgttggggccattgtcgatgccggaaaaaccgacttgctcgagttctcactgtggtcggatgttggtaaactcacccttgagcattgccagctgctcagacaacgcttcatgtcattctctcactcttgcccggttgctttcaggtggctcaccaatcttgccctgcgcaacctcgcgtttcaagaatcggacgtctcccatatcctaaacacatgccataacctgaagttccttgccttgtgttcttgtgtctcggactttgttgtcctcaagatcgatgccccacactcggagctcctcacgcttgaaattgtcacttgtgggtttgacagagctgatctgatccatttgccaaatcttaggcgggtagtctgctgggattggtgccttccaaaccccccaatccgttttggcaatgttactcgccttcacaacatgagcctctcttgctctgcgacgtatgaccagatgccgttcaggttgaccgagcttatatcaagcgccacaaacttaactatcttatacctggatttccaagatcagatgatttggattgagccacaaggtcctaaacttctctatcctgtattcagcaacgtcagagatgtctatctttgcaacattttctatgaatgtgacctgaactggactgtgtttgtccttgaagctgcagctcgtctcagcaacttttatctcaagttatgtcagcatccatgtgaaaggaacagatgcgaggacagcgctgagaaggtcaatttgttatgggatcagatgtcatctgatttcaaacatcgccacttgaatctattagagattacaggatttgcgatggatgataagatgataaattataccaggcttattatggagcgagctgtgaacttgaagagaatccgcttgctcgatcaagttccatgtgacaagggcaatgccatgaatggtatgggatctacatcctcaaacaaatggagatttcctgttgaccaaggagaaaagagtctaataaagcagaagcttatagatggattctcctcgtctgctgaaataaccataggatgaatcagttctatttattctagtcgattgtaaattattagttgtataatggtcgtcgattgtaaaagtacgtagctaataaaattgtcatttggaccaagaagtatcatgaaatattctgggtaatcctagcccttttcagccc

SEQ ID NO: 23942 - DNA, 3570 bp, Oryza sativa
  ref <308>: DATABASE ACCESSION NUMBER: AK074022
  ref <309>: DATABASE ENTRY DATE: 2001-12-06
ggtcccccaagcctccgggggccgaccggagtgaggaggggggcgaggggcgtcctccggcgggaaacggcaaaaaattttcgcgagggcctcagggcccccaaaacttccctcccccggaaccccaaatccctaaacccctccagtggcgaagccctagagccgaaaccctagccagcccagccatggtgatcgcggtggaggggggcttcgtgcacgaggaggaggaggtggaccacccaattcgctacctcccacttggccgcgtctactcctcctctgctccgtgccctctccccaagaagccccgctccgccgaggacggcaagccccccgtgatcgtctactaccgccgccgccgtaagaagccgcgggtcgaggggccacctccctcgcctgccacagcaccaccgatgctgcacccccgggaggacgacgaggatgaggaggttacacggcggaagggttctctcaagtacgagctgctgagcctggggcaagccccgcccgcattaggcggggatggggaggagcccgcgcggcggcgctgcctgaggcgtagcggaggggctgagaggaggggttacttctctgaacccaagaggcggcagcggcagggcgtgcacaaggaagctgcctcctcggctgggaggagatggttggagttggaaattgaggctgcggatccactggcctttgtgggattaggatgcaaggttttctggcccctcgatgaggattggtacaagggttctatcacagggtacaatgaagcgactaagaaacattccgtaaagtatgatgatggcgaatcagaggaccttaacctagctgatgaaaggataaaattttctatttcatctgaagaaatgaagtgcaggaacttgaaatttggaatttccaatctgaacaagaggggctatgatgagttgcttgcccttgctgttagccttcatgattaccaaggtcttgatccaggtgatcttgtgtgggctaaacttacaggtcatgccatgtggccagctgttgtggtggatgaatcaaatgttcctgctaacagggctttgaagccaggccgactagatcagtcgatacttgttcaattctttggtactcatgattttgccaggattaagttgaagcaagcggtgccctttctgaatggccttctttcttctttgcatcttaaatgcaagcaagcacgcttctatcggagtttagaagaagccaaggagtttctctgcacacagcttctcccagaaaatatgttgcaactacagaaatccatggaaaagggcagttctgatgctaattccaataaagatgtacattcttgtgacaatttatctgaagataaaacagctgaaagcggaggggattatgatgagatgactccaatagaactaggaaatcttcgtgtgagcaaattaggtaggatagtaactgactcagactatttccataacaaaaagcatatatggcctgaagggtatactgctttcaggaagttcagatcagtgaaagatccacatgtagtaatactttacaaaatggaggtactgaggaattcagatataaaagctcggccattgtttagggtcacatcagaagatggaacacagattgatggctctaccccaaatacatgttggaaggagatatattgtagattaaaggaaaaacagcgcaatgtggcctctggattggacagagatgtttgtcagggatctggttcctatatgtttggcttttcaaatccacaaatacggcaacttattcaggagttacccaatgcaaggtcatgcttaaagtattttgaaaatgctggagacacctttcgtgggtatagagctgttcatgtaaattggaaagatctagactattgtagtgtttgtgatatggatgaggaatacgaagacaatttgttcttgcaatgtgataagtgccgtatgatggtacatgctagatgctatggtgaactcgaaccattgaatggagtcctttggctttgcaacctgtgtcgacctgaggcgcctcgtgtttctccacgatgctgtctttgtccagtaacagggggcgcaatgaaaccaacaacagatggtcgttgggctcatcttgcatgtgctatatggattcctgaaacttgcttaaaagatgtgaagagaatggaaccgattgatggattgagcagaatcaacaaggaccgctggaaacttctatgcagcatttgcggagttgcttatggagcttgcatacagtgttctcatcctacctgtcgtgttgcatatcaccctctttgtgcacgtgctgctgatctttgtgttgagcttgaagatgatgacaaaatccacctcatgttacttgatgaggatgaggacccatgtattcgtctactttcatactgcaagaagcacagacaaccatcgactgaacgtccatctcttgaaagtaaccttgctaagcctgctgtggtagttcagacagatgcagttccaccatccggttgtgcaaggactgaaccttataatatccatgggagaaggggccaaaagcaacctcaagttatggctaccgcttctgtaaaacgtttatatgtagagaatatgccttatattgttagtggtttctgccaaaatagagtaggccatgatgctatcagtgaaccaattcaatcagttggctttttggatgttgcacatcaagaagctgttggcaacgtgtcttctatgattgaaaagtataaaagcatgaaggctacattcaggaggagactagcttttggaaagtcaagaattcatggatttggtgtctttgcaaaggtttcgcacaaggcaggcgacatgatgattgagtacatcggagagctcgtcaggccaccaatatcagacattagagagcggcgcatatacaactctttagtgggtgctgggacgtacatgttcaggatagatgatgagcgtgttatagatgctacgcgggcaggaagcattgcccatttaattaatcattcttgtgagccgaattgttattcacgcgtcataagtgttctcggggatgagcatatcatcatttttgcaaagcgggatataaatccatgggaagagttgacttatgattataggtttgtttcgagtgatcagcgacttccttgttattgtggattcccaaaatgccgtggagttgttaacgatgttgaagcagaggggcaatcagccaaaataagggtcaatagaagtgaattatttcaacaatgatcagactgagggatcgtatttagaattgccccagggtactggattgcgaactgtgctccttcggggctagtggcaaaattgcaaaaatttgcctcagtttttcatgtgagaaatgctaattattctttgctcacatttacacaagaatgccatcgtaattgtacatctattctgacataggtctggcattccatttgttattggtaccataattggaacttactttgtggtggcataatcaaaatattcagatcttctcatgtaatttgtccatttgtcatcagttatatgttggccctatcaaccaaatgagtcg

SEQ ID NO: 23943 - DNA, 2159 bp, Oryza sativa
  ref <308>: DATABASE ACCESSION NUMBER: AK074023
  ref <309>: DATABASE ENTRY DATE: 2001-12-06
gatagtatgcatgtgtggagtcatccaatggttccttctcccttgcatcagctggggctaaaagtgtgtgtgcgacagtgagagagagagagagagagagaggagaactaatttaatcctaatcagttgcagacttgcagagcccaagagaggagaggagattccaagagaagagatgagatcccacgagatgaacaactcttcttctcgttatgcgtcagaggaggagcgcggcagcaacagcttcctcatcgagagcgaggaggaggaggaggacgaggaagcccacccccactcctccatcctcctcaaggatgccgactccgactccgactccgacgactcctcctgcgctaccccgcgcccaagctcctacgccacccaccaatggccgcaaagctacaggcaatcaatcgacatttatagtagcgtgcagtctcccaacctgagctttttgggaactccaactctaagcaggctctccaactcattcctcaccaactcttttcgtggcaaaacccctgaaattctctctaatcttgtcaagccacttctacgcccatcatcttcaagcgacgaccagcagcagcagcagcagcatgacgatgatacccgtaagagttcccagtacctgcttccctcaagaaaaccgtctttgcaacagatcccggaggatcaaaaaccattggtgccggctcatgaggtgccggcttatcaacaatgctcctacacccaggcagtgatgaatggaataaatgttctgtgtggtgtggggatcctatcgactccatatgccattaaacagggaggctggcttggactggtgatactttgcttatttgctgtgctcgcttggtacaccggagtgctccttcgacgttgtctggacagcaaggagggtcttgagacataccctgatattggtcatgccgcctttggcaccactggacgtatagcaatctcgataatcctgtacatcgaactgtatgcctgttgcattgagtatttgatattggagagcgacaatttgtcaaagttattccccaatgcacatctaaccattgggagcatgacactaaactctcatgtgttcttcgcaatcttgaccaccctcatagtcatgccaaccacttggctccgcgaccttagctgtctgagttatctttcagctgggggtgtcattgcatcaatccttgtagttgtctgcctatgctgggttggggttgttgaccatgttggttttgagaacaaagggactgcactgaatctcccaggaattcccatcgcaattggactgtatggttattgctactcaggacatggtgtgttcccgaacatctattcttctctgaagaatcgcaaccagtttccttctattcttttcacttgtattgggttgtcctcaattttgtttgccggtgctgctgtgatgggatataagatgtttggtgagtccactgaatctcagttcacgctgaacttaccagagaatttggtggtttcaaaggttgctgtctggaccacggtggcaaatccaataaccaaatatgcattgaccataaccccattggctatgagtttggaagaattgctgcctccaaatcagcagaagtatgcgaacataatcatgcttagatcctccctggtggtctcaaccctcctcattgctctatctgtccccttctttgggctagttatggcgttggttggttctttactcaccatgcttgtgacctacatccttccatgcgcctgtttcttggccatccttaagagaaaagtgacttggcatcagattgcagcttgctcattcatcatcgtggtaggggtttgctgcgcttgcgtggggacatactcatccctctccaagattatccagaactacacctgacctgagtggccagctgaggaacggagcactagctgcttatgtagtaataagaaaataattaatcatccttctatagccctgcacataccggaacaaagttttgcccgggaactggagtcgacttgatcaattatatatgtataatataattagtttggatcgtttgtttaatttgtggcaactccaggcatgttaatgtataattaacgataaaaacaccacagtaccacatagtggagttttgttaatgataaaaataaataatgct

SEQ ID NO: 23944 - DNA, 1248 bp, Oryza sativa
  ref <308>: DATABASE ACCESSION NUMBER: AK099391
  ref <309>: DATABASE ENTRY DATE: 2002-08-28
gacgccacgcgccgcctgagccctcgcgtcgcgacaccgctcgccgcggcggcgctgctcctctccagcgaccacgcgaggagggagaagaggaggaagaaggcgagaagggagcaagctagaagagtgggagagggggacatctaggtcgtcgacggcctcaatggggtggggcataccgacgcggccgccggcgacgtcgacgccgtcgcgggtgcaggcgctgtacgagctctgcaagcgcaccttcccgtcgccgtcctccgtcgccgcgtcctcctcgccgtcgtctccacctcccgaccacgccatcggcgccatctcctctctcatggatacaatcactcctgtggatgttggactcagagatgataatcttgaggatggaagaggatttgggttctttgaatcaaacttcttgaagaattcagcaagggttgctagatgggcgcaacccataacctacctgcatgtctacgagtgtgacgccttctctattggaatattctgcttaccaacatcggcggttattcctctccatgatcatccgggaatgactgtgttgagcaaattactctatggttcgatgcatgtcaaatcgtatgattgggtagagcctgctgttctagcaaatggcaagccagtgaaacttggaaagttacatacggatgatgttctgaatgccccttgtccaactgctgttttgtatccccaaagtggtgggaacatgcactgcttcacttcagtaaaatcatgtgctgttcttgatgtcattgccccaccatactctgaatcttctggccgtgtttgcacctattttcacgattatccattttctagcttctcagctggacaagcaaaagtagtccatgggccagataattatgcttggcttgaggccttaatcgtaccggtgaatattaatatgcgccctggcacgtacactggcccaactatacaggaacatctgccataatcaataaaaatggataggacaggagcatcaaactatgtccaagtgcaatctcacaaatacagttcttgtcatgtagtgatgtaaatgtaacatgttcatctttacattttgatttatgttggaacttccttcatagaaaaggtgtggctatagtggtgacatagtcaaaacagtttgtactagctactccgtatcatagttaccaacctgcattctaaattgcttctggagagattgtaaatgtatttatgttaatgtctacatttttctcg

SEQ ID NO: 23945 - DNA, 768 bp, Oryza sativa
  ref <308>: DATABASE ACCESSION NUMBER: AK074024
  ref <309>: DATABASE ENTRY DATE: 2001-12-06
gggcggtccatgttcgcggcggcgcggcggggtggttcgtctgcgagatcagtacaatctccttcactcctgcgatccgatcgcaagacgcgatcggatgtggatataatttgacagggattcagagaattaagatgaatggtgctttatggattcctattctgccccctccagttgttgatgctcgttatcagggactgtgcctacagtgtggccgccgcattaagggccgatctaacctctgttccatttcctgcagactattgcgggtgcataccggagctaggcgaggtatggctcaaaacctggtggaattttcagagtctgttggacagccgatccatcagctggatcagctctgtgggcaatgcctccggtccttttgtggtgtttcctgtccgaaccatctggtccacccacacccccagggtaatcatgctgcaggacctgatataattactattgagcgtttgaatggctggttggtcatagaccaagaacagctcccagtggaatttggccaagatattcatgtaatggttggagaggacgggcgtcacatgcttcctattaagcgcctccccgctgagcatggagatgggcatgatggattagtagagccagattggaatctttgtgctcgtgcagggtgtaatgagatgttcaatggaaatgctgtgtgttgctgcatgaggtgcttccatttactgtgaggataccaagtggatgtgattaaataagtttaagaaatacccctgttttatgttg

SEQ ID NO: 23946 - DNA, 1901 bp, Oryza sativa
  ref <308>: DATABASE ACCESSION NUMBER: AK074025
  ref <309>: DATABASE ENTRY DATE: 2001-12-06
gctccgtcccgtttgcttcaacaacacatttgctttgctcggtacatgcagagagaaaaagaagcaatgggcatcggcatcggcatcggcatcggcatcggcatcggcaccggcaccggcgcggcgctaccattcggcgaggcctcgccgtggagcctgctcggcggcgcggtggccgcgctgctgctggtctgggccgcgcagatgctggagtgggcctggctggccccgcggcggatggaacgggccctcagggcccagggcctgaggggcacccagtaccgcttcctccatggcgacctcaccgaggacctgcggctcgtcacggcggcccgctccaagcccgtgcccatggaccggccccacgacttcatcccgcgcgtcgcgcctctgcttcaccgtgccttggaggaacacggtagggtttcttttacatggttcgggccaatgccaagggttacaatcattgatccggacttggtccgtgaagttctatcgaacaaatttggtcactttgagaagacaaagctggccactcggctttctaagttactcgttggtgggcttgtgatccttcatggtgaaaaatgggtcaaacataggaggattatgaatccagcctttcatgcagaaaagctaaagcggatgttgccagcattctccgcatcttgtagcgaactaattggcagatgggagaatgcggttgctgcttctgttggaaaagccgagctggacatttggccagattttcagaatttatcaggagatgttatttcaagagcagcatttggtgtcagacaccacgaaggcagacaaattttcctacttcaggccgagcaagctgaacgccttgttcaatctttccggagtaattacatcccaggcttatctcttttaccgacagaaaacaacagaaggatgaaggcaatagacagagagataaagagtattctaagaggcataatagaaaagaggcagaaggccacgaagaacggcgaagccagcaaggacgatctgctcggcttgctcctacaatccaacatggattattacagcgacgaggacggcaaatccagcaaggggatgaccgtcgaggagatcatcgacgaatgcaagctgttctacttcgccgggatggagacaaccgccgtgttgctcacctggacaatggttgccctgagcatgcacccggagtggcaggatcgcgccagggaggagattctgcaggtctttgggcgaaacaaacctgatatcaatggcgttagccgcctgaaagtcgtgaccatggtgctgcacgaggtgctgcgcctgtacccgccggtggtgatgatgaaccgccgcacgtacaaggagatcgagctcggcggcgtcaggtacccggcgggcgtgatgctgtcgctgcccgtgctgttcatccaccgcgacgccgccgcgtgggggcacgacgccggcgagttcgacccggggaggttcgcggagggcgtggccagggcgtgcaaggaccccggcgccggcgcgttcttcccgttcagctggggcccgcgcatctgcatcggccagaacttcgcgctgctggaggccaaggtggcgctcggcatgatcctgcagcgcttcgcgttcgagctgtcgccggcgtacgcgcacgcgccctacaccgtgctgacgctgcacccgcagcacggcgttccggttaggctgcgccgactctgatcgtcgggttagggaaagaaaaaaagatgaaatgaaatgaaatcgtctgtatagatccgtgcatccggcattctgaatctctgatatcaaagcagaacacatttgctgataaacactggaagctccatgttccgggcatccggcactctgaaatctcaatctctgatatgaaagcagaacactatttgctg

SEQ ID NO: 23947 - DNA, 2156 bp, Oryza sativa
  ref <308>: DATABASE ACCESSION NUMBER: AK074026
  ref <309>: DATABASE ENTRY DATE: 2001-12-06
tctccctgttcgttgccttctccgtgccgaacaccacagcgcgcgcgcgggggggcgggttcggctctctcgcgagctctgctctctgtccctctctctctctcgccgcctcctgcctcgcacactcgagattggtggggtggatttgggggaggaggaggtggggtggggtggggtggttgctgaggaggaggtggtggtgagagatcgggcggcgggttgccgccggaggaggtagagggatcctcgggggagggcggttcttgggtcgggggacccccccatggcgtgaggagagggtgccctccgggagatcttgcggggcgggtgtgtggtgttgctagctgaggctgttgggtgggtacccccgagcggccggggaatctcctcccttctcgagcgaccgcccgcgtcgctccgccatggccggcagcgacgaggtcaaccgcaacgagtgcaagacggtggtgccgctccacacatgggtgctcatctccaacttcaagctgtcgtacaacattctgcggcgggcggacgggacgttcgagcgggacctcggggagtacctggacaggagggtgccggcgaacgcgcggccgctggagggggtgtcgtcgttcgaccacatcatcgaccagtcggtggggctggaggtgcgcatctaccgggcggcggcggagggtgacgcggaggagggggcggcggcggtgacgcggcccatccttgagttcctgacggacgcgccagcggcggagccgttcccggtgatcatattcttccacggcggcagcttcgtgcactcgtcggccagctcgaccatctacgacagtctgtgccgccggttcgtgaagctgagcaagggcgtcgtggtgtccgtcaactaccggcgcgcgccggagcaccgctacccgtgcgcgtacgacgacgggtggaccgcgctcaagtgggtcatgtcgcagccgttcatgcgcagcggcggcgacgcgcaggcccgcgtgttcctctccggcgacagctccggcggcaacatcgcccaccacgtcgccgtccgcgccgccgacgagggcgtcaaggtctgcggcaacatcctgctcaacgccatgttcggcggcaccgagcgcacggagtcggagcggcggctcgacggcaagtacttcgtgacgctccaggacagggactggtactggaaggcgtacctgccggaggacgccgaccgggaccatccggcgtgcaacccgttcggcccgaacggccggcggctcgggggcctccccttcgccaagagcctcatcatcgtgtcgggcctggacctcacctgcgaccggcagctcgcctacgccgacgccctccgggaggacggccaccacgtcaaggttgtccaatgcgagaacgccacggtggggttctacctgttgcccaacaccgtccactaccacgaggtcatggaggagatctccgacttcctcaacgctaacctctactactagtacatatacagcccctctccctctcccccctcgctgatcgtcgtctccaacacaaatactccttatagggaagatggtaattcagcttgactttgttatagtacctactactactactactactacctcctatactactgctgctgcttgggatcgcaatgccgtcgtctgctcttgtgtggcgaaggagaagctagctccatgctgtctgatcagctctaatcaaatggtgactcggttgcgtcgaggaagaagaagaaagtcgtccgtcgtcgtcgtccttgttccactaatcatcgttcatccttttctttttttgtggtttggatcgttctttgatccatgttttccatgttttgcctggggtcagtgtagtcaagacaagttgagggtagttccatgtctgtcatgcatgcctccattagtactactactgttgtgactttggttgatggagagaagaagcatgtttttttttcttttaatctcgcattccatccatcttctccatgtactccaaagagaggaaagttgctatctaacgttatgtgtacagtgatcgatcaacaaggagatttgaggaggcatgccccttttgttgctgttgatgttctagttttatcttctttcttgttaacaggattggatggtgctctcttgctcactctc

SEQ ID NO: 23948 - DNA, 1026 bp, Oryza sativa
  ref <308>: DATABASE ACCESSION NUMBER: AK074027
  ref <309>: DATABASE ENTRY DATE: 2001-12-06
gggctcgccgctgcttccactccgcctccacctccgccgccgccgctgctcctcctcctcgcgcttacagtttcctctacttccccctccttggtcttggtctgcctcctcctcgccatggacgtcaagccggtgaggactgtgaaggtcaccaatgtctccctgagtgcaactgtgcaagacattaaggagttcttttcattttcaggagacattgaacatgtggagatgcaaagtggcgatgagtggtctcaagttgcatatgtgactttcaaagatccccaaggagcagaaactgcacttcttctttcaggcgcaacgatagttgatctttctgtcatcatcgcacctgctccagaatatcaaccaccccctacttcatctgctcctccaatgtatagtgcaaccagtgtccctgtcagtgaagacaacaatgttgtccataaggctgaggatgttgtcagcaccatgcttgctaaggggttcaccctggggaaagatgccgttggcaaggcaaaagcttttgatgagaagcatgggttcacatccactgctggcgccaaggtggcctccattgacaggaagattggtcttagcgagaagttcactattggtacttccatagtgaacgagaaggtcaaggagatggatcagaagttccaggtgtcggacaagaccaagtctgcattcgctgctgctgaacagaaggtgagcactgctggatctgctatcatgaagaataggtatgtcttcaccggggcttcgtgggtcaccaacgcattcaacaaagttgccaaggctgccactgatgttggtacaatgacaaaggagaagatggcagctgaagaccagcataagggctcgggtccttctggagggcactcgtacacacccatccagtgatgactccacgctctctcatgtgccgcattgtgttgtattgatggatgtaaaacatagatatagaacagaaaaagtcccctcctggcataccacatacttctatcagtgaacttttcgcattgc

SEQ ID NO: 23949 - DNA, 1582 bp, Oryza sativa
  ref <308>: DATABASE ACCESSION NUMBER: AK099392
  ref <309>: DATABASE ENTRY DATE: 2002-08-28
gagcaagagccgatcgatcattgtccaagtctccaagcgatcagctagctgacttgacgacgctgcgagcagcggcagcaagagagcagcagcacaaagggttcccctttcacaagtgtccggccggctgcacgtaggccatggggaagcaaatggccgccctgtgtggctttctcctcgtggcgttgctctggctcacgcccgacgtcgcgcacgcgcagacgcagatcctcttccagggttttaactgggactcgtggaagaagcagggtggttggtacaacatgctcaaggaccaggtgggcgacatcgccagcgccggcgtcacgcacgtctggctcccacctcccacgcactccgtctcgcctcaaggctacatgccgggacggctctacgacctgaacgcgtccaagtacggcaccaaggcggagctcaagtcgctcatcgccgccttccacgccaagggcatcaagtgcgtcgcggacatcgtcgtcaaccaccgctgcgccgacgacaaggacggccgcggcgtctactgcatcttcaagggcggcggcccgcgcggctgcctggactggggcccctccatgatctgctgcgacgacacgcagtactccgacggcacgggccaccgcgacaccggcgccgacttcgccgcggcgcccgatatcgaccacctcaacccgctcgtccagcgggagctctccgactggctcaggtggctcaggagggatgtcggcttcgacggctggcgcctcgacttcgccaagggctactcggcggccgtcgccaggacgtatgtccagaacgccaggccgagcttcgtcgtggcggagatatggaactccctgagctacgacggcgacgggaagccggcggccaaccaggacggccagcggcaggagctcgtgaactgggtgaagcaggttggcggcccggcgacggcgttcgacttcacgaccaagggcatcctgcagtcggcggtgcagggcgagctgtggcggatgcgggacaaggacggcaaggcgccgggcatgataggctggtatcccgagaaggccgtcaccttcgtcgacaaccacgacaccggctcgacgcagcggatgtggccattcccgtctgacaaggtcattctgggctacgcctacatcctcacccacccaggagtaccatgcatcttctacgaccacgtgttcgactggaacctcaagcaagagatcaacgcgctggcggcgacgaggaagcgcaacgggataaacgccgggagcaagctgcgcgtcctggcggcggagagcgacatgtacgtggcgatggtcgacgagagggtcatcaccaagatcgggccgagaatagacgtgggcaacataatcccgtcggacttccacatcgtggctcatggcaatgactactgcgtctgggagaagagcggccttagagtcccagaaccagaaggtcggcgctagaaacggctcgcaagctagctacacagttcttaataacttggtcgcaaaaaaaaagttcttaataatttgtacgagaaatgttcgtttctgtttgcatatatagcttatgaaatcttacc

SEQ ID NO: 23950 - DNA, 2044 bp, Oryza sativa
  ref <308>: DATABASE ACCESSION NUMBER: AK074028
  ref <309>: DATABASE ENTRY DATE: 2001-12-06
gacccttgtgcccttatctcctatggttgcttccactgtcaccaaagggggactcgccatctaccttgttcctcagttcatgcgaatttcatgcggtcctgggctgtgactgggagtagattgagggttgatctcgtttgcggagtaacaaatttgcaagcctacaactgctagggagaatttgactaaaaatggggtcgtgttgcagcagagctacgtctccagattctggtcgaggaggagcaaacggttatggctattctcaccagacaaaacctgctcagacaactcctagctataaccatcctcagccgccgccgccagctgaggtgaggtacacaccatcagcaatgaaccctccggtagtcccacctgtggttgccccaccgaagcccaccccagacacaattcttggaaagccgtatgacgatgtgcgctcggtttactcccttggaaaggaactcggaaggggacagtttggggtgacatacctgtgcacggagatcgctagtggtaagcagtatgcttgcaaatccatctctaagcgcaagcttgtgagcaaggccgacaaggaggacattcgccgggagattcagatcatgcagcacctatatggacaacaaaacattgtcgagttccggggagcatatgaggacaagagcaatgtccatgttgtcatggagctctgcgctggtggggagctgtttgatcggatcattgccaaggggcactactcagagcgtgcggctgctaccatctgcagggcagtggtgaatgttgtcaacatttgccattttatgggagtgatgcatcgtgatttaaaaccggagaacttcttacttgcaaccaaagaagagaatgcaatgctcaaagccactgattttggtctctcagttttcattgaagaaggaaaaatgtatagagacattgttggaagtgcttattatgttgctcctgaagtccttcggcggaattatggtaaagagattgatgtatggagtgcaggcgttattttgtacattcttctcagtggtgttcctccattttgggctgaaactgaaaagggaatatttgatgctattcttcaaggggagattgactttgagagtcaaccatggccatcaatatccgagagtgctaaagaccttgttagaaagatgttgacacaagatccaaagaaaagaattacttcggcccaagttctccaacatccctggctcagagatggagaagcatctgacaaacctattgacagcgctgttctttctaggatgaagcaattcagagcaatgaacaagctgaaaaagatggctctgaaggttattgcttcaaaccttaatgaggaggagatcaagggcctgaagcaaatgttcacaaacatggacacagacaacagcgggaccatcacatatgatgaactcaaagcaggattagccaaacttggatcaaagctttcagaagctgaagtaaagcagttgatggaagctgctgatgtagacggcaatggatccatcgactatgttgaatttatcactgccacaatgcatagacacaagctcgaaagagatgagcatttgtttaaggcattccagtattttgacaaagacaacagtggcttcatcacaagagatgaactggaatccgctttaatcgagcatgaaatgggcgatacaagtaccataaaggatattatatcagaagtcgacacgaataatgatgggaggattaactacgaggaattttgcgctatgatgagaggaggggggatgcagcagcctatgaggctcaaatagtctgtttccttgtagaaaatgatgtacaattacattagtaaactgttttcgccttcttttttttgttccatggatggtagtcgacggataaaaggtttaccctggacgcagcttttgcattgttgagatgattgtgtatattttcttgccttgcccgtgtatggtgtagtgatttgaatgtcctcccttttgtaagttgtttctgcaagtacacacaataaaagagcatttttgcacctcaattcttctgc

SEQ ID NO: 23951 - DNA, 2127 bp, Oryza sativa
  misc_feature (661)..(661): "n"=any one base of a, t, c, or g
  ref <308>: DATABASE ACCESSION NUMBER: AK099393
  ref <309>: DATABASE ENTRY DATE: 2002-08-28
gaatccccgcatcaccaatccacacaagcttcgcagctcgcgcgccgcgggaggggagggagaaaagctcgcccccgagatttttctcctctcctctctgctcgtgtttcttggattggtccatatatccacggttcttgggggcgcggcgcgccgccattgatctggttttggttttgtgaggaggagaagttgcggtggtgctggtgctggtgctttcttgatctgatgatggcgagcacgacgtcagcgacggccgccgggggcgcgttcgccgccgcgaagacgcgggcggggtcgtcggcggcgggcggcggcgcgtgcgctagggtcgccgccggcgggcggaggcggtccggcgtggtggtgcggtgcgacgccggcgtggaggcgcaggcccaggcgcaggcggtggccaaggccgccagcgtcgccgcgctcgagcagttcaagatctccgccgaccggtacatgaaggaaagaagtagcatagcggtaataggcctcagtgtacacactgcaccagtggagatgcgtgagaaacttgctgttgcagaggaactatggccccgtgctatctcagaactcaccagtctgaatcatattgaagaggctgctgttcttagtacctgcaatagaatggaaatctatgtggtagctntatcgtggaaccgtgggattagagaagtggtagactggatgtcaaagaaaagtggaatccctgcttctgagctcagggagcatctattcatgttgcgtgacagtgatgccacacgctcatctgttgaggtatctgctgggcttgactctttggttcttggagaagggcatatccttgctcaagttaacaagtgttcagaagtgggcaaaacagtggaggcctcggaaagaacatcgataggatgtcagaggatgcaatcactgctggaaagggtgtccgctgcgagactaacatatcatcaggtgctgtctctgtcagttcagctgcagttgaattggccttgatgaagcttccaaagtcggaatgcctatctgctaggatgctgttgattggtgctggcaagatgggaaagttggtggttaaacatttgattgccaagggatgcaagaaagttgttgtggtgaaccgttcagtggaaagggtggatgccatccgcgaagagatgaaagacattgagattgtgtacaggcctcttacagagatgtatgaagccgctgccgaagctgatgtcgtgttcacaagcacggcatccgaaaccccatttttcacaaaggagcacgcagaggcgcttcccgctatttctgatgctatgggtggtgttcgactctttgtcgacatatccgtccccagaaatgtcagcgcctgtgtgtctgaagttggccatgcgcgagtatacaacgtcgatgacttgaaagaggttgtggaagccaacaaggaggaccggcttaggaaagcaatggaggcccaaacaatcatcacccaagaattgaaacggttcgaggcatggagggactcgctggagactgttccgactatcaagaagctgaggtcctacgccgacaggatcagggcttcggagcttgagaagtgcctccagaagatcggcgaagacgccctcaccaagaagatgagaagatccatcgaggagctcagcaccggcatcgtgaacaagcttctccacggcccattgcagcacctgagatgtgacggcagcgacagccgcaccctcgatgagacgctggagaacatgcacgccctcaacaggatgttcagcctcgacaccgagaaggcgatcattgagcagaagatcaaggcgaaggtggagaagtcccagaactgagattgaagaagagatttttttttttcagcccgtgtatctactatgtatactactaccatatctgtccagacattctaattccaattttttttctctctctcttgagcctttgcttactgagccctcgctgagttggtcaaattgtctcgtgaattagcgccatggctgctgctagagataactaggaaaatgccttgtttgtaaattactgcatctgctgtggcaagagctccattttgaagatattatatacacgctgttggtgaaataaaatcagaagttcatc

SEQ ID NO: 23952 - DNA, 1242 bp, Oryza sativa
  misc_feature (523)..(523): "n"=any one base of a, t, c, or g
  ref <308>: DATABASE ACCESSION NUMBER: AK099394
  ref <309>: DATABASE ENTRY DATE: 2002-08-28
gctgtcacctactactacacacagcgacagagaggagcagagccgcaagaagagtcgagtcatggcggggtcgtcgtccctcagcacgctctccctctgcacgcagtcgccatcaccgtcaccggtggcgtccgcccgcctcgtggcaccggctgtcctcggtttcgccggggccccgcggttcccgacgctgcgggccgcgccacggcggctgacggcgcgggcggtggccggggacgccgaggacgagtgggggaaggagccggcggcggaccagggcggtgccgccgcggcggtggccgaggcgcccgcggatgtgccggtgacgagcgaggtcgcggagctcaaggcgaagctgaaggaggcgctgtacggtacggagcgcggcctgcgcgcgtccagcgagacgcgcgcggaggtggtcgagctcatcacgcagctcgaggcccgcaaccccacgccggcgcccaccgaggcgctcaccctcctcaaacggcagtggatcctcgcgtacacctcattntcacagctattcccactattggggtctggtagtttgcctcagcttgtcaaggtggaagaaatatcacaactattgattctgagaacttcacggttcagaattgcatcaagttttcaggacctttagcaacaacttcagtgtctaccaatgccaaatttgaagttcgaagtcccaaacgtgtacagatcaaatttgatgaaggcattatcggcactccacaattgactgattctattgtactacctgagaagtttgagttatttgggcagaatattgacctgaccccattgaagggcatattttcatcaattgaaaatgcagcatcctcagttgctagaaccatctctggtcaacctccactaaagataccaattaggactgacaatgctgagtcttggttgctcacaacctaccttgatgatgagcttagaatctccagaggtgatggcagcagcatctttgtactgtttaaggaaggaagcaccctcctatattaagcttggcatgcctaatctagggtagaacttgatgctgaagcaactccaagcagtacttgtggctaaattatttttcatatttaagttggtgtgttgttatttgtgtttgtatagttcgggcgtttggattatgtgaagttttgtgtatgtgtaatgtattctttgatgtccctgagcacctgagctgctatactagtatacatgttatatattgcaaaagtt

SEQ ID NO: 23953 - DNA, 1857 bp, Oryza sativa
  ref <308>: DATABASE ACCESSION NUMBER: AK099395
  ref <309>: DATABASE ENTRY DATE: 2002-08-28
tgaattaagctatagcttggtaatccgcagccatggcgccggacgtcgaggcgcggctgctcgccgcctcctccaagccggccaccgccgccgccgcctcgctgccgcgccgcaacaagtaccccttcttctgcgccgtcctcgcctccatgacgtccgtcctcatgggctacaacgtggcggtgacgagcggggcgcagatcttcatggcggaggacctgggcgtgagcgacgcgcagatcgaggtgctttcgggggccatcaacatctactcgctcgtcggcgcgctgctcgccgggtggacctccgaccgcctggggcggcggctcaccatcgtgctcaccaacggcttcttcctcgccggcccgctcgtcatgtcgctcgccggcgggtacgccgcgctcatggccgggaggttcgtcgccggcatcggcgtcggctatgccctcgtcatcgcccccgtctacgccgccgagatctcccccgcctcctcccgcggcctcctctcctccctccccgagatatttatcaatgggggagtgatgctgagctacgtgtcgaacttcgccttctcggggttgccggtgcacctgtcgtggcggctgatgttcgccgccggcgtggtgccgacggtgttcctggcggcgggcgtgctcaccatgccggagtcgccgcggtggctggcgatgaaggggcggcgcggcgaggcgagggtggtgctcgaccgcacgtccgacacgccggccgaggccgagcagcggctgcaggagatcgaggacgtcgtcgccgccgccggctccgttgccggcaacggcaacggcggcggcggcgcgtggaaggaggtggcgaccaagcccggcgtgcggcgggtgctcgccatcgtgctgacgctgcagttcttccagcaagcgtcgggcatctactccgtggtgctgtacggcccgcgcgtgctcgccgcggcgggtgtggcgtcgaacaccctcctcctggggctcaacgtggtgtttggcgtcgccaaggcgagctcaatcctcgtcgccatggcgctcaccgaccgcgtggggcggcgcccgctgctgctcgccagcacgggcggcatgacggcgtccctcctcgctctcggctcggtgttcgccgcgttcggcggcgcgagggacgacgcggcggtggcggcgggcgccgccgtcgccgtggtggtggcgttcgtgtgcgcgttctccgtcgggatcgggccgctggcgtgggtgtacagctcggagatcctgccgctgcggctgcgcgggcagggcgccggcgtcggcaccgccatgaaccgcgtcgtcagcggcgtggtcaccatgacgttcatctcgctctacggcgccatcaccatggcgggggcgttctacctctacgccgccatcgccgccgcctccttcgtgttcatctacgcctgcctgccggagaccagggggcggagcctcgaggacatggaggagctcttccacaccaagtgatgatctcatcttccatcaatgaatcaattcacatatatatgcatttgggttgttgcaacattttgaatggaaagtttgattctttcttggtaagattatcaaaggtttttcatgttcatttggctgattaattggtatactataaatttattattactgttgaaattgacatgtaaagatcggtgggacagtggatacatactggctgaatatggggaaaagagaaaagtttagaacggagggattttgtattatagaaagaaaactaaaacatgtgtgtttaattttgtaaaaatcctgtaaattttcttgacgagcctttatcggttggttttgctatttatcaggcgagccatatccc

SEQ ID NO: 23954 - DNA, 1377 bp, Oryza sativa
  ref <308>: DATABASE ACCESSION NUMBER: AK099396
  ref <309>: DATABASE ENTRY DATE: 2002-08-28
gttacaccgatctatccggctaaccccacctgcccccgtccgtccgcccgcccgcccgcctcggcgacttcacgcgtacaagggggatttgttttctctagggtttcgttcgcgaggaggagagatctggttggggagatggacgggaagccgccgccgccgaacccgaacctgccctaccgggaggactgctggagcgacggcgagacggcggcgctcgtcgacgcctgggggaggcgctacgtcgacctcaaccgcgggagcctccgccagccgcagtggcgggaggtggccgaggccgtcaacgcgcggccgggggcgtccgcgcgccgccggccgccgcgcaccgacatccagtgcaagaaccgcgtcgacaccctcaagaagaagtacaaggcggagcgcgcgcgggggacgccctcgtcctggtacttctacagggacctcgacatgctcgtcggccctaccctctccgccgccgccgccgccggcggtggcggtagcgccaagaagccgtccccgccccgcgggctccccatgatgcggaggcgcctggaatcgccctcccgctccccctcgccgccgtcaccgacgccggccgtggccctccccttgccaaactaccgccaggcgtcgaacctcccgtccgcgggcctcctcttcaataagatggctgcagcggccgcggcggaatctgattcagaggacggctacaacaacccgaacaacaactatgaggacgatgaagacgacggctcgcagcagtcggcgtcgcggtccgtgtcgtctcgttccggtggcgttgcagctgcaggtgcaggtggtggtggcgtcagcagcagcaagaggaagaggggaggcggcggcggcggagggttcggggagctagcgagggcagtcgaaacatttgccgagatgtacgagcgcatggaattcgctaagcagaggcacgcggaggagatggagaggcagaggatcaagttcctcaaggatctggagctgaagcggatgcaggctttcgtggacgtgcagcttcagcttgcaaaggcaaagcacgggaagcatcctgatggtgccacggagatgctcatgtctctcgccgcgctcccgttcctcagcacccctgcttacctatgataatttaagaacaagagtttaggtaaagatttgtttggtctcagatttatattgtggtggactggtggtcatattaggcctgtagtggatttttcatgcgattcctatatgggtactgttcctttatattaagctgtctcagatattccagcgtgcttaaatttggcaatgcctggttgatatctcctcagattgggaggtttactaagtttgaaattcaactgtcaattagctttctcc

SEQ ID NO: 23955 - DNA, 1665 bp, Oryza sativa
  ref <308>: DATABASE ACCESSION NUMBER: AK099397
  ref <309>: DATABASE ENTRY DATE: 2002-08-28
gatcatcctttccgatgcctcgcaccgccgccgccgccgccgccgcgccgccgccgctgctgctgctctccgccgcagccgccatcgccatcgccatcgccgtcgccgtcgcggcccccgacggccacctagtcgccagcctcccgggcttccatggcgccttcccctccaagcactactccgggtacgtgacggtggacgaggggagcgggaggcggctgttctactacctggtgacgtcggagcgcgacgcggcggccgaccccgtcgtgctctggctcaacggcggcccgggatgctccagcctcgacggcttcgtctacgagaacggccccttcaatttcgagcgtggcagcgatccgggtggcctcccaaatctggagctcaacccctacagctggtccaaggtttccaacgtggtgtacctcgactcccctgctggtgttgggatgtcgtactcgttgaataaatcagattacacgacaggtgacctaaaaacagcggctgatgcacacaccttccttctgaagtggtttgagttataccctgagttccagtcaaatccgttctacatgtcgggagagtcatttgcagggatctacattccaacactagctgatgaagttgtaaaagggatagaaaaggatctgaagccaagaatcaattttaagggatatctaattggcaatggagcaactgatcaggactatgatttcaattcgtttgtgccgtttgcacatgggatgggtctcatctcaaccgaattgtttgaggatgcaagtactgcatgccatggtacattttggggcaaagttaataatctgtgccaagaaaagatagacagagtgcattgggaactcaaggacctgaacaagtacaacatccttgctccctgctaccatcaccctgaaattcaagaattagagttcaagaacagcagcttgccatcaagttttagaaagctaggtgagacagagaagcgatttccagtgagaaagcgaatggctggccgctcttggcctctccgtgctcctgtgactcgtggacgcatgacgatgtggcctgaacttggtggtagatcactcccctgcacgagcgacgaacttgctaatgcatggctggatgatgaagatgtaagagctgccattcacgcggaaccgaaaagcttaattgggtcatgggaactgtatactgcaagaatagagtactaccatgatactggagacagcatggtgaagtaccacaagaagttcacagccatgggatatcgcgcacttatttacagtggagatcatgatctctgtattccctatgtcggaacggaagcatgggttagatccatgggataccgagtaattgatcattggcgaccatggtactttggagggcaagtcgctggatatacacaaggttatgaacacaatctcactttcctcaccataaagggagctggacacactgtcccggagtacaagcccaaggagacgcttgcgttctatagccactggttgtccgggaagaagatttgacatcaagatcaactcgtcgtaacagttttgagcctccgaatgaaaaaaaaaagttgtaatctgtaatctcaacaggcagacaagtgcatttgtccgtaatctgcatctagggatgtgagcagtcccagtactaccc

SEQ ID NO: 23956 - DNA, 3187 bp, Oryza sativa
  ref <308>: DATABASE ACCESSION NUMBER: AK099398
  ref <309>: DATABASE ENTRY DATE: 2002-08-28
gcctaatcaatctctcgcgttcttggccgccgtctccatctctctctcactctctctctctctctctctctctctctctcggctttggtttgccgcgttacatccgcgaaaaggaggaggaaacaggcgaagcgaggagctccagagggagaaattccgtagaaagcgaggagcgtcggctcccgcttttgatctgtgggaattcaaacggtggtgcttgctatttcgacgtaagggcttaaacgaattggtttgtcactattttggtttcaacacagaaggttgtgggaccatggtttcaaaatcttattcaaatctgttaggaatgagttgtggagatggagttgactttcggcaaccttttaaatctcttcctcgtgtggtaacctctcctggcattatatctgatcctgattgggacactagaagtgatggcgattcagttggttcagcattttctgttgagaggaaaataattgttgccaacttacttccactgaactgtacaaaagatgaagctgggcaatggtccttctcaagggatgatgatgcactgctcatgcaacttaaagatggtttttcaaatgagactgatgtcatttatgtgggtagtttgaaggttcaggtagatcccagtgagcaggatcaagttgcacagaagcttcttagagattaccgatgcatacctacttttctccctcctgacctccagcagcagttctatcatggcttctgtaaacagcaattgtggccacttttccactatatgcttcccatttgtcttgacaaaggtgagctctttgatcgctccctgtttcaagcctatgtccgagctaacaaactctttgccgacaaagttatggaagctattaatacggatgatgatcatgtctgggttcatgattatcacctcatgcttctcccaacatttctgaggaagaggttacaccgaataaagctaggattttttctccacagtccatttccctcctcagaaatctacaggtcactgcctgtaagggatgagatcctgaagtcattgcttaatgctgatcttattggtttccaaacatttgactatgcccgccacttcctttcttgttgcagcagattattgggtctgcattatgaatcaaagcgcggttacattggaatagattactttggaagaacagtgagcctgaagatcctctcagtgggtgtccatgttggccgtcttgagtccatcctaaagttgcctgctacagtaaagaaggttcaagaaattgaacaaaggtataaaggcaagatgctcatgttaggtgtagatgacatggacatcttcaaaggaatcagtctaaaactgcttgggttggagctacttctagataggaacccgaaactcagagggaaggttgtccttgtacagattgtcaatccagcaagaagcacagggaaagacgtggaggaagcaataacagaatctgtctctgtagctgaaagaatcaaccttaagtatggctctgtagattacaagcctgttgtccttattgatcatcgcataccattttatgaaaagattgcattctatgctgcatctgattgttgtattgtaaatgctctgagggatggtatgaacttggtaccatatgagtacactgtttgccggcagggaaatgaggagatagataatgccagaggcagtgacacaaattgccatcacacaagcacactaattgtgtctgagtttgttggttgctcaccatctcttagtggtgctttcagggtaaatccttggagtgttgacgatgtggctgatgccttacaccatgcaacagacttgactgaatccgagaaaaggctacggcatgaaaagcactaccgttatgttagatctcatagtgttgcttactgggctcatagctttgctcaagatctggaaagggcatgcaaagatcactacagccgaaggtgctgggctattggttttggtctgaacttcagagttattgctctttctcctggctttagaaagctctctttggaacactttgcttcttcttacaacaaggctaccagaagggcaatatttcttgactatgatggcactcttgtaccccagtcatcaatcaataaagctccaagcgatgaacttattactattctcaacagcttgtgtgatgacccgaagaatgatgtattcatagtcagtggaagagcgcgtagtttgcttgatgagtggtttgctccatgtcagaagcttggtattgcagcagaacatggctattttgtcagatggaacaaagcagctgaatgggaatcaagctatccaaaccatgattttgagtggaagcacatcgctgaaccggtcatgcaagtttacaccgaaacaactgatgggtcctccatagagccaaaggaaagtgctctagtatggcattatttggatgcagaccatgacttcggttcctgccaagcaaaggaactactgggtcatcttgaaagggtgctatcaaatgaacctgttgttgtgaagtgtggtcattacattgttgaagtcaaaccacagggagttagcaagggtcttgttgtggacaaggtaattcacagattgatgaacaacgggaagacgcctgatttcgtagtgtgcatcggtaacgatcgatctgatgaggacatgttcaaaagcatcgacagcatgacctccagctccgcattccctgcagttccggaagtctttgcctgttcagttggtcagaaacccagcaaggcaaagtactatgtcgacgatgctggtgaagtagtaagattgctcaagaatgtagctggcatttcgtcgcaccgggaggccgtcagccatggacgtgtgaccttcagggatgtgatggattatgtggagtgaaccacctaatctttgtaacatccaaacttgtgtacattccaatgtcttcatctagatttggccaaaagcatgaatcatcaccaccattaggacaactacaggagtgcaagcggaagctctgcatttttagtttaggtgatgtatactcatatgtaggcaattttgatagttgatgaggttcttgctggagaactgcactgtgaaagaaaagccccctggctttgaatagccatcgacttgtttcacttgccagttattaccagttgccagtgtttacctgaatgactgaatccaatctcctgcttc

SEQ ID NO: 23957 - DNA, 1344 bp, Oryza sativa
  ref <308>: DATABASE ACCESSION NUMBER: AK099399
  ref <309>: DATABASE ENTRY DATE: 2002-08-28
gatcgtcctccactcctccgcccttttgacccaaccccaccgacccaacgaacgcgaggccgcttcggcaacctcctccgcgcgatcccccaacgcccgcgaaaccctagctctcgctcgcgcggggtgcgccgatgcggaggtggctggcggagggggtcatggagctggcggtgggggcgccggagtcgaactcctccttctcctcctccccctcgggcgcgacgccgtcgtcggggggcccgattggtgggtgtcggggtgccacgggacggtgtacagcctggcggtgatgctcccgtcgttggcgttcgtcgggttcctggcgtggcaggcgcgccggagcttccgccgcctcagctacggccgctcccacgtcgtcgtcgtcgcctactacgcgctcctctgggccgtcgccgtcctcaacctcctctggtgcttcctgcaggcgtggcaatgtatgcctgatagggcgttctcatggaatgtgctgtctctgtttaccaaatcagggatgttattcttggaagttagtctcatagcatttctgcttcaaggaaacgaaaccagtggttttgaatctttggcacgtacgtttgttatctctggagctgtagttgctgctgatgtattgctcaagactatatatgtttttgggtttggtgtctctttgttcattgatgttgaccaaggaactggtgggaagtggggcctatggtttctacacaaattggtgcttactggtgtctatggcctgattgtgttcatgtatcactcaaggtggagagacaggttacctgcaaaaccagcatattataactatgtctgtgcgatgttactactgaatggcatatcactgtttggatgtttccttgttgcaactggagctggatttggtttatggttgtacaatctcaccagtgtatgttatcattctctttaccttccacttctctatgtgactttcctagcagactttttccaggaggaagatatgctcctagagaacgtctactactcagagatgaaagacgctgggttctttgatgctgactgggattgatctgcagataccacgccgtatgaccactttcatgtgaatttgcagtcgtagctttcatttctggaacttaatcttagatgggaaaattgtatgtaaacaaccgttataatcaaatgaaatatgtaaattgatatcgatatgcttaatctgtagtaggtatcttttatgacaggtggttagcagcccaacttagacaatggatgaggaagggtgtttttaacaactacgaaactatcaccctgatgaatgaatttacgtttctgtagcctcgtaaaaattcc

SEQ ID NO: 23958 - DNA, 849 bp, Oryza sativa
  ref <308>: DATABASE ACCESSION NUMBER: AK099400
  ref <309>: DATABASE ENTRY DATE: 2002-08-28
aaaaaaaaaaaaggagaagacagtgagaaaaagaggagaaagaaacatacacatgaggatccacccatcaccagccacgaccgccggcggcagctgcggcggcaagaaggatctccggcggctgccgcacgtctacagcaaggtgctggagctgccgttcccggcggacaccgacgtcgcggtgttcgaaggccccgacgcgttccacttcgtcgtgtccgccgccgccgcgctcgccggcgaggtgcgcgtgcgcaccgtcaggatccaccccggggttgtcagggtggtggtgcaggccggaggaggaggcgtacacgacgacggcgacgacgacgacatggagctcgacaagtggaggtcccggctgccggaggcgagctgcccggcgatggccgtggccggctacgtcaacggccagctcgtcgtcaccgtgcccaaggggcgcggcggcggcgaaggtgacaacgacggcggagaggaggcctggaggtgctgcaatggagggaagattagtggcaggctggtggttgtacagtagagaaatcatcagtagagtgatagccctttgtctgcgctaattgttcatctaatctacttattatctagtaatgtctttgccatctttgtttttgggtaaagatggggttctttgatgtttctcttccatcatagttcaaggaagagctgtttcatatgctgtctttcaaacagcttttcttgaggcaaagggaaggaagctactgtaagttttgtaagttgtagcttctctttgtttttgtttttgtttttgttttttttctttcctgaaaccaattgtaaatacaggagaatatgtgattaattttt

SEQ ID NO: 23959 - DNA, 830 bp, Oryza sativa
  ref <308>: DATABASE ACCESSION NUMBER: AK099401
  ref <309>: DATABASE ENTRY DATE: 2002-08-28
tcctctcaaaccttcgcgacaccaccacgcgtccgcggcgagcgccaccggtttgcgagctctccggccaccgccgcgtcgcgtgtccatgtcggcgtcgtcgcgcgcgctctcccgggcggggttcctggcgcggcgcggcgggatcgggatcctcgccgccgcccggtgcggctaccacacccggcgccggctgccgctcacggcggcggaggtggtcgagggcggcggcgccgcctccgcggcggggggcgcgtcgacgtcggaggaagccgggtcgtcgtcgagcgcgatggcgcggcggatggaggaggccatcgacggcgccatggcgcggatgtcggagcccgagtgggcgccgttccggcccgggacgtcgtactacgcgccgccgcggcccgccggcgccgcccgcgggttgctggcgctcgtcagccacgccgccgcgaggatggggccggtgccccgcgcgctttccgccgacgaggcgcgcgccgtcgacgccgcctcccgcggattcccctgcacgacctacttcatcgatggacactttccggatgaagtggagcgctcggatgtcattccagctgaagatgaatgagcgaaattccagctgaagatgcattagtggaagccaaatcagccgaagacgaattcaagctttgcctgtttcatgtgctagtatttgttttctgctgttgtacaaatgtagaatccagaaattcatgagctactgtgagggaataaaaacgcaggaatccatgtagctcatctggttataatatgtaagactcatcaaacaaactataaagagattaataattaccacc

SEQ ID NO: 23960 - DNA, 3216 bp, Oryza sativa
  ref <308>: DATABASE ACCESSION NUMBER: AK099402
  ref <309>: DATABASE ENTRY DATE: 2002-08-28
tcctcgctctgtacaacaacaggttccacggcgagataccgccggagctctgctcgttgcgcggcctcagggtactcagccttggcatgaacaccctcaccggaagcatcccatcagagattggaaaccttgcaaacctcatgactctgaacctgcaattcagcaacctcacttggggaatcccagaggagataggtgatcttgctggccttgttggactaggtcttggttctaatcagctggcaggctccattcctgcctcacttggaaacctttcagcactcaagtaccttagcatcccttctgcaaagttgacagggagcataccatcgctgcaaaacctttcatcacttcttgtccttgaattgggagagaacaatctcgaaggaactgtgcctgcatggttggggaacctctcatctctagtgtttgttagtctccagcaaaatcggctctcaggacacatccctgaatcattaggtagacttcagatgcttactagccttgatctttcacaaaataatcttatttcaggctccataccagattctcttggaaaccttggtgccttgagtagccttcgtctggattataataaactagaaggttcgtttcctccttcactgctcaacctttcctcccttgatgatcttggtttacaaagcaatcgcctcagcggggctcttccacctgatattggcaataagcttccgaatctacaaaggtttgttgtagacatcaatcaatttcatggaacaatcccaccatccttgtgtaatgccaccatgcttcaagttctgcaaacagtatacaactttttgtcaggaagaattcctcagtgtcttggaattcaacagaagagcttatcagttgtggccctttcaaaaaatcagcttgaagcaacaaatgatgctgattgggttttcttatccagcttggcgaattgcagcaatttgaatgcattagatttgggttacaacaagcttcaaggtgagctaccgagttcaattgggaatctttcttcgcatttgagctatcttatcatagcgaacaacaatatagaaggaaaaatacctgaaggaatagggaacttgatcaacttaaaattgctctatatggatattaaccgtttagagggaattattccagcttctcttggcaaactcaagatgctgaataaattatctataccatataataacctgtctggatccattccaccaactcttggcaatcttacaggactaaatctactacaactccaaggaaatgcactcaatgggtccattccttccaatcttagcagttgtcctctagaactattggatctttcatataacagcctcactggcttgatacctaaacaactttttctcatttctactttgtccagtaacatgtttttgggacataattttttatcgggggctttaccagctgaaatgggtaatctaaaaaatcttggagagtttgatttttcttcaaacaacatttctggagagattcctacatctattggtgaatgtaagagcttgcagcagctcaatatatctggaaattccctccaagggataattccatcgtcgcttgggcaactaaagggcctcctggtgcttgacctttctgacaataatttatctggaggcatccctgcatttcttgggggcatgagaggtctatctattttgaacctctcatacaacaaatttgaaggtgaagttcccagagatggcgtttttctaaatgcaacagctaccttcctcgctggaaatgatgacctgtgtggcggtatcccagagatgaaattgccaccctgcttcaaccaaaccaccaagaaggcatccaggaaacttatcatcataatctccatatgcagaataatgccattaatcacattaatatttatgctgtttgcattctactataggaacaagaaggcaaaaccaaacccacaaatatcactcattagtgagcaatatacgagggtttcttatgctgaattagtcaatgcaacaaatggttttgcctctgataacctcataggagcaggaagctttggctcggtctataagggaagaatgacaaacaatgaccaacaagtagttgctgtgaaggtgctcaacctcacacaacgtggtgcatctcaaagtttcatggcagaatgtgagacactgagatgtgttcgacaccggaaccttgtgaagatattgactgtatgctcgagtattgattttcagggcaatgagttcaaggccattgtatatgagtacctaccaaatggaaatttagaccaatggctacaccctaatatcatgggacaaagtgaacacaaggcattagatctcactgcaagactacgcattgcaatcgatgtggcatcttcacttgaatatcttcaccaatataagccatcgccaatcattcactgtgatcttaagccaagcaatgttctcctcgacagtgacatggttgctcatgttagcgatttcgggcttgcaaggtttctgcatcaggagtcggagaaatcaagtggttgggcatcaatgagaggaacagtcggttatgctgcaccagagtatggaattggcaatgaagtctcaattcaaggtgatgtctatagctatggcatactgttgctagagatgttcaccagaaaaagacccacagacgatgaattcggggaagcggttgggcttcgcaagtatgtccaaatggcattgccagacaatgcggctaatgttctggatcaacagttactaccagagacagaagatggcggagcaatcaagtcaaactcttacaacggcaaggatctaagaattacttgtgtcacttcggttatgcgcattggaatctcctgctcagaggaggcaccaacggaccgcgtgcaaatcggagacgctctgaaggagttgcaagcaataagagacaagtttgagaaacatgtgtccaatgaaggaacatcaagccaatgaagacaatgaagcattccaagatcatttttgcgcatggcatgatattatgctccatgtcattgaacacacaaataaggtgccggaagctgcggattctgcagctttttgtttatgtaaagctagcatcaattacagagaggctctatattatacatgattgcaaatttgtaagtgctgtgcggctaaaaaaaaaaaaattgaatactagggcatttgttcgaaaaaaaaaattgttcagagg

SEQ ID NO: 23961 - DNA, 1519 bp, Oryza sativa
  ref <308>: DATABASE ACCESSION NUMBER: AK099403
  ref <309>: DATABASE ENTRY DATE: 2002-08-28
gatctaaaaaaaaaaatgctgtggaaggacagcatctcccagagactctcagcacatccttcagccaggggatggtgcgatatcgatgatccacccgtgcagccgcgccggcgacagcctcgattattctacctagcttgatgaggattgggaatttggaatagccgagcaggggtgagtagctagcttgacgcgcgtacgggatcatggcagcctcgacgggggtggtgagttccctcctctcgaagctggcgaccctggcggagcagaagtacggcgacgtcaggaggatccgccgcgagatcaccttcctgacggacgagctcagcagcatgaacgcgctgctcctgaagctggccgacatggaggagctggactcgcagctgaaggagtggaggaacaaggtgcgcgagctcgcgtacgacgtcgaggactgcatcgatgccttcgcgcaccaccaccgccttagccgcggcgacgccgacccgggcggcctcatccggagggcagcacgcaacatgaagaagctgcgggcgagctaccgagcggccgaccagatccacgagctcaaggcccgtgagctggggaaacacaagcttcagtatctagatatctgtgacgatgatgctatcccagatgcactaatgtgttcgtcgtcagagtcagactgcccgtttccgcacctgcagaagcttgttctgtccaaccacaacatccaaaggattccaaggtggattggctcgcttgtcaacctctgtcacctggaaattgttgtcaagaccacacggcaaaacgatctcggcacactagggaacctgccatgtctgctctacctcaagatctgcaggttgtatgagcccgtcgaaagccagcagctcattgtaccgaaccgaggattccgttgcctcaaggagctgtgcttccagtgttggtgcccgttggggctggagtttgccccgggagctatgccgtgggtgcaaaccttccgcctgtggttcatgccatgctggaagagctgcgatcatggtgtcagcgtcggcttaggcatcgagcatctgctagaactcaagcttgtggatgttaagacgggctatggatgtggtaagagggaggtgaagtcatttgaggcagcaatcacagctgtggtcgccaaccatcccagacgccctgcgctcgtattgcgtagatcaggtgagagaagtgcagtcaggaaggagaattggacagcagtggagacaaacatgaacaagtccctgtttgattcatcaacagtcagacaaagattgcagaagcagtccagatttcaaacttgaaattaaagctgcgatgttcctcgctcctaagtcgtaatacaccaacggacagtttgtaggttgtttttccgggtagttccttgcagtgctcaacatttttaggtttgtgctctgctcttctataaatgtgaaatcaaagtgtgttttgattattatttcacgatgaacaattggtatttgagataattgttttaattttccgaggg

SEQ ID NO: 23962 - DNA, 2375 bp, Oryza sativa
  ref <308>: DATABASE ACCESSION NUMBER: AK099404
  ref <309>: DATABASE ENTRY DATE: 2002-08-28
gagtccctctcctcccccctctctctttctcggcgaggattggctgtgtgattagaggtaatttaatcgcgatagattggtttaactctaatccgggagtttgcttggcctagggtttggtggatttgcgtccctgtgagaatttccatatccaatcggaatggggccaaagagagcgaagtctatgccaagtcgtaatcgtgctgggaatggatgacaaagaatcacacagtcacgagctagaatgatatgcgctttttagtccatcaagaagaagtgattggtttgtgatcggtgctcgcatcgtcgccatgggaagtgcttgctctaggaagagaggccagctgcttgttgatgaggaagatctctacagtgcaaggttctccaagagcagcagcttcaagtggctactgcacaccttgccccgcagcggctctgatgtacacaggaaggtgcagggaccagtgcctgtgcggtgcccatcgctaatggagctctgtgtggccaaagtccgcgaggatattgggaagtattctgatttctcgctgctgcctagagatcttagtcagcaggtatttaatgaactggtggagtggaacattctcactgaagagttgcttggagcttttcgtgattgtgcattgcaggacatctgtttggcagactaccctggggtgagggatgcttggatggaagtagcggcttctcaagggcaatcattgttatctgttgatatctcttgctctgatgtgactgatggtggactgaatcaactcaaggattgcatcaacttgcaaagtttgtcatgcaattactgtgatcagatatcggagcatggacttaaaacattgtcaggcctctcaaatgtgacatccctgagctttaaaaaatgttctgctgttactgctgaaggagctaaagcctttgcaaacatggttaatttgggtagcttggaccttgagcgatgtccgaagattcatggtggacttgttcatttaaaaggcttgagaaaactggaaaagctaaatttgaggtattgtaatggcatcacagattctgatatgaaacatttatcagatcttacaaatttgagagagcttcaactttcttgctgcaaaataagtgatcttggtgtttcttatctaagaggtctatcgaagctagctcacctaaacctggagggctgtgcagtaactgctgcttgtttggaggttatttcaggattggcttcattggtattgttgaatcttagtagatgtggagtatatgacgaaggctgtgagcatttggaaggtcttgtcaagttgaaggttctcaatttagggttcaactatattacagatgcctgcttggttcatctaaaagaactgatcaatttggagtgtttgaacttggactcatgcaagattggtgacgaggggctagcacatttgaaaggacttctgaaactaagaagcttggaactttcagacacagaagttgggagcaatggacttcgtcatctctctggcctacggaatttgcagagcatcaatctctcttttacattggttacggacattggcttgaagaaaatttctggcctgaattcactcagatcccttaatcttgataatcgccaaatcacagataatggtttggcagctcttacatgtctcactgggttgacacaccttgatctatttggagctcgtataactgatgctgggacaaactgcttgaaatatttcaagaatctacagtcccttgaggtctgcggtgggttaattacagatgctggagtgaagaatatcaaagacctcaaagctctgacgctgcttaacctatctcaaaatggcaacctcactgacaaatccttagagctgatttcccgcctcactgccttggtctccctgaacgtgtcgaactctcgggtgtcgaattctgggctccaccatctgaagccactccagaacctgaggtccttgtctctggagtcctgcaaggtgaccgcgattgagatcaagaagctccagttggctgccctgcccaatctcgtcagtgtgcggcccgagtaatctggtagctgcacatgtgtccacatgtaaatatccacctgcttagagcaggacaaatgtacatattcccacaagaacaagctcgagtgatctgtacgtcagtcctgcttgtatcggtgtgtctggtcgccctggtgctgaagggtctgatggatggcctagtggtgaagggctggcacgtatttaggccgtgtaaatatgtagcggtgctgatgggaaggaacaactgtaaatatggcgtgcttcctctgcattttcgatgttatgtaatgtttcgtgttatcgtgttaatgaactggtattgttgcttgacctttt

SEQ ID NO: 23963 - DNA, 1696 bp, Oryza sativa
  ref <308>: DATABASE ACCESSION NUMBER: AK099405
  ref <309>: DATABASE ENTRY DATE: 2002-08-28
gagtctctcactgtgctggacatggagtccggcgggatactcccaccatccgagacatgcgccggctccggttcaccggacggccgcggcggctggcgcgccgcgcgcttcctcatcgccgtcgggttcctggagcgcatcgggttcaacggcgtgcagggcaacctggtgatgtacctgagcgggccgatgggcatgtcgacggcggcggcggccgccggcgccaacgcctggggcgggacggtgctggtgctgacgctcgtcggcgcgctcgccgccgactcgcggctcgggcggtaccgggcaatcgtggccgccggcgtgctccatctgctgagcttgggcatgctgacgatctcatcagtgatgcaaccaacgcaccaacacccggtgagctgccatgacgccgccgccgcctgctcgccgccgccaccgccatcgccatctctcggccgcctcgtcttcttccacgccgcgctctacctgcttgcgctggcgcagggcttccacaacccgtgctcggaagccttcggcgccgaccagttcacgccgccgagcgaccctggcgcgcgcgcgtcccggagctcctacttcaactggtacaacttctccagttcctgcggctacgccatctccaacaccgccatgagctacgtcgaggacaacgtcagctggaccgtcgggttcgccgcgtgcttggccaccacggcggtgtacctccccgtcttcttgctcggcacggcggcgtaccgcgccgagcaacccatcgacggcgcgctgctcgcgctgctcgccaagaagtccttgtcagccacgcgcgtgtggacggcgagggtgtttccccggaaggacgccatttgcacggaacggcttctgctggcgaaagaagaagaggtagaacatggcaagggtttcgtcgtcaagctgcttccgatctgggtgaccagcatagtgttagccgccgtcatctcgcagcaggtaacgctgttcaccaagcagggcagcacgatggaccgccgcgtcgccgtgggcgggggcgtcttcgtcctgccgcccgccgcgctgcaggacgtcatcagcgccaccatgctcaccgtgctgcgggcctacgaccgcgccctcgtgccgctcgcgaggcgcttcacgggccaccccgcgggcatcaccacgctccagcgcgtcggcgccggcatggccacgtgctgcctccacatggtcgtggcggcgctcgtcgaggccaaacggctccgcgccgcgagcgacgccgggctgccggcggacgccaccgtgccgatgagcgtgtggtggctggtgccgcagtacgccctcgtcgggctatcgaaggtgttcggcgtcatcgggctccaggagttcttctacgaccaggtgcccgacgacctccgcagcgtcgggctcgccatgtcgctgagcgcgcagggcgtcgggagctacgccagcagcgcgctcgtgtcggcgatcgactgggcgacgacgaggagaggaggagagagctggttctccgacgacatcaaccgcgcgcacctcgactacttctactggctcctcgccgcactcgccgcattggatgtcgccgttttcgtgtacattgcaaagcgatatgtctacaggaacaaagacgagcaatgattcttctgtttttttttatatatatatctgaaaaatggttcgcatgggg

SEQ ID NO: 23964 - DNA, 2717 bp, Oryza sativa
  ref <308>: DATABASE ACCESSION NUMBER: AK099406
  ref <309>: DATABASE ENTRY DATE: 2002-08-28
ggtctcgcccaccgccaccgccactgcactccggtcgccggagcagccgccatgtcgggccccaagctcgaccgcaccccgagcatccgcgaccgcgtcgaggacaccctccacgcccaccgcaacgagctcgtcgccctcctctccaagtacgtgagccaggggaaggggatcctgcagccgcaccacatcctcgacgcgctcgacgaggtccagagctccggcggccgcgccctcgtcgagggccccttcctcgacgtcctccgctccgcccaggaggcgatcgtgctgccgccgttcgtggcgatcgcggtgcggccgcggccaggggtgtgggagtacgtccgcgtgaacgtgcacgagctcagcgtcgagcagctcaccgtgtcggagtacctccgcttcaaggaggagctcgtcgacggccagtacaacgatccgtacatacttgagcttgattttgagccattcaatgcctcggttccacgcccaaatcggtcatcatcaattggaaatggcgtgcagtttctcaacaggcacttgtcttcgatcatgttccggaacaaggattgcctggagcccctacttgatttccttcgtgggcatcggcataagggtcatgtcatgatgctaaatgacaggatacagagtctgggaagacttcagtctgtgctgacaaaagctgaggagcacttgtcgaaactcccagctgacacaccatactcacagttcgcatataagtttcaagaatggggattggagaagggttggggcgacacagctggatatgtcttggagatgatacatctccttctggatgtgcttcaagcgcctgatccatctactcttgagacgttcttgggaaggatccccatgatctttaatgtcgtcgtagtgtctcctcatggatattttggccaagccaatgtgttgggcttaccagatactggagggcagattgtctatatactggaccaagtccgtgcattggagaatgagatggttcttaggttaaagaaacaaggccttgattttacccctaaaattcttattgttactcggctgataccagaagcaaaagggacatcatgcaatcagcgtcttgagagaataagtgggacacaacatacttacatattacgagtgccattcagaaatgaaaatgggatactcaggaaatggatatcaagatttgatgtatggccctacctggagaaatttgcagaggatgctgctggtgagattgctgcagaactacaaggtactccagacttcataattggaaactacagtgacggtaatcttgttgcatcattgctatcttacaagatgggaattacccagtgcaatattgctcatgctttggaaaagactaaatatccagactcagacatatactggacgaagtacgatgagaagtaccatttctcctgtcagttcacagctgatataatcgccatgaacaatgctgattttataatcaccagcacataccaggaaattgctggcagcaaaaacacagttggacagtatgagagccatactgcatttactcttcctggtctgtatcgtattgtccatgggattgatgtttttgacccaaagttcaacatagtctctccaggagcagacatgtctatatactttccgtacactgaaaaggccaagcggctcacttcgcttcatggttcacttgaaaacttgatttctgacccagagcaaaatgacgaacatattggacacctggatgacagatcaaaacccattctcttttccatggcaagacttgaccgagttaagaacataacagggttggttgaagcttatgctaaaaacgctaggctgagggagctggtaaaccttgtcgtggttgctggctataacgatgtcaagaaatccaaggacagagaagaaatcgcagagattgagaagatgcatgaacttattaagacctataacttgtttgggcaagttccgttggatctcggctcagacgaacagggctcgcaatggtgagctctatcgctacatagctgatactcatggtgccttcgtgcagccagctttctacgaagcattcggtctcactgttgtggaggccatgacatgtggactccctacttttgcaacagtccatggtggacctgccgagattatagagcacgggatctcagggttccacatagatccttatcatccggatcaagctgcaaatctgatagctgacttcttcgaacaatgtaaacaagaccccaaccattgggttgaagtttctaatagaggcctacaacgtatatatgagaaatatacatggaagatctactctgagaggttgatgacattggctggggtttatggcttctggaagtatgtctcgaagcttgagaggcgggagaccaggcgctatcttgagatgttctacatattgaagttccgtgaactggcgaagactgtacctcttgcagtagatgaggcacactgactgtaggtcctcgacgtgatgagatctgagggaaatcttcctgctgtcagtgggaatggtataggcaataatgtgcagcagatggccgcttggccgataataaaatggaatgtaacttgtgtgttcagcaagtgacgaacttgggagttgggactctgtaaaactagatttgtcaaacatcttgtctatgtacattaaaatagtttgatactcagtgcttcattgccattgtgtt

SEQ ID NO: 23965 - DNA, 1050 bp, Oryza sativa
  ref <308>: DATABASE ACCESSION NUMBER: AK099407
  ref <309>: DATABASE ENTRY DATE: 2002-08-28
gggtggcatccaaccaccaatccatctcctcctcctctctctctctctacgcggctcagccatggtggagaaggccagcgccgtggcgcgcaagctcgacgtctccgtcggccgctgctcgacgtccccgtacgggagcggcggtctcccgtcgccgacgagcccgctcgaccgcgcggcgcttcacgcgccgtcgccgcgcggcgagtggcggcaccgcgacgcgggcggggtcgggctcggcatcctggcggcgctcgaggcgcaggaggaggaggaggcgcggaagcccgcggtgtccgccgtcgccatcgcggcgtcggcgtcggcgtcgtcctccgcggccgccaccaccacccggcgccgcgccgcgaggctggaggtctcggagctcgggtgcagcgggcggtgcgccaccagcctgtgcggctccggcgccggcgcggcggcgttccgggtggcggagttcctggcgtgctgcgacctctgccggcggccgctcgacggcaaggacatcttcatgtacagaggggagcgcgccttctgcagcatggagtgccgctaccacgccatcgtcagcgacgagttccaacaggagaaggaccggaagcgccgcgccgccgccgccgccgccccgagggatatccccagcaaggtctccgccgccccatcaaccgcggcggcggagatcgccggatcgccgtgctccggcggcggccagatcttcttcaccaccggaatcgtagccgcctgatcagcagaaagaaaggaaggacgccgcggctgtaacataaaagaaaataataattaaaaaataagaaaagatgagaagaggaagaggaaaaataataattaagggtgtattaattatgtgtagagagattagagaggtgttttggtgggaggatttttgctctccttgtttgctttgcaagagggaggcattggttttggtcttgatttttgttttctttttgcctctttatgtaatatttttggtggtgctacaagaggaagaccaagcaagaaagggatgatgacaagttttcc

SEQ ID NO: 23966 - DNA, 2926 bp, Oryza sativa
  ref <308>: DATABASE ACCESSION NUMBER: AK099408
  ref <309>: DATABASE ENTRY DATE: 2002-08-28
tcaggtctggaattggggagcggttccggtagggccggtggcctccccgtcggcgatcgccgctcgcgtcgccgccgacgacaccaggagctccgcctgcccgccgcgcgcaggaggaggcgaggttggaaggcggtcactctggcgtggtacgtactgagctcgtctggtctttctcgtgcctccggctccgcttcgttcgtcaactagggtttccatgttcatcgcttcgacgcttcctgtaacttcagtgtgggcttctctttgttagacgtttcactgcaatggagtacagagaggtcaggaggagcatttgatgaatcaagtaaaggtgtacagaaaaataagcctactggttcggaacttttcatctctatttccattaagaggtcaggaggaggctgggtggtgaggttgtacaattttctttatctttttttttcccatttcaatcgcacgctaataattatttgggtttaaatcatatattccagtcactatcaactaattagaattaaaaacaattctagtgctacatttctaatctgggcatgttttgatggtatagaaccgaaatgtccgtcgtctttaatcaatgccgtttagatcattgggaacaattgagctggtgaagcagggaattaaccattatgggggttagaattgctatagtacctagactatgtgaaaatcgctgatagagcaatctttcatttgttttagctaagaatatgagattgacaatgcaaaagctaaataagtttactggggtaaacatggccagtattgtgatttaaagaattatcagtaggaaacatggtgatagtaacatgtatgctagttactactattcatttacacttgaagttggttttccttcataactttttgcaaggtttgattggttttaatttatgtgcttgcccacccaaattcaaggtaaaccatcagtttcaatgattatatgggcaccagtccttgccacagtccaaatctccttgcttacctcggtccatgcttagtcatcttgtctgttcatctcatcatgttttcctgatgaccatgtgacatgtcacacaaatgtacagaattcaatagaagtcagtttttgagtactcatatccgtggtctgtcagtgaattgtgaaaagacaaagtgtgggaatttggatgcgaagcaaccatgtttattgtgcgatcagcgttcggcaggtcagtctgataatgcagcgtatctgtaccaccgctgtgtgcatgtggatggccgctctgaggcgtgacatgtcgtagtcacctatgcaggaatgcatggtatgattgtataacttgttactcaacttccgaagtcctaacggcatttcaaatgagcttccaaattgttgaatttgctcttcaaggaaaatccactagaaaaaaaatgttgctgacaatacccaatgacaggtggatcctgctgcagtttacatcggcatgtagcaatttggttcgatgatactgctctgatgtccttgacgaggagggaaataagggtatataaaataaacccgtatcgacctttgtctgtctgctgtttgtggtgtcctacattgcaggagctaatctgatttgaatttttatgtttttagaacaagttaagaaagcaagcagttgtgccaaacaagggagtacaaagcagttgggtcataaaaattcaggacaggatctgttcctctgtgcgtgcactctgaaacatatgccatcatagtgttcataaccactggcccattcaagggatgagcttatttaagagagccacagaagaacttctgaaatgaccagggaaaagatgcaaaagccgtgatattgtggtagtagtacacaaagacattccttcgtcattgatctccaacgggagcagtgtctgattacacagtaaccgacctactcaagcaatcatgcgtgttcgttgcttaaaggatggcttttctttgctttgcaagtcttgatcccttcctgttcctccaatggcaagcaaaagctatggcttacccagcacttttgagttaggactatggctattatgtgaagagccatcagtttacttgtacggaaaataaaagcgaagctggcatagtgatgtaataatggtatgtatgtcactaacaatctccagtgtggcgtcttcagtaacatagtgttgttcagttagtttgcactcttgttttcatgtgttttactagcatagatggtcagggttgttctaccatttccttgtcactggacaactgagtagatcacaattatagctaccaataaatgaggtcgctgctggtttgctggggtagcacttcacaaagagagactattcaattttggatatcattttctgtcagtggccacctgctaatttgttcggcgtttcatgctggataaaagaagtgcacatcaagaagaggagtaactataaccatgtgatggaccgaatgaacttatgatacatcatgtgttttactatctctctaggtcagaaatactaggacaacccagatgaggaacagtacttcttgttgctgtagcttggacttaaaaggccagtcatgtgctgaactgcagatacttgatgtgctctcttaccttcaggattaaacaagtgactgcttccttcattgcagttgggttttatttccagtttaatgagcctatgattctgtgagtcgtcttctctgcatagtattataaacagaagaatagaagctagcatctgctgcttgctggaagtaaaatattgctaacacaggttcctgcatcaagacaacagtggtggaggtgggggacctttggagcaggagtttaggaccgacgcatggcccctccttgtgcatgcatcattgtacatatatgtacgtatacctgtacattcatatttacgagtatatactactacattt

SEQ ID NO: 23967 - DNA, 1230 bp, Oryza sativa
  ref <308>: DATABASE ACCESSION NUMBER: AK099409
  ref <309>: DATABASE ENTRY DATE: 2002-08-28
ggttttgagccagttgagctgctgcagctttgggtgaggtggaggtaggaggcggcggccgctcccatccttccttcacctccatctatctccaagctcgatcttctgctgaatagagaggagatgggtgacgtggccaaggacctgacggccggcacggtgggcggggcggcgcagctggtcgtggggcaccccttcgacaccatcaaggtgaagctgcagagccagccgacgccgccgccggggcagccgcccaagttcgccggcgccatggacgccgtcaagcagacgctggcggccgaggggccgaggggcctgtacaaggggatgggggcgccgctcgccaccgtcgccgccttcaacgccctcctcttcaccgtcaggggccagatggaggccgtgctgcgctccgagcccggcgcgccgctcaccgtcagccagcaggtcgttgccggcgccggcgccggagtcgccgtctcgttcctggcctgtcccactgagctcatcaagtgcaggttgcaagcccagagcgcgttggcgtccgctgctcctgccgccgccgccgctgccgcctctcccgtcggcggaggcgcggccacggcgacggcgagcgtggcggcggtgaagtacggcgggccggtggacgtggcgaagcaggtgctgaggtcggagggcggcgtgggggggctgttcaaggggctggggccgacgctggcgcgggaggtgccggggaacgcgctcatgttcggcgtgtacgaggcgatcaagcagtacctcgccggcgggcaggacacgtcgtcgctggggcgggggtcgctggtggtggccgggggcctcgccggcgcctccttctgggggtcggtgtacccgacggacgtggtgaagagcgtcatccaggtggacgactacaagaaccccaagtactccggctccatggacgccttcaggaagatcctcgccgccgacggcgtcaagggcctctacaagggcttcggcccggccatggcgcgcagtgtccccgccaacgccgcctgcttcttggcctacgaggtcactcgctctgcactaggctgaactcatgtatcattacatcctcctccttcttgacccttaattttcttcttctgattctgattctgattcttgctgtcatccatctcatctgtggatgtaagaacagtgtaattctgtacacacaaatactatctttataaaaatttcctagatcac

SEQ ID NO: 23968 - DNA, 1043 bp, Oryza sativa
  ref <308>: DATABASE ACCESSION NUMBER: AK099410
  ref <309>: DATABASE ENTRY DATE: 2002-08-28
gtcttcccccaatcccaatccctttccccactccccccctccctctcgagtctcgacgaagcgaggaagggatagaatccccccaaatcccccaacgcgagctccaaaccctagcgccgcaaaggcgggcgacggtttccctctcctcggtgccccgcgcccggatctgcagcgatctgggagggggcggctccggcgatggcgatcctggcgtggtagcgcccgcccccacaattcggaggccttcccccggttggtgtggtggagggagggagagggcgggtttctcttcgtgcgggctctttacctccggtggtggcttctttggcggctgcgttttaggagagcggccgcccggcagggcggcggagacacgaaagtgctgcttgcttgtacacttgttcatgtgtctatctgttttctcgatttgttccggtttaaagcatcagttttccgctcaatttaagggcgaaggcaaaattttttgttatttactgctgttctctatcgaataatctgctctattacagaagaagagggggggggggaaaagccaacaaaaaaaatagaaagaaaaacaaaaaaaataaaaagataaattcagaagaaaagaaaaaaaaactgagtgggcattatggctgtatattacaagttcaagagtgccagagattatgactcgattccgatcgaggggcaattcatctcggttgccaacctgaaggagcggatttttgagtccaagcatcttgggagaggcacagattttgacctcatgatttcaaatgcgcagaccgacgaaggttggttcttcttagcgtcgggccctttgtgtgatttcttgtatgagtgaatgtaagcaagttgataaggccagatagtattgcgaatttgtgatagacctaggttttattgttgtttcatttgtatggtaaatctgtgactttctgatttgtgcagtcaagagttctgcattgattcagttgtataacacgaaaattgatgctctatctagtatcaatagctattatcattttttttttacc

SEQ ID NO: 23969 - DNA, 2956 bp, Oryza sativa
  ref <308>: DATABASE ACCESSION NUMBER: AK099411
  ref <309>: DATABASE ENTRY DATE: 2002-08-28
gccctctccccgaccgcttgcttccttcccctttctcccgcccctctccaccaaaccctcaggccgtctccctccctccgcctccccactcaccatctccccgtggtgtcctccgcggctccttcgggcgcggtggcgtcggcgacggagcgccctcgcttcctagagcggtgcggcctcaacgccgacgagttcgacgacgatgccgaggcggaacccatgaagagaggaggaggggaaggccatcgtcattgctggatctggtctctccttgctcagcggtagcggcaacgtcctcccctttgtcctggcctccccatcctcctcccaaaaaatcccccactgctggcttcatcggtgacggcgatgacgcacagtagctcccgcgtcgcccactccgctagatatggaggcacctcgtcctcttcttcgtctcagcgccaggcagtcccctcgtcctcggcaccatcgtcgacaccaaaggaacaatgacgaggcctctgggtggagacgaggatctcggtggcgatgcggccggaggcaatacaacgttcccactgttagcatgacattgaagtgtggttgattaggcgaaggaagatatattttggttggaggattgcagggatgtaagcggtttgaataacatttggggctaatctgagaaagaggttccagtgtttcctctgcgaaagttgttgcgaaaagcagctggacaagacaattatgagattccatttacatggtttttcttcatggtcatgaagcaacttgctcgctggacctgttgcatagcttacatggctcctcccattatgtcttgcttccagattctgggaaatcattgagctgacctggagttcttgttcagtgttttgctcttcgactaagaatctggatatggcgagctttcagcaggaaacaaaggccaggaatgatcaagggcctgttgctgatcacgttaggcatcagaaccatggaaaacctcacagatcatccagaaaaaactctcagaatgcaaaggatctaggattttctccatcgagtttgttgccctgattgcattttgcccctttagttcagagttgttcattctctcgtgagtatgcttgagaaaccagtctgttggtcattctctcgtgagtatgcttgagaatcccgtctatttttttatgtgttcctgctagaacctgagttgtgtggctgccttctcatctcaacccatagaagctatttctgattttttttttttttggcctgcttgttttgggggctgacatgcatagcatcagtaataccttcttaacataagctgcgcctactattttactatcctcttttatgtttaagatggttgccagttcaataacacatctgcatccatagcgattccatcatgttgcttcgtttgtccatgcagggaaaggagaccgcacaaagcatccgttaatttatccattcagaataagataccaaggaaacccactaaaatgatagttggcaacaacctagcaagaagaacctaaggtgatggaaaaagcaacaagtacttagcgtttgtcattctctccagcaggtgatatgctattcaatttattatttcctgtgattttacggtgccactaccttcgttctgttctcggaagcaatatagctaattgcctataataaaagtttagcgcatctgccaggtagcattttcatacaatgttagatacttacatgctatgcatctattcaagatcccttttcttctgtcatgacctattactggcagtacttatttttgggcactcatatggatcttttctaatggttctctgttaaagctacgcattgttcacacatgaagattaagtgaaaaagatgacacacccatcttacctttatttgatggatatgctatattaaaacccaattgtatgtccttagcctcttaggtcattgtattgcacaacaccgtttgcagatgagctcagtatatatattgcttatatcattgtgtttgcataataaggttttggtactaatatgaggttactatgctcagagtggttagatatagaattcattttgttattggtctgtagtttgcttttggctcttgttttgtttttccacaggcccagcaaatatgatataagataatgttagtcatggtccctcatcttgaaaaggtcgctgctgacattcctcaaacaaatatatgagcctgtatataccgtactatttaatggtcgtctcaaatgataaatatatgaaagtattatatgtttaccgtgtattatgcaagagtacatgagcttgtcaggttgtgtggcgagatcaaatatatcattgctgattgctgatttgttggctaccttgatgatgtccatctgagagcatctgaacatatatccattgaaataatctagtttcacgtccttagaatgcatatagactttgttggcggtatggcatgaggcccttcaaccagaatctaccgaaagctatgcgaagagtggggattcaagcccgagacgtcaaagttagtcggggcgaagccccctatggcgaagactatggaacaaggacggcgagaggcgagggatcgcgcgggtactctgccaagccagtggcctcttgggcgaaggatgtagggcgaagagtatatgccgaagggagacgatttcgccaaagcaagcttgcccccgcgagggccgaagaagccttttccggcccatcaagcctaggggctattgggccgacgatcgcccgacggcccatcaggggctcataaacctctattacactatatacccatgtaaatgtcccttaaccatgtaaattcccctgtataaccaaaaccctagtagtaagaacctgtaataggggctataaatagtctcatagggccatgtgatagggggatttaagaaaaaattctctaatcaatacactttacttgttttcc

SEQ ID NO: 23970 - DNA, 659 bp, Oryza sativa
  ref <308>: DATABASE ACCESSION NUMBER: AK099412
  ref <309>: DATABASE ENTRY DATE: 2002-08-28
gacagcatcacaagcatcacctcacatcaaaagaaacacagtagccttccagaacacacaaaaacaacagtcacttaccatggcttcttctggttgtcatcttctggttctgctcctggccttctcagccctccatgccaacagttccaaccacgctgcctccgataccttccatacctgcagtccccaagctgacagtgcccccaatgccatctgttcctatcccaaaggttaccattcccccaacagccgctggcacaattccatctcttccaattccggccattccgaccaccataccaaccattcctacagttcctgttaccctgccaccaatgccctcaatcccaaccactattccatccattcccaccacaatcccgacgacgatccctaccattcccgggttccagatgccaccaatcccattcatgtcctcacctcccaaaaccactagcccctgaagttcttcaagaggatgagactgatattcatggttactagtcagggatttggttaggcatatgttgccatcatatcagtgtgtacatttatttgtgttctgttattggagttatactggcttgcattggtgtgattgtaaatgcagctaggcagttgtactatcatgtttgtgaataaatcatttcttggtttgc

SEQ ID NO: 23971 - DNA, 812 bp, Oryza sativa
  ref <308>: DATABASE ACCESSION NUMBER: AK099413
  ref <309>: DATABASE ENTRY DATE: 2002-08-28
gaggagtatatcgcgttcccttccgccgacggcgaaactctccggcgccccctctccttccgttcctcttcgcctcctccattaatcggcgtcaacccacttctccgccgtgtgtgcgtacgtgcaggagcgactgctgtggagagcgcgactccggccgctggcgttggatgcgcgcgcagtgccttccgcgtgcgcccgatttgcgtcggcagcgcccacttcggaggccgctctgacgaattccggcgccgccttcacgatccccgtccgcgtgcggccgagacctgcggcggcgccaacctcggaggccgattcgttccattcctgtgcaagtctcgtgcgcacgacgagtactgcgaagaacaacccttgccatcacatcctcagtatctgggggcggacgctccaggcagtgaagctgggactgggagcagccgccggcgaatgcttctccaagagcaccaagattcacagatcgtagtggttctggaaaaaaaaagtcctatatggcgaatgtctgaagctagtggttgatggaaaacaacagtcctatgtgtgaagctggtgagaatattcagagatgctcgtgtatagattattatcagttagtactctgtttgtgatctatttactccctccgtccaaaaaaaaaaactcaaccaaggaaaggagtgttttttgggatggatggagtattatgcaaggtaagggcttgtttagttggtgaaataaaaatttttggatgtcacatcagacgtttaaccagatgttggaaggggttttcggacacgaatgaaaaaactaatttc

SEQ ID NO: 23972 - DNA, 1131 bp, Oryza sativa
  ref <308>: DATABASE ACCESSION NUMBER: AK099414
  ref <309>: DATABASE ENTRY DATE: 2002-08-28
ggaattccagtaactttcctctcatctctcacagaaaaaacattcctctcatctccaatcagcagctatctcccttcctcatcaccagcttgctgtgatcttatcaggcctttttgttgttctgctggtcttgctcgcgtgcaaagagatgccggagcactctgagaatgcggctgcgaacattgtggacagcatagtggacgccattgccgacaatcttcccaagcagaagtcagtcagatttgaagatggctcaatctctgatcaagctaagagactcttcggtggtcagaagtctgtccatcatgttttgggtggtggaaaatccgccgacgtgttgttgtggaggaacaagaagatatcttcaagtgttcttgcagttgcaacggctgtctgggttttcttcgagtggctcgactaccacttcctgacgattgcttgctttgttcttgttcttggcatggttgtccagtttgcatggtccacttttgcaggcatgctaaatgggtcaccttcgaaagttcctcgcgtcgaattgccggatgagctgttcgcaaacattggttctgcaattggcacccaagtgaacaagttcttgggcactcttcaggatgtgtcttgtggaagagacctgaagaattttctcctggtgattgccgggttcttcgcggccgctatcattgggagctggtgcaatctcctcactgtcatttacattggatttgtgtgtgctcacactctcccggtgctgtatgagaagaaccaagaaaaagtggacgagttcctgtacaacacacttggcctgcttcagaatcagtatcagaaacttgacaagggtgtcctgggcaaggtgcccaaagggatcatcaagcttaagaagagcgattagtttcactagctgctgctgctgctaatgctgcgtacagtcaatcagaatactgcgtaatttggacagatgttagcttcccctgaacagttaattgtgtacagtattggaaaacaccgtgtcagtgatgctagtggtatactcctatattgtaggccaaattcatcagtggcagattgtttcagctagtctcatgtgttttgcccatgagagaaattgggaaaaaaaataaaaggtgatttgtg

SEQ ID NO: 23973 - DNA, 1355 bp, Oryza sativa
  ref <308>: DATABASE ACCESSION NUMBER: AK099415
  ref <309>: DATABASE ENTRY DATE: 2002-08-28
gcatgtgtttgcattgttgctttggtcgcaggctgcaccggtgtacctagcggagatagcgccggcgcggtggcgcggcgcgttcacggcctccataggcctcttcggcaacttgggtttcttgatggctgacatgatcaactaccgcgccactaccatggcgaggtggggttggcgcctctctctcggcgccggcatcgtcccggccgtcatcgtcatcgtgggcgccgcgttcatcccggacacgcccaacagcctcgcgctgcgcgggaggctcgacgaggcccgagactcgctgcggcgcatccgcggggccgccgatgtggacgccgagctcaaggacatcgtccgcgctgccgaggaggaccggaggtacaagtcgggcgcgctgcggcggcttctccgtcgcgagtaccggccgcacctggtgatggccgtgctaatcatggtgttcttcgagatgacgggagccatcgtggtggccatcttcacgccgctcctcctctacaccgtcgggttcacgagccagaaggccatcctcgggtccatcatcaccgacgtcgtcagcatcgtctccgtcgctgccgccgcggccgtggtcgaccgccacgggcggcgtagactcttcatggtgggcggtgccgtactgatcctgtgccaggtggccatggcgtggatcttcggcgcgcagctgggcgctgacggtgggagggcgatgccgcgggggtacgccgtcgcggtggtggcgctcgtgtgcacgtacacggcggggctaagcgtgtcgtggggctcgctgtcgtcggtggtcaccagcgagatcttcccgctggaggtgaggtcggcggcgctggggctgggcggcaccatctcgtcggcgctcacgttcatgcagtcgcagtcattcttggagatgctgtgcagcttcaagtacggcgccttcgcctactacgccggatggttggtgatgatgacggcgttcgtggcggcgttcctgccggagacgaagggggtgccgatcgagtccatgggcgcggtgtgggcgcagcattggtactggaagcgctttgtcaagctggcaccggccaagcaggccgatgggccagaatgatgaaaagtattttctacacctagatgtgtatgcacatagtttaaaccataagcgttacaagcatgtttgtccgaaacgtagtggttatccgaaaccataagcgttacaagcatatttaacgttaatttggatctgtaaatgtagggataagttcattttacgtccctcattgtgatgttgactttgaaattcggtctctcagtatgccaaaccggtgtacccaaggttccagggaagtatagtgctc

SEQ ID NO: 23974 - DNA, 944 bp, Oryza sativa
  ref <308>: DATABASE ACCESSION NUMBER: AK099416
  ref <309>: DATABASE ENTRY DATE: 2002-08-28
ggttcgccgccgccgtgctccagcgcctagggttttcttcgccgccggcgagtgctccagctcctagggtttcttcaccgccggcgagtgctccagctcccagccctgcgcgtcctcctcgccggacgctgccggtgacgtctgggccaagctaggtctgtagtgccctccgattccgtgttcccggaggtggagctggccgaggacgacgccgtggtgtgctcccgggtcaccccggatggcggcggggaggtggtcgcgtggtgcaagattaggcgcggcggcgacgtgtcggcggcgacgatttggaatctgagcttggatgcaattattgtcgatggaagagttatccagcaagaagcagttgacatcaaaccggggagtgaaattgttccagggccccagaaagatgggtatctgttgtacacctttgatataactggcctgaatgactaggacaaaaataatatcaagattgtgctaggtattgagaatgcaaagtgcagcatatgcttaaatttgtgggatgatgttgttactgttgcttcatgcctccacaacttctggctatactgtaagttttttcatcgctacagcggtctgatgaggagattgcattgttggagtcatatgccccggtcaagacaaatattctaatcaaggccatctacaccatccgatgtaccacgcggcaacgatccgtcccctcttctgcttctaccctcccgtgagctcgtggttgaaagttacatttgtcatgaatttggattatcattctattttgaagatatccttgattgataaatgcactgccatgtttcagataacattttattctcttatttcccccaattttccttccatttggcaattctcgtggtgttggtttgtctgtactgcactttgacacattatatttaatttacaagacttgccaggtgcct

SEQ ID NO: 23975 - DNA, 1956 bp, Oryza sativa
  ref <308>: DATABASE ACCESSION NUMBER: AK099417
  ref <309>: DATABASE ENTRY DATE: 2002-08-28
ggcgtcggccatggcgctcgccctcctctccccctcatcagcgagtgcccaccgtctgccgcgccccatcagctccccgccgctcgggcgcgccgcctcggccaccagcatcggttcctccttcttccccctctgctcctcccctccgtcctccggctcttgctccttgcggagggccagctccgcgggcggcgcaagcgagccagaagcgtcgggggccacctccctcgacgccgacttgctcaggcgtgtcgccggcgccgcggacgccggcgaggcgctggacatcgtcgcggagtcggcgggaggcacgggcggtctggacgcgtccgactgtaacgcgatcgtcgcggcggcgcttgaccggggcaacgtggagctagcgctctcggtgttcgaggcgatgcgatccggctttgcacgagctggggcctggaggtgggcgaggccagacgtgcggacgtacgcattgcttgtccagcgattggcagctgctctgcgtgtttctgatgctcttaggataatcgattatgtatctcgcgcaggcatttcttcggcagaggaggtcccatttgggatgattattcgcagtccaagctgcatggtagcagtcgcagttgcacagccccagcatggaactcagactgtttcttgttcaaaatgccgatatcagtacgaactattttctggagttatcatgagcatcgagtctgaagaagttagcatggacatttcagctttggacaaagcattgcgatttataaatgtgataaaagacggtcttccagctgctgtgcactctattgtgattcgcacaccttcaggaacagcccgtacccatagatttgctacgcagactgtagaactgcctgctcaagaaggagaaagagtgaccatttccttggctgccccatcaaatgtttatcgtgaaatgggtccccttaagatttctgcacgctcacaagggtttagaccaggagaacccatgtctctcaccaatcacatcaacagacaagtctcaagattgctaagagctccatcaaagaacgagggaccattcgtctttaatccatatttgttggtcagtgctcttgctcttcttgcctctggagatgctgcttctgcattcatcgacccaagcctccctagatttattacagcaactgcttttgcatcaggctgctgttggaacagcactaaatcaagtgatcctgccagagattcgaaagcttccacaaaagacagtagatataattgctgttcggcagcaacttttatctcagtacgacatgcttcagactcgtctaaaggatctgaaacaactttccgaaaaggaggtgtggatgctggcaagaatgtctcaactagagaacaagatattagcatgctcgtcgaggtagagtgaagagggtacttgaaagcttggaaagtacactcctggcaaagattgagctgatggaaagttatgcaaaattgtgttctatgattgaaattgaagttgagatggactcagatgttattgttgctgaagcagcaagtagtgcagaaaggatatcagaacaaatacagcaactaatggagattgatagtcttgaagagcaatggcgtatacaagctgaggctaatgacgaagcagaaaggctgcttaattcagattcttcagaaacattttccgctgagcatgtataatgagttattttgggtaatatgcaagtacctctgttttcttatgccatgtttctttgtgtaaaatccttttcttcccttataaactagaacaaaatcgtaataacatgtgaagggagatagttttggttcagccatgtagatgatgaacagatcactgtgttacaatacaatatgacagaagtaaacaaaccctttttaaattcctgcaacgcatgcacatccattgcatgttgagtgcagattagaacaagcttacagttggacatg

SEQ ID NO: 23976 - DNA, 1597 bp, Oryza sativa
  ref <308>: DATABASE ACCESSION NUMBER: AK099418
  ref <309>: DATABASE ENTRY DATE: 2002-08-28
gcttccctccccttcccgccgccgccgcctcctccgcctcctctccgccggccgacgccgccgccgccgccatggactccggcggcgcctccgacccctcgcgccaggtgcgggtgcgcttcctgacgaagctccccgcgccgctgcgcgcgccgcccacctccatcgccgtccccgccgacctcacccgcatgggcctctctgagatcgtcaacagcctcctcctcgccgcctccccggatcaccaggcgcagcccttcgacttcctcgtcgacggcgagctcgtgcggctcccgctccaggagttcctcctcgccaagggcatctcagtggagagggtgcttgagcttgaatatgtaaaagctgtggcaccgaggaagcaggaggatccatgcccgcatgatgactgggttagcgcagttgatggatcgaacccgagattcgtattaacaggttgctatgatggtcttgcaagaatatggagagatgcatctgaatgtacacatattttggaaggacatagtgacggaatcacttctgctcgcttcattaataaaggtgaaactgaagacaggctgcatgtagtcactgcatcaaaggataggtcattgcgcttattcaagtttgatacatcagtcagtgttccaaagcaaattggggcttacaaaattctccgtggccacacatcatctgttcagagtgttgcagtagacccttccacaaacatgatatgttctggttcctgggataactcaattaagctatggtcagtcgaagggtcggaagaagatggtgacactgtctcagtgaagaagagaaggacaaattctgattcatctggacctgaagaatctctgtttgagggttctgccacttcaacatttctgggacatacgcagtgcgtttctgctgttacctggcctgagcgacaaacaatatattcagcatcttgggaccattctgttcggcagtgggatgtccaaacagggaaagagacatggaatatggtatctgggaaggccttgaattgcttggattgtggtggtgagagctcttcactaatcgctgctggtggctctgaccctgtcttgagggtatgggaccctcgtaaacctggaactctagctccaatttttcagttttcctcccataaaagctggatcagtgcttgcaaatggcatccaagttcgtggtttcatttggtatcatcttcatttgatgggaaagtaatgttgtgggatctaaggacagcatggccactggcttctgtggagtcacacaaagacaaggttttatgtgcggactggtggaaaggggatagcgtcatcagtgggggagctgattccaagctgtgtatagcttcagggattgaaatagtgtgatgatgttccctcgtttttgaccaggtttaaacatttttcatctcaattgattgaaaaatatcctgatttgatatccaggatctagtatctaactgctgttcagaattgaacagaatgttatgtatggaaagatacctgcaaaaggaagctgtgccaattttggtagggaacaatgtgtaatcgtttggcagattcaatacatcacataatttatc

SEQ ID NO: 23977 - DNA, 564 bp, Oryza sativa
  ref <308>: DATABASE ACCESSION NUMBER: AK099419
  ref <309>: DATABASE ENTRY DATE: 2002-08-28
gacaactccgtctctcaccttcaatcaaactacagaaatctgaaccaaaaatcgtgcgacgcgatggaagggagcaacctcaagtcggctgcgctactggagcagttgcatgtccacctcgcgtccggcgccggcaaggagctcgtcgaaatgatcggcttcgtctaccagctcaacatctctcccaagaaactcggtttcgacgaggaggtattcatcgtcgtcgatctcaagaagggcgtcgtctccaaagggccgtacgaggggaagccagacgcgaccttctccttcacggacgacgatttcctggccatctccagcggggcaaattgaagatcaaggggagtataagcgcggcgcagaagttcacgccggacatcgatcttccccaagccatccaaactgtagggttgagtggagttcgacaattaatacaaacaggcagttggagtagtaattttagtctgaaaaatagttcagagatgttcttgtggtaccatagagatgctgttggcgttcccctcgagcttgttttcataagatgcggaaaatattggactgtcc

SEQ ID NO: 23978 - DNA, 1188 bp, Oryza sativa
  ref <308>: DATABASE ACCESSION NUMBER: AK099420
  ref <309>: DATABASE ENTRY DATE: 2002-08-28
ggccgtccgcaacgacctccacaccgcaacggtccactcgctcgcctccgtctccctcccgcgtctagggtttcgccacgtctcacgcagccatggccgcggcggccgcgtccacctcgctccccgtcccgcgcgtctccctcccgccgtccgctcgcccagccgccgctccccggcacggtctcctcatccccggtcgccgtgggtgcttccgtctccgcggctcaccagcggcaccggccgccgccgcctcgggctccccttccgtgccttcctcttccccggaggctgggtcgggcatcggggatgccctcggtggcgtcgccatctactccgcggccaccggcgagcccgtgctgttcagggacctgtgggaccagaacgagggaatggctgttgttgccctgctaaggcattttgggtgcccttgctgttgggagttggcctctgtgttgagggatacaaaagagagatttgattcagctggtgtcaagctaatagccgttggtgttggcactccagataaagcccgtattcttgctgagcgtttaccatttccattggactacctctacgcagatcctgagcgcaaggcctatgatctcttgggtttgtattttggtattggtcgcacattcttcaatccagccagtgcaagtgtgttttcacgatttgactccctcaaggaggcagtgaagaactatacaattgaagccaccccagatgatagggctagtgttctacaacagggtggaatgtttgtgttcagagggaaagaattaatatatgcaaggaaagatgagggcactggtgatcatgcacctctggatgatgtcctcaacatctgttgtaaagcccctgcggcatgatattgtgtaatcaatgtcccatgagaattttcatagcctggttctgttcgtgtcccaaagttgtatgcagaaaagcatctcttgattttggaaggctggcttctgcaaggatagtatctctttgtctgtacgtctgatctaccatgctgttgatatgtaatatatcagttgaaaacttgagggatgtaggcagaccaaaggactttctcatgccataagctcagcagttcttttccttttcctcatagaaatgtactaattatagaggagaatcttacactgtacaataagtttgtgttaaagttggcgaaattttcct

SEQ ID NO: 23979 - DNA, 1127 bp, Oryza sativa
  ref <308>: DATABASE ACCESSION NUMBER: AK099421
  ref <309>: DATABASE ENTRY DATE: 2002-08-28
gactagtagcgtacactaccacagctagcaatggagacctcgtgcttccttacctccaatgcctcgccggtgaagagcatggtgatgccgtcgccggccggcgtcgtgaaggccaggccgcacgtgctcttcggcggccggcgagcggcgagctcgtcggtgaccacctgctgcagctacaacggcgagggcgcggcgccggcgatcgacccggactggcggtcgttcagggcgcagctctacttcaacgagcagtacgcgaagagcgtgaacccggcggtggcggcggtgagggcgacggcgacgacgccggagccggtgaagatcggcgacaagtgggcgcacccgctagtggagccggagaaggggtgcctgctgatcgcgacggagaagctggacgggtcgcacatcttcgagcgcacggtggtcctcctcctgtccgccggcgtgctgggccccgtgggcgtgatcctgaaccggccgtcgctgatgtcgatcaaggaggcgcaggcggtgttcgcggagacggacatcgcgggggcgttctcggggcggccgctcttcttcggtggcccgctggaggagtgcttcttcctgctggggccgcgggcggcggcggcgggggacgtggtggggaggacggggctgttcgacgaagtgatgcccggggtgcactacgggacgcgggagagcgtggggtgcgcggcggagctggtgaagcgcggcgtggtcggggtgagggacttccgcttcttcgacggcttctgcgggtgggagagagagcagctgcgcgacgaggtgcgcgcgggcttgtggcgcgtggcggcgtgcagccccgccgtgctgggcctcgccaccgtcgtcaagggcggactctgggaggaggtgcagggcctcgtcggagagaggagggtgtggtgactgattacttctcaagggtgaccattatgtaattaattaattaattaatctcttaattaactcgcaagtaaagtatttactcctttcagattaatgattttaggcttttagtcatcacggtaggtttaaagagggttgtatttgtatactctgtatcttgtactcttatcgttttgcccaccactacgcgaacacacctcgatgcc

SEQ ID NO: 23980 - DNA, 778 bp, Oryza sativa
  ref <308>: DATABASE ACCESSION NUMBER: AK099422
  ref <309>: DATABASE ENTRY DATE: 2002-08-28
gacggcccctcctctccttgcaggcgccacgccgcctttccatcccgggcgccactgcaccgccgtctccacatccctggagccccgccaccgtatcctctccaaccccatcccctcatcctcctccacccctgccacagcctcctcctccccatccccactgtcgtttcctcgccatccccatcgatgtcttctcttccccatcttcagtggcactaccatgacctcctcctatccatctccgacagaagctgcagatctggtgtccttccatcttctttgctccctattcctcgcaatggggaaggtcaacacctctgcctcctttcgtgctggtgactccaatgcttctacctgtctccatccctaattcgccactaggaggcacggtgaagcaaagacaaaagggagacgcggaggggaatatggcggcagattgggaggggagatggtcatatggagatggaggcggaaagggcctcttcgtcacgtatagcaacttgtgcttccactccgcttccacttacggcctccgcctgaccgtgcggcggccgccggcgttaggcccatgggggcgggagtggaggaggccacgcctctccacgtcgtccttatctgcgccggcgagaggagggagcagaggggagatatagagagaggggaagaagaggaagggattgagaatgacaggtggggcccacgttgaccccaccatttttttattattgtgtgtgaaactgacatgtgggtcccataagttttattattttttggatcg

SEQ ID NO: 23981 - DNA, 1173 bp, Oryza sativa
  ref <308>: DATABASE ACCESSION NUMBER: AK099423
  ref <309>: DATABASE ENTRY DATE: 2002-08-28
gatcctctccctctccaatctccctcttcctctcctcagatcggggcgccggctgagaccgagcggcggctgctcgttgcgatcggggcaggaccccgcttctcccgtccaatccggcggtggctcggtgacgagagtaggggcggcgagagctcggctcctccctcgcctcttctcccctccaatcccggtggcagcggcggcggcggctccgcgacaaggaagggcggcgggagcttggttcctccctcccctcttctccccttcaatcccggcggcggctcggcgacaagtgcgggacaagggcggcggctcggcaacggcggctcagcggcgacgacgacgacagcgacatgggaggggccttggcgactttgacgacgaccgtgacgacggagggcctcgtcgacatcgacggcgcgcggtggacggcgacgagcggatccggcaccacctcctccatccaccgcgccacctccatctccgcccccagccacctcgtcgcccttccccgcctcgctcccccagccagggaagggacggtggcgcgcggatctgccgcctcccggcctcgggagcgacggcggcgcatgaatccagcggcctccgtcctcgggagcgccctggcgtgagcgggagtgccggcagcacgcagattcgcaacgacggtgacggtggctgcaacgacgacgacagcggcgatggtagctgcgacgacgacgacggcgatgacagcggctgtgatgaaaacgacaacgctgtgatgcaagtagcggcggtgctctcttcctctgtcctccgccatcagcagcaccagtataccctgatcataagagccgtagtactatggctgatcctgcacttgctagtgatccagagttacacgggctgtcttatatctatgagaggaatggtcgtcattattgtttaaccatggcaactcctactgtagtacctaatcctccagccaaattttcagaaagtgcttagaccttgtattagggatcttcgaaaaattgtaattctcttttaagggcacacagtagtatctcgatataaactctctggtagtccaattttgtaacaccatgtcttgtacttagtctagaatggctaccatctatctttatgtatgactaccatatatatcaatgagaaaccatgtgatccacc

SEQ ID NO: 23982 - DNA, 1024 bp, Oryza sativa
  ref <308>: DATABASE ACCESSION NUMBER: AK099424
  ref <309>: DATABASE ENTRY DATE: 2002-08-28
gccctcctctctcctctcttcttcacaggcgcgggtgggggagcagctgcacgggcagcagccggcgggcgcaggtggtgggggaaggagccgtgtgtttgcggctagaggagcggcgcgtgagagggcgcaggcggcggggagcagcttcatgggcgacgacaccgactgcggaggcggcggcggcagccgcctcgtggccgtaatcctcgtggcggcgccatgtctctgatgaggccgcgctcctccaacgcaagctcgacgccggtggcggcgaagaaggagaagacggcgacgaggtggtgctcgcaatccgcccaagagaaggtcgtcgtcgttcgcgtgcaaggtgttcgaggccaagaagacgtggtagcagagtctgacaagggcacgtctcgagcagatgcaactgcggcggccgcggcggcgccgccgcctgtgtccagcaagcggctgcggtggtgggcggtggtccttgccaacattgtgttcgtcctcggcgggcagagcgtgggatgcttctcggccggatatactacgatcaggggcggcgacagcttgtggctggcgacggtggtgcagtcctgcggagcgcctctcaccgtcctgctgctgctgctgctctacttccaaatgggctcaccggcccctcccttgatcgagcccagcgagcggtggtggcggcagagctcggctggggccgggctcgacggccgcctctccccatctgccgccggctctgtcgagaagagaggagaagagaagaaataaaaagaaaagagaaaaaaaagaaataagacgagaatgatgatgtggcgtcctgacatgtggggcccacgtgggtcccacgccaactcagccgccacatcagacaaaaccagggtcaaaactaccgagggatctgaagtgaacggttttgtagattgaaggatgtcatatatctggtattgtggttcggggacaattttgtaactcgactataagttgagggacctttggtgtactttttcctgggtgaagc

SEQ ID NO: 23983 - DNA, 1185 bp, Oryza sativa
  ref <308>: DATABASE ACCESSION NUMBER: AK099425
  ref <309>: DATABASE ENTRY DATE: 2002-08-28
agaaagatagaccaccactgaccttctctttgctggtggagttttttcttctagcactgtgtgggataactgcaaaccaaggtttctacctcctagggctgtatcacctttcaccaacttatgcttctgcaatacagaacacagttcctgccatcacctttgccatggctgccgtcctcaggcttgagcaagtagacctaggcaagaggcatggggtggccaaggtggtgggcacggtggtgagcataggtggtgccacagtgataactctctacaagggcctaccactgttcaatcacaatctgaacatcaagtccctgtcttcctcgagcctcatcctcaactggactctgggctgcgtcttcatccttggccactgcctctcatggtctggatggatggttcttcaggtgccagttctgaagaggtacccagctaggctgtcagttctatcactgacctgcatctttgggctcctccagttcctggtcattgcagccttcactgaagaagacctgagcagatggaaggtgaactccggaagcgagctgttcacaatcctctacgctggtcttgtggcatctggcgtggcgtttgctctgcagatatggtgcatcgacaggggagggccgctgttcaccgccgtgttccagccggtccagaccgtcgccgtcgccgtcatggccgccatcattctcggagatcagctatactcaggagggatcatcggagcagttctgattgtgatcgggctgtacttcgtgctgtggggcaaaagcgaggagaagaagagcaagaacaacaacctgcaggaccagccggtgcagggaggaggagacgacatcaggaggcatctgctcggacaagaagatgcatctcgcaaagacgaagaagctgcagtcactgatgaactggcatgacgatcgatcgaaggggcgttcttcaccagtaatatgcatgatgatgttggagttggaaaatatgttgatgtcagtgactgtactttcttaactatattaatcaaagaagaagatccaagcgtgccagtgtaattaaaaacagtactgctagctggtcctcactcaccagtgatatactatatataattgctacgaatcagtctgtgtatatctcaagctgtatattcagagttaatgatataatattgccatcacttgaacaatt

SEQ ID NO: 23984 - DNA, 1787 bp, Oryza sativa
  ref <308>: DATABASE ACCESSION NUMBER: AK099426
  ref <309>: DATABASE ENTRY DATE: 2002-08-28
ggcagagcaccgtccactcttcctccgaccaacgcgctcgcctcgcgtcatcggctcaaatggtggaggcggccacgcgcggaaccgagagcccctcctcctgctaatgcgccgccatggccgcccgcgcgctgggtccacctcctcttcacgctctcgcagccacgcggcaggctcctcgctgccccccggctgccgccgcgccgccgacccatggctaccggcgtggagccgcggtgctctccggccgccggggaaggcatactttgagttcaatacaattgatgcatgctgttagaggtggcaatcttcaagtggaaccaaacatgcttcattcccccaagccattgatgtccaccagacgtgggtgtgtggctagtcctactattgctaatgtggatgactgcactgaaggtgaaggtgcactggggtacacaatgacccaaatctgtgataagtttattgagttcttcatgtacaagaaaccacaaacaaaggactggagaaaagtattggtgtttagagaggagtgggaaagatacagaccatacttttacaagcactgtcaagcacgtatagatatggaaaatgattcttcaatgaagcaaaagttggttgtacttgctagaaaagttaagaagattgacaatgagatagagaagcacatggaactcttcacacagctccgcgagaatcccacagatattaatgccattgtcgcaagaagacgaaaggatttcactggagggttcttccaacatcttaattttcttgttaatgcatataatggtcttgatgagagagatgcaattgccaggcttggggcgaagtgcctgtctgcaatccatgcatgactgcacactggagcagttggaccttgattctgctcaatcaaagtttgatgacattctgaattcttcttccctggatgatgcatgtgacaagattaaaagcttagccaagactaaagaacttgattcgtccttaattcttctaataaacagagcgtgggctgctgcaaaagactctacaactatgaagaatgaggttaaagatataatgtgtcatatctatacaacaactaaggaaagtctcaagagcatctcgcctccagagatgaagcttctgaagtacctattgaatattgaagatcctgaagagcggtttggtgctcttgcaacagccttttctccagaagtcgagcatgaagccaaggatgaagatgctctgtacacaactcccaacgaactccacaaatggaccaaaatgatgcttgattcgtaccatctcaataaggaggagacggattttatggatgccagaaagatgagtgacccagtgatcatacagaggttaactttgcttaaagagacaatcgaagaagaatacatgaagaagtatatacatccagaggagcaagaatctgaggacgacgaagattcagaagagtgagcttgcaagtgtatttttatagttgtagtcttgatgcagagatgatatttttatagttgtagtcttgatgcagagacggtatttttctagttgtagttactgcagattggtagtgccctgctgctttttgcaaagatggacttcaatctgctttgcttccctcctgttggacgaaagaaaatgccagtggtgcagtaattgtaaagtgtatcatgatcatcccaaagcctgcgtatcataaaattccctaagattggtggggttcctttttccctgtttttccaaattgttctctcctcttgattttatgattgtgagtcacaaagatgttgccg

SEQ ID NO: 23985 - DNA, 775 bp, Oryza sativa
  ref <308>: DATABASE ACCESSION NUMBER: AK099427
  ref <309>: DATABASE ENTRY DATE: 2002-08-28
gcacgatgatgggcctcgcgagctctcgcccgccgctcgtctccgcgccggcgacggcgacggcgaggctgcctcctcaccgccaccgccgccgccgcctctatctcagtgccacctcatgcgcttcgaccaattcctactcctccagcgtcctgtcccatggaggaacctgtgctccgcgctccctagtggcggcggagttgcagtcgcagtcgcggccgcctccgctcgccgccggcgtgtccgtacggggagacgccgcgacggggctcgcgttcctcctcttcgttctcgctgtggtgatgagttcctttctgtcactggccatcttctcatttccaacatggagagctctgaagcgattggaaattgctgtgcataaattgtcgaaagtagttgcagaagaggtaccaggaacactatcttcactaaagctatcatgcctggagatcaatgatttaactagccaactaaagaacttcagacaaaggctcatgataaatatatttggaaacaacagtagtgttgatgcaagatcacagactggatggccaaaacggggaaaaatatgacttatttaacctgtaagttttatggtaactcttagcttatcactcttgctgaaatgcattatcaagtcgatacatgtgtgtcacagtagcccttgacgacttgcagccacatcaaacatgttgtgatgcaagtaccaaactgtgccttgagccaagaccttccataaaagactggcattattgataatgagatgctttcttgt

SEQ ID NO: 23986 - DNA, 1207 bp, Oryza sativa
  ref <308>: DATABASE ACCESSION NUMBER: AK099428
  ref <309>: DATABASE ENTRY DATE: 2002-08-28
gaccccttccatctgccaagatcccgcgaaacccgccgctccccgcgccgccgcccgccggccggcaatcccaccacagcccagtcccagattcccagcatccccgcgcctcgattcgagctcgggactcgcgaggagcccgcgggattcgagcacgattgatttcccttgggggaagccggatgatggtggggttcatggggaagaggaaggagctggaccaggtggtggacggcctctccgacttctccctctccggccccgccgccaagagccgcagattggatattgggcttccacctattatggaagaagagacgccaggtccttccatgccatttggacatgagatgctaggagaggaaatccacagtgttgttagcatgcccattatagaagacatgctgggaggtgccatggaatctcatccatcaagtgaggacaggcacttgttttatacaagtcagtagataacactgcatgcattggtcctgggacctcgaacccttcaatcataatcagtccagacttgatacgtagtctaaagaatcaggcttttatgcaaaggaactttcacgggctggaggacaaatctcctgggtgcagcaacttcttggctttagttccttggacaccaccacaaattgccacggtatctaattggtctgcttcagattcagaaaagagagaattcttcgaagtgccaatggagtctgatgagacagaagtcgattctatggacgttgaggaatctccggaagcaaatgtcgcagcaatcgatggcgaaagccttcaccagtggcaacaacactgcatgaccccatcgtcgctaccaaacccttcagcacctgttatgtggtcaaggtgacggtcagatgtcattgttgtgaattgactgctgctgtttacttacaggaaggatgaagaaatcctccagttagttagcatccacgactagtacctcaaatggctgccatgtggtgcatagtgctgatcattagatcaattggtaaaatgattgttatgtgcatagtagctccctctagcatagtgctgatcttgcccattcagtgtttcagtgtacacctagaaatagtcctgatcttgcccattattagtgttttagtagagagtgtacactgttgttgttacaaaaaacacaagcctgtatgttggcatccaattaatttatctagcattttggatt

SEQ ID NO: 23987 - DNA, 3008 bp, Oryza sativa
  ref <308>: DATABASE ACCESSION NUMBER: AK099429
  ref <309>: DATABASE ENTRY DATE: 2002-08-28
ggttccccctgcgtaaaagaaaatctcccgtctcgtcgtctcctccgctccctgcggcaagacgagccgcggctgaacaggggaggggcgccgatctccatccagcgagcagagcagcggaggggatcctgatctgtggtgggagaagctcttctcttaatttcagagtatacaagtaacagtttgttgtttgttccccccaaaaaagtttgggggggttcaactgaacccaccctccatgtcccaagttggatccgcccctgcaatctttgctcctgctcaggaccaactggttgctgatcgattgcggaagtgaggatggacgtggagctgaattcccgtgcgctgatggatgaagctctcaaagcaagggatgcggctgagaggaagttccacgcgcgtgatgtcaagggtgcacggaggtccgcaatcaaggcgcagaacctgtgcccgtcgcttgacggcatttcccagatggtctcgacgcttgaggttctgcttgcttccgaatcgaaggttgacggcgagaacgattggtaccggatcctgtctctcagtgcctctgctgatgaggaggaggtgaagaaacagtacagaaagctagcactccagctgcaccctgacaagaacaagtcggttggtgccgagggggcctttaagcttatctcggaggcttgggccgtgttgtctgataagagcaggaagatgcaatatgatcagaagagaaaggatcatcctgtcactaatggggccaatggtttgtatacttatgataagaaagctcacaagcgggctagaaagaatgctgcggcttctgcggccgcagcagctgcagctgctgctgcagcagcagaggctactacacgtcctgtgggacttgatacattttggacatcatgcaatcgctgtcggatgcagtatgagtacttgagaatttacctgaatcacaaccttctgtgcccaaactgtcaccatgcatttatggctgtggagactggatatccttgcaatggaaccagttcctcgttctcctggtcaaccaagcagcagcagcagaaccacaagcactcatatagctcagcaagcagaacctctggtgttccaggaacgggacatggtgtataccaacaagagaacacttacgagacctacaacaaccaaagcttccaatggaatcagtactccaagacaaataattctgctggtacaaatgcttacagtagtactgcctcagagaaaccaaaaagaaaacatgaggagagctatatatacaattattcgtcaagtggcaatgagtttgggcaggagagacctacatcaggacgggggcgattttcaaaaaggaggcagaatattaataatggatatgcttctgttgattgtaatggagataacaaggaaactgtggctgcaactgcaggaacaactgtgcttgctgatgttggaagggttaatggtacttccgtggagaaattcagatcagcagtaagtggaagaagagctaatgtcatgagggagatattccaacttgacacccgaggtcttctcattgagaaagccaaggcagcaatccgtgaaaaattacaagatttgaatatttcagcaacaagacatattgcagccaaagggaaagcagaaagaaaaaatcacgtggaccacgatgtaaaggggaacggcatcctccctcataatccaagccataaattcaagatatgtaactcaaaaggtgctgatgttgaaaatccagcaactgatgagaataatctggaacagaagcgtgtgcctgtgtcaattgatgtcccagacccagacttttatgattttgataaagatcgcacagaaagaacttttgataatgatcaggtgtgggctacatatgacagcgaagatggcatgcctcgtctatatgcgatggtgcagaaagttatttcaaggaagcctttcaggatccggatgagttttcttaattccaagtccaatattgaactgtcaccaattaactgggttgcctcggatttctcaaaggcgtgtggtgatttcagggttggaagataccagatttttgaaacagttaacatcttctcccatagagttagctggagcaaaggcccccggggaattatcaagattgttcccaagaaaggtgatacttgggctttgtaccgaaactggtcttctgattggaatgagcttacacctgatgatgtgatatacaagtatgagatagtagaagtgattgatgatttcactgatgagcaaggtgtgactgtcattccattgctgaaagttgccggtttcaaagcggtcttccataggcgcacagactctgatgtggttagaaggataccgaaggaagagcttttccgcttctcacatagggttacttctcgactgctcactggggaagaaggcaataatgctccaaaaggttgccatgaattagaccctgctgctactccagttgaccttcttaaggttatcactgaggtcaaggaagttgccacgacagaaatttctgaatagtacccatcaacctggatccctaaaaatgccatgccaaaaatgcactaactgggtgatgatccgcgttatttggctcttagctctatcatgtgatctaacttctagctgatgacttggactatgttaccaggaattaagattccgaaggatccaagtgatttgttatcagattctaccattaagacgatcaggctaaaaagatgatcggtccacatgatatttcctcgcaagctataagatgatcaggctaatgagatggattcaggcattcaggcttcagcggaacacaaacgagtgtcattctgcatgcttgacaggatcctaattgcattttacgacggtttttggtcataatgttgggaaccagcgttattgtccgaggatcatgcaatgagataactaaaatattagaatatgctgctgtagtgacccaacagtgggatcatgggcgatcgattgatggggtaataatgcggtagtggttc

SEQ ID NO: 23988 - DNA, 1051 bp, Oryza sativa
  ref <308>: DATABASE ACCESSION NUMBER: AK099430
  ref <309>: DATABASE ENTRY DATE: 2002-08-28
ggccggaccgaccggcgagacagccgtaaccggggagatggccgcggcggagacctcgggcacggtggcggcgccggggaggtggtctctccatggcaagatggctctggtcaccggaggcacccgcgggattgggcgtgcggtggtggaggagctggcggcgctgggggcggccgtgcatacctgctcccgcaatgaggcggagctaggggagcgcctcaaggagtgggaggccagggggttccgcgtcaccatctccgtctgcgacctctccgcgcgggaccagcgggagcgcctcatcggcgacgtcgctgaccgcttcggcggcaagctcgacatcctcgtaaacaatgtggggacaaacataaggaaacctactactgagtattctgcagacgaatactcatttttgatggctacaaatcttgaatctgcatatcatttgtgtcaacttgggcatcctcttttaaaagcatctgggtcgggtagcattgttttcatatcatcagttgctggaattgtagccctatttagtggaactatctatgctatgactaaaggtgccatgaatcaattaaccaagaacttagcatgtgaatgggcaaaagacaacataagaaccaactgtgttgccccagggtacatcttaacttcgctttcagaaggaattttggcaaacaaggagttcgagggctctgttaagagccggactcctcttaggcgtgtcggagaaccagcagaaatctcatcgttagttgccttcctttgtatgcctggttcaacttacattactggtcagacgatcgccgtcgatggaggtatgactgtgaatgggctttaccccagttgaggagggagtcatggatgatggatgttcttgctgccaggaaacagcgcgtctgatattcgtggagttggttgttagaaactaaagaaaaggtgaaaaacacttgtgtgaaagtgagtccatcatggacgcgtgatatatttttccattgcacaagccctttcagaactatgtgatggaggcgttgttagctagatattgcgc

SEQ ID NO: 23989 - DNA, 528 bp, Oryza sativa
  ref <308>: DATABASE ACCESSION NUMBER: AK099431
  ref <309>: DATABASE ENTRY DATE: 2002-08-28
gcattcaactcgcgcaaaaccgcggcccgccttggccttgtgcggcggcgaccatggccgccgccgcctcctcctcctcgccgccggggaccgcctccccggtgctcagcgtgcggatcgtctccctcgactactacatggcgccgcccctccccggattcgacttctcctacagccacttccacggcggagaggtggaggaggtgccggtgatcaggatctacggctccacccccgcggggcagaagacttgcctccacatccatcgggtccttccatttctgtatgtaccttgcaaagaggaccttcttcataacgtcgaaaaaggtaattcatttatatctggtctattgagtgatcttgagaaagctttgcagattcgcagctcatcaaaaaagaagcatgtgcatggatgtacccttgttcgagcaaaaaagttgtatggctatcatacatctgaggaactttttgtgaagatttatttgtatccataatttaattattttttaagaaaatatatttgctgct

SEQ ID NO: 23990 - DNA, 3270 bp, Oryza sativa
  ref <308>: DATABASE ACCESSION NUMBER: AK099432
  ref <309>: DATABASE ENTRY DATE: 2002-08-28
gtctatcatcaggcatcagcagcagcagcagcaacaacatttggccgctctgaagattggtgacggagaatgcccggcggctccctcctcaatagcggcggcatggcggactacggcggcggtggcggcagcggcggcggcctcacgttcccggtcgtggttacctgcctcatggcggcctccggtggcctcatcttcggctacgacattggcatctcaggtgcgctggagatggatcggattcgatcgatcgcttactttgcaattgcatgcggtttgggggtgctcttttctgaaaatttttctgaatgtttaattccgtggttttctttttttcttcttcttctgaaatctctgcacacgtatcgcgtaggattcgatttgatttaccactcattttagtcggtgattctcccaatccatcatatctcccctcatcacgacctcgacgacaacgatacgattctcctgtggcttgtggctagcccactttgaggacttgattcctgggtctctcaagtcactcgctacaagccaagaccattttcctttgatctgaagcggccatggccgagccgcatctcaactgctgccctgtgccccccttggtttctttattccgtttctgcttcttccacggcagattcccaacacatggagtagtccaaatctggcctcagtttttaataatctaaaaaaaaatcagcgcgcaggtgtaagcatcacgcgagcgaacaaatctaatccaatcaaactggtgaattttacaacagaggaagaggatattttttttctattcttgagaagattcacgggagaacaattagttctcgtgtgatatttccgcgttcattcaaatcaaagcccagagaggccgaagaggacgcagctcttgttctctcgtcaaaccgaacgtacagcagctgctgattaaccgggcacatcacagaagaaaatccaggaagtagatatctttcgaggaagcgtgatccgagccgcgcgttagccatcggacggccaggaggggatagaggcggaggtggggccccacctggcagatccttacacgtgggcccgttcacctgcttgggcgggaccaggtgaggcgacacaatccggtcgaattggatggccacactgcggcggcggggccagcgagcggccggtgtacggcctacccatcttctcgtggagcgccattagacacgtcaggttggttacagttaaacctttagagcccataagtatgtccgttgactctctttccatcgtgaggctgttaagtgtgattggttcctaactatattttaccacgtttttaaatattgttagtacttgtttaagttgagataattaaattctgagtcccacattaacaagtctaagataatcttgtcacactttcttgattcattaacgtgtgggacttgatttattaaaagtgaattttgccacaattatgatcaaacttatctaatcttagacatgataaactgtggtaaaatgtggctgacaaccaaacataattttagaatcagagctttactgagccaaaaatcaaagtcatttttagaattgaggggtacctgagatatttttagatgagtgagattttttttttagggaagatagtgagattttattttgagcagcacatttttttttctattcccacatagcagcagtaatcttcttgggaattaccactttctgtatttcaaagttttaagcccgtttgaaacgcaaaattttagaattagttttttatatagttctgttcttttatttatttttcggttaaaacatgtcagcgaagcaaaaaaaaatagagacaaaatttgatatagctctgttagtggtttaaatccaataccaaacaaaaacaataaaaaacactaaaaacacttatattaatttaaaattaacttctaaaatttaaaattcggttagggtttataggctccatcggttggcttttttttttctaataagccaaaacggcttattagggaataaaaataaatttgtaagtaaaacttttatatatgtgctctttgtaacttaaaagccaatgctaaaaaaaactacgttgaaaacatctcaaaattaagtttgaaaattcaaaatttggcttattgggccatccgatgggagcctatatgaagcacacacttaatagtgtaaaactttctcatcttccaaacgagacctaaatgagtacagattttatatacctcaaaatttacctcatcttccaaatgaattttaaatgaggctcatgtggaatgtgggaaaaggacgtgagctgctcccacatcttacgctcggaacgtagtacatcaacttgtcgctaggtgtgcatcgacagttacttgcaactttggacgttctgtgtgcaatctgctgcttcggtcagaccagatgtcatggtggcgtctcgtcgtatatcttatttgcccctccttttgttgccgcgagttttggtgcggcttttctgcgctaaaccccgagctgtaattcacgggcatcttcctggaatccttggtctcagttgctttcctgcaacaaaagaaaggagagattatgattgcttctttttcttcagtggcatggctagcttgcttgtcgagattattagtatgtgctatataggcgagtatagtagtatttgtaggccactcgatggtagaaatcttgctttggatcggggaatcgggtttttatcatgtcttgagtgatggtgtgtgggctttgacaggatcggaattttttttctaaggagataagttgttgatgtgatgattgatcaagactaaaatgcgtcaaatagaaatactaggaatccctatcaacgtgaaaagaaataaattctaatgaaatgaccatggtgcatccatagtgttttgtaaaaagcttttctttttctgccgttccttactattattatacacagcacctgaattggatcctttgtagtagcatgtggcttaccattgaaagagacaataatttgcattatgacttctctttgccatctgattggaatttgaaaatgcccaactgagatcaaagtaccacagtaatcgctacagcgtgtcactcactacagtaatttactgttacccccatagcttaatggttgtctacagtatagaagagtagaagacaatctagatccctcgaaaccactatctccagcatgtatgattattggtgcatggcagaaaaagtgtatgtaaaacacaaaatattacgtgacacaagttattc

SEQ ID NO: 23991 - DNA, 1333 bp, Oryza sativa
  ref <308>: DATABASE ACCESSION NUMBER: AK099433
  ref <309>: DATABASE ENTRY DATE: 2002-08-28
gtatcgccaggcacacaccctgccccgtcctctcctcccccttccccccacctcgacgaaccgacggtttccccggccatggctgctccgccgccgcggcgaaccccgaaccccgagcgcggcagcaggaggaaggtgagagcaccgccgctcgccggacttactgctcccgatccctaaccccgctcgtctctctgctctcgcagggcgaggacccgtggctcgcggcgagccttcgcccggggaatttcctcccggggctcgcgattgggttcctcctcggcctactcgtcgacttgacctcctcatggaggccccaatcgagtccaccgctggctccggctgccccggcgccgcggggctccaagcggacgggtggttcgtcgtccgctggcgggggcatcggcggcgaagagcttaagatggttttggtcgtgcgtaaggacctcaagatgcgggctggaaaaatagcttctcaatgtgctcatgcagcaactggtctgtatgcagaactgatggcaaggtgctaacgcggtttgcaatttttctcacttagcaaccggggtcttttgagacagtgggagcaatttggacaagctaagattgttttaacatgcaagaatcagcaggaaatgaataggattaaggaaaccgcagaacatcgaggtatcccaacatttgttgtcgctgatgcaggacgaacacaggtacaagctgggtctaagacagttcttgcagtagggccagggaggaaagcagacatagattcagttactgggaagttgtctttactatgaactgcatctcagacatgacacactgattccttcaaagattcaaaccaattgtcgggttcagttgacggtggtatcttatgcttgtagtcccacaacaggaggtcagaatccttgggatgctttacccagttctcaggctaactctgaagcaattcttcaagatccagttctagagtggctgattcaaaattgccgttggttgtaatcttttcctccacatgtcattgtagtctacccacatgttagcgcattccagcgagtggattttactttgggacaatgaacaagtatctgtagtttcgaagtagtaggttatcaccttcctcaaagtaacggatcatatgtaccgtatgtccagaggaagcacaaaatgcgtagaggtgacttgtcttgtcaaacatccttggtgtgaagcctcttgctgtgaaagttctgtattcccaagttcccaactagtccatatctactgggaattgaatctctttcttgcagagctggaactttgtgcactagttccaacaaaattagattcttgc

SEQ ID NO: 23992 - DNA, 926 bp, Oryza sativa
  ref <308>: DATABASE ACCESSION NUMBER: AK099434
  ref <309>: DATABASE ENTRY DATE: 2002-08-28
ggctggccgtcacgaaggcggcggcggcttccttcctcgtctccccacaagagagagagagagagagagagagagagcgagccagcgaacttcgtagccatggcgtgggaggaggaggcggcggtggaagaggagtacgagtacggggaggagatggaggggtcggggtcggaggcggaggacgtggtggtggggcagatgccgacggtgatggtgcccaagcacatcaacaaacgcgccctcaagaacaaggccctctccgtctccctcgacaagaaagccctcaaggatttcgtgaccggatttcacaagaggaagaagaagaggagaaaggaggcgcagaagattttgcaggagaaggagagaaagaagcgaatcgaggagcgcaagcggagaaagcaagagaaagaaattgcgctgtatggaagagtcctgtcatcagataatgctgatggtgaagatgttgagaatgatggtgatgaaatggaaactgatgatttgcctgaacctgaagtaaaaacatacgaagatggtgggactaaaattacggtcaccacgagcgaaatcactcctgaagatgacgatgaagaccttggcccgaaaaggatcacccctgcatcgacgggctacgccaacaagagcgtctccaagaagagtgctagtctaggtgtaaagaagaagccatcgaagagaaccttcaggaataagagtaaatctaagaagggcgaccagaagcgaggtgctgcaaagggtaaacggaagaacaaagggaggaagtgagtgaatgtttctgtaaccactctgtagaaatgtttgcacctttggccagggccagaggccagagctgccgtttttgccagacacgatgaactttgtactcggttcctgattcatcatccaaatgaggctaatcatgctcagcagcc

SEQ ID NO: 23993 - DNA, 1715 bp, Oryza sativa
  ref <308>: DATABASE ACCESSION NUMBER: AK099435
  ref <309>: DATABASE ENTRY DATE: 2002-08-28
gtcgagaattgaacctttttcacgcagaggactgaagaacaggtccatatttcaccaattcattcatcagctgacaatctgacgcgcacatgcatcatgcacggatgctgcatatggctgtgctgcggcaactgcaggtgggccaactgggagttccacgtgggcttcgacatgcgggccggcacggtcatctcgctggcctccgtccacgacgccgacgccgacgccggcggcgcgcggcggcggcggcaggtgctctaccgcggcttcgtgtcggagatcttcgtcccgtacatggacccggtcgaggagtggtactaccgcacgttcctcgacgccggcgagtacggcctcggcctctgggccttcccgctccagcccggcggcgactgccccgccaacgccgcctacctcgacggccactactccggccaggacggccgccccgtcgaggccaggaacatgatctgcgtcttcgagcgctactccggcgacgtcgcgtggcgccacaccgaggccggcttccccaaccagctgatcacggaggtgcgccccgacgtgagcttggtggcgaggatggtggtgtccgccggcaactacgactacatcttggactgggagttcaagacgagcggctccatcaagctcgtggtgtctctcaccggtctcctcgaagtgaaggcgacggcgtacgcgcacgccgacgaggtggcgcaggacgcgcacggcatgctggtggcggagaacaccatcgccgtgtaccacgaccactacgtgacctaccacctcgacctcgacgtcgacggcaccaacaactccttcgtcaagaacatcgtcaccgccgtcgtgcgcgacgccgacgccgacgcggcggcagacacgccgaggcggagctactggacggtgcggcgggaggtggcggagagggaggcggacgggcaggtggacctcggcggcggcgccccggccgacctggtgttcgtcaacccggggaagaagacgaggatggggaacgaggtcgggtaccgcgtcgtccccggcggcgcgatggcggcgtcggtgctggccgacgacgacttcccgcagaggcgcgccgcctactgcaagaagcaggtgcgggtgacgccgtacagcaggtcggagaagtgggcgtcggggctgtacgccgaccagagcaccggcggcgacggcctcgctgcgtggagcgagcgggacagggcgatccgcggcgaggacatcgtgctgtggtacacggtggggctgcaccacgtgccgtaccaggaggacttcccggtgatgccgacgctgagcggcgggctcgagctccggccgtccaacttcttcgagaggaacccgctgttgacgacgatgccgatcggccatggccggcctctcgtcaactgctcgtgcgccggcggcgactccatttccagatgactatagctgcttgcacgtgcaacggacaacgggtgcaagtcggattgacacgcgctgtggcaagtgagtaagtggccaattatttattgggaacatctttttgcagttccattggacttggtagaccttgatttcctttgaacttgagaaatttcaattgaattcgactcgcagttgggtacttgggtcggcaatgagatttctcgccgcccatgctttactcaaatactctggtaacttactctctccgtcccaaaatataagcattttcagactct

SEQ ID NO: 23994 - DNA, 700 bp, Oryza sativa
  ref <308>: DATABASE ACCESSION NUMBER: AK099436
  ref <309>: DATABASE ENTRY DATE: 2002-08-28
gaaccatcacaagtgtctgaacattcattttctctcttcctctattgctccctaggcgctggcgaaatgcagatggtgtcctcgtcgctgagcaagccgttgttgttgtcctcgtagctgagcatggttttaggcatgctcccgaccctcaagagtgtattcgcgtggccgtcgtcgtccccgtcgccggcggaaggggcaccctgcagcctcagccaggctttcttcctcctctgcatgagagccaccattatcctgggggcgtgttatactgttttccttttctgggttgcatttgcataccctcgtagctggctagagtacctgcagctgtctccattgttcgtcgtcgctgtaactgctccaacgctgggagtagtgatgatccggaacggctgaactataccatcaaacttcgtggatgcgtgtgggcacatcattaattcctcatactgcttactactactatgtgcatgtctgttatgctacgaaatgcatgtatcgatctgcgatgtaatattcagtatttttcatagcacaacagacatcgcagatactgtacgtatattgttgttcgtcattttcctttccacttttcttgttaatttgaagaatgcaatagatgcgcctgaaatatatgcatctgtaccgatataaagatgttatataataacacaggtttgatacgcatctagtcttg

SEQ ID NO: 23995 - DNA, 2209 bp, Oryza sativa
  ref <308>: DATABASE ACCESSION NUMBER: AK099437
  ref <309>: DATABASE ENTRY DATE: 2002-08-28
tggccgctccccgccacaagtccgcgcctcctcgacgaccgcccgctcgaaacaatctcccgctgcgctgcggcggcgcttcgagggcagggcggcatggcggcggcggagcgcccgagcaggtccgacgtcgacttcgccgacgtcttcggcggcccgccccgccgctcgtccgggcacgacagcctgaggcgctcgtcgatggactcgtcgttcggctcagcgacgaaggggaggagcggggcagaggagaggcccgtgttcggggaccgcacgagctccgaccggaggaggcagctcgggcaggaattctacaaggacatattcgccgggagcgagtcgatgtcacctaggcggggaggcgcggcgggggatctggatgtgtttggtgcgcaggcctcacccggttccaccagccgcctgcattcgagcttctccatgaagttcaacggaggcctggacagttctgtccctacttctccatctcggcatacatccaacaaaaacgatgatggaatatcatatgcttacagtgttccaacttcacctaattcatccatgaacagctttctagcccaaggggcaccccaacaagattccacaaagaatcctttttcatggcatcgctatcccttcttatcccggtttcgctctaacagtggagataagaaggacacctcccattatgtcagctctatggacagtgaatacgaagggactcctgttagcttggaaagtagcattgccaataacaagttccatttttcattctataaatggggagggaaaggtgccgttttggtattgccaactactgcacaggaaaatgctggtgatattgttggagtaaggagtttccctcaagtgattgtgcaaggtatggacctaattgatgaagaagatagcacgtcaactgccactggagcatcaaagagtcagactgattacgaagactacaaatctgggaaagatgtctcgttaggggcactcttaaaaaccaaggatggagcccttcctttagcttttgatgactacgtgctaggcgataaatctgaagaatcaggaacaaaacataacaccaataatgcaaagaacaatgtattaggagctagccccagctctaaaagttctcggtcaccttcaggagagaaaagtcgtggcagcagagtgaaaggaaaagtaaaggacttcatgaaaatatttagtcctgagagttcaccgaagagcaaacgagatcggacatccagtgggaaaaacggaagcaaaagtggtcctgaagataaatttagcatatccaattcggaggtcgatgacaatgtcagaacagccaatatgaacaagcagaatgtgttccctcctgtaccctctccaatcagcgaagcacaagacaggacggagataccggtttttacagtggataatgaaatggattcaaaggcagattttggaagaaaagaagttacacctccctcttttgatgagtcaagcgatgcccaaacaaaatataaggtagatgagataacagatcttgcggaaggtccagtggaagatcttgaagaatgtgtggttgaggatgtctctgaagattttattcttcgtaataatgaggaaaaagagcaaataaagatttctgaatccaaaatctgggaatggtcaaagggaaaagaaggaaatattaggtcattgctttctacactacaatatgttctatggcctgagagtggatggaaaccagtcccccttgttgatataattgaaggagcagctgttaagaaggcctatcagaaggcattgttatgccttcatccagataagttgcaacaacgaggagctgctatgcatcagaagtatatagcagaaaaggtttttgacattctacaggaggcatggaaagaattcaatacagttacttttggatagtattccttagatcctatcgttgttttggctctatcattcagatatggtgcttgttgttgtccactttaatgtacggatggtaatgcccaggatcacattggatatggacatggccatgggaggccatgatatgcatttttttttgaggtattgcagtcctcttgcagtctggtgaattgcactgtatgaatttgcttgcctaaatgtaagtacttagaaaaatagcagttcttgtacaaattttccggttgtggcaaataaacgggtgtatccagagtattgaaattct

SEQ ID NO: 23996 - DNA, 1128 bp, Oryza sativa
  ref <308>: DATABASE ACCESSION NUMBER: AK099438
  ref <309>: DATABASE ENTRY DATE: 2002-08-28
gacaagggccgcgtcggtggcggcgtccaggccgcccggaacatctcgccgtcggaacgacgaggcggcgcggcggctcgcggtgtccgggcggatccacgagggaacggcccctccgaggtcgcagcgatgccggtgaggcggcggcagccgcggcggagggagacgggtgcggcggagaggtacagggagatggggatatcggccgcgctgtcgcggccgtgggactacccgacggcgtgcggcgagatcgccgcgctcctccgaatcgggtacggcgacctccccaaggccgcccaggctctcgtcgccggcgacgtgctgctcgcgttccggctcctccctgatgtacagacaggatatgcgttaagcgcagctaatggtcttctccaagctgtagacggttccctaccaaagcaaaagaaggcacaggctgtttcagagttcaagcgttctgttgttgcacataagcggcgtgctagggttcaacaagatccaggtgtaccacatataccatacgatgtgcttgttcatattttcagttttcttgacatgcgctccttggtagctgctggtcttgtctgctggccttggaattctgctgcaaatgacaaccacctgtgggaaatgaattactcccttttcttcggcatctgccatataaactgcaatagcacacctacagctggtaatgtacagaacactgattatcatgtacagaatagcatttatcaagtatctccggatcctggttttaactggaaagaggctttccacaaaaagtatgcagaacaagaaacatggagttccgcatcaaatagagcattatgtggatattgccgatctgtcatttggttgtgcgacttgacgtgtgctactccacactattgccttaataatggaaaagatggagtaaaactaggacctctattacctcatacagttgctgactacatattggacatcgctgatctagcagcttcatcgacagaaagtgatgatacagatagcgattctgaaaattatccccaggcacgcttttggtcgttgtcatagtaaaaggaaaacaatgtatacatcgacttgagatgtggattgtgaacttgttataactctttaatttctggt

SEQ ID NO: 23997 - DNA, 1324 bp, Oryza sativa
  ref <308>: DATABASE ACCESSION NUMBER: AK099439
  ref <309>: DATABASE ENTRY DATE: 2002-08-28
ggatgagccgcccaagggttggaatcccaactatggcgtcgtcggcagcggcgaccggcgactggccttctcccgccagctctcctcctccatgcctcgcctcgcccgctccgactcttccatctccatgccccccccgtccctcgcccccaccggagccatcaccttccgctggctcgccacccgccccatgcgccgcctcgccctcctcatcgctctcaacgtcgcctactccgccaccgggctcgccatcggcctcctcactgcccgcgtaggcctagtctccgatgctttccatctcacctttggttgtggaatcctcactttctccttgtttgccatggctgcctccagaaccaaacctgatcacctctacacctacgggtgcctccctccctcaatttactcctcttttctttaatcttccactcccactgattcattgctgcctttattcagctataaaagattggaggtccttgctgcctttacaaatgccacagctcttcctgctcttcctgtctttctccttggctgttgaagcactacatgcatttatgcaagatgagtctgagcataagcattatctcattgtttctgctgtcacaaaccttttggttaatttacttggtgtttggttctttcggagctatgctcgtgttaacatagtttacaggaaagcagaggatatgaattatcactctgtatgtttgcatgttcttgccgattcagtacggagtgcaggcttgatactagcttcctggtttctttcattgggggttgaaaatgcggaagtgttgtgcctgggaattgtttcagtggcagtgttcatgcttgttttgccactctttaaggctactggtaatatccttctgcaaattgcaccaggcaatgtgccaccttcagctcttaccaagtgcttcagacagataactgcgtgcgaggatgtttctgaagtatgtcaaggtcgattttgggagcttgtacctggtcacgctgttggatctctcgacatccgggtgaagaatggtggtgattgccagtccgtgctcgactatgtgcatggattatatcaagatttgggcatacaggacctgaccatccaaaccgatgaataaggcatcatctagtgtagaaaggagtcataggggaaaaaaggatagatcaaactctcgcagtgtattgcttgggcgtgcttatttgatagtacggtatatcgctttgtactcgactgctgcagtttgtactcagatttactcagtagctactacaatttgtactcacttaagctcgtttgctatggcatcatggttgaaattcgttg

SEQ ID NO: 23998 - DNA, 992 bp, Oryza sativa
  ref <308>: DATABASE ACCESSION NUMBER: AK099440
  ref <309>: DATABASE ENTRY DATE: 2002-08-28
gaaagttcccaaccaaaaatcccatctcctccgatcccttcctttcctgccatctagctagcaaagatgatctccccggacgcggctcgcaacgtcgtcggcatcatcggcaatgtcatctccttcggcctcttcctctcccccgtgccgacgttctggaggatctgcaagaggaaggacgtggagcagttcaaggcggacccgtacctggcgacgctgctcaactgcatgctatgggtgttctacggtatccccatcgtccacccgaacagcatcctcgtcgtcaccatcaacggcatcggtctcattgtcgagggcacctacctcttcatcttcttcctctactcccccaacaagaagcgcctgaggatgttggctgtgctgggcgtggagttggtgttcatgctggcggtgattctgggcgtgcttctgagcgcgcacacgcacaagaagcgttccatgatcgtcggcatcctctgcgtcttcttcggctccatcatgtacttctccccgctcaccatcatggggaaagtgataaagacgaagagcgtagagtacatgccgttcttcctgtcgctggtgtgcttcctcaacggcgtttgctggacggcctacgcgctcatccgcttcgacatctatgtgaccatccccaacggcctcggtgccatcttcggtgccatccagctcatcctctacgcctgctactaccggaccacacccaagaagaccaaggccgccaaggacgtcgagatgccctccgtcatctccggtcccggtgccgccgccaccgccagtggcggcagtgtcgtctccgtcaccgtcgagcgataaattaagtaaaattaaattaattagcttgtgttaattttggtggtagttttttcggctcgatatatatgatctaagtgagagtgtaatatttacctatatagttgaagtttgatgagacaatacaatgatacaatatcacccgccagtggcggatttaggct

SEQ ID NO: 23999 - DNA, 749 bp, Oryza sativa
  ref <308>: DATABASE ACCESSION NUMBER: AK099441
  ref <309>: DATABASE ENTRY DATE: 2002-08-28
gtgaaaaaccgcatcccgcaactccaccgctcccaatctcgatcgaaacgcgagggtttcgcatctccgccgacgcctagaggaagaagggttccgccgccggtagccaagccatgccgaagaacaagggtaagggagggaagaaccgcaagaggggtaagaacgaggccgacgacgacaagcgcgagctggtgttcaaggaggacgggcaggagtacgcccaggtgacgcggatgctcggcaacggccgctgcgaggccatctgcgtcgacggcaccaagcgcctctgccacatccgcggcaagatgcacaagaaggtgtggatcgccgccggggacatcatcctcgtcggcctccgcgactaccaggacgacaaggccgacgtcatcctcaagtacatgaacgacgaggcccgcctcctcaaggcctacggcgagctccccgacaccctcaggctcaacgagggcgtcgacgtcgacgggcccgaggacggcggcgaccacgacgactacatccagttcgaggacgaggacatcgacaagatctaagctcttttcttctttctccgcagctacaatttactgctatgttctaattaatagctatgtgtggtactatgtgggctggctgttatggattgtttggttgccggtttcatcttgtgatatgagatatttgtcatggtttgaggtggttaaataattgttggattccgtaactttaatctggtatacatgatggttatgcgt

SEQ ID NO: 24000 - DNA, 3159 bp, Oryza sativa
  ref <308>: DATABASE ACCESSION NUMBER: AK099442
  ref <309>: DATABASE ENTRY DATE: 2002-08-28
gtgccggactccgccaccaccgcaatgccgcgccgctccgcctcccggtacgccgcctactgggccgccgacgcgctcgccggcgacgacgccctcgacttctccctcaccaaggcgctggtgggcgtctcgccggattccctcacgggcgcccccgaggccgtgcgggagcgcgtcgcgctgcggtgcctccaggaggtcgtctccctcgcctccgatggcgactacgaggccacgccgacggccggaggggtgcttagtgtggacgcctcccgctcctgcgaggactcgctgcttcaactcatccgagagattggtagctcaggaagcttggagaaggttatgcttctgccctttagtcaagatgtccagaagtttatatgtataaagagacctacattacctgaaacttcttttgaactgctcagagaagtttacccagagatcacacctgtggtcctaccatcgccagtggagcagaatggcaatgatcaacatgacaatgtcagccatgatcttgaaaatacagagaagactgggttcaatacagatggcgctcagcttcagcaagatgatctggcaaatttagtcaacgaaagtaacacaggaaatcttcagaaggatgcaatggcaactcctgattttcaccaaccatgtacatcagaaaataggtgttttgatcagccacaagaagattcaattaatgcagttggtgtcaacatcaggtctccaaaagacagtccaactaatgtagatagacacatacaagttgcagctgagccttctttagctacttctgcagatttgctgggaagtaatacaggaacaatttctgagcaggacatgatagatgatacaaccatggttcaatcgcaatctcaaggggtcaaaaatcctaatacacttcattataataatggagatgaaccacttgttgccagcattcagtcaccaaaggattccatccatgaaggactgaccatacaggcaactgtttctccagcttttgacagaagcaatgatgctttaccagcaagtacatctgaaataagccagttgcctgagtttattactgcaagggatacagtaatgaattcagagccacgtatcaacaaatctcatccaaattccccgaaacatgacactgttgataaagcaaatcaagatgtggattatggcagtgttggtattcagaaagctgctgctttcctatctgaagatcgcaatggggctactcaaggagagaaatctgaaattaaagatccaccagaaaatactgcagaacatacaaaaatgtttgaacaagaaaatagtgtcgaggctcagttggaagtcggttgttccgacaaagttaatcaagatatacaggatgatggcaacatcatgacaaagaatatggtctgtgatgggctgaatgtgcagactgctccggaacctcatagctgcagaatggccttgcataacaaaaatttggtggccaaccatttgtccgagcagaatattggaaggaacacaactgctgttgagaaagattgctgcagtattccaacctctcctcaggttgctaatgacacaagagtgaagcaaccttcaaacaagagaaccatggggaatactgtggtagaaacatcgcatgtgcattcttcagatgatagtctcagtggcttcgcagccaccggtcttctgtcaatggctgacaaaataccattctgtactcaggatcaagatgccaacggtcctgttgagggcttgtcagaacaagatttgtgcataaagtgtggtaaagatggccagttgttgaaatgcagcagctgcttgttagcggctcatgattcatgttttggttcattagcgacattggatgattctggccagttgtattgtcctgtatgcttctatactaaagcaactgaagcatatcaaaaggcaaagaaaacgtattctgaagcaaggaaaaacctatcagctttccttggtagaaagcaattagctgagcaacatcagcaagctgcagtggggcaaagagctgccaacaacgaggatcatttgaatgggtgtaacgatgcatctaaaaggaaagataatcatcaatctgaaggaaataacctttctcatagggatgaagaccctacccggaagaggaagaagcagaagacaaatgctactagtgatgcttgcgctcaggaagtagtcactgaaaaggtaccagttgttcagaattctgatgttgcacccatgaataagcattctgtactccagaataacagaaaacaagctcaggttgcagagcacgagcagccagaggaaaatgaagaagctagtggagaatctggtaatgacaattcattgcacaaaacaacacattcatctcagaccaaatgcagtcctgctgtaaatcagaatgttgacgctgacaaagaaaatggccttgcaagttctcaacagtcagaagattctgatgaaattgaagctacatcttctaatgactctaccaagaaatcatcgcctccttggcgcaagttgagacaccgcaaagcaatatatcaggataaggatacagcaatgccaagtaattctaagaaagtacttgggaaccgtgatcaacatatggcttcaccatcaaggaaaaggaactatgcatgtccacccaagcgttactctaaccctattgtaccggctggaaggcgcacaaagctctgttggacagaaaaggaggagataacgttgagggaagcaatggcaaaatttaccccaagggacaatggcccaattccatgggtccagatactggagcacggtagggacgtgttccacaggacacgcctcccatccgacctgagggtcaaatggaggaacatgaagaagaaatcaggctcatgacagtcttaacaacctactagtgcaggctgtgcagcttttgttctgtgtattctaaccacttactcttagagcccattgtgtgtgtcatcaccatcttgtaaggttgtaaattctcgttttcgagaaaaaaaaaagtaaggttgtaaattctccttgatgtgtagaacacttcaattttatcgttctttcttggtatgtagaacagttcagtgaacttagtttgatgtcccgagttcaacacatctattttctgcagatggctcccttctgttaaatgtt

SEQ ID NO: 24001 - DNA, 1280 bp, Oryza sativa
  ref <308>: DATABASE ACCESSION NUMBER: AK099443
  ref <309>: DATABASE ENTRY DATE: 2002-08-28
ggccctactcctcacgctctttcgatcttcctcctctcctctctatttctctcatcaacaattaccgcatcacaaggagcaaaagcagtttcagtttcggctccattgcttattaatttacctctacagaagaatgggcacagagatggccaccgtggaggtggagggcatcccatttcctcaggagatcaccgtcagtaagccgttatcactgctagcccatggcattacagacattgagattcatttccttcagatcaaatacaacgccatcggggtgtatcttgaaaaggacaatgtactagggcatttggagagttggaagggcgagaaggcagaggagcttgtgcaggatgatggcttctttcaggccctagtttctgctcctgtggagaaactattcaggatcgtggtgatcaaggagatcaaaggatcacagtacggcgtgcagctggagagctcagtgcgcgaccgtctcgtgtcagtggacaagtacgaggatgaggaggaagagtctctggagaaggtgactgaattctttcagtccaagtatttcaagcccaactccgtcctcaccttccactttcctaacacccctggaattgcagagatatcatttgtgacagaaggcaagggcgaggcgaagctgacagtggagaacaagaatgtggccgagatgattcagaagtggtacctgggtggagaatctgcagtttctccgacgactgtgaagagcctggcagatcaattcgcagcactgctctctgcatgaggcatggagtaataaactactgtagtaatgttgcctgtttcccattcatttttaactcgatcatgctttgatttgtccagctgctctcatgtgcatgctacaattgataatggtattggtttccctactacttcaaatgcatgatttacttgctccaaagcagaggaaacatactcaaatgtatatgtttcaactttacctgtgtatctggtgcaagcaacctaagacagtgatagaagtgaaggtaggaatctgtccctgtactgctcatgtgttggaattaagtccaccagtggttccaacttccaacttgtgtattgggcttgcaaaatgaagctggaaaaagacaccagaatatctttgagagcaacatcatgacacaaattcatgaatagtactgtactgctatagtttggtgtgcagtcttcagtattgtacatcctttaaaacctcctttcagtgttgtactcattttggaatcaaccaacccatacaagttacctactcc

SEQ ID NO: 24002 - DNA, 727 bp, Oryza sativa
  ref <308>: DATABASE ACCESSION NUMBER: AK099444
  ref <309>: DATABASE ENTRY DATE: 2002-08-28
tcagagcaagctcttctcctcctcctcctcctccgccgccgccgccgccgcatcatcgccgtcgaagcgtagagggagtaaggggaggatggggagaggaagaggggtgagcagcgggggagggcagagctcgctgggctacctcttcggcggcggcgagacggctcccgcggcgaaggcgaagccggctgcagcggcggagaaggagactacgccggcgccagtgaagaaggcggcggtggcggcggcggcgtcgccgtcggcagcggagaagatgaaggagatccccgcggggatacaaagcacccaggccaacaactacttccgggcgcagggccagaattgcggcaacttcctcacggatcggccgtcaaccaaggtgcacgctgctccgggcggcggctcgtcgctcggctacctcttcggcggcaagtgatgcgaaaaaaaaagaagaaagaatcctctgctcgagaaatttctctctagcagataacgtgattatttttaaacctgcttttgtgtagattgcctgtgtattgtgtgttgtgatgtgttcttgtgtgatttgcagctacttaaaaaaaaaacttaactagttctgcaggctctgatggctgtatcagccactggcataaaatgctcagatggtgttaattcttcgagttagtatgcttggaatgcagttgtaacttgtaaacatttacatgaccatgtctctgtttccttc

SEQ ID NO: 24003 - DNA, 1817 bp, Oryza sativa
  ref <308>: DATABASE ACCESSION NUMBER: AK099445
  ref <309>: DATABASE ENTRY DATE: 2002-08-28
ggcgagctcgcgacgcgaaccccctacgccgcagccgcaggcttcctcttcatctcctcctcctccagacctccacgcgagcgtgccccggggtggaagcggaggcggcggcggctcgagcgcaatctggtggcgtgggggcgcgtcacgatggcggcggcgctggcgaggcgtggcggtggggggctggcgcgcgccctggcgcgggggagggggatgtgctcggccacggcggcggagcgcgccgccggggcggcgctgacgtccgaggagctcatgcggatggagcgcgagcgcagcgcgcacaactaccatccaattccggtggtgttctccaagggagaaggttcacatatattggatcctgaaggcaacaaatacattgatttcctgtctgcttattctgcagtcaatcagggccattgccatccaaaagtcctgagagcgttgaaagagcaggcagaaaggctcacactgagttctagagctttctacaatgacaaattcccaatctttgcagaatacctgacaagcatgtttgggtatgaaatgatgttgccgatgaatactggagctgaaggagtggaaacagctatcaaattggtgaggaaatggggttactgagaacaaaaagataccaaaaaatgaggctttgattgtctcttgctgtggatgttttcatggtcggacattaggtgtcatctctatgagttgtgataatgatgcaactcgctggttttggcccattggttcctgcccatcttaaagttgattttggagacactgatgggttggagaaaatctttaaagatcatggcgagaggatatgtggttttttgtttgaaccaatccaaggagaagctggggtaataatcccaccagatggctatttgaaagcctgtcagagatttgtgttcaaggcacaacattctgatgattgcagatgagatccaaacaggcatagctagaactggcaaaatgctggcatgcgattgggaaaacatacgacctgatgtggtgattctaggcaaggcccttggtgctggagtagttcctgtcagtgcggttcttgcagataaggatatcatgctgtgtatcaaaccaggagaacatggaagtacatttggtgggaacccattggcaagtgctgtggcagttgcatcactgaaagtagttacagatgaaggtctcgttgaaagggctgcaaagttaggacaagagttcagagatcagctacagaaggttcaacagagattcccgcaaatcataagggaagtacgtgggaggggtttgcttaatgcagtggatctaagcaacgaagctttatcccctgcttctgcttacgacatctgcatcaagctgaaggagagaggcgttctggcaaagcccacacatgacaccataatcagattagcgcctccgctgtcaatcagtcctgaggagcttgcagaagcatcgaaggcgttcagcgatgtgcttgagcatgacctgccacagctgcagaagcagatcaagaagacagaatccgcggcagaaaaacaatcctgtgacagatgcggcagagacttgtactgatgagtgatagacgagacaatgaaacgtttccagaggcacccgtttcgcccaaataaaatagcagaacacacctcgcgaattcatagctcattgtagtagtagagtaggatatatacacctccttgttgcgatgtctgggacatatggtccagggatttgtcgcctaatcgagctggttgcaaacaaatggggtagcattattctagtctatcatatcatgcagaagaatcttgaattggatg

SEQ ID NO: 24004 - DNA, 519 bp, Oryza sativa
  ref <308>: DATABASE ACCESSION NUMBER: AK099446
  ref <309>: DATABASE ENTRY DATE: 2002-08-28
gctctctctcctaccgtcgccttccactttcccctctctctctctctccgccgccgccgacgccgacgatggcctccagccgctgggtccgaccggaggtgtacccgctgttcgcggcgatgggcgtggccgtcggcatctgcggcttccagctcttccgcaacatcaccggcaaccccgaagtcagggttaacaaggtagggagggcagctggagtgctcgagaaccatgaggagggaaggcgctacgcagagcatgggctaagaaactatgtgcgcgacaagacccctgagatcatgccagctatcaacaagttcttcactgagccaacaaaatgatgaaggaatttagttggttgttgattgctctgctattagttactattgcggattgatttaatggattttacccatttcaagcattacatatgttgtctcatccataaatcggaggacatcaaatgcctcttgttggaagttaccatatgtgtttgtggtcaatgactagtcaaatgttccg

SEQ ID NO: 24005 - DNA, 2992 bp, Oryza sativa
  misc_feature (1833)..(1833): "n"=any one base of a, t, c, or g
  misc_feature (1876)..(1876): "n"=any one base of a, t, c, or g
  ref <308>: DATABASE ACCESSION NUMBER: AK099447
  ref <309>: DATABASE ENTRY DATE: 2002-08-28
gtatgattctttttgggaatatatatatatattttttcatcttgttctaagttccaataacatatatttgacatggttgtcaattgtgcagggacttccaaaataattctctcaatatgcttccagctgaaattagtcctcctccaccaaatgttactgtcgtgtacgttcctacatatatgcaatacactatcaatctacattcctgcataaaaattctgtgttgcggatggatatttaactgtgagcacgcaagtttcgcagttaatttccattttgatgattaacaccatttcatttatttaaagcaagcttatactgcttatataacagttttcaggctacactattcttatttgagaatggacatcataaccaaaaacagtttattcatcatcgtattatgagtgaaaatctggactataactgaatattgcttacataaaatactcagttcttatagttgtcacaaccaatgttatttgtgcaggttatatggaaatcctatatgtgagaattctagtgaaactctgataatcaacctttgccgcctccagtcaataaacctggaaaaatctaaacaggaaacaagcactgccatggtttgtggagcttgcccgacagaaaaaaattatgagtacaatccttcattctcggaccaatgtttttgtgcggtgccacttggagttggacttcggttgaagagtccaggagtcacagactttcatccatacgaaaatgctttcaagattgacctaacttctttgttgcagttgtttccttaccagctatatattgagaactacatatgggaagttggtccaaggctaaatatgcacctaaagttatttccaagcaatacaagtttgttcaacatgtctgaggttgtccgactcagacacgtacttgctggatgggaaattacacttttagatgtatttggtccatatgagcttctcaatttcacacttggttcctatgaagatggtatatacacttgaagctaaagtgtataaaactagttttgcgatgaaactcctcgttttaacttattaaggataaattggaatttgttttgcacatttttttctgaaattttttttgatggatcatttaaacaaagattgatcgtatctcagctgtacacagtgactaattactaatggaatacaagtctgtactatttaatgttcattaccaaaatgttagtgtatgaatgttcattaagattattgtacaaggtaaataagtaatcatcgtatttatatttttaacacatatattgaataacaaccaaagtttttattttttttaacctgtggttcaactgcggttctctgccttttccggttgctctcttctgattactaatatagtatatctgtttttcgtttttttttctgtagaatatccaaatctagcttcatcaggtttaagcaaagctgcactgggtggtatcttggcaagcacaatagctagtgctattgcactttctgcagtagttactgctcttataatgagaaggaattcaagaactaatagaatttcaagacgttcattgtcgagattttctgtcaaaattgatggggtcagatgcttcacatatgaagaaatggcttctgctacaaataattttgatatgtcagctcaagttggtcaaggaggttatggaatagtctataaaggaattctagctgatggaacaattgttgcaatcaaaagggcacacgaggattctcttcaggttcaacagagttttgcacagaaatagagctgttgtctagattgcatcatcgcaatctggttgcgttggttggttactgtgatgaaganaatgaacagatgctagtttatgaattcatgccgaatggcactntacgtgatcatctttctggtaagcacatggctagttcttttatcccactgatctactgcaatcctgaactgactcctatggctttgatatcaagatcagccattcagttgtcagtttactgaatcttatagttgatgtgccttcttgaacctgcttatagtgaattgtgtaatactttgttctgttgccaatatccttgttctacttcaatctcctcgttttatttttcaatcgcaggaaagtccaaaccacctctcggttttggtttgaggctgcacattgcattgggtgcttcaaagggaattctgtatctccacaccgatgcagatcctcctatatttcaccgtgatgttaaggccagcaatattttgttggattctaaatatgtcgccaaggtagctgacttcggtctttcgaggcttgctccagtaccagatgttgaaggggctttaccagctcatgtctccaccgttgttaagggcacccctgggtatcttgatccagaatacttcctaactcataaattgacggataaaagtgatgtgtacagccttggggttgtttttcttgaattgttgaccgggatgaagcctattgagcatggtaaaaacatagtgagagaggtaaaaaaagcttaccgatcaggcaatatatctgaaatcatggatacccggatgggcttgtgttctccagagtgtgtggatagcttcctccaacttgcaatgaagtgctctcgggatgagactgacgctcggccatccatgacagagattgttagagaacttgagctcatcttgaagataatgccagagggtgatcttatccagctggaaactccacagacatactcaggacgtgctatgagcaaggaccctatgagtaaatctacatcaaattcaacaaatgggaattacttggcctcatctcaaacttttactagtgttgatgcaagtagtagcggcgtgctttctgggatggtgagtcctcggtaatgttatggtagttctaaacatgcagcaatactctgtaatattatggacttcacactttcatttgtcaatgaaccagccagccttgctggaaaatgcaatacatgatagtaacaattgataatgc

SEQ ID NO: 24006 - DNA, 1193 bp, Oryza sativa
  ref <308>: DATABASE ACCESSION NUMBER: AK099448
  ref <309>: DATABASE ENTRY DATE: 2002-08-28
ggcaaccagcacaagagcagggcagtaacttctgtgagagatggagtactcttacagctacaggttcatgcttgtatgctctgttcttgtactgtgccttaatactcggggtgcgagatgccagttatccgacgatttctacgactacatatgtcctgatgtgtacaccgttgtccagcagcatgtttatgctgccatgaggactgagatgaggatgggtgcctccctcctaaggctccatttccatgactgctttgtcaatgggtgtgacggttccatccttctggacggtgacgacggcgagaaatttgcacttcccaacaagaactctgtcagagggttcgaagtcattgacgcgataaaggaagatctcgagaacatctgccctgaagttgtttcctgcgccgacattgtagcccttgcagctggctatggagtactatttagtggaggcccttactatgacgttcttctcggtagaagggatggtcttgtcgcaaatcaatcaggagctgacaacggcctcccttcaccgttcgaacccatcaaatcgatcatacagaagttcaatgatgtcggcctcgacacaaccgatgttgtcgtcctatcaggagggcacacgatcggacgagcccggtgcacgctgttcagcaaccggttgtcgaccacctcaagctcagccgacccgacgctggacgccaccatggccgccaacctccagagcctctgtgccggtggagacggcaacgagaccaccgtgctggacatcacctccgcctacgttttcgacaaccgctactaccagaacctcctcaatcagaaaggcctcctgtcctccgaccagggcctcttctccagcgacgacggcatcgccaacaccaaggagctggtggagacttacagcgcagatgcccacaagttcttctgggattttggcagatccatggtgaagatgggcaacatcagcccactcaccggtgacgacggccagattcgcaagaactgcagggttgttaattaactgagcttcagtgtgttgaaaagatagtaaatttcttgtacttttcacaaggcgattgagacgatgtgtgttatgttttgatgttaaatgaatgcttgaagaagcagaagtaataacgatgtgattgtgactagtttgtgaactgatcgtcaacaaagatgtgatccattgg

SEQ ID NO: 24007 - DNA, 829 bp, Oryza sativa
  ref <308>: DATABASE ACCESSION NUMBER: AK099449
  ref <309>: DATABASE ENTRY DATE: 2002-08-28
gagccgacgcagcgagaaggttttaagggtaggcggcgccgcggcggaggggggctcagctcgaggaggacgacggaaaccttcccggcggcgcgcgagtctcgcggggggaggagagcgatgtcgaagcggcagggtcccccgaagcatcagaaccgctacgcgtggaagcccaacctcgggcagaagatcaacgagaccgagcccggcggcaggttccgtcctttgtcggagatcaccggcgtctgccagcgctgcaaggaccaaatcgactggaagagaagatacgggaagtacaagcctatcgttgagccggcaaaatgtcagaagtgtgggaaacggaacgtccgacaggcgtatcacaacgtctgcacggcttgctccaaggaccttgggatttgcgcgaagtgctgcacttgtgttaaagcgcttgtcggaagggatcttagtgaacaggagagtgagcgcaaggaactagaggaggccataagaggtgctagggagagggagaggcgcacacttcttcgccttatgaacaaaggtggcggggagagcggaccgtcggttccaaagattgctgacagaagtcgtgaaggggacattttccctgctgcatcccttgacgaatatgctgaacaagctagacagcaagatgattcagatgaagaagaggccagggattttgtagaagattaattttagaactcagaaaccttttcttttgcaaaaggatttatatagccttatgtggtgatttacattacatggtgggtaatcccacccactgcggaaaacaagtgtattagttttggcagatatatttccgtct

SEQ ID NO: 24008 - DNA, 2392 bp, Oryza sativa
  misc_feature (1106)..(1106): "n"=any one base of a, t, c, or g
  ref <308>: DATABASE ACCESSION NUMBER: AK099450
  ref <309>: DATABASE ENTRY DATE: 2002-08-28
gaggctccagctcttcttcaccctaacccagatccgcggggacccatccgattcgcccagccacgccaccgagcgctcgtctcgtctcgtctctcgacccaatcccgtcccccggcgcgacgccccgccgcgcgatggccgacggcgccagcagcagcggggccgcctcggcctccggccccggtggcgggggcggcggggagtcggtggtgatcgactacggccggcgccgcacggcctgcggctactgccgatccaccggccagacgagcatctcgcacggtctatgggctaacagcctgagagctgatgactatcaagctcttcttgaccgtgggtggaggagatctggttgttttctttacaaacctgagatggaacgtacttgctgtcctcaatatacaatacgcttgaaggcaaatgatttcatttgttcgaaggagcaaggtcgtgtacttaaaaagatgcaaaggttccttgatggtgagcttgatccacaggttggaagtccacagaataaaactagccctacaaaacattcactcgctgaacctatgaatatgccggtctcaaaaatatccaagacattaacaaatgattttcaagcagccaaatgtccaaatttatttgaagaagatgagttcatcagttgcctgtctagcaaaattaatgaggcagtgggtatgtccttccaagttggtacattaggttctgatgttcaactccctaaagctgttgtaaagactgttaaaccacaactaaaaaagaaagtaggaggagcatcacaagacaagaaagtaggagaagcagtacaagatttattgtacacatgtaatataagctttcaaatagtggcagaaatcagacgtgcattgcctaaggagaaggatgctaatcacaataaagtagtagcagatatttctccaaactctattgcagaaaagctggccatgacaatggagtgccatggagatattgctggtttagcagtaaaagcctgcaatggccatctgaacttctattcagtcaccaatcagacaaagcagaacaaaaccagtatcattgtgtctacacatgctccagataaatctagtagctcaaagcanagctctgtgaacaaaaatactgtaagagttccccagaaaagaagaaagcttgaaattaaaatgagaaggtcacattttgatcctgaggagtttgctttatatcaaagatatcagacaaaagtgcacaaggagaagaaagtttcagaaagctcatacaagagatttctagtggatacaccaatcgtgtttgttcccccgcggagtggtgataatacagttccaccttgtggatttggttcatttcaccagcagtacagaattgatggaaaacttgtggcagttggtgtagttgatatccttcctaagtgcctgtcaagcaagtatttgttctgggatcctgactttgctttcctatctcttggaaagtatacagctctgaaggagatagattgggtcaagacaacacaggagcactgccccaaccttcaatattattatcttggttattacatacattcctgcaataagatgagatacaaagctgcgtatcgaccatcagaacttctctgtccagtccgtttcgagtgggtgtgctatgacagtgccaaacgtttactagataagagcctgtattctgtcctatctgattttgcccaaatacaagatgagatgcctcagccacagaattctcatcttgatactgagttatcaaaaaatgacaattgtgagtctcccatcgatgaggatgatgaagatttgtcctatgatgactcagacatgatggttgatgaagagatggttcgatcagaatccaacactgatgtaatggaggattgttccagcataattgattttgaaaatgtcatgatggatctgaatggttctcgagttaaatataaggatcttctgggagtcgttggacgaatcgagaggaggcacctcgaacagctagaaaggcaattgagcaaatacgtgaaagttgtagggaaggagctatctgatcgcatggtttattccctgtagttggcctgcaattctgtcccaagggagcaatgcgaccatttagaggtacaataacatgtttatgctaatcgcttcgcagtcgaattctggtgggttcaggttggaggctggaatgacacatttttccggccgattcgttatctgtcattgaagtccgtattccataaactgttggccgaagggtatagcacaagtcgtttggtttctgcacatgattctacataaaaatagcacatctgtttcttgatgaaaaaaactcgaggaccgcaggcgttgaaatgagaagaatatgtgatttacagagtgtccaactgttaaacagc

SEQ ID NO: 24009 - DNA, 1079 bp, Oryza sativa
  ref <308>: DATABASE ACCESSION NUMBER: AK099451
  ref <309>: DATABASE ENTRY DATE: 2002-08-28
catgctggactacaacgtgcttggtggaaaattgaaccgtggcttggctgttgttgagagctacaaaatactgaaagctgctagcgcaacagaaccgagcgaggaggaattgtttcttgcatgcatccttggttggggcatcgaatggcttcaggcctattttctggttcttgatgatataatggataactcacaaactcgacgaggaaaaccctgttggtttaggcttcccaaggtcggcctcatagctataaatgatggactcgtccttcgcagcaaaatttcaaggatctttaggcgctattttcgtggaaaaagttactatgttgatctcctagatttattcaatgaggttgaaattcagacaacttcaggccagttattagatcaaattacaacaaatgaaggaaggaaagatctgaacaagtataatgtacatgtatataggcgcattgtggaatataagacagcttactattcattttatttgccggttgcatgcgcactgctgttgtttggtgagagtttggacaattatgctcaagtgaagcatatcctagttgagatgggtgtttactttcaaagccaggatgattatctggactgttttggtgaaccagaaattattggcaagataggaagtgacattgaagatttcaagtgttcttggctatttgttcaagcacttgagcgcgctgatgagaaacaaaaaggagtcttgtttgaaaattatgggaaatcagatccagcttgtgttgccaaagtgaaggatctatataacgaacttcatctccagcgggtgttttctgagtatgaaagggagagctatgaaaagctgatctcagccatcgaagcacaaccgaatgaagcagtacgagcggttctgaaatcttttctgcacaagatctacaagaggagcaagtagaacacggctgaaaaataaggccaattttggcatctcgtggattattctggttcttggcttcttgttgggatgtatagcataggtgtgataggtttctaacttctgggactttgcaacgaggaacgtgcctgataaataagaaaaatagtttccc

SEQ ID NO: 24010 - DNA, 1871 bp, Oryza sativa
  ref <308>: DATABASE ACCESSION NUMBER: AK099452
  ref <309>: DATABASE ENTRY DATE: 2002-08-28
gagtcgccgccaagcgtaccaagctctccgccgccgccgccgccgccgccggcggcgaggaccgcctcagcgcacttcccgacgacctgctcgtccaagtccttctccggataggaggaaccaccgccgcggcgaggaccagcgtcctctcccgccgctggcgctccctctggtgcctcctcccggagctcgatttcgtccccgaagccgacggcggcagcatccgcgccgccctcgctgcccatgaaccgccttccctacgccacctcctcgtcgccgcccaggacgccgcccctcacggcatggcggaatggctccccgtcgcggcgcgccgcctcgccggggatctgttgctgttcaacatggcgccgaagagagatgccaaggacgacgacgacgaggaggggaaggatggctccccatttcttgagctcccctgcttcggcagcgccaccaagctctctctcgacctagggttccttcccctcgccgtgccggtctccggcgtgttcgcccggctcaccgacctctcactggacagcgtccggttccacggcccgtgcgagttcggtgacgccgcctcgtcgcggcggttcccatccttgaagaatctcaacatccggaacacccagggtttgagcaatttcatcatccactcggattctctcctgcagctggacctgaggagtgtgagaggattgaagcagctcaatgtcgtggcgcctgcactgcaagtgttaagcgtgttcttctgctttgctgatactcaggctaggagtcaaccggtcgccgacatcgcagccccgcagctggagactctccagtgggaagatgcttttgatccaagctccgtcgaatttggcgagatggcgagtctccgatgtctgggaacctacttttttcttgtatatggactagaagactttaagaacaaccgcgattgcttgaggctcttgaagcgctttcggcgtgatgccatctccagacttaccctcacgcttgcctttctgccgaaggacctctgtgactttgaatacttaatggaaaatatgacaatgctccctgacattgtgtcccttaacctcaacgtattggcaaatggacatgccattggccccagcttattccatgttctcaggatgtgcacaagtgtaagaaggttgaagctagtaacacatatttctcttgacctcgaggcacaagctgtttgttcatcagattgcgtttgtgatcttccaccaaactggaaaactgaggaacttttgttgaaattccttcatgaagtagaaatcaataatttgaggggaactggacatgaaattgcccttgtgaagtggctattcagttgggcagtagtgttgaaagacatgacgataaatttctatcattcagtccctgagagcacggcgaaagagatggcgtaaggttttgtatgttccagaggactaatgcgccgcaccagacttgacgcttgactattagactcattttgctttctagttttgtacttggtttgaactgcgttgcatgtaaacatcaaaatgctctcagatattagacaaaatgcaggtcagccatctatcttacaagaacatgtgagccgtgcaaattcatgtagtgtaactgctgcacaaaattggttagaacttaaagttaatggctgcaaaactttggcatatcttccatcacatgagtgttagagcaggcagggctcatatgtgatgcagtaatgtttcattccatcatttaattttgagcagctgatagaaagttagaacatggaggatgtgcaggatttatctcgttatctttgtatgtttcaattgtgtaaggtacaagttaacagagatggaagtcacgcttccttggcg

SEQ ID NO: 24011 - DNA, 847 bp, Oryza sativa
  ref <308>: DATABASE ACCESSION NUMBER: AK099453
  ref <309>: DATABASE ENTRY DATE: 2002-08-28
gctccgtcccccaccactcttcccggcgagagctccagttaatgcggcggtctgcctccgccgccgcttctcgcctccgtcgacagatgggtaaggtgccgtttgctcccggtatatgcgagaccaagcctcggcgtcgcccataccgccgccatgacgccatctgttattgctaccgtgtcaagatccggtcgaatctataagcccgatgtcttcaatggtatcgtcttctcaagtccctcacaccacctccgtttcccacattattagtcaatttccatcctgagcctcgctgcattgaaaatgcagcactgggagtaaatatgacacgctgcgggatcgatctcttgtgttgaagggaatggagagcaaataccacaactttattgtggcgttcagcaaggatgatttgtggactagcagcaacgatggaataaggaaccaagaacagggtgatccaggatggtgtcttgtccagagcatgataattgcataccaggtgcaccgcatgatggaggttgtgtcgaaagacggaacgggtacctgatctctggtccatgcttgctgcaccgctgggatgaacaagtcttgaagaagtcttcatcatcacttgctgtggcaacatcggattcgtatttgagaggagagagtaggaggagcaccgtgataagaaggttggtgaagtccatgcagttcaatggagatgagatggaggtggatgatgagagggctgtgctttagaaatatttggtcacctgttttctcggtgacgattgatgctgtgcttgctatgatgtctgaggctctgagcagagccaatgaaacttttgacgtgttctatttcttc

SEQ ID NO: 24012 - DNA, 825 bp, Oryza sativa
  ref <308>: DATABASE ACCESSION NUMBER: AK099454
  ref <309>: DATABASE ENTRY DATE: 2002-08-28
agcgtcaacctcacacttgacgatagttcctttcatcaatcacccagctttactcctcttctccccccgccccgcttcaccaatcaatccaaaccctagagcaaatcccctccctcccttgccggaatcgctcgcaagctccaggcagcccccacaccagtccgcggcggatcagggggcggggcgatctctagcgccctccgggatttgaagggttccgagcgtcggcgatgtcgtcgtgggccgggcccgacgagatcttcctctccacgtccctggccggcttcttggacaagaaacttattgtcctactacgagatggacggaagctgcttggcacactctgctcatttgatcagtttgcaaatgttgttcttcagggtgcttgtgaacgagtaattgtaggtgaactatattgtgatgttcctcttggtctatatgtggtccggggagagaatgtcgtattaatcggagaattggatcgtgagaaggatgaactccctgctcacatgacttgtgtttcagaggctgaaataagaaaggccgagaaggcagaaagggaagcgagagatctgaaaggttcaatgaggaagaggatggagttcttagactttgattagaatggatttgaccatcttgatagttgctgctcccactatggccgcgagtttttaatggcagcctctgctacatatgtgggctaatgaaagccagatttcgttgtatctcatgctgcttgttcagccagaattcttcaggttggagatttcagtaaacatactcttttacagcggtaatgtacctgtgttcttaaaatttcttcag

SEQ ID NO: 24013 - DNA, 1220 bp, Oryza sativa
  ref <308>: DATABASE ACCESSION NUMBER: AK099455
  ref <309>: DATABASE ENTRY DATE: 2002-08-28
tggcagtcgcagcctctttcctcctccgtctctctctcccctcttcctctcctccgcgcggcgaacgaagcgagcgagcggcggccatggagcggctgcagcggatcttcggggcgtcggggatggggcagccgccgacggactcgccgctgctcgactcctccgagcaggtctacatctcctccctcgccctcctcaagatgctcaagcacgggcgggccggcgtgccgatggaggtgatggggctgatgctcggggagttcgtcgacgactacaccgtcagggtggtcgacgtcttcgccatgccgcagagcgggacgggcgtcagcgtcgaggccgtcgaccacgtcttccagaccaacatgctcgacatgctcaagcagaccgggagaccagaaatggtggtgggctggtatcactcccatcctggatttggatgttggctttcaggtgttgatatcaacactcagcagagttttgaagctttaaatcccagggctgttgcagttgtgatagacccaatccagagtgtcaaggggaaggtggtcattgatgcatttcgtctcattaatcctcagaccatgatgcttggccaggaaccgcgacagacaacatcaaatgttgggcatctaaacaaaccatctatccaggctcttattcacgggctgaacagacactactactccattgcaatcaattaccgcaaaaatgaactggaggagaaaatgttgcttaacttacacaaaaagaaatggaccgatggattgattttgaagagttttgacactcattcgaaaaccaatgagcagactgttcaggaaatgctgaacctagccatcaaatataacaaggcagtgcaggaggaggatgagctgccacctgagaaactagcgattgccaatgtgggacggcaggatgccaagaagcacttggaagagcatgtctcaaatttgatgtcgtcaaacatagttcagaccctaggaaccatgctcgacacggttgtgttctagtctccttctactgttgtgtcaaccctatacagacccccacccaaattattatttatgtttatcgaagcctctgccgtaattctgtaacttttggtgccagctacatttgggttctaacagttcgacttgaagaatttgttttcttttagcacggtgtactgttaatcttctgttgatttcgctgcattttcaaggttccatcacttgatg

SEQ ID NO: 24014 - DNA, 1102 bp, Oryza sativa
  ref <308>: DATABASE ACCESSION NUMBER: AK099456
  ref <309>: DATABASE ENTRY DATE: 2002-08-28
gatcagcagcctgactactcccagtctccaacccactaaccccatccttctctctacgctgggcgaggccaccactgagcggagcaggaggaaaaccagcaggcgagttagagttatcgccatgcttggcctccgcggcctcgtcgccgcgtcacctgtcaccgcgccgcggtgtagggggcggtgcagtgccgcgaccgcggcgacgtcggcgccggagaagacggctggccacgtcggccggcttccactggccatcgtcccagcggccgccgcctcgctctcacttgtcctctggtccagtccagtacatgctggcatcatgtcagggttcaaagggatggaatcggttccaggcccagatctgccacgagtggagttcttggaaaaatggaatggttagcaaactggctactactctcctatatatatgtatgtatgtatgcatgccatatctctctcgaatctcgatcgctgagagttcctgtaatgttcctgccaattgtcacttctgttgtgacatgaattcgctgataaaaaaaaactttctcttaatttggtgctctcaagcggagaaccagaagaagtacgccgagttcgactccaggttcaagtcttcccaagtgctcaaggatctgctcgagaagtccaagcagaacaaactgaagtaccccaattttcgctagccctgtttctcttgaagctctcctgcagccatgttcttgccatgggtctctgaacaatttatcaaaaaattgcaggaatgagagggagattcaggataaatactgcctgcgtggcgccgagtggggcgtcggggactgctcgacggaggggatgtcggaccaggagaaggaggatttcatcgcagagctgaagaaaagaactggacaagagtgaaaaatgtgtagaccattttccaccatggtggagttttgccactgcatatatacagcttttgttgccagaccagtaccaccactatgtttagatccaggaatggcattttactcttggtagcctgattagcacaggttctgtattgtaggaaggaacaaagtctgaaacactcaaagacaattccactctttcttttttcttc

SEQ ID NO: 24015 - DNA, 1026 bp, Oryza sativa
  ref <308>: DATABASE ACCESSION NUMBER: AK099457
  ref <309>: DATABASE ENTRY DATE: 2002-08-28
gatcgctcctacccatctctgtctccgtgagcccttcctcctccgctcctctcctttccgccgccgccaccgcgcgctcttcctcctccgctcctctctcgcccaccaccgcgcgccctttcctcctccgctccactcccacccgtcgccgccaccgcgtgcccttcctcctgcactccgctcccacccgccaccaccgcgcgccgtcgacactcggcgaccacgacgacgacgccggccgagagagcggatccaccgccaactcaggatccggaggctcctcccctccctctgtaccctctccttctcccagatctagctggaagggagtggttggcgcagaggaggtgatgacgcggtggaggaagaggatgaaggggaggcgcggtggaggaaagggtggggtgtgccgatcagcgacgggggtacacgagagctctggatctgtcgggcggcggcggtgctcggcagtgcacgggtgccagcggtggtcggcggtgcacgggcggagagacgtgcgagcagcagagctcggttgcgggaggcagatggcggatccggcggcgactcgttcaagtcctgcattggcaagttctccatcggcaagccattaggcaatccggcagccccaagtcctcggatcgacgacggcgtggagctccttcctccgtgacgagctgccgccgtggagctccgtcctccaccgccgtggagctccttccttcgcatcgagccgctgccgggagctcggagccttgggttcagcaaccgctgctgttcttctcgtggtgaggcaatgggtgatgcatgctgggattgaaacattttttttgttccgcaggatcgacagcatggttggcaaaattaattttgatttttgtgatggtgaaattgcactgtgaggccaacatatttgaatcgatgcttgaatttgtgattgtggacttgtatttgtgatttggtgagaagaagaggatgcttgaatttgtaattgagggcatatctgaatcggtttgaatttgagtt

SEQ ID NO: 24016 - DNA, 1107 bp, Oryza sativa
  ref <308>: DATABASE ACCESSION NUMBER: AK099458
  ref <309>: DATABASE ENTRY DATE: 2002-08-28
gagttatctcttcgtttcttcttcttcctccttcgacgagagcaagcaagaagccatggcggactacaaccgctacggctacggcggctacggctccaccccgtcagcgccacccgcctcctcctacggctacaccaccacgccctccgccccaccggcctcctcctcctcgtcctacggctacggacatggcggcggcggttacccgtcctccacctacccaccgccgcccgccgtcgtcgtcgcaggcgtatcccatggggatggggggcttcctggtgttcccgccggggacgcacccggacgtggagcgcgccttcagggccgtggaccgcgacggcagcggctccatcgacgagcgggagctgcaggacgcgctctcctccgcctaccaccgcttcagcatccgcaccgtccgcctcctcctcttcctcttcaacaaacctgcctcccattccccctctcgcatgggtccagcagagttcgtgtcactgtggaattgccttgggcaatggcggggcattttcgacagatacgatagggacgggagtggaaaaattgagaaagatgagttgagagaagctctacgcagtcttggatatgcggttccaccttctgtccttgagcttcttatcgcgaactacaacaatggagtctccagccgtggcgcgttggactttgacaactttgtggagtgtggaatgattgttaagggtttaactgaaaaattcaaagagaaggatacacgctacagcggctcggcaactctttcatatgacgggttcttgtcaatggtcattcccttcattgtcccttgacttcttcgggtgtctcaagacccaaagagctttgaatttgtacagcttttcagctatgtttctgcttcctagttggatttgtttgtgcaaataggccttggtgattttattgactctgtgccgtactgtgtacttagtaccattttgttttccctatagcctatatcgactgttacctgtgattgcgtctcggttctgacatgctttgatcttagttatcctcaaatgtaattgccttttgatgctaacagataatatgggagagtaaactcagcatctatgttcagcc

SEQ ID NO: 24017 - DNA, 883 bp, Oryza sativa
  ref <308>: DATABASE ACCESSION NUMBER: AK099459
  ref <309>: DATABASE ENTRY DATE: 2002-08-28
gcgccccaccaccacctcttctctttccaccaccaacaccaaccccacgcgaccacccccaatcctcgatcaaacgccctaggatttcatcgcaagcaaggaaggaggagaccaaatccaatccaatcccccatggccggcgcgtcgaccttcagtggcgacgagacggcgcccttcttcggcttcctgggcgccgcggcggcgctcgtcttctcctgcatgggcgccgcctacggcacggccaagagcggcgtcggggtggcgtccatgggcgtcatgcgcccggagctcgtcatgaaatccatcgtgcccgtcgtcatggccggggtgctcgggatctacggcctcatcatcgccgtcatcatcagcaccgggatcaaccccaaggccaagccctacttcctcttcgacggctacgcgcacctctcctccggcctcgcgtgcggcctcgccggcctcgccgccgggatggccaacggcatcgtcggcgacgccggcgtcagggcaaatgctcaacagccaaaactgtttgtgggtatgatcctcatccttatctttgcggaagcgcttgcactctatggtctcattgttggtatcatcttgtcatctcgtgctggtcaatcccgagcggactaatttatcaggctataatgcctgtaacacttgtctgtcatgaatataatggcatgtcaatattcttttgctgtatctttgtggttacgtactgttgttcagactacgttttcttttgcttatttttgagatagtacaaccaacttataattttgactcaccccagagccatggctacatttgttgcatgggaacatggacttatatggtgctagacgatttggtgaataaacaacaaatttttgtactg

SEQ ID NO: 24018 - DNA, 2211 bp, Oryza sativa
  ref <308>: DATABASE ACCESSION NUMBER: AK099460
  ref <309>: DATABASE ENTRY DATE: 2002-08-28
ggccttccgcgccgccctctccctcctccaccgcctccgcatccgccttctctcgtgccgccgatctccatcgccggcgtgcggtgcaccgagatccacccgagatgtggcgcggctgcgtctcgcgtggcctcaggagcctctccaagggcaagggctcctcctcctccgcccccgtctccgccgccgctaggctcttctccaccgcctcgtcgtcgtacacggtggtggatcactcgtatgacgcggtcgtggtgggagccggcggcgcggggctccgtgcggcgatcgggctctccgagcacgggttcaacacggcttgcatcaccaagctcttccccacgcggtcgcacaccgtcgcggcgcagggtggcataaatgctgctcttggaaacatgacggaagatgactggagatggcatatgtatgacactgtcaagggtagtgattggcttggtgaccaggattctattcagtatatgtgcagagaagcaccaaaagcagttatagaacttgaaaactatgggttgccattttcaagaactgaagatggaaagatataccaacgggcctttggaggccagagcttagattttgggaaaggtgggcaggcctatcgatgtgcatgtgctgctgacagaacaggacatgctatgttacacactctgtatggtcaagcaatgaagcataatactcagttctttgtagaatattttgcgctagaccttatcatggacagtgaaggcacctgtcagggggttattgctttgaacatggaggatggcactcttcaccgtttccgtgctacaaatacaattctggccacaggaggttatggcagagcctacttctcagcaacctcagctcacacatgcactggagatggcaacgctatggttgcacgtgctggtttaccacttcaggaccttgagtttgtgcagttccatcctacaggcatttatggtgctggatgccttatcactgaaggttcccgtggtgaaggtggtatccttaggaacagtgaaggcgagcgtttcatggaacgatatgctcctactgcaaaagatcttgcttctcgagatgttgtttcaagatctatgacaatggaaatcagagaaggccgtggtgttgggccattgaaggaccacatctagctgcatcttaaccatctgcctccagaagttcttaaggagaggcttcctggtatttctgaaactgctgctatttttgctggtgttgatgtcaccaaggagcccattcctgtcttgcctactgtgcactataatatgggtgggatcccaacaaattaccatggagaggtagtgactatgaagggtgacaatcctgattctgttgttcctggtttgatggctgcgggagaagcagcatgtgcatctgttcatggtgcaaatcgtctgggtgcaaattcacttcttgacatagttgtttttggcagagcttgtgcaaacagggtagctgaaaccgctaagccaggtgagaagcagaaacctcttcaaaaaagtgctggagaaaagaccatagcctggttagacaagctgagaaatgcaaatggatcattgccaacttccaagatccgtctaaacatgcaacgtgttatgcaaaataatgctgctgtcttccgtacgcaagaaacactcgaggaaggttgcaaattgattaccaaggcatgggaaagttatcatgatgtgaagatcagtgaccggagtctcatatggaattcagatttgatagagaccattgagttggaaaatctcttgataaatgcatgcataaccatgcactcagcagaggctcggaaggaaagcagaggagctcatgctcgtgaagatttcacgaaaagagatgatgagcaatggatgaagcactcgctggggtactgggagaatgagaaggttcgcttggcatacaggccagtccacatgaacacattggacagtgaagttgagtcgttcccacccaaggcgcgtgtttattagttcgggattcacgcagcgccgtaattctgtgtggtgttaataattcaggggctgggcattcctagctgaaagtgcgacctgaattccatcctcctttttccctcggtattttgtgtaatttgctagaaaaataaaggacaaactcatgctaatgctagtgcctaactggtcccttctgggcaacttgtataaatgaaattttgtactgcttgcc

SEQ ID NO: 24019 - DNA, 1625 bp, Oryza sativa
  ref <308>: DATABASE ACCESSION NUMBER: AK099461
  ref <309>: DATABASE ENTRY DATE: 2002-08-28
gaccacatcatcatcatcccctctcctccttatgttctcctagctctatcccctcaattctttcaacctcctctctcttctcatcaagcctcaatcaaaaggcttgaagggaagaagagcaactccagcaggtagaaaggccagaagcaaagatggcgatctccagcctacatgccaccacctccctgcactccccatgcaccaccaacacaagcttcaggcagaatcaggtcatcttcttcaccaccagaagcaacagtaggggtagcacaaggtacggaggagcaagaacctttcaggtttcatgctcagtcgacaagccagtggtgattggccttgcagcagactcaggatgcgggaagagcacctttatgcgccggctcaccagtgtgtttggtggtgctgcagagccacccaagggtggcaacccagactcaaacacactcatcagtgacacgacaacggtgatatgcctcgatgactaccattccttggacaggactggcaggaaggagaaaggtgtgactgccctggaccctagggcaaacgattttgatctcatgtatgagcaggtgaaggcaatcaaagaaggcaaggcaattgagaagccaatctacaaccatgttactggtctcctagacccaccggagcttatccagccccccaagatttttgtcattgagggcttacatcccatgtttgatgaacgtgtgagggacctcctagatttcagcatctacctggacatcagtgacgaggttaaatttgcatggaaaattcagagggatatggcagagcgcggtcacagccttgaaagcatcaaggctagtatcgaagccaggaaaccagattttgatgccttcattgatccccagaagcaatatgctgatgcagtgattgaagttctgccaacccagcttattcctgatgacaatgaaggaaaggtgctacgtgttaaattgatcatgaaagaaggtgtaaagaacttcaacccagtttacctcttcgacgaaggatcaagcatcacctgggtcccttgtggaagaaaactcacatgttcttatcctggcatcaaatttgcctatggcccagacacttactttgggcatgaggtatcagtgctggagatggatggccaatttgacagactagatgagcttatctatgttgagagccatttaagcaacctctcaaccaaattttatggagaggtgacacagcaaatgctaaagcatgcagacttccccggcagcaacaatggaacaggtctcttccaaactatcgtaggactgaagattagagatctctatgagcagattattgctgagagggccggtgcacctactgaagcggcaaaagtttaatgagctccacattcatatttcgtgaatctcttcatcaccataccatatcaatgacaatgggcatcctcgcatttcttgtaactagttttggaaatattacagctagaagaaagtaggatggtcattgcataacttgtgaaaccatgcaatggaacttctaaaaatccctctccatgagggtgctcctacatctcttcttgacacatttcaatgtacatcttctatatttcaatgtagaaagaaatacggttgctttctact

SEQ ID NO: 24020 - DNA, 1616 bp, Oryza sativa
  ref <308>: DATABASE ACCESSION NUMBER: AK099462
  ref <309>: DATABASE ENTRY DATE: 2002-08-28
gatctgtgtgtttcttcagagttcttggcttggctcctctggtgttcttgtgctctgggttttggagggagaagataatacttgttcatctgccatggatgatgagcagagggatggatgagccatggggttgactctctgggtgttcttggtttcttggctaaggttataggaaggaagtctgaagcttgagccctgtcagttctggggttggacaaggattaatctgtgaggctcactctgattgaagccatggggtctggggactggttcaagacgatcatcagcaagaagaagtctaaacgtggcaagtcaaaacacgcaaaggttgccggtcaggtacccaatgggccaaactcaacaaatcaaaagtctaataatggtccttcctctagtagtgaccctgaagacaatgcagcactagaggaatgggcagctactcgaattcaaaatgcctttagatgctacaaggcaaagaaaactctcagatgtctcaagggggttaaaagattgcacattattgggcagaccaatccagttaacaagcagacagctgccacattgaactacatacagtcttggaacaagttgcaggcagagataagaaaccggcgtgccttcatggtcactgaagggcgcaataggaagaagaagcaagaaaatcaaatgaaacttgaagcaaaactccaaaatttgcaggtcgagtggaatggaggctcggatactatggaggaaatacttgggaggatccaacaaagggaagaagccgcagtaaagcgtgaacgagctatggcatatgcattcaatcatcagtggagagcaaggtctgccacaagtcttggaaacttcaactatgaagttggcaagggtggctggggttggagctggatggaccgatggatagcggcacggccatgggagccccgatcactggtccaccccgaaaacctgaagaaaggacaggcaaagaaggaaaatgccagcacaaacccatcagctctgaagctgcaaggctcaatcagtctaagcaacaacatcaatgatcgaaaagcccctaagaagaagtcatcaccatctccccctgatcagaagaaaccggtagcagcatctcctcctgatcagaagaaaccggtagcactgtctcctcctgatcataagaaaaccgtaacaccatctcctcctgatcaaaagaaaccggtagcaagggtgcagaaggcaaaggcagctggtcctccaaaggcaaagcccaaggacatgaaagggggccaacagaagaagcaacaacaactagaggttccttcgctcagtgtgtaaaattcgccgcgaaatggttaccgctcattgtatgatacatcttgtgaagttcacttttgttttttctccccactctttgtttctctcttctttttgttttttacagtgacatggaacaaacaagtgaccaatgtagaatgtatttggttgagaggttgcacacatctgatgagagtggctttgattaggactaggattcattgttgtgctgttgtaatatgacttgtgatgtgcctgcctatatgtttgaattgaagggaagggttttgttggaacaacagttaaaagttccttcttttgtt

SEQ ID NO: 24021 - DNA, 768 bp, Oryza sativa
  ref <308>: DATABASE ACCESSION NUMBER: AK099463
  ref <309>: DATABASE ENTRY DATE: 2002-08-28
gagaagttccttcctttggtctagctagcaagagatcttacttgtgagaggaagaacaagaggaggagaggtagtatagccttggccttctttcttcagatgaattcagaagtaggaattcttggttgagattatactgcccatgccagtgagctgacaagagagaacaaaaatggagaaagaacacatcaagatggccatcctgaagcaggaacagacattcagacaacaggtcaatgagctgcatcgtgtgtaccgggttcagaagcaactgatgatagagatgcagagcatctcaacccaggctcaagcaaaagcagacaaccgaacgataccaagattggagatggaccatcaacaatggtacagaaactcgggggagaagaaggcccccgaattcgttgaagatttcgaccttgaactcacactggcaactggggctggtaggaagcaggagaagccatccaactcggactccggagcaacagtgtcatcgtcgacttctgctgaatcagagtcggagcagcggttccctgagtccaatgtagccctaaggtttcagaatgagagcaagaggcatgatgatcagctcatgcaatctccttggctctatcaatgtttaagtctgaagatggcatgatgacttagctatgatgggtggctttatgagtgttcaaaaactcaaaaatctcagataaaaaaaaaaggcttcttttatgtatatgtatatgacactaattcagagtaactggaaggctcaaaagagtg

SEQ ID NO: 24022 - DNA, 1114 bp, Oryza sativa
  ref <308>: DATABASE ACCESSION NUMBER: AK099464
  ref <309>: DATABASE ENTRY DATE: 2002-08-28
gtcgcaacgcaacgcagcgcagccgtttccccttcccccttcccctcctccggcttatctcctcgcgagccacgaggcgcctacaggtgggcccacgccccggggtcgctgtcaagcggggcccacctcccctccccgctctaatcgtctctctcggccgatgagattgtgtgactgcatattttgcttggtcaactttgtttcataaccggatagatgggttctgaaggaccttctggtgttaccgttcacgttactggattcaagaagttccatggagtcgctgagaatccgacggagaagattgtgcgcaatcttgagtcatttatggaaaagagagggttgcctaaaggtttaacacttggaagttgcactgttcttgagactgctgggcagggtgggcttggtccgttgtatgaagtgtttgaatcagccatcgtagacaaagagtatgggttgaatgatcaggggcaagtgattctgctccattttggagtcaacagtggcacaacaaggtttgcccttgagaatcaagctattaatgaagctaccttccgttgccctgatgagctgggatggaaaccacagagggcccctattgtgtcatctgatggaagcatctcaaatttaagaaagaccactgtgcctgtgaatgaagtgaacaagtccctacaacagatgggcttcgatgtggcgccttcggatgacgctggtcgattcgtatgcaactatgtctattaccaatctcttaggttcgcagaacagcgcggtatcaagtctttgttcgtccatttccccctcttcacgacgattagtgaggaagttcagatgaacttcgtcgcaaccctcctcgaagttcttgcttcccagaactatgcacagtaacctgatggggggcagggtctacttcctaaggtttcttcttccaattttattaggaagttgccaagtgacaaaacctctctagtgctctgtttgctgtccgactgtaggccgtcgtcgccttttgctgtgaagatgaagtggagtgaataagattgtaaaatcattcatgacattgcctgtgctccaaattgtgtataaaaaaaggctggttagagctgttcttgtggtg

SEQ ID NO: 24023 - DNA, 1164 bp, Oryza sativa
  ref <308>: DATABASE ACCESSION NUMBER: AK099465
  ref <309>: DATABASE ENTRY DATE: 2002-08-28
gtattcattgcgaattcagtttgatcagtggttggtcggttggccagcctcccatccaccggaattctcaaatcggagcaagcagcctactgattgcgattgcatcctctgatctgatctgctgatgcgaatgcgagcagtaatcaacagcgtagtagattcagtccacgcgcccattaaagccaagccactgtccttgtccatctttgtccaggcctcgcgttcctcggttcctcctcctccttgctagctgctgctgagtgctcggcgatgacgggcgtcgggtcggcggtgcggcggctctacctctccgtctacaactgggccgtcttcttcggatgggcgcaggtgctgtactacacggtcacgacgctgctggagagcggccatgaggccgtctacgccgccgtcgagcggccgctgcagttcgcgcagaccgccgccttcttggagattcttcatgggcttgtaggtttggtgaggtctccagtctctgcaactcttccacaaattggatcaaggttgtttcttacttggggcatcctgtggagctttccagagacacattcacatatccttgttacttccttggtcataagctggtccatcactgagatcattagatattccttctttggcatgaaggagacattcggatttgccccttcctggctcttatggctgaggtatagcacctttatggtattgtatcctactggtatcagcagtgaggtcggtttaatctacattgccttgccttacatgaaggcaacagagaaatattgccttaggatgcccaacaaatggaacttctcctttgatttctcctatgcatccattctttctctcgccgtctacgtgcccggatcgcctcacatgttcacctacatgcttgcccaacggaagaaggcattggcaaaggctaaggctgcataatggtgatgctcaagagctttcttgaatttgtcacttgtggcttaaggatctgcctaaatagctcacatttgctactcttttagtagaagtctgtagatgaggacatgttggaaagaactactattacactgcccatcatttgttgtaactgtagtcttctaccaagaattctagattttacctggttaaattattgaatgattgatccaaaatttaccagcttgtttc

SEQ ID NO: 24024 - DNA, 911 bp, Oryza sativa
  ref <308>: DATABASE ACCESSION NUMBER: AK099466
  ref <309>: DATABASE ENTRY DATE: 2002-08-28
ggtagatccatcgagcttcgtggcagactgtaagctatggcagccagaacaagcgctaacttctcatcatgctttaccttcctgaaggaagccctagtcctcccaactcagaaccccaagctcttcacacctgtcttcctcctgatcgcgcttcctagcttccttgtcctctctaccaatgtcctattcgtccagccactctccatggacatggccgaacttgcaatcaagctccagaccaccgaccgctactcgctcccggagctcctccgcaaggcgatgaaggggaatctcaagggtcctctcataaccatcgccatggtcaccgtactccgggtcacatacatggcgctcctcggtgggcgacacggagcgccgcgggatccgggcgctccggcaggcgtggcggctgatgacgcgggtgaggaggaaggagggcctcgtgctggtggtggccatctgcctcttgtcgatagctgtcagcccggtgaacctggtcgctgctgcgtacacgaagaacatggtactggggctatgcctcttggtcgtctatgctctgctgtctggtgcagagcagctgttctactttgcagcagccacggtgtactgctgccaggcaatggacagcaagggagaggccatggattatgcatacgccaagatccctaccggtgaagcaaattgctaattggtatggacaggaaagaaataagcttattagtattattagtatctgcgtgtgtcattatgcaatggtatatatacatatgtatgacatatgctattatgttgtgtacgacacatgtgtatcactattattaattagtgatcaaaactacaaccgctcttattgttatgctgatcaccactcgagttagttatatcattgtgggcttcactcattctgaaat

SEQ ID NO: 24025 - DNA, 3975 bp, Oryza sativa
  ref <308>: DATABASE ACCESSION NUMBER: AK099467
  ref <309>: DATABASE ENTRY DATE: 2002-08-28
gtccgcgtcccctcccctcccctccccatccatggcgcctcctctaaaccctaaccccgcgtagtccccgcgccctcctcctccgccttctcctgccccgagaaattccggaatttccagctgcaggtatgtgcagcttgcccgtctcctcgctcctaggtttccagtagtcgtgattaacctagtgccgcttggtaattcattctgatccgtgacacttgatatagttagggatcttttttttaaaactttaggtggcaatccattcgatgcgatcaaatttaaccagaaagtgttgcctgtggagacacaagtatattgctacaatagtggtaatctggttagtgaactggcaatgttataacattgcaccggtgtgttgccatggctagatctagtaattcagtgctaggaatatcaactgcaaatgcttatgatgtcctgcacgtagttttgcatgttctagtttgatatatggagtgtgcataaccaacagacttagttttttttttttaaaaaaaataaggttgttgattatttatagcatatttgcataactgaaaaaaaataaggctattgattattcatagcatatttgcataacttgtgaatcagtggttcaatgctattgaaaatttgaaatctgaatggggttgaaattagttgatgcatgagctgaataaactgtaattagcatgacaccatttgtatttcaggcatcatgagatgcatatactatacagattttaaaatacatgcttattattttatacttctcttcactctttctgttctctcaacagtaaaacattacgtacccaatgcgaatcaaattctaacttttcgtgcaaaaatttcccacgtggccacgtgttgtttatcttttgcgaatctagccagctaggctaataaaatgttaattaaatatggcaaaccataagctggatgggtaagataggaatttgtaggcggaaggctttcatgattccacattttctaggtaccttcgtcctccgtcgcatttaactgaccttttctttgggtgttgccagttattttgctttagtaatgccactgttttctgatggcttaaagaaattgttttaactaaaacaaccactgtatcacatttatgggcgagtgcttaccagaatccacatataagtgagtagtaacagtaacatatcatacaattcctttcatacatacctaatcggttgagttgaagctcatggaaaagaaaccgagtgatatcagagtagtgacggttttgcggtatctttaaaattagtgttgtttggtaatatggtgaaggtagctgaaaaagaaaagatatttgtggattttggttgcttgtatgtttgccactggaagcctctaatatggaaattttcaagtgggaagaggacatgtgcaagaccaatgctatatgctaatgacatggaagaagacatatgtagctgctattgtggcaccatgtatgattgtattatgggggttttgcctccgcagccatagtaaaatcttaaaaacattaaatcactctgactctgttgtctgtacattaaaagtactgaacaaacatggatcattgaaatgtttatggaagccaatttattctttgaagataatgcctaccatattggccctgacaaaccagtgggtccacctgacataataggatctaagtaactcggctacattccaaaaaaggttagtagtaaaactttctgtgcaatccaattaaatttgcatgatcggctccatgtacagtctggacatgagctggataatgaccttcctataatttatttttagtctttaatgccttttttgttgtcttgtgtgcatatatgtgtgaaaatgttccatattgtgccaaatatgttggataaacagagaagacattgatgtaaacgccactgaggtatcaggaagtggctaataagtagatttggacaaggaaggggagggcaagaaaactccaggattgatcaatggacacgcctgatctcacatttctataatcgtacctgctaaatctgatcaactaactttcatgcacagaatttcccttaactgactactttgcaattcagatattttaatatttaaattattgtttactaatttatgaatttaatttgattgtgcaggaagagtatgacacctatgatgatgaagtccattttcttgttcagctgccatttttgtggagcagaaccaaaattattgagattgttgcagcaaaggatgtcatatttgcacttgcccaatctggactatgcggtgcatttaatcggggtaaatctcattcttcaatgctaactggttttgcttttgtcagatttatgttcctaacaaaacttcttctcatgttggcagcaacaaacaagcgcatatgctacttgaatataagtcctgatgaagtgattaggagtttgttttataataaaaacaatgaatcccttatcaccgtttcagtttatgaatcagatcgtttcagctcgctcaagtgcagaacaactccaatagagtaagaagccttatttatttcttcttgaattattctgtgtatgaaaagagtatctttggtgctaaatagttgggcttcctggtgtctgcagagcaagatgctggttctttgctctcattatgtttatttagaaagtgataattgggcttgtcacaactcacaagttcatgcctcgatctgtttgctagctcattttaaagcatcaacatattttctcttatcataacttctttttaggtacattagaagaggccaattgaatgatgggtttcctttatttgaaacggaatcactgaaataccctggatttgttgagtttgatgatgttaatggcaaagtactgactttttcagcccaggatagcacttacaaagtttttgatctgaagaactacaactttctgtattctatatgtgataagaacatccaggaaatcaaaataagtcctggaatcatgctcgtaatttatcagaagtcagctaatcatgttccattaaagatactctcaattgaggatggaaccccactgaaaaccttcacccagttgcttcatcggagcagaaaggttgacttcatcgagcagtttaatgaaaaacttcttgtgaaacaagacaaggaaaacctacagattattgatgtacgttacttatgttctttgtttgtggcaactgcagtttgtactttgcccttgaactaacttggttctctgaccaggttagaaactccaacttgattgaggtcaacaaaaccgaattcatgactccttcggcattcatcttcctctacgaaaataatctattcctgacattctgcaataggacagttgcagcatggaatttccgtggagagctagttacttcatttgatgatcatgagttgtggcattctaactgcaataccaataatatatacatcactgccgaccaggacttgattatctcatactgcaaagcttcaaaggaggtcagagatagtggcggctgcgagggcatagctccccccacgggatcaatcaacatgagcaacatcttcacgggaaagtgcgtcgccaagatctcccccctcgaccctactctcacaattgctcctcgaaaaagaggtgacagcagcagatctaccattcggagcactgtttctgatgctcttgaggacatcaccgcactattctacgacgaggaccgcaacgaaatctacactggaaacagcaaaggcctggtgcatgtctggtcaaattagtttcacctcccctcatcatcaaccttgtagataccttctgtacctgtgtttctttttactgctccataacaaatgtaacgatcatccggtctgatatagtggaactgtgtgctccctgacattatacgattcgttagaataatctgagtgtagattttcttgatgtatatcaaccgtggtccgtggtggaagtttttttctcg

SEQ ID NO: 24026 - DNA, 1933 bp, Oryza sativa
  ref <308>: DATABASE ACCESSION NUMBER: AK099468
  ref <309>: DATABASE ENTRY DATE: 2002-08-28
gaccgaccgaaaaagcagaaacagcctgcctgaccccaaaaaaatggaggaaggcgtcgtcggtgggggcggcgctgccgttcttgttgccttgctcgtgaccgtggtgttggcggtgatgaggtcagctggaagcagaagcagcaagcgcggtcggctgcccccgagtcccatggcgctgcccatcatcggccacctccacctcatccggccgccaccccaccgcgccttcgaccgcatcctcgcccgccacgggcccctcgtctacctccgcctcgggccctccacgcactgcgtcgtgatcggctcggccgacgtggcgcgcgacttcctcaagttcgaggccagcatcccagagcggccgcccacggcggtgacgcgacagctggcgtacggcaaggccgggttcgcgttcgcgccctacggggcctactggcggttcgtgaagcggctgtgcatgtctgagctgctgggcccgcgcaccgtggagctgctccgccccgtccgtgccgcggagctggcggacgtgctgcgcgcggcgcagtcggcggcggagaggggcgagggcgtcgacatgagccacgagctggtccgcatggcgaacaacagcatcatgaggatggtggcgagcgctctgcctggcgagatggcggaggcggcgagggactgcgccaagcaggtggcggagctggtgggggcgttcaacgcggaggacttcgtggcggtgtgccggggctgggacctgcaggggatcgggcggaggaccaacgaggtgcacgccaggttcgacgcgctgctggagaccatcatcgaggccaaggaggaggcgcggaggcggagcctaaggctgggccggcgggagagtagcagcaaggacctgctggacatgctcatggacgcggcggaggacgacaccgcggaggtcaagctcaccagggacaacatcaaggccttcgtcctcgacatcttcaccgccgggtcggacacgacggccaccaccgtggagtggatgctggcggagctggttaaccacccggagtgcatggcgaagctgcggggcgagctggacgcggtggtgggcaggtcgcgtctggtgggagagcaggacgtggccaggctgccctacctgcaggcggtgctcaaggagacgttgcgcctccgcccccccgcggtgtttgcgcagcgcgtcactgtggagcccgtccaggtgcgcggctacaccatccccaccgacacccaggtcttcttcaacatcttctccattggccgcgacgccacctactgggaccaaccgctccacttccgccccgaccgcttccttcccgacggcgccggcgccaccgtcgaccccaagggccagcacccgcagctcatgcccttcgggagcggccgccgcgcctgccccggtatgggcctcgccatgcaggccgtcccggcgttcctggccgcgcttgtgcagtgctttgactgggcgccgccgccgtcgcagccgctgccgcttgacatggaggaggcggcggggctcgtgtccgcccgcaagcacccgctcctcctcctcccaacgccgcgcatccaaccgctcccttccttctactcctgagcatcctcgatcgtcgatacgtacacctgcgagcctgcgatcctgatccatccatttgtttttgttgacttgttactagcacctgctttgttttacgtacctcacatcaaataattcttattcaactcaaaattaagctacaagtaagctatctcattttgagtcaatgagtagaacaaaatatcatgggcaggggctcgaccttgtttggtcctactcatggccaccctgctcatatctacttggcttttagcaacccttatccttggagaagaaaattaaagagaggaggtgcaatgtaaaacaatttataaataaaactagaccaaagtg

SEQ ID NO: 24027 - DNA, 2549 bp, Oryza sativa
  ref <308>: DATABASE ACCESSION NUMBER: AK099469
  ref <309>: DATABASE ENTRY DATE: 2002-08-28
gctgaatccgtggcacagctacgtacgtacgtgcgtgctcgttacacgtatatggcggcgtcgctggcaatcgttgccgtggtcgtcgcgctgtgcgtggcggctgccgcgtcggccgagacggcgacgtacatcgtgcacatggacaagtcggcaatgccgagcggcggcggcggcggggacgggtcgaccagcctggagagctggtacgcggctacgctccgggcggcggcgccgggcgccagaatgatctacgtgtaccgcaacgccatgagcgggttcgccgcgaggctgtccgccgagcagcacgcgaggctgagccggtccccgggtttcctctcgtcctacctcgacgcccccgtgacgcggcgcgacaccacgcacacgccggagttcctcggggtgagcggcgcggggggcctgtgggagacggccagctacggcgacggcgtcatcgtcggcgtggtggacaccggggtgtggcccgagagcgggagctaccgcgacgacgggctcccgccggtgcccgcgcggtggaagggctactgcgagtccggcacgcggttcgacggcgccaaggcgtgcaaccggaagctcatcggggcgcgcaagttcagcgcgggcctcgccgccgcgctggggaggcggaacatcacgatcgccgtgaactcgccgcgcgacacggacggccacggcacgcacacctcgtcgacggccgccggctcgcccgtcccgggggcgtcctacttcggctacgctcccggggtggcacggggcatggcgccacgcgccagggtggccgtgtacaaggtcctgttcgacgagggcgggtacacgacggacatcgtcgccgccatagaccaagccatcgcagacggcgtcgacgtgctctccatctcgctgggcctcaacaaccgcccgctccacaccgaccctgtggccatcggctcgttcgccgcaatgcagcacggcatcttcgtgtccacctcagccggcaacgacggcccgggcctctccgtcctccacaacggcgcgccgtgggcactgaccgtcgccgctggcaccgtggacagggagttctccggcatcgtcgagctcggcgatggcaccaccgtcatcggcgaatcgctgtacgccggctcgccgccgatcacccagagcactccactcgtgtacctcgactcctgcgacaacttcaccgccatcagacgaaaccgcgacaagatcgtgctgtgtgatgcacaagcttcctcctttgctctgcaggttgcagtgcagttcgtgcaagatgccaacgcggccggcgggctcttcttgaccaacgacccgttcaggctgctgttcgagcagttcacgttcccgggcgccctgctgagcccgcacgacgggccggcgatactgcggtacatccagaggagcggcgctccgacggccaagatcgcgttccgggcgacgctgctgaacacgaagccggcgccggaggcggcggcgtactcgtcgcgcgggccggcggtgagctgcccgacggtgctcaagccggacatcatggcgcctggctcgctcgtgctcgcgtcgtgggcggagagcgtggccgtggtcgggaacatgacgtcgccgttcaacatcatctccgggacgtcgatggcgacgccgcacgcggcgggcgtcgcggcgctgctcagggcggtgcacccggagtggagcccggcggccatccggtcggcgatgatgacgacggccgcgacgctggacaacaccggcaggtccatcaacgacatggcccgggcgggccacgccgcgacgccgctggcgatggggtccggccacatcgacccgaacagggcggcggacccgggcctcgtctacgacgccgtcccgggtgactacgtcgagctcatgtgcgccatggggtacaacctctcggacatcagggccgtgacgcagtggtcgacctacgccgtgaactgcagcggcgcgtcgtcgccggacctcaactacccgtcgttcatcgcctacttcgacaggcgcagcgccgccgccgccgccgcggagaccaagacgttcgtcagggtggtcaccaacgtcggcgccggcgcggcgagctacagggcgaaggtgaagggcaacctgggtgggctcgccgtcagcgtcacgccgagcaggctggtgttcgggaagaagggcgagacgcagaagtacacgctggtgttgcgcggcaagatcaagggcgcggacaaggtgctgcacgggtcgctgacgtgggtggatgacgccggcaagtacacggtgaggagtccgattgtggcaacgactttgagctcaacacggctgtagactcttcttttcactcttgtgtactgtagcgtgcaagttgattcacatatctgaagttctgaacatgttgttcgtctctagctgttgggcaaataatgcttttggtggttagttagtgcagtccgtgagttttggtatatgctgctcgaatgccccagtaattggcataagtatttatgttcttgcttttgttcaaaggaactgttagaagccct

SEQ ID NO: 24028 - DNA, 2549 bp, Oryza sativa; identical to SEQ ID NO: 24027
  ref <308>: DATABASE ACCESSION NUMBER: AK099470
  ref <309>: DATABASE ENTRY DATE: 2002-08-28

SEQ ID NO: 24029 - DNA, 1277 bp, Oryza sativa
  ref <308>: DATABASE ACCESSION NUMBER: AK099471
  ref <309>: DATABASE ENTRY DATE: 2002-08-28
ggcttcagctcttcttctcccccaccacgagggaggagaagatcctgtcgggatcggaatccccccctcctcctccgctcctcgccctctccgtcgaggaggaggcggtggtggtggtggtggcgcggccgctccaacaatcgcgaggtgaggagtaccatttgttcttcttagttaatagtgttcacataaataaagtgaataaatgggagtccgtgaagattcaagacctttgggaggtctagatggactctacggggtacaacttgcaggccggtcaatgtacagtgatgatgaagccgtcaaaactagcattatagatcctttggctcgtgaaccgcaggagggtgttggcacaagccgaagattgctaatccggcggctctggcagcagagacccccatgtctgaggcctatccactgtagtctctcatgcgataaacatccgggcgaaactattgctaatgttgtcacctctattcctttcattgttcttgggctgcagacaccaagaaagaacttgaacactgcactttacgcgaactcactaattggagttggaatagcttctagtttgtatcatacgtcaagaggacgaatcagaaaatatatgcgatgggcagactatacaatgattgccactacaacactttgtttaagcagagcactccgaaatgggcatccaaaattactgatggcagcatccacattgctcctacctttccagccattggtggtttcagccgtccacactgggataatggaggtttcattcgcgaagcgagcatccatggaaccagagctcaggatggcccataacctacacaagatgtcctccctactgggaggcgcgctgttcatcgccgacgacgccttcccggagaccccctatctccatgcggcatggcatctagctgcagcattgggggtgggcacatgcaacaagcttcttgaatgatcacgtccttcctgcctatctaggctatagctagttttcaacaaccagttgatatgaatatgatagcattatagcaatacatcaacctgccgacactgatcgcgtcacattgtgtaggttcacattgaaccggagaaatattggcacagtagggtagactggtagtgcattcatagccaggtgtatatggtaccatcttgtgcctgtattactgtatattgtagtcgtatgttgtattgttgttccgtgaataatgtaccctagtatgtaaactttggtctcaaagaaatatatatatcgtagctaaacatgcatgttc

SEQ ID NO: 24030 - DNA, 2364 bp, Oryza sativa
  ref <308>: DATABASE ACCESSION NUMBER: AK099472
  ref <309>: DATABASE ENTRY DATE: 2002-08-28
ggcaccgctacactactcggctcggctgcttcttcttctccttctcctcatcctccacatcgctgcggattcgagcggcgaggcttggattttctcccggcgagatctccccggcggccgtctcgcgatgcctgaggcaaatgcgggtgggcgggcggcgccggcggcggagcagcggagcaagaacacaacagagatggatttcttcagtgaatatggtgactccagccgatacaaaattcaagaaatcgttggtaaaggaagttatggagttgtttgttcagctattgaccaacataccggtgacaaagtagcaatcaagaaaatacacaatatctttgagcatctatctgatgctgctaggatcctccgtgagatcaaacttctccggcttttacggcatcctgatattgtcgagatcaaacatataatgttacctccatctagaagggacttcaaagatatttatgttgtcttcgaactgatggatacagacctccaccaggttattaaggctaatgatgacttaacgaaggaacatcatcagttctttctgtatcaaatgcttcgagcattgaaatatatccatactgctaatgtttatcatcgtgatttaaagcccaaaaatatattagcaaatgctaactgtaagctcaagatatgtgattttggactagcaagagttgcatttaatgacactcctacaacagttttctggacggactacgttgcaactagatggtacagggctcctgagctgtgtgggtctttcttttctaagtattcaccagctatagatacatggagtattggttgcatttttgcggagattttgactggaaaacctttgttccctggtaaaaatgtggttcatcaattggacttgatgactgatctcttgggtacaccatcaatggatgctatttcaaggattcggaatgacaaggcaaggaggtatctgagcagcatgaggaggaagcagccagtacctttttcagaaaagttcccaaatgtagatcctttggcactcaagctcttacaaaggcttctagcatttgatccgaaggatcgacctactgcagaagaggcgttggctgatccatattttaaaggccttgcaaaagtggagagagaaccatcatgccaaccaatttcaaaaatggagtttgagtttgagcgaagaaaggttaccaaagatgatatcaaggaacttatattccgtgagatattagagtatcatcctcagcttctgaaggattacatgaatggctccgaaaacacgagctttctatatccaagtgctgttgataatttccggaggcaatttgccatcttagaggaaaacggaggaaagagtggtgcactagataggaagcatgtttctcttccaagggctacaacagttcactctacatcaattcctccaaatgaaggcctagatgcaacatcccaagttactcaaaggatcccaacagctagaccaggaagaacggttggtccggtattaccattcgagaatccaggcgccgcagatccgcacagcgcacggagggtggtgaggaatccgatggttcctccagcagctgccaacaagtcaggatacagctacaacctaaagtcagactactctgataggcaacatcaggaagagcttgagaaagatcgtgtgcagtacaggcctgcacaacacttgatggatgctaaagttgctccagatacagccccggacatacggtcttcacaatactactttacgaggagtgctcccagaactgatctaacagacagggctgcactccaggggagcatgctatacggcattgctccgttcaacggcatcgcagcagttgctggtggatacagcaaggttggtgccgttcaatatggtgtttcaaggatgtactagagttttagtcaggcagttgtggaattgctccatagatgagcaagatgggaatgccggagcatggctttgtgttgtgcccatccacccagatataaggctggcaagggaattggtcgcatctggtcatggatgcaggcgaaggttgaagaaaggagaagggaaactcctattccatctcaggcggccattgtccatttgaaatggcagtgagctcgcgatggtgaaagaggaaaagagggagagaaagttcatggtggaatttctcgcactttatttgttgtggagaaaaggagaaaatgtgaataacagcactaggctgggcttgtgtacatacctgcaacccttgatttttttttcttgttttcttgctagaagctgttgcttcttgtgtaaacctgcaaaagcatactccgaaaatgaatcattcgccaaaaaattgagacggcggattatttggt

SEQ ID NO: 24031 - DNA, 1242 bp, Oryza sativa
  ref <308>: DATABASE ACCESSION NUMBER: AK099473
  ref <309>: DATABASE ENTRY DATE: 2002-08-28
gaagcgacagaaaagacacacacagagagaaaccgcctcacctcacctcgcctcgccgcagtgcgcgcagcgagtgtcaccaccaaccagccatggctctcgccgccgccgccgccgcccaccacctcgtcgcgcccgccgccgtgtcgccgtactactcggctcgcgtgtcgccggggttcctccgcctccacgacttcccccgatccgtcggcctggccgccaccgcggccccgaggattttttgccaatctatcaactcggctgatgtcttgggtgcttcttcaacgacatctgatgatgcaattccacagccagttgttctgatagatcaagactcagaccgtgatgcaaccatagtgcagctgagttttggagaccgtctgggggcactacttgacacgatgaaggcactcaaggacctgggccttgatgtgacgaaaggaagtgtgtcaactgaatcagctgtcacacaaacaaagttccacatcatgcgatcggggcgcaaagttgaggaccctgacacattggaaaagatacggctaacagttattaacaaccttctgcagtatcatcctgaatcaagtgagaatttagccatgggtgaattttttggaataaaagctcctgagaagaaggttgatgttgatgttgtaacacatgtaattgttgaagatgatggacctaaaagaagcatgctgtacatagagacagctgatcggcctggtctacttctggaaatagtgaagatcatcactgacgtgaacgttgatgtggaatcagctgagatagatactgaaggcttggttgcaaaggacaaattccatgtgagttacagaggtgcaaaattgaacagctcattatctcaggtgctcgtgaattgcttgcgttattatctccggaggcccgagacagatgaagacagctactgattcttatgaaaacccgggctttgagttcctttctgcaagcccattgtgctgatttttcggttgtagtgaacaaaaaacgtggtacatttgtcctcaaaatgcatccgtatattatgctttacgtaggatgcatttaaaatcgggccagatccgggagattcagctcaatatggcccgttatcatcaccattggttcctacagtagtagaggaatcacattgggactgggaggccatcacctgatggatgctgtctgtaatttcctataattcgcttgaacctgtcgaaatcacaaggatatgcatacatt

SEQ ID NO: 24032 - DNA, 3213 bp, Oryza sativa
  ref <308>: DATABASE ACCESSION NUMBER: AK099474
  ref <309>: DATABASE ENTRY DATE: 2002-08-28
ttggttccaggcgtgaagacacagatcgaggagaggaagaacagatggcgacgacgccggcgcccggctggcgcgccgccgcatccactagctagcgcgccgccgtcttcccccacgtcggccgccgctcttcttccccacctcgccggcgcagcttctcccaccgcgccgcctctcctctccaccacccagtgaactccgccgccatggaaggctctctctctcatccttccaatcgatctcctcgacctgctatgctcatcccgtcgaaaagttcgattcttttgctccgatcgtttcgctgtagatttggttttgttttatttgtgttttgcttttcttttggtctctcttttttgttggatcgatcttgtctccgacgatgtaaatttatactttcgttcttctgaagttggcaatgtggaagaactatatggagacctgaactgggggttcccatcgatcaaatcttatcattttttttggtttttttagttgagatttggtcaggggcaaaacggtccgagaaaaagttatttttatggaaaatgtaagcgagcgaaaccagcttttaacagtggcacatatacaattctcccctccgcccgtgacggtttcggcgacaaaacgaaacccgcccccacccccacacccaaaatccgtgtgcgccgccccgcacggccgcgccccccgtcctcgcccccgtcgccgcctatatcaccgacgaccctgctttgctttcctcctcctcctccttctcagcgcgagttagatctccacaggagagaatcccaatcgggcccctcctccgcccctctccctctcccccctcaccgtcggcctgccggcgacggtatatcgaatcgaggtcagtcttctcgtgctccagtcattggggtttcctctgcggagggatcctccttggggttgggtcgtcggatgtctcaccccagagggattggggcgggggatgtcgggttggatctttccttgttgctgtcgttagctcgttgcgtacggggaggtgggggaaaaagacggaagtagctatgcgttctttttgtgttagcttgcgtgttctgttgtattccttcctaattggtgcggagaatcgtgctaaatgtgtgtgtttgtgctcctttctgtcgcagtgctggagcagctctccatgcaggaatcgtgaactgctggtctgttttgctggaccgagacgattgctttgcttcatgattcttgccgatgctgaccgtgttgcattgattggaccggggcatgggaatctctgaatctgaatgagtgccttccattagagtgaacatggactcaagagttggagtggtcctattcttcctgctctttgtccttgtccgcgatgtctcagcggtcgctgagacagaggttggcgttgtgcgcgtcgtgcaggaagcgcctgataggaagcttgagggcgcaggcgggcaggatgggttcaagagcgggaaggtgccggtgtctacggtcgcgtggtcgacgcttgcaatggccgctgccaccggtttgggtgctctgccattctttttcctggagctagaggcccagtgggcgggactttgcaatggactcgcggcaggggtgatgttagcggcgagctttgatcttgtgcaggaagggcaaatgtatggcagtgggagctgggttgtgtttgggattttgagcggagggtttttcatctggctttgcaagaagtttcttgagcaatatggagaagtaagcatgctcgatataaaaggtgcagatgcaagtaaagttattcttgttgtcggaataatgacactccattcttttggggagggctctggtgtgggtgtttcctttgctggctcaaaaggattctctcaaggtcttttagttactatagccattgctgtacacaacatacctgaaggcttagctgtaagcatgttgctatcatccaggggtgtatccccacaaaaggcaatgatatggagtatcataacatctttaccacagccaattgttgctgtccctgcattcctttgtgccgatgcatttcaaaaggtgcttcccttttgtactggttttgctgctggatgcatgatatggattgtaattgctgaggttcttcctgatgcttttaaggaagctgctccatctcaagttgcttctgccggaacgcttgctgttgctttcatggaaacattgggtacagtgcttcagggatttactgatggccacaactcagaagatacagcaggctttttggtatcacttgtatttggactaggtcctctttttggaggaattgtacttgttgcattctctcttactttcagcatgccacaccctcttttgactggtgtagcatcaggcatagccttccgtctcgcagcatggagacctttacaacttctaatgtcatcgaagatgggtctatttaccaccttattcctcctaattggaggttctctcatttaccatgtcgccacatcaaacatccttcagctagttaaccgcaagaaatcttctgttaatgtaattacatcatcctcaggcctctcacttagtgtcctcacactgcaatcgctccttgcttgcggttctgtcttccttcacgcatatgctgaaggtcttcaacttggtgtggctgcgcgcaaggcttatggtctagggcgctacatggttcttccagtttcccttcatggtctaccacgaggtgctgctgttgcgagctgcatatatggtgccactgatagttggcgggcagccttggcagccgctgctttgaccggctttgcagggccaagcgctgccatcagtgcaatcctcgcgaagattgactacagtggactagactactggatggtcattgcctgtggtgctttgattccaagctttggccgagtcttcaaacgctcgctaaggttggacatgcggaagagcatctgtgggcttttgataggtttcgcctttgcctctgtatgcctgatgtcgaccagattcatttgcttgcacactccctactgcaactcagctccagaagcagtcacataacctttcttttctttgctggtacagttgtagaacatgtaatatcagtgtaatgatgatacaggaatggaaaattattaccgttcaggttgaggaattcccttgtatgaacaaatcaaagggaaataggcatggaatatataccggtttaatttttgtcttttc

SEQ ID NO: 24033 - DNA, 3191 bp, Oryza sativa
  ref <308>: DATABASE ACCESSION NUMBER: AK099475
  ref <309>: DATABASE ENTRY DATE: 2002-08-28
gaggagttgagttttggagaagaaggaaccatctggattcccctcgcgaacggcacattcccttcccttcccacccacggcgaggcgcgggccccacctcgccgcctcctccgttgccggcgatcccggcacatggagtcccccgcggcgcgtggcgccctcgggtacgacgcgtcgggggcgtccacgagccaggcggcccccggggccgtggatggcggcgcgtcgccggactcgctgcggaacacgccctccaacatcgcgaggctggaggacgccatcgagcactgcgccgctcgccgcaagtacctcgcccgcaccaagagcccctccgacggcgaggatgtccgctggtacttctgcaagctgcccctcgccgacaaagcgctctctgcttcagttccacggacagagatagtgggaaaaggggactacttccggttcagcatgagagactctcttgcattggaggcgtccttcttggagagggaggaagctctgcttgcatactggtggagagagtacgccgagtgcagcgaagggccaaaaggttccttagttgcagctgatgcttcggattctaaaagtctgtataaggtggaggaagaacgggttggggttcctgtgaaaggcggactttatgaggtcgatttaatgagacgtcattgcttccctgtgtactggaatggggagaacaggcgtgtcttgaggggccactggtttgctcgcaaaggagggcttgattggatccccttgcgtgaagatgtttctgaacaacttgagctagcatataattgtcaggtatggcatcgccgtaaatttcaaccttcaggcttatttgcagcacgtgttgatctccaaggaagcaccccggacttgcatgctctttttactggagaggatgatacctgggaagcttggctggtctttgatactggtcctaagctaggtggcaacacaatcaaattaaggcgtgggttttcatcttctggatcagcgaagcctacacaggatgagttgcgtcagcaaaaagaagaggaaatggatgattactgttctcaggttccagttggtcatctagtatttatggttcatggcattggccagaggttggagaaagctaatcttgttgatgatgttgttgatttccgccgtgtaactgctaatttagctgaaagatacttaactccttatcaaagaagtacccagagggttatgtttattccttgtcagtggagaaagagcctaaagctcagtggtgaacaatcggttgggaaaatcactttggatggagttaaaggtcttcgtgtagcattaggtgccacagttcatgatgttctgtattacatgagtcctatatactgtcagcacataattgactcggtctcaaaccagttgaaccagttgtacacaaagtttatcaagagaaatcctggttatagtggaaaggtttcaatatatgggcactcgttaggaagtgttctatcttatgacatactttgccaccaagaatcttcttctgcaccatttccagtagattatatgaatatggaagtttcttctgatgaaggtcacatagcaaaatcgcctgacacagttactgcacatgaatcagtcatgaaggagcaagatacatcttccatttctgggcattcttgtgctgataatgtaaatgatgtagttgatgaagggagcaccagaactggcacttcatgtacagaggacaccaccctcccaacatgtgcacttgaaaattcaccgaaacttaccacagatgcactacctacagcagtagatggagaacaaattgaagtcgaaaaacaggtcgacaatcataaaattgcatgcagtgaagaaggggacaattcatctgtaagagcaaaagacattgacagttgtatcatttcaagatctgctgagggagtccatgcggatgtccctgacaaagatacattgatatcatcattgaaagaagaggtggaacgccttaaagctagattagcacaacttgaacaacataatgatttggtgactgaaagcagtgctgagtctcatcaaggtaaaagtgccactcatgcagtgaacctatcatcaggcaaaaaccgcatagggcaaggaagcacgagtgagtcctacacaccacacatcagatacactaaactaaattttaaggttgacacattctatgctgttggatcccccttaggagttttcttgtccctgcggaatgttcgcattggtattggcagggggcaagattattggcaaaatgagaacatagttgaagagatgccatgctgccgtcagatgttcaacatttttcatccctttgatcctgtagcatacaggattgaaccacttgtatgtgaagattacataagcaagcgccctgtaattgtaccctaccatagagggggaaagaggatacatgtaggagtgcaggaattcactgaagatattgctgcaaggtctcaagctgttgctcgccagttcaagtcactgaaggttaaagcagtagctgctttgctatcactgagcagaaatgacacggacgaggacgttgacagcaataatgagaaagagaagtcatatggttacatgatgatggaaaggctgacaggttcaccagatggtcggattgaccatgtacttcaggagtaaacatttcaacacccatacttatctgccctgggatctcataccaattattggcgagatcatgatactgctcttttcattctcaaacatctgtaccgtgatatacctgaagaacctccaactgatgatcctgaaaggatgcctattcgactgttttatgtgagggatccaattgctgaagagactcccttgacgttttcagataattcattagttaaggaattctcaagaaaagtgagaacttattcaagaaaatctgagaacgattcaagctgtgaatcttcctgatggatatgctatgataatctcactgagagggtagattctagacatggaggaacacttagataaagagatgcgtggttcatagttcatacttgaccacagaatcggagcacccgggtgaatgttgtacataaaatctgcccggttgccgtgcaacttttgtatctaaactaaagaaaatgtaatgttgtacatgtacaaataaggctatataggaaatggaaaaagaaaagagattagttttgacc

SEQ ID NO: 24034 - DNA, 942 bp, Oryza sativa
  ref <308>: DATABASE ACCESSION NUMBER: AK099476
  ref <309>: DATABASE ENTRY DATE: 2002-08-28
ggaggaacacaaaccagagatccaaaagaatccgtcgaggccacagattgttccagagtttttgttttcctcttctccccttcgcgttagcgagcatgtgtcccggaggcagatacgcgggcctcgacgtccccgcctgcgcggcggcgggagacctgaggccggcgttcgacgtgctggacgcggaccgcgacggtcgcatcagccgggaggacctcaagtcgttctacgccagcggcgcggccaccagcgagcggttcgacgacgaggacatcgccgccatgatcgccgcagccgacgtggacaacgacgggttcgtgcagtacgacgagttcgagcgcctgctggggcgcgccgccgcgggggcggggtgccggcccgcgatggaggacgtgctccgggtgatggaccgcgacggggacggcaaggtggggttcgacgacctcaaggcgtacctcggctgggccgggatgccggcggccgacgaggagatccgcgccatgatacgcgtggccggcggcggcgacggcgatggttgcgtggggctcgaggagctcgccatcgtcctcggctgctcgcccacaaattggaccgcatcttctcaaactctgcattgatgcattgattgggagacttcaatttgttggttggtggtgttgtggtgatgtgattgttgagcgattttcgagtttcgagaagcgtgagggatgtttaattgggcgtaactgctcccgaaaataggggtattaaaaactccccgatgcagcttcttccatagaaaaaagttgaaaagtttgtattgaagctgagcatcgatggtgtgagttgggggtaggttttatttggaactaatgagatgtttcttttctcaatccttttttaagcaagtttctttttcaatctgaaccgaaaatttgtgtaagatcctcgaaaaagaggagg

SEQ ID NO: 24035 - DNA, 2944 bp, Oryza sativa
  ref <308>: DATABASE ACCESSION NUMBER: AK099477
  ref <309>: DATABASE ENTRY DATE: 2002-08-28
ggtgtattatgggaccaaaaaaagctgatatgtgagctctgaagcgaatgttgagcccctcggctgtgaaggtacactatggcagaggtgagtatatcgagctttgcaatcaccgttcttgaaaaagctgcgtcttttggcactgactgggctgttagtgagataaagtccgcttggaacgtcaagaaagaactagagaagttggaaacatcactgagatccatatgtgctgttcttagagatgccgaatgcaagcagtctacttcccactcccttcaagagtggttggacaatttgaaggatgcagtctatgacatagacgatgttctggacgatgtttctaccgaagccctagagcaagaagttcggaatagtttcatccatagaacaaggaacatgcttacttatccattcaaattgagtcaaaaaataaaagaagttcgcaaaaaacttgatgagatagcagccaatagagcacagtttggactaactgagcatgtaattgatgtccatacatctgggagcagcaacagggaaacacattctttcataactgaaccagaaattattggaagagatgaagctaaacgtaagattgttgagacgatttgtacagctacagaatcaaatcctttgtctgtgcttcctattgttggtttaggaggcataggaaaaactgcactggcacagctgatttacaacgatgtacaaattaccgagacatttcagaagaagttatgggtatgtgtctctaatgtatttgatcttaagaagatcctggatgacataatgcagtcaggcacaggtaaaagcaacaaacatttaaacctagagatgctacagagtaaggtgcgtgggtttttatgtgaaaagagatatctgctagtattggatgacatgtggaatgacaaagttaatgaatgggacgagctaaaatgcctactatccagtggaggaagtggaagtgtgattatagtcaccacacgcaatatgagtgttgcatcgatagtgaagaccctagaaccatatgatgtggcaaaactaactgatgataagtgcatgcaagtattcatgcattatgcatttagaggtggcgggccacatgaccctaagttattggaaattggaaaatccattgttgagaaatgttgtggtattcccttggcagcaaagacattgggttccctattgtgcactagtcatgatgttggagaatggcggcgcgtcatggaggataaaatttggaatactgaggcaaaagtatatggtctaatccctgcattaaaactgagttatgatgcacttcctccccatctgcgagcatgcttttcttgtttatccattttcccaaaagaccatcagttgttttattctactacagtcatgttatggatggcattggggatgttgaatacaggcaaggaaagcaaacaaatgatatctgctggaagtaagtgctttcatgatctcctaggaagatcgttgttccaagaccaaattattgtttatgatgaaaccattcaaagctgtaaaatgcatgatcttattcatgatctagcacaattcgtttcagaaaatgagcatgctgttatcagttgtgaaaagactgctttctctaaaagggttaagcatctagtgtgagattgcaaggacttctcaggagagcacgaatttcctaagcagttgaaaaaggcatgtaaggtgagaacattttcaagcatatacaattatggtaccgtgagcaaaccttttcttgaggtcctcttctcaacgttcacgcttctgcgtgtattgattttttccgaaactcactttgaagagctgccaagttccatcagaaatttgaagcacctacggtacttagatctacaatggaaccgaaaaatcaaacgcctaccaaattctttatgtaggttggtgaatctgcaaacggttcatcttgctcagtgcgaccaactagagggcctaccaagagacgtgcatcaacttgtcagccttacatatttgagcctcacgtcaaagcagaagtatctactaaaaagtggattttgtggttggcctagcctgacgtttctatatttgcatcactgcgttgagttaacatcactgacagagggattcggcagcctcgctgccctgcgggagctgcgcatcttcaactgtccgaagttggcttctctcccctctgcaatgaagcagctctcctcacttgagaaattggtgcttaataactgcaatgagttggatttgatggaaccaggggaagccttgagcggcctgggcagtcttcgtgcgctcaaccttgtggggcttccgaagctggtgggtttctcagcgagcttccaatctgctgcgtcctctcttcaatatttttgtatcggcgattgccaagggctggagaagctgccagatttcatccaaagtttcacttgtcttaagataattgggattcgtgacttccccgagttgagcaggagatgcacggctgaatccggcgaggattttcatctcatccaccacgttctgcggatttacatcgacaataaaatctgggaaaagaatcgtacgtgatgcccccctgacgccaggcctgtagagaaccggctggtttcaagactttccgctcaaagaaaattgcattcgaatatttggttggagtggccttccaggctgggcgtccatactctgatactcctcgtgtattgaaggcttgaagcgcatcatgtctgtgtcatttgtgctgcaccctattgtgtacgcatacatgttcgttccatgcatgcatactttgtgtgtaataattgggtacatttgctaattgctacatatttgtgcaactttcatgtgtaacaaacggcacaaacgtactatgtacggatgtttgaactggatactcatgtttgtaactttgtatttctaatatcacatcatttattttgctggt

SEQ ID NO: 24036 - DNA, 857 bp, Oryza sativa
  ref <308>: DATABASE ACCESSION NUMBER: AK099478
  ref <309>: DATABASE ENTRY DATE: 2002-08-28
ggcttccatgggagagaaaaaaaatagtctggcggtggttcgttccatagaagcacggcggaagtagtctggctgcggttcgtcccattgtaccggatctgacctgcaatgggtgagatcgatgccgcagttacccgccacaggccagatcgatctaccggcgtcagtgatatcgccgtcgaacagttcccatgttcgagatcgagatgaactaacggcggtcgggcgagatcgatctaccggcgtcagtgatatcaccggcggacggggttctgatctccaaggggagtaaagtctgtcctgtctggtggtgttttttacgatattgtatagaacaacggcgacggcaatgatatcgatgaaaataatttgtcgccctgtttctattcttcagatagatcgtcgccatgatctctccaaggaggggaataacggtgatggcaatgatatcgatgaaaataagttgtcaccatgcatccattcttcagatagatcgtcgccatgacctctccaatgaaggggtttgcgtgcaggggcttgggacatctttatgtaggattttggctgggtattgcgctctgcatcatccatgcatcgccgtcctaggtctagaacttataagaaagctgagatgaaatcggctatccctacatgagagggaagtccggttcggggtgtctacaattttccctccacgtcgaaagaacagaacatttggtaattttttatttgttttactcaatttgtcaagttatagtacatagtacttttgagaaacaatacatgtattttcatagatttcagtccattgtggagtcgttccttctaaggatatgaaggtagaatgtttcaaggtt

SEQ ID NO: 24037 - DNA, 1142 bp, Oryza sativa
  ref <308>: DATABASE ACCESSION NUMBER: AK099479
  ref <309>: DATABASE ENTRY DATE: 2002-08-28
gcccattccattcggcatccgcttctcggtgggcaacgcgacggcggcggaaagccaaggccaacgatgcagcgcctctcccgcttcgtcccctcctcctccaggagagtcactgacctaaaggatgctctctggagtggttctttgactttccaacatgctctttcaacatttgcagcagacgagaacacatctggtagaaaatttgcaagctacaccgtgttcaagggaaaggctgcactttctatgcaacccatactgccaagcttcagcaaactggaatctggaggatctcgtgtgaacaaaaatggatcggtgatgttgacttttttcccggctgtgggacaaaggaaatatgattattcaaagaaacagctctttgctctgtcacctactgaagtcggaagcttgataagtcttgggcctgctgaatcttgtgaatttttccatgatccctccatgaaatcaagtcatgaaggccaagtgaaaaaatcgttgtcagtcactcctctcggcaatgacagtggatactttctgaatataactgttctgaacaacttgcagaagacaactgagcgactttcactcccaatctcaaaagctgagtttacagttatgcgcacagcattgagtttcgcattgccgcacatcttgggctgggaccaggccttgactaatcaccagccaagtccatcaccagctagcaagcccagggtggagcgcccacacccagattcagagtgggaaaggtgaagctcccttgtaggcaccagcagcatggagggatttgaacatcatcgctaccaaaatttggatgctgttgcactttctccacgaaatcgaattaggagatatctattagattcatggagctaaagatcgaatgtcacagattgagcacaccatgaagggttgtgtttgttcaatgcatgtttgaacttcaccaggcctactagttgcaaaattctactccagttagctatgcattgcgtttgacaccttgtgccttttgaatgtgtgacttatgttatttgcaaaatggtggagtcttacaaaactactcaaacgtagttgagtggttatggctttaaaaagctaaacaaaaaacatatctgtttgttaaggctcaaactttttattcc

SEQ ID NO: 24038 - DNA, 1083 bp, Oryza sativa
  ref <308>: DATABASE ACCESSION NUMBER: AK099480
  ref <309>: DATABASE ENTRY DATE: 2002-08-28
gatctcccaatccactacttcttgctgatcatcatatatctcttgtgagcttcagcaatgggggctctgccaagggctctagtcctcggcgtttgcgccgccgtcttgctggtgaacgtgctcgccgttgccgccgacggcgacgccgcggcggcggcgtccatggtcgtcggattggccaagtgcgccgactgcaccaggaagaacatgaaagctgaggccgttttcaagggtgttcgcgtggcgatcaagtgcaagaacagcaacggcgagtacgagacgaaggccaccggcgaggtcggcaagtctggcgcgttcgccgtgcccctcgcggcggacctcctcggcgacgacggcgagctgaggcagcaatgcttcgcgcagctgcacagcgcggcgtcgaaccagccatgccccgggcaggagccgtcgtggatcgtcaacgccgccgccgacaagaagaagaccttcgtcgccgtcgccggcgacacccacttcccgtcgtcggagtgcgcgtcggcgttcctctgcgacccgttccacaagaaggacttcttcttccactacaagaacccgtcgccgccagcgccggcggcgtaccacaagccgccgccgtcgtacacgcacccggcgccgccggtgtactcctacccgacgccggcgtactctcacccgacgccggtgtacaagcagccgctgccgacgccgtcgccgccgatctaccacccgccggcggaggagaagaaggtggcgatgcaggacgacgcggaggctgaccccgagctgttcaagaagctgctgccattgatcaagaagaatccattcctcaagttccccaagctcccgcctgtggaggtggaggcaaagccatagatggtcgccggcttcgccgcggcgccatgatcgatcgatcgaagcgaggaaacatgagtactagctggtttaattgcttcgtttctttgtgtgtttttcacaccggctactcgagctagttaattactgcccttctagcgttgttgaagcttggtctgttgcctgcctgctagcttaactattcagatataaataaaagcttctgttctc

SEQ ID NO: 24039 - DNA, 1499 bp, Oryza sativa
  ref <308>: DATABASE ACCESSION NUMBER: AK099481
  ref <309>: DATABASE ENTRY DATE: 2002-08-28
gaggaaacccaccaccgaattcgtccgtactccttcctgcttcccctccggcgacggcggcgcagatctccggttggaagttagggtgttcatcttgacacaaaatcatgccgaaatcaaactgtaccgaagcgaaaataagatatggattagctctccttccaattgatttatcgttctgtcaatattgatccgaatacgaaaattttaagtgctgttattttgaaggtttcggaaccggaattcggaattgcagtagcagtggatgcctttataaatcaagttcttgtccttggcttcaaatactcgatgtgtttcttggctaatcctaatccctagctgcttgtgtgttgcgtgtgcaatttctgacccttttgtggtggtgtatatcaacagagaaatctctagctttttcagcggcgaagcgaatccatggccgagcacctcgcttccatctttggcacggagaaggaccgcgtgaactgccccttctacttcaagatcggcgcgtgccgccatggcgaccgatgctcccgcctgcacaacaagccgtcggtctcgccgacgctgctgctctccaacatgtacctgcgtccggacatgatcacccctggaattgatgctcagggcaaccccatcgaccctgagaagatccaggccgacttcgaggatttctacgaggacatctttgaggaactcagcaagtacggcgagatcgagagcctccacgtgtgtgacaacttcgccgaccacatgatcggcaatgtgtatgttcaattcagggaggaggatcaggccgccagagcgctgcaggcgctgacggggcggtactactccggccgtcctatcattgtcgagttctcgccggtgtccgatttccgggaggccacctgccggcaatatgaagagaacagctgcaaccgtggtgggtactgcaacttcatgcacgtcaaggagatcggcagagacctgaggaagaggttgtttgggcacctgcataggtcccggagaagccatagccatggccggagccgcagcccgagcccgtaccattaccggagggactatgatcggaggagctcatcgcggtccagggaccacgacgattactaccgtggaggtagccacgattactaccgtggaggtagccggaggagcagcgagaggcaccgcagcagctacgacagcgatggcagcaggcggcggcacaggtccaggactaggagtcctgtcagggatggtagcgaggagaggagagctcaaattgagcagtggaaccgtgaaagggaggctgcacaagtgtgatctctggattagttgctgtttgcaatggcccatgtttctcatcttgtactggtagccctagattaaattagcatcatatcttatcttaatgatctgagcttggatgtactcgagattttccttactgaacttgaattttctgtcagatgcatgtgttaactgaacctatttggtgttaaattatatttgtactg

SEQ ID NO: 24040 - DNA, 2049 bp, Oryza sativa
  ref <308>: DATABASE ACCESSION NUMBER: AK099482
  ref <309>: DATABASE ENTRY DATE: 2002-08-28
ggtttatatttctgcgaggaaacgaagcgaagcgaagcgaaggcaaaaacatccgccgccgccgccgccgccgccgccgccagttcgtcgtcgtctcgtcccctttccttcctccatccctcgctcgcgagcatcgcacgcgctctccccatcctcacatggcagctctgcgactccacgcacaacccgaacccctcaagaacaacccctgcttctgcttctgctgcttctcctaccccgatcccgactccctctcccgtctcggcctcgccgccgcgcccatccgcgcccaccgcactagctcctgattcgagcccgagtcgagccgagctgaccctccccccgcgtcgcgtctcctcctccgtcttcttgcggccgcctcgcctgttcttgctgtggttggttcttgggatcaggttctctgattcttgctgcgcggcctctttcgccatggggaagagtaagaagagcaaggtccgtggcgttggcggcggggacgacctgatcgacagcagcgacgccgacagcgtgggctcgtcgtcgacggcgctgtcggatctatccatgtcgtacgctaccgagcacgtcggctcgcaggagttcgtcctcgacaagtacatcgatgctctctatgagaagagggggtctaccagggaagccgcactctctcaactggttgatgcttttgaaagcttcattcttcatggtcttgtggagaacaaatatgccaccctgctgagtctgttcaacagttcgataaagaagggatctacaaaagaggcttgtttagcatcccgtgccattggtcttttagcccttacagttggtgctgggagcagctcacatgaaataatggaggagtcacatgcacaactttctagggtccttcaaacttggccagatgcttccaagatgatttcggcacttgattgcttggctgtggtgacatttgttggtgctgctgatttagctgaaactgagttatctttgaaagctatgtgggatgtgattcatccaaaatcaggttcaaatgtgggaattatccgtaaaccaaggccccctgtgttagcagctgctatatctgcctgggcatttcttcttacaactattggttcatggaggataaatgctgatagttggaaagagcctattgcatttctctctactcttcttggtgcggaggatcgtgctgttcgaatggctgcgggtgaagcattagctttgtgctttgagctaaatttgcttgacgtttcctttggagaagatgatgatgttgagaatggaggaactgttggttctaagagtaaacttttcctggatatgcaagctttgaaagccaaaatatcaagtcttgcctccaatctctcaatggaggcagggggtaaaggtgcagataagaaaaatcttactgaccaaagagatctgtttcaacggatcttggattttgttaagtatggtgagtgccctgaagaatctgttaagatttcaggaaagcgtgacgttttaagggtgtcatcatggtctgaattgattcagttgaacttcttgaggcggtttcttgggagaggcttcctcaagcatgtgcaggagaatggacttcttcaagatgtgtttgacattaagactgacaaagctgaaactctgtcatccactgataagaaaatcttcaggtctggtgaagagaaaggaagagctctaaagttgaacaaggaccgccgtttagcccaggagaggaagaatgccgttatgttggacttggacgagtagcctagtgaaactgcagccgttcgtcctcttctccgtttagctggacttatctgtaacgagtgtttggaagtcgcgatttgttatcacgacgctatgcaaagcaatactgcagaaatactactactatactagatccaaaccagttcgtgtttatcaactcagcagtgcctttacatgtaaaggtctaaaccagtttctgttgtccggtcgctcagagtgcctttacatgtggaaacaaacgtgctgaaatgaaatctgattcctattggggtctatttatgc

SEQ ID NO: 24041 - DNA, 3273 bp, Oryza sativa
  ref <308>: DATABASE ACCESSION NUMBER: AK099483
  ref <309>: DATABASE ENTRY DATE: 2002-08-28
gttatgagcttttgcagttgcagccttgcacctccctcccattaacttgtcctcgctcaccaaggtgcccacgtcgctgcgcgcacaaattcgggccatggaggaggcagcggcgccggagcggaagcggccgcgcgacggcgacgtgggtccatcgacggcggcatccggggaggcgcagtacgtgtacctgcccatcgccgacgcgctgaaggcccccggggcccgggtctgcctcttcgccgccgtctccgagatcggcgcggccgtccgcagccgcggcaccggtgagcctccttctcgcccgcactttcgagtccccccccccccccccctgagagcagggtttagggttttggtcgctatagcggatttggagctgtttggggttgctactggactaataattttcagtgctcaaatgtgctcggtcatggtgggggagattaggtcgagtttccgcacccgatttgcgagctgttctgattgtaaatgctagggaaagaggaagatgtggggttttaggtgtaggcctatagccatgccgaagttctgaacactgaacagaacagggtcatttttgggggatttttgctgttaattggatgaagaagcaaacctggtgagttctaatggctgtatctgaaatcgccaattatagatgagcttaccatgttccaccttggaggagtttctttggttggttattgagctcaattgtgattatattcttatacatttgctattgcagaaatgcctgtatgacaggtttaacaatttttgttttttgttgattcttttgtgattatacctgcaattgacgtcgtgctacttatccatggctatcatttgtgcagatttcactcttacgttgaggattgtggatcactcacgtgcatctgcaatctctgtgaccttctttgctgataacactgcattactgccctgtgttaggtcaagtggagatgtgatcagtctccataatgttgtgataacaatgcaccatggcgaattctttgtcacatataacaaaaggttttcttcatttgcgctatttgaagggaaagtatctacgggatgcataccatatcagcattctatgaaataccatggcagcaaacatgacagtgaatttttgactcacttgagaatgtggattgtatataatcctccaggtgagtatgtgactgctagttgaaaaattattgttgctcatttttctcttgtccactcataagctatacggatgatatgtcttgtgaagttgtgatactccaaaactttgcacatctacgaatattataaggaacaacatgcctagaagctcctaacccacatgagaatatgttgttatcaattcctgattttaccagttgctgtgaacatacatcgatatatgactcatatacaatcattagtatacaatcgataacatactctcctttacccaaaagttaagcattattacataaacacgtgtacaatagaacacccattcttttctttacaaccttaggacaggatgcctaggtttcggtcaaataaaataaaagccttcaaattggttgtcagctctacatttctttctaatttttttaaatttttggttgtcagctctttagcattatcatgttttattgactgcctgtcctagcagtacctgttgagtatatgattcacctacttttggatactcgtccgtctattataatgtggcttatgctcaacagcatctactgatttacgtctatgtattttgcacaaaatgcagattaccgaaatatttatatcttctctgctgaatacatgcactacaaatatctgttgcaacactctttctttttctaacaagctattttgctctctaggtctgaaagatcttgaactgcagttaaggagtataaaatccgattctacttttgatctagtatgcaaggttagctctatatgaagttacataatattcaacagttatttgaatagaggaaatctgatgttcctttttgttaggttctagatgttcatgaagcttccaatggcgtatggattttgtatgtttgggatggaactgatacacctgtgaccgagttcccgacgtaaaaattagacattggtgtcactgtttaatttttaattcagaaataacttaaaattaattctgcaaaataggatggtgttggtgcttataacattgtgttgaagtaaattgtgcctctgccatttctttcataacgtatggcataatatgataataacagttcatttttaactaaattgcgcctatgttgtttggcttggttgaatgcagcttggacaatgaatcagtttctccaccccctctacatcttgaaggagcacctctgccaagggaggttttgtgcacattgccttgtgttgggagtgtgctgagggttttctcaaacaggtttttcaagaaaatgctacacttgcaaaagggtatttattgggccaggttctgtaatatgacgtgcaagcagcagtttggcatgtggaaagggattctgctgccttctagcagagtccgccttttatcaaatgaagatggcagcgttgctgatcgtctgaagctattcgacagtcgcattgccacccaaattcatcgtcagccaatggcaagcctccccaatgcttctgatattgctgatgtagaatacgagagagcaggttacacaacattgatggagtcgctcacccatggagaggtgacgcacaaattcaaaaccttggttcgagttgttgcagcatatccacgtggagctagtcatctttgttcactattggctggcaattgttgtctaaggttgactcttgaggatcctacggcaagaattcatgcgtacatccacaaggacgatggggccaaattttttggtggtttcctgacggcagaagctgtgatcagaaagatgaacaagcttctgggtatcccagaagacaccgaggaaggtgctccatcgaataggaacccaccttggatatggtgttgcttgaagtcttaccgtctggacaagaacgatccctggggaagcagaaggtatcggatttttggcacagagatcagggattgaataggggagaaagatttggagcaacttggaaattactgtgtacagtggcatttgcttgtggtacagacacgcaaattgactgagttgtaacagctaggtgacagcctttcggttggtgctactacctacaatgttactgtgatgctgttagcatttggtaatgccagatgatttattttagttt

SEQ ID NO: 24042 - DNA, 796 bp, Oryza sativa
  ref <308>: DATABASE ACCESSION NUMBER: AK099484
  ref <309>: DATABASE ENTRY DATE: 2002-08-28
gatcagtttgcccacacagccgccgcttcctctcccaggccgcgtgcaccgtcgcggccgcctccccacgccgtcgccctgctcccttgccaactattcccccgctggccgccgctgccccatgccaccatacctcgtcttcaagcgacgtcgattctaatcatcatcatccttctgccgttcttcaaccacttccgaggggaaacgggctgaagtggggagatggtgctgcggcgggctactgcggcggtgggcgattgcccgaagaaggtggcgaagctggtggacctggtgaaccttccgacagccctgagggagttcgcggggggccagtcccagatgtcccacctctctttcttcctccgcgtctggtcacatatcaagagcaacaacctccaggacccatctaataggaacattgtaaactgtgatgacaagctgaagactgtattattgggtaggtctaaagtggagctctctgaactcccaatgcttgtcaagctgcattttcccaaatttcaaaagtcataagaatataaaagtcacagcttttaataactaaattttgtggaagctggttttatttcttgtatcctcagataagcagcaaagtcaatgtgaatttgtttccaaaatgcccgttactatcagctaacatgtgtgcaatgaacgatgcagttctgtgactcttgagttctgcccactcgatatatgtaatttgtcatgttagtatcttgttgaagaaacagaacgatagaaggaaatctgtgctgcatgattgctgtcactgtctttg

SEQ ID NO: 24043 - DNA, 1712 bp, Oryza sativa
  ref <308>: DATABASE ACCESSION NUMBER: AK099485
  ref <309>: DATABASE ENTRY DATE: 2002-08-28
gacttgggccagtctgaccgccgcgagcgagcgcggcggcttcgctatatatgcatcagagacctcgattgcccaacccaaccaaccaaccaccgccgcggcagcagaaggatccccaatttccgcgaaaaaccctcgaattcgacccggcatcccggcgcgtcggttgttccccgatggaggcagcagcagcagccgccgcggcgctcttgtcgccgcccgccgccgccgcgccctcgcggcggcctgggactcccggtgctacctcgctccccttcgcccggaggcgcggtgtcgccgccgtcaagggtcttggacggcagcagctcacctgcagaaggcgaggcgtcgtcgtgagggcggcgtcgtggtcgccgtcggggccggagtcgctgccgccgccgccgtcgtcgtcgatcgcgccgctccagatggagtcgccggtggggcagttcctctcgcagatcctggccacgcacccgcacctgcttcccgccgccgccgagcagcagctcgagcagctccagaccgaccgcgacgccgccaaggacaacggcggcgacaagcccgcgccgtcggacggcgacatcgtgctgtacaggcggattgctgaggtcaaggaaaaggagcgcaagagggctttggaggagatactctatgcacttgttgtccagaagtttgttgaagctggtgtttctttggttccagctctttcccactctatcagttcttctggaagagttgatcagtgggcagaatctgtggaagggaaacttgagaagatgcattcacaggaggcatatgaaatgatcgagaaccacctcgctctcatcctggggcagcggcaagctgatgccactgttgcggccataagtaaactccgagttggtcaggtgtatgctgcttctgtgatgtatggttacttccttaagagagtcgatcagagatttcagctcgagaagtcaatgaagaccctcccttggggatcagaagaggaagacaagctcaaccaagttatgacaacggactcaaggccctcaccccagacttctacttcacatccagagatggcatcatggacttcccctaacttcagtgcaggcggacctagccaatctgttaagccatgccgtcttagatcgtatgtcatgtcatttgattcagagaccctacaaagttacgcaacaatcaggtccaaggaggcatttggcatcatcgagaagcacactgaggcactatttggtaaaccagagattgtaatcacacctgaaggcacagtcgattcttccaaggatgaacatgtcaggataagtttcgcagggttgagaaggctgatcttagaggctgttacttttggatccttcctttgggatgttgagagctttgtggacaccaggtaccattttgtggccaactagttgatcctacaaagtttcatcccagatagtggagattagtgtgtatatttggtccgaagtgtatgggtttcaatgaagactctttgcaaaacgaatttctcctggctctatgcagatcgcagagatctatgatttttacacagttttcgggcatatagcttcaatgtaaaatggatatttttttagcctaatgtgcagctgttagttcctggtaacacttgggctgcttgggccttgggtgatgtataatgttttatgacttgatgtctggaaattgaatgaggaatcctagtt

SEQ ID NO: 24044 - DNA, 785 bp, Oryza sativa
  ref <308>: DATABASE ACCESSION NUMBER: AK099486
  ref <309>: DATABASE ENTRY DATE: 2002-08-28
gatacgagacgacggacgtgtcgacgtcgccgccggcgatggccagctcctcgcccgtaccgccgccgcgttttttcccgggctccggcgacgtcgggcggagtgggacacagcaggacaggagcgattcagaaccatcaccagtagctactaccggggagctcatgggataattatcgtctatgacattacggatatggagagcttcaacaatgtgaaggagtggatgagcgagatcgacaagtacgccaatgacagcgtatgcaagcttcttgttggtaacaagtgtgatctggcagagagcagagttgttgaaactgcagtagcacaggcttatgctgatgagataggcattccattccttgaaacaagtgctaaggactcgatcaatgtcgaagaggctttcttggctatgtgtgccgcaatcaaaaagcaaaaatctgggagccaggcagccctggagaggaaggcatccaatctagttcagatgaaaggtcagccaattcagcaacagcagcagccacagaagagcagctgttgttcatcgtgatggcacaatggtctggcatcttccatgaattgggatgaacatggcatatctgttaagtgtgttcctctgtcttctcatagatttgagcactttagttactgcaaggtgtcgccacatctgttgaaaatcgagtcaagaacctaatttcctgtctttgatgattctctaataaacattgcatctagaaagttgtaccatatttaatagatacatgtagtttccagtctgaaaggtc

SEQ ID NO: 24045 - DNA, 1164 bp, Oryza sativa
  ref <308>: DATABASE ACCESSION NUMBER: AK099487
  ref <309>: DATABASE ENTRY DATE: 2002-08-28
accaaaaaattccatgtcattatccacgtgatgtgccacgtaggcaagaccacagtcaaatgcggctttgaaccggaatgatataataaaccaagtttagggatctcgatgtgcactttgcaagttcgtggatctaagtgaaacctcctgacaagtttaagaaccgctggtgtattttactcaatgatttttccagtagtgaccccaaaaacgttaatgtgtatataacttgggaaggaaacacactctacatttgtatagagtagcacttagggaaagtcatgtcatcccttaacatgatataccaccattacttgcataccaattaattagtaatgattttttttaaaaaaaattgctaacgtaattcattatgttatatcactccataaacatacaagtttaaaatcaactagaacctggggcgtgccgttggcgcgccacctgagcggaattacggtgggcaagaaatgggtaattagcaaagacgccagatgatgagatataaatgtaagtattctttggtgttaaaaaagagagcaagaaagcaggaagtgaaatagaagtaaactgcagtgccaaacagttataggcataccgatatctagtagtctttagcagcaacatggatatacacagacgtttcttaaaatgtccaagctagtgcactatggatagtaagcacctaaggtgtagaactaataagcatggtaacaattccaggggagggaagcggccgatcctgatagtgatcagcttgtttactggcagcagaagcatgatcataagatagctatgaatgcccatatggtcttcacaggacatcaatagtaacctccaggcaggttgtcctgtagaaatggaagatgcaaactgatccgagagctatgtcatctgtgctgcgaactttgtccaccctttcttcaagttgcaacggtcatctgttgaaacgtggaggatcatgctggttgaaatacctcctgctacttgtacttcagtgtcgacggttttttaccttccattagcggttttatgtagttctgtgaaaattcctttgtaaagtactgtaattgcacggtatgttagttctttattagtggtagaaaagcaatattatcatgaatgataggggtgggaaaaataaataattgttgcaagagcttc

SEQ ID NO: 24046 - DNA, 4054 bp, Oryza sativa
  ref <308>: DATABASE ACCESSION NUMBER: AK099488
  ref <309>: DATABASE ENTRY DATE: 2002-08-28
gagatacgactcctcctcctctctcgctccgtcactcggctctctcgttgctcctccaccctgcaacccaactctcccgtctcccgctgcctctgctccgcctcgcagccgttgagcggcgagatgctccactctaggcggcatctgcatcatctttctcgatttgcctacggatgcaaggtcatgccaagcatcattggagtaaaaaatgagaagaataagagtatgtgtaggtcacacatgaggcttttctcgaaaaaaacaaaagatatgtggtggtttactgaaggtgtcagcgataactgtcccactgttgatgtacatcctgcaacaatattagaaggcagtagccaccgtgatggttctatatacaagttttgccctggttttatccaagtatttcaaattgctgatcgtcatgagagtaagttattgaattctctttcctattttgttatgctagctctttataagaattgaggttcttttgtgttgaaatataaatgtactacggatgttccagagaaattatcttgaggtgtgggctattaagaaatgaagtaactctggtcagaacaaatcagttcaagttttgttgaacatattgcaaaccatatataacttttttctatcagacaatggttttctgtaattttgcataaatatgtattaaaaagcgtatctgtattttttataacaaacatttgccaaatgtattaatttagttgtctttggtgaagcttgcttggagccgatgatgctttcacaacctatggactgtcaacctaatagggatacatgcactgtgcatttttcaactcgcatgatgcaaattttctcaattaagttggctaaaatacatatgtatagtggcccagtacagatatatgggtacatagcagtgagagatcatcttgattcaatgcttaattatgttgtgaatcgtagcagggatgatcccatcatcgtgaagcaggtgcacatcctacactcatatgcaattattttagttactcttttaattctacacaagtccaatttaatctcatgaataaaccgaatcggaaaatatatgttgtggtggcatactacaatcactcgatctcctttaaatcataaaaattggaatgaaaggtggaatactacagctatttaatctcttttatatgatgcaagtttgtgaataaatagaatgttgtgttatcttctttgttttatttttaaatagtcttatatgttaataaataaatataggcttttgttgatttgtcatatatattttatattgcatgaatatcgacctactctagccctagttatttttgtgttatggcagcaaaactgaactgtaaataacgatgataccaaatcatgtctcttcaggatgagtattattatggtattgacattgactgttgactgatgtattaagtaaacagtaggttttctagacaaaacaagcatgagagtttcgtcaacccataatcatttaagagtacaacagtgagtctgtacaataaaattatgtttcttttcttttctctaatgcatctgaggataaaaatgtttgagttataaaaatatccttttatttcttctctcccaatgcatctgaagatcttatgtggatgggttcttcaaatacatgtcccttggaggatcttatacaagaatgtttgtctatgtgaatgagcatctttcaggtgctcccatccccttaaaaatgtaaatatttatcatggaaagttatcaaacaaatcacagcaacatagagtgtggtgcacaaaaattcaaaactttgcatgatgaaggctaaaaaatttccaagtaacaattcttgtttctccttatacaagttctgtttacatttcaaattttgtgaagtggcagatgtcaccatactctatattactaaacatttttccataaaaaatgtatttctgggatgacttttatttagtttatcctaggagcacctgaaatgtccttagcatatgtttattaatgacacatgccatcgcaccttttgagttttgtatgctgtgcacaaatctatgaccaattaactgtgcacgatgaatttcacaagactgatttaatatgttgggtgtaaggtatatgccacaggggtttttcctacttatcattttggcaccacttttttcctaattgttgtgatgccactggttccaccagcgagatcaatatgcctctccaccgttaacgttaattaagtagcactcacagtatcatatcaataggggttaagcatttctttgacaaaatgcccatggaaaagagaaaaagggccttcctctcttcacacggctatcagccctcctcactccatgcatgtggccacaggtgattgctgactaccacatgcgaggaaggcctcgccctgggcagctccacctgcctttgccacctctgtacctggttcgttaccactgcctggagccttcctcggcctcctcctcatgggctctgcgtcaccactctgcattgatgttagttacttctgcactggccccggtgccactaccctacgcctgcctaggccacttctgcccatccccaattttgtcgccgccattgcctctggtgtacatccccctaggtctagtttccacgcctagtagagtgatgatgttgaagactggtgtagctttccctgaccgaagccccccatacccagacctggttgccaacgtgatctaatgtaagaaccatgacataataaatctaatgtgagaactatgacacaataacacacaaaacatactaaaattaacacttcgaatttcatgtgtaaccaacttatgtgtcatagcaaaacaccaagttgtcaatttttagagcctgtagtttacgccatcatttatttgatatcccttgcattcttataaaaaccaagctattagtttaaaatattggaaatttaatatgaaaatatactaaatgataatttataataatttcacagggttcttgcattgaaatgattggccctaagcgaggcatttcgatgtcttgttctgttgttctgagtttgacatgaggataaaaaaaggagatcgagaagaggatgatctagaactgattgatggagcattagagtacagccagataacaacaccagcaatgagaccaatgacaagtcgcgttagtggcaattgtggcgcagttgacatcactttagcgtacctttaccaggcagtggaggcaacaatagaagtttccatatcaaaagtgcctagggggtttcaatttatctctgagtgtgtttgttcttattgataaggtacgacaagaaattcaactctttgatggcatggttggcgagccttgtggcttaagaaggtatgtggtcgtagtagcgtcggatacctggatgcatttgtagttcaaggtatgtgaaaaaggctctaaaaatgatgttggtcactactgttccttcaaagcaaaccgccatggatttgccagtcaacaaatagttgttgagcctggagctatcacagtgaaggtgaattggtctgttatccctctatatctgtatgtgtcgcacttgctgaatatgacttaactagtggttggtttctatgctgaaagggagtactcttagatatatatgtatattatctagtagtattattcaatttgattgtggcgtatagcattgcttcgtttgcgatattggtctatgttctgcttaatttgttgcctgccactgtaaatccttaacttactggttttatcgtatgttctgctatgacccagattactagttttcctacttactgatattaagatataaatgatgacggacaattttggggttttctgaaaatatcaagatgaagcaagctctgatatttaagatattgaacaaatattcaagaaatacaaaaatatagtgtgtatttacgtatgtggaagggagaaagaaggatcaacgtatacaacctgatgtatgcttgttgcagagggatagaactaaattacgtatacatgatagagaaaactgaagctaatgaaaaaaataatgttctgg

SEQ ID NO: 24047 - DNA, 942 bp, Oryza sativa
  ref <308>: DATABASE ACCESSION NUMBER: AK099489
  ref <309>: DATABASE ENTRY DATE: 2002-08-28
gaagtgcatcagcagcgagttccagccatggcagcagacaagggagtgaaggtgttcggcatgtgggcgagccccatggcgatccgtgtggagtgggcgctccggctcaagggcgtcgactacgagtacgtcgacgaggacctcgccaacaagagcgaggcgctgctccggcacaacccggtgaccaagaaggtgcccgtgctggtccacgacggcaagcctctcgccgagtccaccgtcatcgtcgagtacatcgacgaggcctggaagcacggctaccccatcatgccctcggaccccttcgaccgtgctcaggcgaggttctgggccaggttcgctgaagagaagtgcaacgctgctctgtacccgatcttcatgacgaccggagaggagcagagaaagctggtgcacgaggcccagcagtgcctgaagacgctggagacggccctggaggggaagaagttcttcggcggcgacgccttcggctaccttgacatcgtcaccgggtggttcgcctactggctgccggtcatcgaggaggcctgcggcgtcgaagtcgtcaccgacgaggcgctgcccctgatgaaggcctggttcgaccgggtcctcgccgtcgacgccgtgaaggcggtcctgccgccgagggacaagctcgtcgcgctcaacaaggctcgccgtgagcagatcctctcggcgtagagagcacggtcacttcagctccccagctagtacgtttcatctccatggtccatggttaaacaataagttcgtcacaagcacattgtgcagaagtagtagatgctcgaagcatgatccgtcttagagagacaaacttaatgctctatgatatgttatccagtgtacaatattgcctacttaattatttcctcaagaggaaaaatacagtacagttttgtacttttgtagtgatctgatcattct

SEQ ID NO: 24048 - DNA, 1800 bp, Oryza sativa
  ref <308>: DATABASE ACCESSION NUMBER: AK099490
  ref <309>: DATABASE ENTRY DATE: 2002-08-28
ggtgcgaatgaaaagatttcaagaaatccaaccaaaaatctcgcgctctcctctcctcctcctccgcatgagctcatcggcgttggcgttggcctgtcgtctccgggaggagtagtgcaggcggcggcggggaattccgaaacggagtttgttcgttttggagcggagtggtgaggtgagtcgtcgagatgggggagtgcaaggtgggaggaggaggcggaggcggagactgcttgatcaagctgttcgggaagaccatccccgtgccagagcccggcgcctgcgccgccggcgatgttgataaggaccttcaacacagtggcagcagcacgactgaaccgaaaactcaagagaacaccgttcaagactccacaagtccacctccgcagccagaggtcgtcgacaccgaggactcttcagctgataagaactcatcagagaatcagcagcagcagggcgatacggccaaccagaaggagaagctgaagaagcctgacaagatcctgccgtgcccccggtgtagcagcatggacaccaagttctgctactacaacaactacaacatcaaccagccgcgccacttctgcaagaactgccagaggtactggacagcgggtggtgccatgcgcaacgtgcctgtgggtgcaggccgacgcaagagcaagagcgtatcggccgcttcccatttcctccagagggtcagggctgctctgcccggtgatcctcctctctatgccccagtgaagactaatggcaccgttctcagcttcggctccgacctgtccaccttagacctcacagaacaaatgaagcatctaaaagataagtttatcccaacaaccggtatcaagaacaccgacgagatgccagtcggtttgtgtgctgaaggattgtcgaaaacagaagaatcgaaccaaacgaacctaaaggagaaagtttcagcagatagatctccaaatgttgcacaacacccatgcatgaacggaggagccatgtggccatttggcgtggcaccaccacctgcttattacacttcaagcattgcaattccattctatccagctgcagcagctgctgttgctgcatactggggctgcatggttccaggagcttggaacgctccatggccaccgcagtcccaatcccaatcggtttcatcatcaagtgctgcttctccagtatcacaatgaccaactgcttcagattaggaaagcaccctagagatggtgatgaggaactggatagcaagggtaatggcaaggtgtgggtgccgaagacggttcggatcgacgatgtcgacgaggtggccaggagctctatctggtcgcttattgggatcaagggtgacaaggtgggagcagatcatggcagaggatgcaagcttgcaaaggtttttgagtcaaaggatgaggcaaaggcatcaactcacacagcgatcagcagcttgccattcatgcaggggaacccggctgccctaacacgctcggtgaccttccaagagggatcttgacttgaacaacgccttggaaatttttatgctgccttctgctgctataaagacatagcgtgatacagctgaaattttgtacattagaggattgtaaagtaggtatgggagatggagtgtcagggtgtataacttaacatagctacaagcaagcccagtagctgtattagataacttgtacatagctatgtgggtttgagaaagatagggagagcaagttccccttataatatgtagataaataatataatgatttgaatatttagatcaaaaggatttccttttgcagtagc

SEQ ID NO: 24049 - DNA, 926 bp, Oryza sativa
  ref <308>: DATABASE ACCESSION NUMBER: AK099491
  ref <309>: DATABASE ENTRY DATE: 2002-08-28
gctcccgcgcattacaacagctacgctacggccccacccaactgctcttcctacgcgcggtcatcgtctgcttcttgttaattcgaccggcggtgatggagtcagcggcggcgttggcgttggttcttgcggtgctcctcctctcctccaccctcgcggcttcagatttctgcgtgtgccggtcggagcagccgacggcgctgctgcagaaggcgatcgactactcgtgcgggcagggggcggactgcacgtccatcctctccagcggcggctgctacaacccaaacaccgtcgccgcccactgctcctgggccgccaacagctacttccagaagttcagggcctccggcgccacctgcgacttcggcggcgccgccaccctctcctcctccgaccccagtttctctggatgcactttcccttccagtgccagtgctgctgggacaactggcttgagccctggagtcggcaccggcaccggcaccttgagccccggaggcggcatcggaaccggcaccaatggcaccgggatggggagcgccctgagcccgccgggcacgagcaacttcgacggcgcggccgcggaggccggcttgctcccgagggctgagccggccatcttcttcaccgtcctcctcctctcgttcttggcattgccatgaagtgatctctctctcactctccctgtgatggtagaagaaagcagcagtagatcaaactcctctttgtattttactatttttcagtatagttgatgtctgatctaccaaaagggaaaaaaatatatgaaaagtttgattggttggagagaagagaatccaaattgatccatctgcccactagcactagggattgctgctagctgctgttcttgttgcttagtgttgtgatggtgtgagagtataactttttggttgaagtatact

SEQ ID NO: 24050 - DNA, 1211 bp, Oryza sativa
  ref <308>: DATABASE ACCESSION NUMBER: AK099492
  ref <309>: DATABASE ENTRY DATE: 2002-08-28
gaacgatgtgggctccggcctcatcgccaacaatcctcgcggcgttcggtctcgtcggcctcgtcctcgcgtggcaggccggcctccagctccaccgcctgtggtggcggccgcggcggctggagaaggcgctgcgggcgcggggcctccgcggctcgcgctaccgcttcctcaccggcgacctcgcggaggagggccggcggaggaaggaggcctgggcgaggccgctgccgctgcggtgccacgacatcgcgccgcgcgtcgagccgttcctccacggcgccgtcggcgtcggggcggcgcacggcaagccgcgcatcacctggttcggcccgacgccggaggtgcacgtcgccgatcccgagctggccagggtcgtcctgtccaacaagttcggccacttcgagaaggtcagtttcccggagctatcgaagctgatcccccaaggcctgtccgcccacgagggcgagaagtgggccaagcacaggaggatcctcaacccggttttccagctcgagaagctcaagctcatgctgccggtgttttcagcatgctgcgaggagctgatcagcaggtggatggggtccattggttcggatggctcgtacgaggtggattgctggccggagttcaagagcctcactggagatgtcatctcgcgcaccgcgttcggaagcagctatcttgaaggaagaaggatcttcgagctgcagggcgagctatttgagcgtgtcatcaaatccatccagaagatgttcatcccgggttacatgtatttgcctactgagaacaaccggaagatgcatcaaatgaataaagagatcgaatcgattctgaggggtatgattgggaaaagaatgcaagctatgaaagaaggtgaaagcacaaaagatgatttacttggtatattgcttgagtcaaacacgagacacatggaagtgaatggtcaatcaaaccaaggcttgacaatcaaggatatcatggaggaatgcaagctattctactttgcaggagcggatacaacatcagtgcttctcacatggaccatgctgctattaagcatgcaccccgagtggcaggatcgtgcaagggaagagatcttaggactatttgggaagaataaaccagactatgatggcctgagccgcctcaaaattgttagtatcttgtaggatttaattgataataccatttcattcatatgagttcag

SEQ ID NO: 24051 - DNA, 916 bp, Oryza sativa
  ref <308>: DATABASE ACCESSION NUMBER: AK099493
  ref <309>: DATABASE ENTRY DATE: 2002-08-28
gtgcgctccaagatcctgtctgaggagttcggctgggacaaggatcttgcaaagaagatttggtgttttggacctgagacaactggccccaacatggtggttgatatgtgtaagggagttcagtatctgaatgaaatcaaggattccgttgtggctggtttccagtgggcatcaaaggagggtgctctggctgaggagaacatgcgtggtatctgctttgaggtgtgcgatgttgttctccatgctgatgctattcacagaggtggtggccaggtcattcccacggccaggagggtcatctatgcttctcagctcacagcaaagcccaggcttcttgagcccgtctacctggtggagatccaggcccctgagaatgcccttggtggtatctatggtgttctgaaccagaagagaggacatgtgttcgaggagatgcagaggcctggtacccctctgtacaacatcaaggcttacctccctgtcatcgagtcctttgggttctcaagccagcttagggctgcgacatctggccaggccttcccccagtgtgtgttcgaccattgggacatgatgacctctgatcctcttgaagctggctcgcaggcttcaaccctggtgcaggatatccgcaagaggaagggtctcaaggagcagatgactcccctctccgatttcgaggacaagctctaaatttttggccgccgcatgtgttgtgccgttacccttacatgttctagttggtctactgctaagagaactgctttcgttgtcgtatttcatttcccttttgtcgaatgcatgtgtttcacatcaacaatcctatgttcgcgtgctactgagaaactatttttactctgtcgtgatgtaacggatgtggaacctggatcatctttttgctgtctaagttatagtgttc

SEQ ID NO: 24052 - DNA, 1095 bp, Oryza sativa
  ref <308>: DATABASE ACCESSION NUMBER: AK099494
  ref <309>: DATABASE ENTRY DATE: 2002-08-28
gacccgtggaaaattagagagagaagagagaagacgagggggaaaaaaatcacaagagaggaggagaaaaaaaaatcgcagcagcaaaccctcctcctccgccatccgccgccttccctcctcccccacgatctccggcggcggcggcggcgatggcccggaagaggaagacggacgcggcgccgcggctggacgaggccgaccggacgctctactccaccttctgcggcgccgccaactccctctcccagctctacacccaggccatggcccagcagaagctctccttccaggccggcgagcgccactccctcgaaaaactccaccagtggatattgagaaagcatgaggaagagtcgaggctcacggcggctgatataatgtctcatatccagcatgagttggattatggaggtaatgatccacatgtttcccccagagtacatcagcatagtgcaaatccgtttgcaaactcaagcatccaaccctcagctggttcctatggtcaagcaacagtaggatttgcgcctagacccagcatcagtgatcagtcaaagaatacaattttctcaaatgctttatcaagcccggtccgtcggagccttcagagctatcatttaacccaaggatctggtaatggaggccggaatgcagaaacaaactctgcaggacagaatagggagaccaactctggaggctccaatgacacctcaatggacatggtttcggacagcgctggtaacgaatactactgaagtggattgtggtgagaaggaatactactgaagtggattgtggtgagatgaatactactgaactggattgtggcgagatgctgcatgcaaaaccaggcagcaacacaataccagtgttgtctcctgttgctgtatgttatgtattttcctaaaaccttatcatctgtgcggccttgtagtcacagatgaaatggttctctttaaggcttttaagcttttgtattttctatttttgttgaagcctgattggagagaaatcaagttgttcgtgggttccatcaggaatactttatatccaactgtgttcgtgacttcgtgttaaagattttgaatgtaaacg

SEQ ID NO: 24053 - DNA, 928 bp, Oryza sativa
  ref <308>: DATABASE ACCESSION NUMBER: AK099495
  ref <309>: DATABASE ENTRY DATE: 2002-08-28
gtgcagagcaccaatcaatccttcctcccagccaagatctttcttcctcctcctcgtcttcaggactcaattcgtcttctgatagcttagcttgattggggtgggtgacaatgggaggtggcaaggacaagcatgacgagagcgacaaggggctcttctctaacatgatgcacggcgttgccggcggccatgggtatcctcctcaccagggataccctcctcagggctacccgccgccgccgggagcgtacccgcctcctccgggggcttatccccctcctcctggggcttaccctccaccacctggggcataccctccacagcatgggtaccctcagcctggtggctaccctccacctggtggttacccccaacatggtggctaccctcctgcgggctaccccggatcatctgggcaccagggcggccatgggagtagcggtggaggacacatgggagcaatgctggctggaggcgccgctgcggctgctgcagcctatggggcacacaagatctcttctcatggccatggtggacacatgggctatggaggccatggaggctttggtggttacggccatggctacggcggtcaccacggcggcaagttcaagcgtggcaagcacggccaccatggcaagttcaagcatggcaagcatgggcacggcatgttcggtggtggctagttcaagaagtggaagtaatgcgcatgatctgatcatgctgggactctgtttaggctttaactgaagtgcttgcgcttggctggttaaaagcctaaaaaaagcctctcgaatgtatctaagcaggatggagctttgctcagttgctgctcccatccttcctctatgatttggtactctagtatgtggctcagtgacaatatggcttgctaataattaattaaataccttctgacgcttatgcc

SEQ ID NO: 24054 - DNA, 912 bp, Oryza sativa
  ref <308>: DATABASE ACCESSION NUMBER: AK099496
  ref <309>: DATABASE ENTRY DATE: 2002-08-28
gtagaaaaaaaacagaggggtagcagaggagcaaccaatcgcgagagagaaggaaggttgaggaagaggaggaggaggaggaggaagaagaagacgagatggagagagatgaggtgtgctgttcttgcgccatgaggcagtgcaggatctgccatgaggaggaggaggaagggtgcaccgccatggagtccccctgcggatgctctggctccctcaagtacgcgcacagggggtgtgtgcagagatggtgcgatgagaaggggagcacgctctgcgagatttcccttcagaatttcgaaccaggctacactgctcctcccaagaaagctcaacctgcccatgtcgcagtgaccatcagagagagccttgaggttcccaggccaagctacgagccggaggacacgccgttgatcggcgagcaggattacgccgagtgcgccggagcggccggcaggagcgccacctggtgcagatcggtggccgtcacgttcacggctgttctgctgctgaggcatctcgtcgctgtcgtgacggtcggagctgcacaccagtacgccttcagcctcttgacgatatacttgctccgggctagtggaatcttgctgccgttctacgtcgtcatgaggctcatctccacggttcagaagggtcagaggcaataccagctgcagctgctccaggagcaaaggagaaatgcagctagaatgcacaggttgcatggtcaagaagaacaaaatcaacatgccattcttgtccggtgaacaaagaatgaagtggttctcctgtagaaaagactgcaaaattgtattattactgatgggaaaaggaaaataaacattgttcataagctttccactatatgtacatgtccacatttgttgcaaagatgattacaccagagctttgagtact

SEQ ID NO: 24055 - DNA, 1112 bp, Oryza sativa
  ref <308>: DATABASE ACCESSION NUMBER: AK099497
  ref <309>: DATABASE ENTRY DATE: 2002-08-28
ggagggtttcccaataggaaagcaactcaggactcaggagcggcgtctgagaggtttcagagatggagaaccagttccaggatggcaaggaggaggtcatcgaagcttggtacatggatgacagtgaagaggaccagaggcttcctcatcatcgtgagcccaaagaattcattcctcttagcaaactttcagagttaggaatattaagctggcgcctgaatgctgatgactgggagaatgatgagaacctcaagaaaatccgtgaggccaggggatactcttacatggatatttgtgatgtgtgtccagaaaagctgccaaactatgaggctaagctgaaaaatttctttgaagaacacttgcatactgatgaagagatacgctattgtcttgagggaagtggatacttcgatgtcagggaccaaaatgatcagtggatccgtgtagcagtgaagaaagggggcatgattgttttgcctgcgggaatgtatcaccgcttcacattggacagtgacaactacatcaaggcaatgcggctctttgtgggagagcctgtctggacgccgtacaaccgtccccatgaccatctgccagctagaaaggagtatgtcgaaaaaattatcaacaggggtggaactcaagctgtcgaagctcgttaaaggcatatcaagatgtgcttcctagttcggtgttctgttacactctacagatactgaataaactgtgctatcagctgttgcaatgggctcctaccgacatcttacatcatttggcagtattttgcacaaacccgcttaaaatctccctgaaaatacgcacgtcaccatgtcagagtgtttatatacaataatgacacttcagtccacagtcagcaagggactaatgacaatcattgtacttgtggtgtgtgtgatgaaaccacaatgatcaaaccgagtgtctgaatctctgaattgttttttttagcacaatgattgtgtaccaaaccctctgttgctgtgtgcggtggctggctcacctgatggcctttgtgctactcctgtcgtcttcaaagtatctgacggtgctgaccaaaatctttgaaatgatagtgctaatgctgttgattaccg

SEQ ID NO: 24056 - DNA, 2906 bp, Oryza sativa
  ref <308>: DATABASE ACCESSION NUMBER: AK099498
  ref <309>: DATABASE ENTRY DATE: 2002-08-28
ggtcgtttgatgcgatttcggcggcgatcaccaccaccaccaccaccaccacgcgctcctccggcgtagcgttcgggcgatctcgcggcggcggcggcgatggctggcgggggcagggctggcaccgagaagggggcggcggcggggcgcgggcagacggcgatccagtccaccatccagtctatcaaggaggtcgtcggcggccactccgacgccgacatctacgccgccctccgcgagtgcaacatggaccccaacgagaccacgcagaagctcctcaaccaagatccatttcatgaagtgaaaagaaaaagggacaagaaaagagagagtgctggacagaaaactgttcctgatgcttctgcacaagctgagcacaactcacagtggacgaagccacgcacacaaagggttgagaatgaccaaagaagagcttacagccatggtcaggcatctggtcctaatcgggaatttcgggttgtgagagacagcaggcatggtgtggttgaaaacagaccagagctaggacacaaaggttcaccaaatgtaaaagtgtctgataggagtgtgcctgtagttcaaaccggtcggaaccatcctcctgctacaacttcagaaggccagataacacaaggtgcgaagcacagctacaactctgacgtgcatcaagtgaagagacaggctcagggcactgctcagaaatatgtgaagccacatttgaagaactcccaggatgagcaacaccctcctacttctgatccagctcacacccgaccaaatttgaaagctgctgaaggtgctgttggatccgttcgacgccatgttggagtagttaatgtgcaaaggcaaccatctggccgctcaagttctcacttgcatgtacaaagtggtggttctcacgtaaataatcagcggggaaactttgtcccaggtggaccatctggacgccattttatgtctaaaaacatgcagtccgttcatagaactgctttagattcagtacatcgtggcagatctggtggcagatcttttgttgcctctagtagtaaatatcagcagggtcctgccagcaaccagaaagtcacacagccggcaaaggagtggaagccaaaatcaacaaagaagtcttccaacattgatactgataataacaatggaacagatgtaataacaacttcagctagcaacactgaaaattctaatgtgttggatgagaatgctttgtgtgaaaaaacctctcaagcttgcatacatgaggtggagcatgttattatcccagaacatctccgtgtaccagagtatgagcagacaggattaaggtttggcagtttttcccctggatctggtgcagaccaagtatcaagctcagaaagtccatcggaatctgaagaacaagaacatgtacaagaaccagttcaacttgttgttgaagatgactcattgcgtgctggacatgatgaggtagatgtggaagcaagatcttcacaactcaatctttccacattgacagccgagatatccttgccaccatctgaggatagcgtagaaatgaatggcgaagaggttgagaacgatgatggtcttgggttggttcagagtgatactccacttgcacctgttgatggccaaaatatgcagagtgcctcaaatctgactgcgttttcaacatatggtcatgaagaccctaatatgcatccaagtaatgaggcacagttatacagactagtggaacctaatgtacatccacaagtaatggcatccccttctcaggggtacccttcggaaaatcctgaagcagataatgccgtgcaagtgttcagaataccagaatctaatgtacattcacaagtactcccttccacatctgaggccattagttcacagatcgtgagcagcagccctgttgcaatctctaaacaactgcaacatatgtcccagccacaacaagcagcacagctctaccctcctgttcatatgcaacattatccaaatttcatgccataccgtcatcatatctattctccagtttatgtcccacccatggctatgccaaactttccaacaaatatcccctatccatcaaatggaaacaattatcttcagatgccaggaggaggttcacatttagcagcaggtggcatgaagtatggagtttcacaatataaacctgttccagctggtagcccttctggttatggaaattatactcatccagctggttttacatttagctctcctggtgttggtgttattggaggggctgttggtgtcgatgatgtcaataggatcaaatacaaggataacaacctttatgcaccatccccacaggtggagacatctgatatctggattcagacacctagagagatgccgactttgcagtgtcccccatatttcaatttatcaggtcaagcaacatctggtgcttttgtgccgaatcctgggaatgcatcattcaatgctacagctcaatcctcccatgcgcaattcccaggcttgtaccatgcacagcagccttcgtcaattgtaagtccacatcccatggtgcatcaacaagtccaatcggcaattggtcccaacggtggagttggtgtggctacaccagcccctcaggtaggggcttatcagcaaccccagcttggtcattggagacctggcttttaaaggtttattaattatctgtaattagggggtcacaagagcctttatgtaacaaaagaggctacttttaacaggaagcacatttgtttttagtgcagctctttctgatctatttaaggtataacagggttttgttagctttcccccaaggtgaattcagtatcccatctgaactggtttgatgtagattgtgagctaaacattggcttagttctttcaagagcacagaagttgaatgccgtttt

SEQ ID NO: 24057 - DNA, 1070 bp, Oryza sativa
  ref <308>: DATABASE ACCESSION NUMBER: AK099499
  ref <309>: DATABASE ENTRY DATE: 2002-08-28
gagaaatggtggggttcttcagcctctgttcttccactcattattatcatttgcagctccgaaatggatcagttcagtatgaactgattagaccaatcaagtacagaccaaggagcatcatcaggtgctgtagcactacaaggggaaaagccagggaggactactaccaagtgctgggagtgacggttaattcaacgccttaggagatcaaggaggcttacaggaagcttcagaaacgacaccatcctgatattgctggctacaagggtcatgactacaccctactgctgaatgaggcatacaaggtgttgatgagaaatagtcccaggaacgctggtgctagtggcagaggctttggcagaggtttcactggaaacgggtacagttgttggaatgggcctgtgagaagccatgcactctttgtcgacgagaacaaatgcataggatgtagggagtgcgtccaccatgccggagagacattcgcgatggacgatgttcttggaagcgctcacgtcgaagtccagtttggagaccaggagcagaagatacaggtagctgtggagtcgtgcccagtgaactgcatccactgggtgatgagcgaggagctagcggtgctggagttcctggcacggccacagcagaaggaagcgcacggcgtgttcggcggcgggtgggagaggccccgggacgtgttcgctgcggccaacaacttcaccaagaggctccagagagaggagcaacaggacatggcacggcagcaacgctacaataatggtgatgcatgcgaggaaggtgaaaccgaacggcaggccgaggcgaggcgtcgcgcagggcaggagctccggtggaagcgtttgcgcgatgtgtggaatgggctgagggactggacgaaacctggtgtggacggcccgtagattatcaggcgctcctggctgcagctgaaggactaaaacaggtttgcatgcactgtaagtagtgtaaccgtttaaaaaaatattattcatctcaagtacaaacagggcatgatgtataacgggcacaactcaacatctaaagttatgtttctgacc

SEQ ID NO: 24058 - DNA, 853 bp, Oryza sativa
  ref <308>: DATABASE ACCESSION NUMBER: AK099500
  ref <309>: DATABASE ENTRY DATE: 2002-08-28
tccacggctggcacagcagagtggatggcaccagaagtacttcgaaacgaaccatctgatgagaaatgtgatgttttcagctacggggttatattatgggaacttttcacactacttcagccatgggaaggtatgaaccccatgcaagttgttggagctgttggttttcagcaacgtcgccttgatattccagctcatgtggatcccaccatagcagagataataaggagatgctggcaaacagacccaaagatgcgtccatcattttcagagatcatgtcttccttaaaaccattattgaaaaacacgcttgccaatcaaccccaaaggcagcgagtgcaacgagcagatggctaagaaaatggaggtcaacaccaggcgacaacgttaaaacaaggtgccttggtctttcatgccttccagtaactgcccacctgtaactataccattattttgtatagcaacatcaaatgcatggctaaggtgaaaaaggtgaagttctatttttgtccacccgtccgaatacactgtaaattttccacaggcaaagaaatgccgagcttagaaaagcagccaacccatcaagcaaaagaaaaggtaaaggagggaaaaggaaaatttgtgcaaaactactgtacatttttttttcttccttgtcatttctttggttcccaaaggttgagtattaatgtgtaaggcccaatcaattgtattgttgttcaacataaaaggtcagtcatcttaatcagcaagcttgaagaagccctctggcagggcccctgtgtatatcacattctgacaaattcgtcggaactgacaattagattgcaggagaaaaacccctttttgtacc

SEQ ID NO: 24059 - DNA, 1837 bp, Oryza sativa
  ref <308>: DATABASE ACCESSION NUMBER: AK099501
  ref <309>: DATABASE ENTRY DATE: 2002-08-28
gatctccaccaccacctaaacccacaaaaaactaaaccagaaaaccgcttaaccgcaagcgccgaggcggagagcggaggcagacgcagacgcagcagccgagcacgcggcgacgcccacgcccacgcacacagctcggcttcccggcggaaaccctagcgggcgggcgggccccaatggcggaggagggcgacaaggccacggcggcggcggaggcggggggaggagcagccgctaccgccgccgctggtggtggtggtgggggtgggggtggtggagcggaggaggagagcgtgaagctgttcgtggggcaggtgccgaagcacatgacggaggcggagctgctcgccatgttccaggaggtggccatcgtcgacgaggtcaccgtcatcaaggacaaggccaccaaggcctcgcgagggtgctgcttcctcatatgcccctcgagggaagaggctgacaaggcagtgaacgcttaccacaataagcacacacttcctggggcatcaagtcctttacaagtaaaatatgctgatggagagttggagagactagaacacaagctttttattggaatgcttccaaaaaatgtaacggacaccgaattgactgatttattttccaaatatggaaatatcaaggatttacagattttaaggggttcacaacaaacaagtaaagctggctgtgcattccttaaatatgaaacaaaggagcaagcagtggcagctattgaggctctaaatgggaagcacaaaatagagggctctagtgtgccgttggttgtcaaatgggccgatacagaaaaggaaaggcaggcccgaaaagcacaaaaggctcaattgcaatcatctaatatgcctagcgcgagtcctatgcaacaatcttcattatttggggctttacagatgggatatatgcctcaatataatggatttggctatcagccaccagggacatacggacttatgcagtaccccttatctcctatgcagaatcaagccacattcccaaacatggttcaacctgttaatcaaggaaactctatacgaggagtcaaccctgaactgtcccctaattcagttcctagatcattcaacgcaatgcagttaagcagcccttatccacctgtacctggtgtgcagtatgctggatcctaccctggtggtctcatgaataatcgtcctttcgggaattcgttcagttcgattaaagttccaattgtaaatgcaaattctcctgcatcttctagtcccagtagcaatcctggtggccaaatagaaggtcctccaggagctaatctatttatctatcatatcccacaagattatggggaccaagacctttccaatgcattccagaggttcggtagagtactaagtgctaaggtttttgtagacaaagcaacgggttccagcaaatgctttggttttgtaagctacgattctcctgcttccgcacaggcagccattggtgtgatgaacggtttccaattaggcagtaaaaaactcaaagtacaactcaagagagacaactccaagcacagtaaacccttttgacgaaaactatgatgaccacgcgatcaggttcctggtacatatttgtcagataattgatcgttgaattgtttgctctggccgcagcattgggagcttcgtgtatcttctttgttcaattcacattcttgaacactgttacgtcgtgtaatttactgcagcctagtggtagaatttgtttcatcagacccttgtacatcagaagtcagattcattcaattgtggacattttctcctgacagtgattccggtttctcattgacacgattccggactcaccc

SEQ ID NO: 24060 - DNA, 1550 bp, Oryza sativa
  ref <308>: DATABASE ACCESSION NUMBER: AK099502
  ref <309>: DATABASE ENTRY DATE: 2002-08-28
gattcgaagcgcctcctcccgcctcctccgcgctcgcgcccgcgccatggccacgccctccgccgcgcgcttctccccctcctccaaccccgcgcgccctcctcctcctcgcctcccgctcccccgcttccttccgccgaccccgccgcaggcgctgctccgggcgaggcctctccggacctcggctgccgttgccgcggccgcggccgtcgtggaggtgggcggcgtcaagatcgcgcgggaggatgtcgtgaaggaggaggacccaacaaacaacgttccggacacgatctactcaaagattggcctgcagctgcacaggagggataatcaccctctagggattctgaagaacactatttacgactactttgacaagaatttctctgggaactttaacaagttcgatgacctctgccctcttgtttctatcaagcagaattttgatgatgtcctggtccctgctgatcatgtgagtcggagttacaatgacacatactatgttgatgctcaaactgtcttgcggtgtcataccagcgctcatcaagcagagctgctaagggatggacacacacatttccttgtaactggggatgtttatcgtagggattctattgattcaactcactatccttgcttccatcagatggagggcttccgtgtcttcactccagatgaatggtcagattctggcatggatgggacagcatatgcagctgcagacctcaagaaaacactggaaggcttggcaaaacatctctttggtgctgtggaaatgcgatgggttgacacatacttcccattcactaacccgtcctttgaactcgagatatattttcaggatgattggttggaagttctgggatgtggagtcactgagcaggaaattttgaaaaacaacggcaggatagataatgtggcatgggcctttggactaggtttggagcgcttagcaatggtcctgtttgatattccagatattcgactcttttggtcaaatgataagcgattcacatcccagttttcagaaggcaaacttggtgtcaagtttaagccattctcaaagtttccaccttgctacaaggatatgagtttttggatcaatgaagagtttacagagaacaatttatgtgaggttgtcagaggaattgctggagatcttgtagaggaggtaaaactaattgacaatttcaccaacaagaaaggaatgacgagccattgctacaggatagcctataggtcaatggaacgttcacttaccgatgaggagatcaacgacatgcagtggaatgtcagagaagaggtgcaaaataaactgaaagttgagttgagatgaaatagagctagttcacgtgttcgaccagacattgattgtttgaccgttttcgtctgtacattcattcaaaagtgtgttgatatatggagaaaattttatcagtttcctgatgatccttgtaatctgctgagatcaaagtccctaagcaatttagcatcatccgcacgccatgactgtaacgataataagacggtgctcaattttgaatcaaacc

SEQ ID NO: 24061 - DNA, 1099 bp, Oryza sativa
  ref <308>: DATABASE ACCESSION NUMBER: AK099503
  ref <309>: DATABASE ENTRY DATE: 2002-08-28
gagacgcttcgcagaggcaaaagctcgaacacatggcgcgcgccctagtccgccgggctctctccctcgccgccgcggcctcctccccggcgaaaccatccttctccaccgtcgtcgcgccgctgcgctccccgatggacgaccgcctcctccgcctcctgcgctccgagatcaactacatctccgaacgccgccctccctacccgccgccgaaggccttcaaatcgttcggggtggaggaccgcccgggggagcagtgggtgcgcctccgcgccacccgcggcgcccaggacgaggaggtcaaggtcgacgccaccatgttcgacggcgccgccgccccgcccccagacgcgcccctcttccgccgcgtcgagtcgctcgagcgcggcccgcgcctccacctcagcctcatcgtcgaggtctcccgggcggaccgcgtcctcggcttcatctgctccgcctggcacgacgaactcgtcgtccgccacgtcctcactctccgggacgccgatggctccagcaccagcagcggaggccgcgacttcgtcaagctggaggctagggagagggagtcggtgaggaaattcttgcaggagagggaggtggatgacgagcttgccgagttcttgcacgactacatggcgaacaaggaaaagatggagcttctccggtggttgaagactgtcgaatcattcgtcgagaagtaggcacaggagaagcagataaatcaggagttccttgctggtatccgcatgactctggacttatttcaaagttcaaactatgggaactgaaaacaaatagcgtctgggaagtgatgataagagctgctgtcctacacaccatgtaaattatccacctcagtggttcaatcccattgttcgtgctgtatgactctagcaatgagctgggttttcagcatattctgtggttcaattctagtcacatttgagaagatcactaggcacgctcgtctgattatattggtgctatggagcactaccatttgctgtggaatacagacaattcttatgcggttggttgtatggcaattgctcgcctattcatttttattttaaacaatataagtagatctccc

SEQ ID NO: 24062 - DNA, 1243 bp, Oryza sativa
  ref <308>: DATABASE ACCESSION NUMBER: AK099504
  ref <309>: DATABASE ENTRY DATE: 2002-08-28
gccttcacagttcacacctgcgaccacgaggcggtggcggaggagacgaggcgcgccggggagatccgaggcactcgttgaccctgcgctccggcggccgattcgctgccggggacgccgtcttctccgtcaactccggcgaacggctgccgcgctccgatctgcacgtcgccgacgtcgctgagcttttgatctcgccttctcgagacacatctgatatcgctgttctttttatgagttcacaagacactcaacatgaagtttttagaatacacccccttcgacagtataaatctgttccttgataatcttgaccttggtgattgtacgataagaggaaaccttgaagccttctcatgcaagcacactggtaatgaccgtcgactttcaataagtctagaacatgagattcttgattgcctcagtaagtcttctgatagtgatcattcatcaccagtggagcatttgtcatgtcggtcaagtcggaaaacattgatctatctagttctcacccttagccacatgtatccagattatgatttcagtgctgttcgggcacacctgttcttcaaagaagaggagtgggaaagctttaaggagatgacagacacctacttatctgaggcttcaaagcaatgggcagcaacaaatgagggcacttctcttctagacagtatgactaatgtcattgatgaggttatcaaaatcggagagtctgacatctacagttataatccagaccaagatggagatccatttcttgaaaagggggtcatatggtcgatcaactttttcttctacaatcggaagctaaagcgagttgtgagctttcgttgcagttgtataagcaaaatatcaggagatgacttccttaccagtgcaccatccgatggtgaagaggaagatgcactgatagacatggacatataattgacacctttctggcaggaaaatgaccaaccagtgtggcatccagttgtgtagtaccagtatatatcatgtatggcagtttggcagttgccagtaggaactacaaccagaattttcttagcagacttcacctgtaccgaggcctgcataatattatgatttgacagcaggaaattctgcgtttctagcctgagacttgaattggcattttacttggtgacctaagctagtgtttgttgagatcgaaattctcgttctatgcagttgaataatgtatatttaacaatgttatgttatgcttgtaacttgattt

SEQ ID NO: 24063 - DNA, 1022 bp, Oryza sativa
  ref <308>: DATABASE ACCESSION NUMBER: AK099505
  ref <309>: DATABASE ENTRY DATE: 2002-08-28
tggtatccctctctatctcttctcttgaattcctctcctcgctaaagcatgcgacagcggccgaccgtcgagcttgccggccgggctttctcctcctcggcacaacaagcacaccaccaagtcgccactctcgaaggcagttgccggagaccgtcgttgttgaggagccacggtgaggagctcgatccccttatcacgctcgcgaattgaggagaaggtgtcgtggcggttgccggtcgagagctcgaaggcgccacggcctcgtcgtcgtctccacctccatcttgatctgcctccttcgacgctgctaggtcggcctcatccctggaagctgcacggacgtcttgtcgccaaccttcgccgcttctccccgtccccctgacctccacgacctcctatgcaggaagttgcagagctcatgctcgaggaggcggccaccgacgtggatctccttctcggccacatgcgtggatctcctcctcggccaccggcgcggatctcctcctcggccacaggcaccgattgaactccaccgccggctccctgaggggaccagcctccgtcgccatgtgcctcctatgcggctgacggacgccacttccggtcaacacgccttggccctatctcttctgccctctctctctctctctccccgcgcgccgccgtccacccgccgccgcccaccgcccgttcgcagccacttgctcgagcgcgttcacgggagagagagagagcgagcgagcgaccgggtaggaagagacatgacatgtgggcccatggattctttttgctgattgaattgccacgttagtgccatgcgtgcaagatcaagtcaaaactgctcaaaacagtgtcgagggggtaattcgtccagtattgaaagtttagggtaagcaatgtctggtttttgggttaggagggtaatatggtcgaccgtaataattaaggagggtaattcgtacttttttcaagtttaagtttagcatacaacgtttggaactcaagtacatacaaactcaagc

SEQ ID NO: 24064 - DNA, 613 bp, Oryza sativa
  ref <308>: DATABASE ACCESSION NUMBER: AK099506
  ref <309>: DATABASE ENTRY DATE: 2002-08-28
gggcggctggggaggaggcagccggggcgaggcgggagaggaggagagcggcgctgcgacggctgccggcggcggccgcagtggggaggcggccgtttcatggaggccacatcccgcaccaacaacaccaacaaccacccggcagcgacggcgaatgaggggatgctctccttctcgtcggtgtcgacgatgcggctgtccacagggagacagccgttgctcgcccccggccgccgccagcttctcctccgcctcccgcgccgggacgtcgacagccgcagcgcacgcatcaggcggtcgcggccatcaccatcccgaggttagtactggtttccttttaggcgaacggctgctgcgcctcgaggagagcggggtggttggggtacaggcagaaaggaaggaacaccagcaataaaaatcaagggcttgttgaacttctcagacgagtatgcagcaacaaaccagccgtccagatcaacctcaactcaacctggcgagcagaacacgatcgagagaaaaggacaaacttgtgtgcatatgtactatgtttaccatgtcaacattcacagataattccctgaagcaattctataaaaatcctgccattttgagc

SEQ ID NO: 24065 - DNA, 1067 bp, Oryza sativa
  ref <308>: DATABASE ACCESSION NUMBER: AK099507
  ref <309>: DATABASE ENTRY DATE: 2002-08-28
gtccgtccgcatcgcgatcacccaccaccacatcacgccggagaagtagtcggcggcggcggcggcgaaggcgaagatggtgtgcatacggcaggcgacgatcgacgacctgctggcgatgcaggcgtgcaacctgatgtgcctgccggagaactaccagatgaagtactacctctaccacatgctgtcgtggccgcagctgctgttcgtggcggaggattacggcggccggatcgtcggctacgtgctcgcgaagatggaggaggacccctcggagccttgccacggccacatcacctccctcgccgtgctccgctcccaccgcaagctcggcctcgccaccaagctcatgtccgccgcgcaggctgccatggaccaggtgttcggcgccgagtacgtctccctccacgtccgccgctccaaccgcgcggccttcaacctctacacctccacgctcgggtaccagatccacgacgtcgaggccaagtactacgccgacggcgaggacgcctacgacatgcgcaagccgctgcggcagccgcagcccaagaagcaccaccatcaccaccaccatcatcacggccccggtggttgttgctcacacgatgctcctcccgcggcatctgggtcttctccgccgtcctctaattcgccagagaagaccgattcatgatggaaggaaatggagaggctgaaggagttggtgagcccgttggacttgcatctggtgcactcactcttttgataagaagtccagcgaaatcatttcctaaggaaacaaaagatatgtactgtgattatgtgtgtttgtaggcatctttgttggccgatgattcacccatgggccagggtccactgtaattctgtttgatggacgtacaaatacttttgttagctacttggcatttgctgtcgtgcctgtaatatctccccatacttgcggaattttttttggcacatctgggcgtatgtacttggctacattctgtagcacgcataaagtcatttttggtgtatctccttgactcaaaacacctgcgtgaagttattgtttgccaaaagaagcc

SEQ ID NO: 24066 - DNA, 1111 bp, Oryza sativa
  ref <308>: DATABASE ACCESSION NUMBER: AK099508
  ref <309>: DATABASE ENTRY DATE: 2002-08-28
gttggtgtgctctaacgttccttgtttgtccgtttgttttgttgttgatatctgttccctgaaggtattttgattcctcaacttggtctctttttgaaccttttcagtgcaaagccagggttcttccatgatggtaaccgtgctggactgtttgaagttgagcctgattctggaaagcttttaaatgctgatcttcatattggaagccccagatcaggtcagcagccttcaaggccaatccacaaaatttaccagggaggaaatgttggtcatcttcacagattactttctgttgcttctagttctcagatcttatatgttggagatcacatttatggagacatactgcgcagcaagaaagtccttggttggcgcacaatgctagtaataccagagctagagcaagaggtgaaacttctttcggaatcaaaatctactcgaaaggagcttaggcatcttaggatggagcgtgattcaattgaagataaaatccatcgtcttgaatggtcactcaagtttgaaaatcttacagaagatgagaaggaaaagttattctcggagcatgacattctgctgcaaaagaaggaacatgttcgtcggcttcatcaagaggctcaaaggcaacatcatcataagttccataaagtgtgggggcaactcatgaagacgggttatcaaaactcccgatttgctcatcaggtcgagagatttgcgtgcctttacagtagtcaagtcacaaactttgctttgtattctcccaacaagtactaccgtccaagcgaagattacatgccccatgagttcgatgtgcttgggctgtaggagttctcccggtctccttgaatagattttcagcttgcatctggataggagcatgatcttttgtcctgtggctcttaccgtctaataacattgtagtttctgttaattttgtaagcaagtgtgggattaatctggtgaatgttcacctgttcttttcaagttaccgctgaaaaaagaaagcgaaaggtttgtgtaattatagtcggccatagcagatcagcaatttaactatatctttttgtacataataacaagcttatagtgaaattaaaggaaaagttcttgatgg

SEQ ID NO: 24067 - DNA, 1276 bp, Oryza sativa
  ref <308>: DATABASE ACCESSION NUMBER: AK099509
  ref <309>: DATABASE ENTRY DATE: 2002-08-28
aaaaatgcccttatggagcttttaagctttatgtacagtggaaagttgacatcaactgaccctactcttctactggatattctgatggctgccgacaagtttgaggttatttcgtgcatgaggtactgcagtcagttgctcacaagcttgactatgactacagaatctgcactactctacctagatcttccatgctccatttcgatggctgctgcagttcaacctctgacagatgcagccaaggaatatctttccaacaaatacaaggatttgactaagttccaagatgaagtgatgaacatccctcttgctggaatcgaagccatcttgtcaagtaatgacctccaggtggcatctgaagatgctatctacgatttcttgatcaggtgggctcgcgcacaataccctaaatcagaggaaggcgtgagatcttgagttctcgtttgcttccgctcgtgcgattcagtcacatgacctgtaggaagctgcggaaggtcctaatatgcaccgatctggaccatgagcaagcaaccaagtgtgtcactgaggcacttctatataaagctgatgctccacacaggcaacgtgctctcgcagcagacgtaacaacctgtcagaaatttgcagagcgggcttacaagtacagacctttgaaagttgttgagtttgaccgaccctacccacagtgtatagcatacttggatctaaagcgcgaagagtgctcccggctcttcccgtcaggtcggatgtactctcaagccttccatcttgcagggcagggcttcttcctctcagcacactgtaacatggaacagcagagtacgttctactgcttcggtctcttcttagggatgcaagagaagggctcaatgagcgtgacagtagattatgagtttgctgcaaggacaagaccgtcaggagagtttgtgagcaagtacaagggtaactacacgttcaccggtgggaaggcggttggttacaggaatctctttgcgataccatggtcgacgttcatggctgacgacagcctcttcttcctcgacggcgtgttgcatctgagagctgaattgacgataaagcaacccactgtctaatgtactgctgccaaactcaagttggctttgcgctcgagtgggtgatagtgcgaaacatcacatgctgcagatatcgtattgttttttttccccttcttctatgcttaaacccttttgttgatagaaactttgcaaatgacaagtggaaaaaaaaaggactaaaaccggtctcttttactggc

SEQ ID NO: 24068 - DNA, 1131 bp, Oryza sativa
  ref <308>: DATABASE ACCESSION NUMBER: AK099510
  ref <309>: DATABASE ENTRY DATE: 2002-08-28
gtaactccaaatccgccatcgcatccttctctccatccaccgaggcggcgccaccacctctcgtccggcggcggcgcggcgcgacgctccatccccggcgaaaaggccgccggattccctgtgggggcggcggagaggcgtcggaggaggctggcgccggcgcggcgacaagcttaattaagcaaattggattcggatcacaaaggaggcggtgcctgtagaaaagccatggcttcttcggtgttcaaggcgatggcagagaaggcagggccgtctgtccgaaagcaggcccttacgctgaccgatgcagcggcgtcgagggtgcgccagctgcttggcgtacggcagcgtgcttatctccgtcttggcgtcaaggcccgtggttgcaatgggttgtcgtacacaatgaattatgctgatgagaagggaaaattcgatgaacttgtggaagataaaggagttaagatactaattgatccgaaagctcttatgcacgtgattggaaccaaaatggatttcattgatgatccacttaggtctgagtttgtgtttatgaaccctaattccaagggagaatgtggttgcggcgaatcatttatgacatcaaccaaaaacaaaggcccggcatagtccaccaagttttggcagcgatttgttgattatttgatgtatagaagtatgttgctaatttgctatacacttcagtgacccattgtagaggaaaatttcatttcagctccattgagctgattatccttcgtcactcagcatggttggcacttgttacctttcacctctggattggatcatctgcagcaaaggaggatactgccattcccctctagcacgaaacatccaattgcaagatgcctcctgattgcatactctggtgagaacaatggaggtcagcgttccagcaactcgcctgagggatcatataacaggattttcggcattccatccactcgctaagggatcatataacagaggtcttgtttacatcttgtaagatggcatccaaggatagatgtggcattgttttttttcctcttttgcaccatgatctgataatcaccttgctgcatgttcatactgagattttgatctctcatgtaacgggattttatgccg

SEQ ID NO: 24069 - DNA, 841 bp, Oryza sativa
  ref <308>: DATABASE ACCESSION NUMBER: AK099511
  ref <309>: DATABASE ENTRY DATE: 2002-08-28
gaccccccacacccccctctcctctccccactccaaatctccctcctcctcttcgtcttcttccttcccccttgggcacttggcctagctactagtactacttcccccatgcccctccactcctatgatccttcctcctccccaccctccctggtttcttgatccatcctttctcatccagatttgagcccccgccttctccgtcccccccggattcctcgctttctgcccagaaatttgctggcgttgggggggctcggagatgtccggcggcgtgcaggagcagtttgagatcaagttccggctgccggacggcaccgacatcgggcccaagaggtacccggcggcctccaccgtcgccacgctcaaggaatccatcgttgctcaatggcctaaagataaggaaaagggcccaaggactgtaaatgacctcaagcttattaatgctgggaagatattggagaacaacaaaaccctttcagaatgcaaaagcccaatttgtgacttctctggattgacaacaatgcatgtcgtagttcgtgctcctacttcagacaaacagtccaataaaatagttgccaagaagccaaaggatttcaggtgtggttgttccatcatgtgacagctttgtgaatagtagcagtacagcgaggaagtgtcagctattgaactcctccccttttttggctcttgctagagtgttgtatgatgcctgaggcgctttctcctttcatttttctttcactgtattatgggtggctcattgcccaaaatcctgagttgcatcgagtacatgacttgaagttattggtctaaaatctaaattcgttccatctcatcc

SEQ ID NO: 24070 - DNA, 3180 bp, Oryza sativa
  ref <308>: DATABASE ACCESSION NUMBER: AK099512
  ref <309>: DATABASE ENTRY DATE: 2002-08-28
gagatctggcgctggctccccccgggttccgggtagatctgggggtgtagatctcgcccggcgttaggatttttttttttgttgttccgttgattgtccgggttagggaaaacccggaaaaggcgtgattttttttttgattgaggcatctcgccaccggccggggagacggggaggagggcgtggggtgtttagcgtgcgtgtgctggacggagaggaaaagcaagggggtactgtttgctcgtctttccgttgctcttttgcctcttttgattgtacaatcttcccttttctgtgttagagatggagttgcgtggacttttgaggatatcttctctttcctttccaaaaaaacagcaataagcttctgtttcttttgttatggttcctttcttactgatttgatggtttctatatacgtttgggtgagagaacagcgtgtcggtatgtgagaacgaaggacggaaggaggagatattgagcctatttaattgatgaatttatggaggagatattgagataatgtgtcagaaaacttgcttcttttgcacggcagctatatgagttactaagaagagtcgcgccaattttgtggaaactgggagcaaatcattagaagttctcttctttttttggttgacagagctactgattttgggtcttctgtgaatgtggaaatttctattatcagtatcagtcgcattgattgtggtatttctccctggcagtgaaaacaaacaaacaaaatattttatgaatcctaacggaaagtaaacggcttgtagatttttactttttaagaacttgtataactgaatccttgtccatttgtccagccttatatatcctattgtgttatcttcaatctttgtatgatgcagcggcttgctggctttaatttatggacatactatgaagtaattaaattgttttgttctaaatatttattgccctaatagcaagaactagctgttgttcttgtagttggtttatttgtttttggtattttataatagggttgaaatgaaatttcccacaacactatcaattttattgagtctgacaaagattactagctctagtgagccttacctgtaggttagcatattgtcttgcttattaacaaaaatactagtttctttttttgagttgacaaatactagtttattaatattatggaagttatattttctgttaaattacacctatttgttcatatataatcttttggtaaaggttgacgtgattgtggtacatcaagtgctcagccatgttcatgctaatccttgttgatatctttgcagggcttggataaaatcttattgcaaatttccccttgtacatgtaacatcacatgtaatttctattaaaaatgacttcactcaataaagttgtttccaatggagatacaaggtcaatgttgccaaataaagtcacagcattgaatcccaacgcagcagaatttgtaccttcatgtattagaccatcttttgagagtagcgctgtctcagatgtaagtaaggcagatcttagggcttctgggaaaactatcctagataggtccgagtcatcaaagtcaaataactcggatgatgaggcacaccagttttggcgtaagcagcttcctgatgacattattccagacttcagttttgagaaaattgaacaagaacctgaagaattgtctcttgctggattatccttgaatgcaccccctttctatggaacaacagctagccgcttttcaagagagcatgatttatcttctcaagctaacaagagcctggaactggggcttaccagtttactttatgaagataattcacaagcatcgtttccaactatgggttcaagcaattgggagcaaaattttgtaggggatctccattttacgaatggaaatcagggccttcattatgattctgaaagtgctgcaggcttttctgacagttttgctagcgattatgctgcagcaacagacgatgttcttgaccccctagcgtatttagcttcacagtttcctgatttttcatcagagagccttgcagagctgtactatgctaatggatgtgacttcaaccatactattgaaatcctcacccagctagagatgcaagttgatgctacctccaatccaactctgacccccaggacaccaaactttagcacaggggacttccccgcactgccaacagttgaagaccaaaatggtttttccaaaggcaatgcagatattctaagcatcttcaatggacgcagctcaccctctgtatctactggtactggtgattttgtttcagctgttcgcaaacttgcatcgcaaaattctggccattggaagtataagaaaggtcctgaatacggtaatggtgtttcaactgtttctgtacccaagcagtacagttctacgaccaaaacatcttctggaaacaagtttcaaagtgttagcagtgcaagagctgctccatggctcgaaactggagatgcagtagcaaacatgtactcagaatcaaggggagaagcccgtgattttgcccgcatccgaaatgcatgttttgagcaggctagacaggcttacctgattggcaacaaagctctagccaaggaattgagtatgaagggacagacatataacacacaaatgaaagcatctcatgagaaagcaagagaagctatttatcgacagaggaacccatcttcgcaacgagggagcgaccgtctgatcgatctacatggtctccatgtgaacgaagcaatccatatacttaaggtcgagctcggtactcttaagagcaccgcgagggctacaggtgagaggatgcaagtcatgatatgtgtcgggacaggtcatcacaccaagggttctcgcaccgccaggctgcccatcgccgtcgagcagtttcttctggaggaaggcctccactacacgcaggcacaacctggtttgctccgtgttgtggtgttctaacatctcttaggtcagcagcacgaagaaaaaagaagcaaaacaaaaaaaggagaaagagatgtagggaaaagaaaaacctaaaaaaaatggccgctgttgcagcactgtaattttcttgtagttgtatattaaaagaggcagcaggagaatagcctgacaacagaatacagtgtaaaattatacatagcttcattcaattcacattccattcc

SEQ ID NO: 24071 - DNA, 795 bp, Oryza sativa
  ref <308>: DATABASE ACCESSION NUMBER: AK099513
  ref <309>: DATABASE ENTRY DATE: 2002-08-28
gtgagccaagaggggaaaaaaaaagggaaggaatttttttcttttttttttgttcgcctccgcttcttcctcacgcagctctcgcctcgcctcgccgcccgccactagagaggagagggagaaggaggaggaggcaaatcccagcaaaagaagatgcagatcttcgtgaagaccctgacggggaagaccatcaccctcgaggtggagagcagcgacaccatcgacaacgtcaaggccaaaatccaggacaaggaagggatccctccagatcaacagcgtttgatattcgccggcaagcagctggaagatgggcgcacactggccgactacaacattcagaaggagtcaactcttcacttggtcctcaggctcaggggtggcactatgatcaaggttaagaccctcactggaaaagagattgaaattgacattgagcccaccgacacgatcgataggatcaaggagcgtgttgaggagaaagaaggcattcctcccgtgcagcaaaggcttatctatgctggtaagcagcttgccgacgacaagactgcgaaggactataacatcgaaggtggctctgtcctccatcttgtccttgctctgaggggtggttattagtaaagctaatgtgctagtacttagctcaataccttcgaatggctgagaaaatttactcttgttggcatggaacttgcgaagggataataacatgctagctttgcacatttgcctagtgggagaggttgtcttccatgttattatcttatatgatttgaggcatattattccagattcacc

SEQ ID NO: 24072 - DNA, 551 bp, Oryza sativa
  ref <308>: DATABASE ACCESSION NUMBER: AK099514
  ref <309>: DATABASE ENTRY DATE: 2002-08-28
ggaaagatagctacttagccactgcatatcttccagcttttgtcatagccttttttgtttcttctcttttggtacaaattcagggtctggaatacttgaatcagtgagaagaaaaaacaagatgtataaccctccaagtgcccaggagatgacatacaaagatcatgttcagaggcgccatgaggaaaaaggctgcttatatgcatgcctgtttacactgtgctgctgcttctgctgctacgagacctgcgagtgctgcctcgagacactctgctgctgctgctgacgtcgtcatgacgaagtgatatgcggactgtgacgtccactgggacactcatcgttgtccatctgctttgtctgaataaaaaatgtatctatgtacttaattaattatttgagtgctgtaaatctgcaatgcgttgtgttgatgtgtttaattaccttttcttttctctgcaatggatggaaacctggtgtatttgtatgttcatcaaataagtactctatgcagtgttttggcttgaacaaaatgtttgtcgagggtttgggct

SEQ ID NO: 24073 - DNA, 1069 bp, Oryza sativa
  ref <308>: DATABASE ACCESSION NUMBER: AK099515
  ref <309>: DATABASE ENTRY DATE: 2002-08-28
gagccgcacaccgatcccctcctcttcttcccccccttctcctctctcctctttttttcctcatccgtgcgcgatactgcgcttagtttgtgggtggggggagtgatcatcaccaaagccacaaagggggcgcggagagatattatatattctttgggaaagcgttggattagtttttctcgctttgggctttttatccggagttggagtgtgtgtgcgccgggagtggtggtggtgatggcggccggagaggaggtgatggatcggtcgacgtcggccgaggacgggtactgcagcgccggcacggactcgccgcgggcggagtccgtcgacgagcaaggggccgccgaggagtcgtcgccccggggagggcagaagcgggagctcccctcgccgtcggcttcgccgtcgtccccgctgccacctgccgcgaagcgcagccggaggtcagtggagaagcgggtggtgtccgtgccgatcgcggagtgcggcgaccggccgaagggcgccggggaggggccgccgccgtcggactcgtgggcctggcgcaagtacggccagaagcccatcaagggctctccctacccaagggggtactacaggtgcagtagctccaaggggtgtccggcgaggaagcaggtggagcgcagccgcgccgaccccaccgtgctgctcgtcacctactccttcgagcacaaccacccgtggccgcagcccaagagcagcagctgccacgcgagcaagtcgtctccccggtcgacggcgccaaagcctgagccggtggctgacggacagcaccccgagccagcggagaacgaatcgtcggcgtcggcggagctggaggtaccggagccggagccggagcaggaatctgagccggttgtgaagcaggaggaggagcagaaggaggaacagaaggctgtggttgagccggcggcggtcacaaccacggtggcgccggcgccggcggtcgaggaggaggatgagaacttcgacttcggatggatcgaccagtaccacccgacgtggcaccggtcgtacgcgccgctgctgccgccggaggagtggg

SEQ ID NO: 24074 - DNA, 1263 bp, Oryza sativa
  ref <308>: DATABASE ACCESSION NUMBER: AK099516
  ref <309>: DATABASE ENTRY DATE: 2002-08-28
ggcgtgcgtggactcatcgagaggagcaaagcaaagcgagcagctgagccccgacgaggtagggggagagatgagggcggtggtgatcgcgcgcgccggcgggccggaggtgctggaggagcgggacgtcggggagggcctcccgccgccgggggaaggcgaggtgctcgtcggggtgtccgccgccggcgtcaaccgcgccgacaccgtccagcgccagggccggtaccccgcgccgcccggcgcgtccccttacccgggcctcgagtgctccggcaccatcctcgccctcggccctaacgtcccctcccgctgggccgtcggtgaccaggtgtgcgcgctgctcagcagcggcgggtatgcggagaaggtggtggtgccggcggggcagctgctccaggtgccggagggggtgtctctgacggacgccgccggcttgcccgaggtggcctgcaccgtctggtcgaccgtcttcgtgaccagccacctctcccccagcgaatcgttcctcatccatggtggatcgagtggaattggtacatttgctatacagattgcaaagcaccttggaattaaggtttttgttactgcaggtagtgaggaaaaactagctgcctgcaaaggtttgggtgccgatgtatgcataaactacaaaactgaagatttcgttgcacgtgtcaaagaagaaacaaatggaaagggtgttgatgtcattctggacaacatcggtggattgtatcttcagcgtaacctgaacagcttagctgttgatggtagacttttcatcattggtttccaaggaggcgctgtaactgaagtgaacctgcaacccatgcttgctcgacgattgaccatacaagctgctggactacgcaacagaagccttgataataaagctctgattatcagtgaggtggagaaaaatgtatggcctgccgttgtgcaaggcaaggtgaaccagtaatatacaagacgtttcctctgtcagaagctgctgaagctcacaagttgatggaagaaagttcccacattggcaagatactattgattccatgaatgtattggtatcttgtttgtgctctcactatcggagccactttaaacactgtatatttggtttgtcctttgatcttgcatgttgacaagagtggacgtactatgtcagaaaattatgtgtcacaatacatgaagaaagttatgtactcatgctctctcaaccaacggatcatttggatataaatgcgattgcttggtttggagtcc

SEQ ID NO: 24075 - DNA, 845 bp, Oryza sativa
  ref <308>: DATABASE ACCESSION NUMBER: AK099517
  ref <309>: DATABASE ENTRY DATE: 2002-08-28
gaccagactcgtcgccttcctcaccgaacccgcaaccgccaccgccaccgccaccgcccgtccacatccgccggcgccgatggcctcctccgccctcgccgtctccgtcgccaagccagccgcgtctcctcccgtcgccgtcgccgcggtaaccccgcagcgtcgcctcctcccgcagtgccggggcgtccgcgctgccccggtcgtccggctccgctcgggacgcgcccgcggcgtgtcggtggtgtgcgccgcccagggccaggagacctccttccaagttcctgacgtgactaagtcaacatggcagtcacttgtggtggagagtgaacttccggttctcgttgagttctgggcttcgtggtgcgggccatgcaaaatgatagatcctgtcattggcaaactttcaaaagaatatgaagggaagctgaactgctacaagctcaacactgatgaaaaccccgacatagcaacccagtttgggataagaagcattcccacaatgatgatattcaagaacggtgagaagaaagatgcggtgattggagctgtgcccgagagcaccctggtcagcagcatcgacaaatacatcgggaggtaaaatgtcaggttgaatattttctaggcagttgggcttcaaccttcacgcccagatggatatattgtcatctatgaactccatttcttttcgagaataggcaggagaatcgtaaattatggaaccccggtttggtagttgtatgtacataataatgtgataaccgctaataaatgcaattcaaggctgagccctgcgtggccttctggatcgaaggtatggaaggttgcttcgagttgcttgtttc

SEQ ID NO: 24076 - DNA, 1307 bp, Oryza sativa
  ref <308>: DATABASE ACCESSION NUMBER: AK099518
  ref <309>: DATABASE ENTRY DATE: 2002-08-28
gaagcgaggttgaaggagacgcacatccatcccggcggagaggatgctgctgctgcgcgccgccagggcgtcgccggcgatggccgccgtcgtcaggtgcaaacccaccaggctgaccccaatcgcgggcctctcctcctcgtcgggtggggcaggaggaagaaggccgggcggcggggcgaggccaagcccccacccccacccccgccgcagctgcggggcggcgagacgaagaagaagaagaagccagacgcgaggacggcggcggaggcggcgcaagggttgcagaggcatgaggtcgagaggaggaagaagccgccgccgccgccgccgccgccgaagcaggagaaggcgaagcgcgtggtgcggtggaagtgcgcggccgggtgcggcgcgtgctgcaagctggacaagggccccgacttcccctcccccgaggagatcttcgccgagcaccccgaggacctcaagctgtacaagagcatgatcggcgccgatggatggtgtatcaactacgacaagtccactcgcacctgcaacatctacgaagagaggcctgtcttctgcagggtggaaccgaaggttttcgaggagtacttcggcgtgccaagccgacccagcacgtttgacagggaagcttgcagtgcttgtgtggataccatcaagatggtgtatggtgaggagtccgcggagctaactaactttaaacgtgtcataagggaagaaagtaaaaagcatgaagctagcctgaaccaagataaattgttggatacatagctcctggtaaattcagaagacatcaatggcctataatgtaaaggtccatatatttatgtttcctgctgtttgatgtgcatcagtgcctcaaatggttaaacgtggaacacgcaccgagatgttgagggagttttacctgagatgttgctatcacggttcggaggaaatgaattgacacttgcaagttaagaaggcagtcggatatgctcaagtttataagcttgttgagtgagggttggtggtattattttttccccgttattgttaacaattgtttgctaaagcatagagcaatagttagcttggtttgaatgccttcatccaattctgatgatactgacctagctaatctcactcagatttgattctgaatgattaaatcccaacctaatcccattcacgatttggttttggtcttttgaggtgataaaatatgttccctgtatttttttccctttcctattacacttgcaatatgttccctgtatttgttttccttttttattccacttaagaaacatttctgctgg

SEQ ID NO: 24077 - DNA, 1092 bp, Oryza sativa
  ref <308>: DATABASE ACCESSION NUMBER: AK099519
  ref <309>: DATABASE ENTRY DATE: 2002-08-28
ggtcttcctctgcggcgcacgcaggcggcgaatcctcctccgtcgacgcgactcctcctccgccgcccgccgctcatctcatcccactatggcagccaatgttggggaatccacaagtggcagcagcagcggcggtgccgattctgggggaagcttcgagtgcaacatatgctttgagcttccgcaggagcctattgtcacgctctgtggccacctcttctgctggccatgcctctacaagtggctgcacatccactcgcattcacctgagtgcccggtctgcaaggctgttgtcgaggaggataagcttgtccccctctatggccgtggtaaggaccgtgttgacccaaggtcaaagaacgtccctggggctgacattcctaatcgcccagctggacagaggcctgccacggctccgcaggccaatcctaacacccacttccccaatgccaaccccaacccttggttcatgggtggaggcatcccactagccaatgcacggtgggggaattacaccttctcggcggcatttgggggtttgttccccctgctcagcttccaagtccatgggttcccagatgcaaccgcctatgggcagcctgctggttttccctacggatatggacacggccacggtcacggtcatgggcacgcgttccacggcggacatgcccatgctgctgctgctccccgccatggaccgcctgggcaacaacagcaggcggatgtgtacctgaaggcgcttctcatcctggttggttttcttgtgattgcaagcctcatcacattctaggattgtgccatcatattgctgtgcttgtaataagaggaatgatttcccgagttgctttctgatgttgtgcattaccttgcctccacacacgacccagtctgaatcaagtggttcttttgcgcaaagtgttgatagaattcttgtatatacgaaatagatgtggtcgtgtggagcatatgtgtactgtggttcatgaataacatggaagctctgtctgaatgaactagagcaatgatacttatattgtgtttttgatatgatgatgctcagaatgagcaggctatgcaattgtttggagc

SEQ ID NO: 24078 - DNA, 1263 bp, Oryza sativa
  ref <308>: DATABASE ACCESSION NUMBER: AK099520
  ref <309>: DATABASE ENTRY DATE: 2002-08-28
gagtgtgaaaaaatggcgaccaaagtgcacgcccgccgcctctagcgccgaccgcctcccgttccccttccccactccgtcccggcagctacctccgctttccaccacgccggccgatccgcctccccaaccctatcgccggcaggcgcgccacgccaggttccgggctcggagacaccgcacgctccgcccgatgggcacccccgggccggagctcgccgctctcgcgattcgccgcagcggcggccgcctgttcgagcggtagggagggactcgtctccccgcctctccttgtcgtggactcgtggtagcgggggtgggaggagccagagaggctgggggcagggagggaggatgctggggtcgggcctgaatctcgtcagcgcggcgctcggcttcggcatgaccgccgcctttgtcgcgttcgtctgcgcgcggttcgtctgctgccgcgcccgccgcgcggacgctagcgcgtcacggccacacccctcgccggtggacttcgacgcggacttcccctcggatttcgatcgcccgatagagcattcccgcagtgggttggaaccattggctgttgctgcaattcctacaatgaagtataactgtgaagctttccattcggaagatgacacccagtgctccatatgtttaagtgaatacaaggagaaggacattctaagaattgtacctatttgtcatcataactttcacctttactgcttagatgcatggttgctgaagcagactacttgcccaatatgccggatctcattgaaagaactgcctgatggaaaatcgaccgtatcctctgctcctaccatgtctcaaccccccaccctccctgagagttctgttaatccaacatctcatttcctcccagttcatcaagaacacagaagccaccaggatggcccagatatgccagaatctgtagaggtggttattgaaatccgacagtgactacggcggaatagtgcaagacaagaatttgcagtttaaattctttgtacgcccttcattgcattgtttgtcgcagtttcaaaatgtttgaagtcaaaattatatgtggtccctttgcaagttgtagactagagaagtcagtcatacaatccacattatcatatgttctttttaatatatgttgtatattgcaagctaagtaaaaataccgataagatctactgatataggagtagagcttatttactgttgagtccctaatttttttatgagtgaatttcagcagggacacctcttacc

SEQ ID NO: 24079 - DNA, 1686 bp, Oryza sativa
  ref <308>: DATABASE ACCESSION NUMBER: AK099521
  ref <309>: DATABASE ENTRY DATE: 2002-08-28
gaatcccacctcgagaaaagcggcgattaaaaaatacgattgttcacagcgaaaaagaaaaaaaaattccctcatgcttcagcccgccgccgccaccgcgcctctcgtgcgggcccaccgccgccactccgctcgcgcggctgcgctcacgactcccctaccccgccgccacctcggatcgcctgtggccgccgcctcccgccagagccgtcgtcgtcgttgccgagggaagcgggccgcatcgccgccgccgctctaggccgccgcctcctacacgcccgccgcttcccaccgcctccgccgacgccttgaccaaaattgtccctcacatctcccgttctcttagggctggcaatctctgctccgccgccattgcatcggaggaaggagaccgccgctggtccggcccgcgtggaggcacttttctgctttgccgccttggcgttgtttccgggcaggagaccccacagctcaggcactccggctccggcgattcggccccatcccctgcagggcaaacaaagcggcggcgttgcttcgagaaggtcaggcaccgtggtgtccgagcggcatggaggccaagttgtgagacacccacggactgcttcatcagttcacatgcctgagcaaggtcctggatggcgagatccaccagctaatcaccaaaggcagcttttgcatcatgcagctgctgcaggccacgatgggattggagaactcctaatcttgttcacacagagttcaagcagcacctagaattgacatgggcaggcaattcattggtgatggagaagaactgcatgcggcgctgcctacactgactcaccttaatgaaaatgacaattcgatttattatatggtggttgcagaattatcacctcacttacatggtcagatggaccatttctgtccaattaactacaggcactcaacttttgtactatgatctctgaacaaagaaattttttgaagggggaccatgtttctgaaattgaccatctggaaaaaagttctgacattgctttctaggatcaatagtcaattgctactaaattgcagggcctgacgttgatatatacaactgaagagaaatatggttattgctgatatatacaatttattttttaaactctctcgctgatttggtttcatttcattaaggtagataaatttattccaaagcaaaattctaccttccccatcactgccactctccatcatgattgacctgctctccgctctctccaaggcggatctaccaccggcgggcgatggcaatggtaggagcagcggctacggtgagcttgggcagcgctgatcccgtcgcctctcctccctctctccgttgcccggagggcatgggctggccgatccaggcggccgcgagctcgggtaaccagcgggtgcgggatccagcatgcggacgacataaatacccacatgaggaaaactgattttcacatgtcggtgtgtcacctggatggaaaattcctattttcgcagatgtttggtccaactgcatgtgaaaatatattttgaccgcatgcacaaatgcttttgtagttatgaaaacttatggtagaattacactcttgtgacgaagggagtctctccctccgttcctctataagtacaattataaatctaatttacttttctaaaataaatataatatcctcctacctc

SEQ ID NO: 24080 - DNA, 1202 bp, Oryza sativa
  ref <308>: DATABASE ACCESSION NUMBER: AK099522
  ref <309>: DATABASE ENTRY DATE: 2002-08-28
gattgagtaacttcaaatattcagtttcagaagaaaaaaaaagtgacttcaaatgaccttttttcaattctgaagtcagttgaagaatcaacgagttgaatttgttccgttcctttggtctccctcttgttaattggctgaaagtctgaaactatcaaacgagcgccctcagggtcgattgggttctctaaaatatgtttttggtgatgtattgttcacgctgttctttcgcagagatgaacagtcatatgatttttttcccctgttgtaaatgaacagtccatgtttatccaattatcccttcctgattcagtcgtcaaatcaatgttttctcacgctgttttacacctgctgaggagaatgctaatggtatgttggtcaactgctgttggttggatgcagttcgcccacaggaaatgcatacaaagatggtgtgacaagaaggggaacatcacatgtgaaatctgcaaccaggtttactctccaaattatgtcctccctccaaccaagtgttgttcagctgaaatggacatggatcttaggcaaagctgggttggacgaattgatccccatgattcgcattttcttgccattgccattgcagagcagcagctgctgcaagctgaatttgatgattgtgtgtcctcaaattcaagtggtgccacatgctgccgaactgttgttttaattttgatgttacttttgcttgtgcgccatgtagttgtgtttgtgagagatgttagcatgctgcaggatgcaacagtgttgtttagcgcaactcttcagttcgcaggattctttcttccatgttatgttatagcccgttcttgttatgcttttcaacaccggaggcgaagacaggtttaggggccacctgaacctggctggaagcatttactcaaaacaactcaacaccatcacagagagacgagaggaaaagcttgtgaagaagtaactcaaactccctttgcttggagcctctgcgaaagatttggcttaatttctcccccaacaagatgtagttgccgatttagaccatgggccctcgtgaagctcaactgtacataggagagcgacccacccccttcggcaaaacatttatgttttcgaaattgaattttagagaaaagaacaagtgggtttaaaaaatttcagtgtctttccagctgttaattctttctgaagagaagtggtcgatatcg

SEQ ID NO: 24081 - DNA, 533 bp, Oryza sativa
  ref <308>: DATABASE ACCESSION NUMBER: AK099523
  ref <309>: DATABASE ENTRY DATE: 2002-08-28
gtgcagcgttggaaacgccgaataaccagtgatgaagccactgctactgctcatctcctccattgtagtgatgacattcttactcctcctgagcggcgccggcgctctcaccgccgatcacgccaccgtcggcgtcgccgtggccggcggcaagcgcacccgccacgcggaggaactaagtgagatggattcggtgccgtacccgcaaagaagggtgctacaaggtggcaacactgtctacagaccgcttggcagaggtgcggcttgcaaccctatttgccctggtcgcggagacaggtacactggccgtggctgcaaatcccgttaccagtgcaggggcatgtaagatatctccatcagggtgcatgataatatcttcacaccctatgtacgcatgcatgcttggaaattattgggcagttcagcagttgttctatgtacatcgatggagtaggttgaacactcagttgatctcgtcttttttcagtattgttacggtattccaggcatataaacactcatgatcactggtc

SEQ ID NO: 24082 - DNA, 1160 bp, Oryza sativa
  ref <308>: DATABASE ACCESSION NUMBER: AK099524
  ref <309>: DATABASE ENTRY DATE: 2002-08-28
gttcctctcctgtcgtgcgtgcgtgccggagacgacgaggcgaacgcacgcgacggcgaccgccgccgccgccgccgacgagggccgagaacgacgtcaccggttttgcttctccggacgtattgtgttagtggaccattagtagagctgatagttgagagaaaagtcctacaacaatgttctccttgttctatggtctatggcagcatgtcttcagcaaggcagagttccatgtagttatccttggagttcacaaggctgggaagacgaccttgctagaaaaggtgaagtcaatctatttgaaagaggaaggccttccacatgatcgtatcgttccaacagttgggcttaatattggacgtattgaagatgccaatgtaaaacttgttttctgggatctgggaggccagcctggcctacgaacaatctgggagaaatattacgaagaggcacatgctgtcatatatgttattgactctgctgctgcatcatcatttgaagatgccaaatctgctctggagaaagttcttcatcacgaggatctgcaaggagtgcctctactcatatttgcaaacaagcaggagttaccagcagctgtgacagaggaagagctggctaggcatcttcaccttaaagggttagacgagaggccatatatgttccaggctggatctgcctacgacgggacgggaatcaaagctggtattgactggttggtggaagaaatggaaaggagtaaacgcaccgaggtgctgatggcgcgtacagaaacagctgagaagatttaacacaccataagccagaccccctgtcacagatgcatatgtcgtttgaggagtatggctcctataaatctcgcgaatataacaaattggcatcctcttgccttctccaggctacgcggtgagaagaaaaaatgtccttggttgtgcggtttcttgcaggctttgcagctgtacacttgggtaggaagcctgctgttgtaacgacagaggcggggtattccttggtttattgattctcataggctcatagcacacataaatgtacctaaagtcatgcgacttttttcttcatattgaacggaacaagaacgacaatgtagagcacagagaagttttgtacatctgtgagaagaaaaaaaatgcattttgtacttt

SEQ ID NO: 24083 - DNA, 1099 bp, Oryza sativa
  ref <308>: DATABASE ACCESSION NUMBER: AK099525
  ref <309>: DATABASE ENTRY DATE: 2002-08-28
gcggaattatcatcgcctgaagagcaattcaagaggagaggagaggagagctagctaaggcagccatggattactgcaagcagcaggagcgagacgggcaccgcgacgatggcgatgtgacggagtggaagaaggtggccgagctgagagccgtcgtcgaagcccaggaccctgcatgcaaggaggaggacgactaccagctgcgccggttcctgcgcgcgagagaccacaacatcggcaaggcgtcggcgatgctggtgaagtacctgcagtggaagcgcgaggtgaagcccggcggccgcgccatcgccgacgaggaggtgcgcggcgagctggcgcaggagaagctctacatgcagggctacgaccggcaggggcgccccctggtgtacggcttcggcgcccgccacttcccggcgcgccgcgacctcgacgagttcaagcgctacgtcgtctacgtcctcgaccgcacctgcgcccgcctcggcggcaatggcgggcaggagaagttcgccgccgtggccgacctgcaggggtgggggtactacggcaactgcgacatccgcgcgtacgtggcggcgctggagatcatgcagaactactacccggagaggctggggagggtgttcttgatccatgtcccctacgtgttcatggcggcctggaagatcatctaccccttcatcgacgacaacaccaagaagaagttcgtcttcgtcgccgacaaggacctccacgccacgctccgcgacgccatcgacgactccaacctcgccgaggactacggcggcaagctcaagctcgtctcgccccttattaatggcgccaccgaatccaatcgccgccggtagatagctctcgcgtcgcgtgcatgaagatcgatatgatgtatgtacacccatctcgagatccaatttaatggtatgtatgtagcacgtgtacggtgtacgtgaatgtatgttactagtatgtatacgggacaggaggacactacgaattcgaggacgtacgtgcgtgctatatacattgaattacggctctgaacagtactgatcatgaatggtcactgttgatgagaaatgcaagttcgtctgcatcg

SEQ ID NO: 24084 - DNA, 1121 bp, Oryza sativa
  ref <308>: DATABASE ACCESSION NUMBER: AK099526
  ref <309>: DATABASE ENTRY DATE: 2002-08-28
gtggagcagttgactttctagtgaagcctatacgtaagaatgaacttaagaacctttggcagcatgtttggagacgatgccacagttccagtggcagtggaagcgaaagtggcatccgaacacaaaagtgtaccaaaccaaaggttgatgatgaatatgagaataacagcggtagcaataatgacaacgaggatgatgatgacaatgatgaagatgatgacgacttaagtgttggacacaacgctagggatggcagtgataatggcagtggcactcaaagttcatggacaaagcgtgcagtggagattgacagcccacaacaaatgtctcctgatcaaccatccgatctaccagatagtacttgtgcgcaagtaattcaccccacatcagagatatgcagcaacaggtggttaccgactgcaaataaaaggagcggaaagaaacataaagaaaataacgatgactccatggggaagtacttagaaataggagctcctagaaattctagtatggagtaccaatcttctccaagagagatgtccgttaatccaacagaaaaacagcatgaaactctcatgccccaaagtaaaacaacaagagaaacagatagtaggaacacacagaatgaaccaactactcaaactgttgatttaattagttcaatagccagaagcacagatgacaaacaagtagttagaatcaataatgctcctgattgctcctccaaggttccagatggaaatgataaaaatcgtgattctctcattgatatgacatctgaagagttgggtttgaagagattgaaaacgactggatctgcaactgaaatccatgatgaacgaaatattctgaaaagatcagatctctcagctttcaccaggtgcaaaaaataatatcagtgtcactcctgagttatgaacatggcaataaattgcgtactaatgttttcttatcttgcaaggtaccatacaactgtggcttctaatcaaggtggagctggatttgggggaagctgttcacctcaagataacagttcagaggctctgaaaacagactccaactgcaaggtgaagtcaaattcagatgctgctgaaataaagcaaggctccaatggtagtagc

SEQ ID NO: 24085 - DNA, 1119 bp, Oryza sativa
  ref <308>: DATABASE ACCESSION NUMBER: AK099527
  ref <309>: DATABASE ENTRY DATE: 2002-08-28
ttctgctctaggaatattgatgaaccttggattaattgaggagtccaagatctcaaggtcattgccttggaggcccccaacaaatgttttccgtgtcaaggaggatgtccgccctatattctgggctaacagaccaaagagctatatttcaaggacccttggttgggatcaatacccacatgggcggtggggtgattcccggaacccatcgtatggagcacttactgactaccagttcactcgaccacgtgggaggggtaagaagctccaagaggaatgggcggttccagtgaaatctgttgaagacattaacgagcgattcatgaacttctgtcaaagaaaacttacaagcagcccatggtctgagcttgatggccttcaacctgagacaaagataatagacgaccaattggtgaagattaaccagaagggcttccttaccattaacagccaacctgctgttaatggagagagatctgattcaacaagtgttggatggggtggtcctggaggctatgtttaccagaaggcctatcttgagttcttctgttcaaaagagaagctggatcagctaattgagaagagcaaggcattcccttctcttacatacattgccgtgaacaaggacggagagtcattctcaaacattcccacaaacgctgtgaatgcggtcacatggggtgttttccctggcaaggaaatagtccagccaactgtcgttgactcagccagctttatggtttggaaagacgaagctttcgaaatttggtcaaagggttgggcttgcctgttccctgagggcgactcatctagggagatactagacaaggtccagaagagctacttcttggttagtcttgtggacaacgactacatcaacggtgatctcttcgcggcgttcaaggagatttgatgacatcttatagtctgcaacctctcgtgtctgaattcctatctttatcaagtgttattgcttccacgactataggacagctttcgtcgaaagcttttgctcatgtgatctcgaaggattcatctagtctgatttttcgtgacttgtatcggttttattggattcatccaacatatatcaataaaaaatgagttgtgtttcctttc

SEQ ID NO: 24086 - DNA, 1569 bp, Oryza sativa
  ref <308>: DATABASE ACCESSION NUMBER: AK099528
  ref <309>: DATABASE ENTRY DATE: 2002-08-28
ggagggtttctccttctcccagtgcgccgccgtcgccaacatctggagcctcgcggagccgctgattcagcgaattcctctgcaattagagagatggggagcgtggagctcggagcggaggaaagggaggtcgccggcggggagggggggagcaagggggcggcgcctcctgctagggatattaggcggtacaagtgcgatttctgcagtgtcgtccgttccaagaaggggttgatccgtgcccacgtcctcgaacaccataaggatgaagtggatgatttggatgattacttgggacgtggtggcggcgagacgtgcaaagagatggaccatgattgcaaggtgtgcggtgctagttttaagaagccggcccatttgaggcaacacatgcagagccattcacttgagaggcccttttcctgccatgtagatggttgccccttcagctatagcaggaaggaccatttgaaccggcatctacttacacatcaaggaaagctatttgcatgccccatggaaggatgcaaccgtaagttcactataaagggtaatatccaaaggcatgttcaggaaatgcataaagatggctctccttgtgaaagcaagaaagagttcatctgtcctgaggaaaactgtgggaagacttttaaatatgcttctaagttacagaagcatgaggaatcacatgtcaagttggattatagtgaagttatctgctgtgaaccaggctgcatgaaggcatttaccaacttggaatgcctcaaggcccataacaaatcttgtcatcgacatgttgtctgtgatgtctgtggaaccaaacagctgaagaagaacttcaaacgtcatcagagaatgcatgaaggttcctgtgttactgagagggttcgatgccacctcaaggactgcaagttgtcattttcaaagaaatccaatctggacaagcatgtggaagcagtccatgagcagaagcgaccctttgtatgtggattctctgggtgtggcaagagtttttcgtacaagcatgtaagggacaaccatgagaaatctagtgctcatgtgtacgttcaggctaatttcgaagaaattgacggggaacgaccacgtcaagcaggtgggaggaagaggaaagccatacctgtggagagtttgatgcggaagagggtagctgctcctgatgatgatgccccagcttgtgatgatggaactgagtatttgagatggcttctctcaggctgattcgtcgtgaaccagaatacagaaatgtgagatctttggatatcaagggtgttgatatggtttgagatactagtagcaacgttcttttcctttgtgcatgtataggtaaaacatggaagtaattttgataagacctctatgtactgtctcagacatcaagttaccagaagtccagaatgcagaaacgccagatctttatatgctcaagggtgtttatgtgctagttaggtagcaacgttctctctttttgtatgtataggaaaagtgaaaggaattttagtagaccctaatgtcttgtgacaggcatggtaatttatcaaggttggtttgttc

SEQ ID NO: 24087 - DNA, 1669 bp, Oryza sativa
  ref <308>: DATABASE ACCESSION NUMBER: AK099529
  ref <309>: DATABASE ENTRY DATE: 2002-08-28
gaggttggcatcaacgacccggcgtgctgcagcgacgagatcgagacactggagcgggagatcggcgaccgcgtggcggggaggtggacgtcggccatgattgcgctcgttgggctcctccggtacgccaagtgcgtcctcttcaccgcggccacgccgcggccgatggacaccaaggtggatgttgacgacgatgacgatgacgacgacgccgagccgccgtcgccgccgccggacttccggtgccccatctctctcgatctgatgcgcgacccggttgtgtcggcgagcggccagacgtacgaccgggagtccatcacccggtggttcggctccggcaagtcgacgtgccccaagactgggcaggtgctggccaatctggagcttgtccccaacaaggcgctcaagaacttgatctcgcggtggtgccgggagaacggcgtcgccatggagagctccgagccaagcaagcccgagccagcgccggtggtgaccgcgaacaaggcggcgttggaggcggcgcgcatgacggcgtcgttcctcgtcaagaagctctccgtctccttctcccccgccgcggccaaccgcgtggtgcacgagatccggcagctcgccaggtccggcaacgacacgcgcgccttcatcggggaggccggcgccgtcccgctcctcgtgccgctgctccactccgacgacaccgccacccagctcaacgccgtcacggcgctgctcaacctgtccatcctcgacgccaacaagaagcgcatcatgcacgccgagggcgccgtcgaggcgatctgccacgccatgggctccggcgcgacgaggcgcgccaaggagaacgcggcggccaccgtgctcagcctggcgtccgtccattcctaccgccgccggcttggccggaacccacgcgtcgtcgagagggtcgtgcacctcgtgcgcaccggcccctccagcaccaagaaggacgcgatcgccgcgctcctgtgcctgtccggcgagagggagaacgtcgggaagctcgtggaagccggcgccgcggaggcggcgctgtcggcgatcagcgaggaggagaccgccgtggcggtgctggcgtcgccgccgccgccgtcgtcgtcttcttcgtattcctcgtcggcgtccgacggggagatcctccgatcgctgcaccgcctggcgagggatctggctgcggcgcggtggtgcgcctcgtggccgagctgcggcgcggcacggagtggtcaagggagtgcgcggccgccgcgctggtgctgctctgccgccgcgtgggcgccgccgtggtggcgcaggtgatgtcggtctccggcgtggagtgggcgatatgggagctgatggccaccggcacggagcgcgcgcggcgcaaggccgcgtcgctcggcagggcatgccggcgttgggccgcggcggagcaaaccgcggagtaccccgccacctccgacgtcacgacgacggccattacagcgtcgtgaaattccaccacggccacattgattaattcataggagcagataaaatttcgattttttttcccacgcacaacgaatgcttgtacaaaaaaaaaaattgtttcttgccttcaaggccttcacgattctttggttcatgggaccagtttgagtaattgataaactgcacatacaattatacg

SEQ ID NO: 24088 - DNA, 1142 bp, Oryza sativa
  ref <308>: DATABASE ACCESSION NUMBER: AK099530
  ref <309>: DATABASE ENTRY DATE: 2002-08-28
gacgttccactcttctcttctcccgattttactcccaactttttttttcctctctctctctctctcgattttctcatctccactgctccacgcttccagggaagaacgtagaaatggcagcttgcttgccatccctctcaccgccgccgcatcaggcgccggtgccggcggcgacgaccgcgctggcggggaacctgacctcgtccctcctctccctgcccccgccgctgccccgcctcgccgtctcgcaccgcagggcggtggtcgccgcggcctcgtcccggcccccgcccccgccatcgcgggaggggggtgatggtggtggtgaggaggaggaggaggtggagagggcgatggggatggacggcggcatccctggcacctccggcgagttcctgcgccgcgtctcctcccgcgcgtacggcatgcggcgccacctcatggaatcgctcgactccctcgcctacgatgtgttggagacaaacccatggagagaagactccaaaccagtctatgtactggctagaagagataaccatctatggacaatgaaaacccgtaggagtcgcagtgaagttgaaagggaacttggaatgctcttaaagggagggggttcaggagttgggactaaatcaaaatactctggttccaagtttaacatgcttgttgaagatatcagagagggaatactggtatttgaagacgaggacgatgctgcaaaatactgtgacattctacagggtggcggccaaggttgtgaggggattgcagagatagaggcatcatcggttttcaacatctgccataaaatgaaagctcttgccgtccttttccgtcgtggtaggacccctccattgcctcaaagccttgagcgcgacttaagggcaagaaagagatcattggaagactagagtctttctgatacatagtatagaacttctaattgtatattcgtctagctgttgaagcaaaggccctaggccctgtatactacgtggtatgtagatccacaatagcacgtggtacatacatccacaatagcctaagaggaaaggaagtcaaatctgacagaaaacatgtccaatagctcgagatattaacaatctcagtaaattgattattcttgccattatgtacattct

SEQ ID NO: 24089 - DNA, 1161 bp, Oryza sativa
  ref <308>: DATABASE ACCESSION NUMBER: AK099531
  ref <309>: DATABASE ENTRY DATE: 2002-08-28
gaagtagctccgtgttgtagtgttgtgtagcagtagtccaccgctgagaagctagcaaagccagccatccattcagcgcagtactctcgggagagctagaagcgatctattctagccacaaggaggagagataaacgtatcgaaatggagcacatcgcgaggttcttctttggagtttccggcaatgtcatcgctctcttcctgttcctttcgccagttgtcaccttctggaggatcatcaagaagagatcaacggaggacttctccggcgtgccttacaacatgacacttctcaactgcctgctatctgcttggtacgggctgccgttcgtgtcaccgaacaacatcctggtgacgacgatcaacgggacggggtcggtgatcgaggccatctacgtggtgatgttcctcatcttcgcggagaggaaggccaggctgaagatgatgggtctcctgggcctcgtcacctccatcttcaccatggtggtgctcgtctccctcctggccctgcacggccagggccgcaagctcttctgcggcctcgccgccaccatcttctccatctgcatgtacgcctcgcctctctccatcatgaggctggtgatcaagacgaagagcgtggagttcatgccgttcctgctctccctgtccgtgttcctgtgcggcacctcctggttcatctacggcctgctcggccgcgaccctttcatcgcgatccccaatggatgcgggagctttctgggcttgatgcagctgatcctctacgcgatctaccggaaccacaagggggccacgccggcggcggcggccgggaagggggacgccgccgacgaggtggaggacgcgaagaaggcggccgccgcggtggagatggccgacgccaagaccaacaaggtcgtcgccgacgacgccgacgccgacgccgatggcaagtcggcggacgacaaggtcgccagccaggtgtgacgcgttcggggccccgcacggcgcccggccgacacgcacggaagaatgcagcttaaagcattgttgctgctgctggattgattagtggttaagcagattattgctgtcgcctttcttgatttttctttttactgatctctgtctctcgtgcccgatcgagagagtatgatactgtatttcccgttctgttcttgc

SEQ ID NO: 24090 - DNA, 854 bp, Oryza sativa
  ref <308>: DATABASE ACCESSION NUMBER: AK099532
  ref <309>: DATABASE ENTRY DATE: 2002-08-28
ttgggtgagatcgagctgaaaaaaaaaagagaggccacgaagagagctcagctgctgcctctagcttacttggtgataaggaggaggaggaggaggagggcaccgacatggccgcagccacggcgtacaccgtggcgctcctcggcgccaccggcgcgcgcgtccccgccgctccacgctccgccgcgcttctgccgcgccgcggcggcgtgctccaaccgctgcgcctccaggacgcgccgcgactgtccctgctccgcgtcagggccgcctccgacgacacctccacctcggccagcggcgacgagctcgtcgccgacctcaaggcaaagtgggaggcgatcgaggacaagccgacgttcctcctctacagcggcggcgccgtcgtcgccctctggctcaccaccgtcgtcgtcggcgccatcaactccgtgccgctgctccccaagatcctggagctcgtcggcctcggctacaccggctggttcgtctaccgctacctcctcttcaaggagagcaggaaagagttggcgaccgacatcgagaccttgaagaagaagatcgctggaacggagtaattaagcagctgcatttgtccggggaagttttggggggtgactctctagagtgcttgctgctgcttcctctgtgtgatgtttgtatatctctacgagaatatgttctgctcccatgtgcagtaacagcgtagtgcaaaaactgtatcaaacctactatcagttgtttcttcgaaattcaaaacaatttcttcgctttcttgttgcgtggaagtgttcatataatctggcgtatgacaatgagaatatatatctcggagaatggttgatcgactcatt

SEQ ID NO: 24091 - DNA, 1037 bp, Oryza sativa
  ref <308>: DATABASE ACCESSION NUMBER: AK099533
  ref <309>: DATABASE ENTRY DATE: 2002-08-28
ggttttggtagtattccattgttcctattaccacttcccaacgaactaaccgaagccccggatacaacaaaagagaagacgcaaaggaatcatcagaagcagcagcagcacgcgaccatgggcgacgccgcctccaaccaacctgttcttgcggcgagcgatcttggccaatcgaacttggacgccggcgccggcgcgggagcagtcggcggcggcgggttcatcgccctcgacgtcagcgccctctcctcgctcgccggcgacggcccggacaccacggcggcgccaccacggacaccgaaggtggtgaggtcgctgtcgaggaagggggaaaggaagccggccgacggcgacggcaatggcgccgccgggacaggcaagaggccgccgctgtcgccgctcttcgtgcatgtggcggccgccgacgacatgggcggcctcggccggctcgtccacacgccggtggccggcacgccgggagggaagtcccggcggctcgggcggcagccggcggcgccgtggctcgatccccggagggtggtcttcttcttcgccacactgtcaagcgttggaacgttgatcctgctttacttcacactctccatgagcaagatgggcggcgacagcggcggcggcggcagcagcgatgctcggtgaaacgccggctgttgaaactgaagaaaaattttcgttttgttctcaaacctcaatgcaatctgtaaaggaggcatgatgttgctacaaagacccaggcatcaaaaaaactgatgctcttctaagggtcaaggaagaatatagagtgaatggcagtgaagagatcaggctgaatggggtctgatggtgaagtatgcgatggtagttgcattctcttctctgttgctgtcatgatttcttcagttatttttctcttcttttttttgcataaaaaggggtacatcatacatgtcgctttgaagcgatgatactagatttttcatccttgatgttgttgcagacacacaaacaatcaaaaatacaaatggacacagatgtatttg

SEQ ID NO: 24092 - DNA, 503 bp, Oryza sativa
  ref <308>: DATABASE ACCESSION NUMBER: AK099534
  ref <309>: DATABASE ENTRY DATE: 2002-08-28
gacttctctccccgagccgccgccggagagcaagaacacggaggagcgagcgggtcgtcgagggcgatggcgggaggcggcatgttcggcggcgccggcgcgttctgggcgacgcgggcgctggaggtggtgaagcggaacgactccccgggactgctctggaagcggatcaagctcaccaccacccgcaagaacaacgccaagaagcgcctcaagcgcctctggcagaatgaggcagttataagggcttgtggtgaagcagaatcgtcgtcgtcgtcaacatcaaacaccgcatcggcctctgggaaacaacagtagatcccaaagtcaatctgatgacatgcacacaggtttaaatgcaatttgaaaaggcctctgcatgacaatgctgaaagcctctccatgtttccaagctttgttacttcatcaactggaacaagtacatgcatgtacacatccaaccttttttcatcaagaggacacatacatcattgcttgctgcc

SEQ ID NO: 24093 - DNA, 1080 bp, Oryza sativa
  ref <308>: DATABASE ACCESSION NUMBER: AK099535
  ref <309>: DATABASE ENTRY DATE: 2002-08-28
gttgtgaaattgccatccaaattgctctgcgcaaaacgcgtagccaaaacacacagcaccgcatcccgccgccgccgccgccgtcgccgccggcggcggaggccatcgcgaacacaagaccggcatacgccattccttcgcgcgctggttagctcctcccttccttccttgcctccctccgactccttcctggtgtgagtaaactcagcgctgccgccggttgctgccgctgactcatgtccttcaggctgcgccatggcacgccgcgtacccactcgagccgagcgcgctccgccggcggccctcgctccgtgggcgcgacccctcgctcggagggtgcagtctgtggcggtggcgccgaggacgcacgccacgtgttcgacgaattgctccggcaaggcagcggcgcctcgatgtacagcttgaacggcgctcgctctcgccgacgtcgcgcgctacatccccgcggccgctgtgtcccgcttcaaccgcatggcccgagccggcgccggcaaggtaactcctcccaccgtgcacacctatggcatcctcatcggctgctgctgccgtgcgggccgcttggacctcggtttcgcggccttgggcaatgtcgtcaagaagggatttagagtggaagccatcaccattaatcctcttctcaagggcctctgtgccgacaagaggacgaacgacgcaatagacatagtgctctgcagaatgatcgagctcggttgcataccaatgtcttctcctacaatattcttctcagggggctgtgtgatgagaacagaagccaagaagctcttgagctgctccacatgatcatggctgatgatggaggaggctgcagagtgtgtccagtaaggcctgctaagattcggagaccaggatcagcagcaaaggctctgaagtacaagctcaaccggatgagcaaaaacagaactgttttgctcgtgtatataagcctatcttggctctcgtagctagggtttggtgactcgggaattatactctatttttttatttttgatgttcttttgtgcttaatattaatatgctactatatgtgtttgttcgggt

SEQ ID NO: 24094 - DNA, 1598 bp, Oryza sativa
  ref <308>: DATABASE ACCESSION NUMBER: AK099536
  ref <309>: DATABASE ENTRY DATE: 2002-08-28
gtttgatgccgatgccctcctcctcctcctcgctcctctccgctatccgccgcctcctcgcctcgctcgcgcgctcccctcctccagctgccgccgcggcgatgccgccgtcttcgccggagccggaggaggaggggatggggaggagcgacgccggcgtcggcggcggcggaggaggagaaggcgggggagggggaggcgggagggcgctgagctacgggaaggcggagtactgggacgcccgctacgtggaggagggcggcgcgccgtacgactggtaccagcgctacgccgcgctccgccccttcgtccgccgcttcgccccgccggaatcccgcgtcctcatgatcggctgcggctccgctcttatgtcagaggatatggttgatgatggctatacggagataatgaacattgacatttcttcggttgtaattgagattatgagaaagaaacacttcaatattccacagctgcagtgtatcctaaattgcttttccattttgtttctttctccacctccactgaaatttaccatccattggtctccttatgacacttagacatgcaaatggatgctagggacatgagtatattttctgatgaatcatttgattgtgccattgataaaggtatgagttcttaaaatggtgttctagcaattattgaagcatacatgtaatgccacttgttcatttttgtgcatttcttctaggtactttggactcattgatggtaagtaggctacattattcattgttccttttccttattctggtacttcttcaacattgtgatcttgctacttccatagtgtggtgtgggtgctcctctcagcgcagctcagatggttctagaagtagaaaggtttttaatgtcttgcttaccccactaagctatcattcacagtctcatctgcaccaagatacgccatagatttcaatagtgctgctgcagactcaccagctcaaccatttgattgcaggcttcttaaaccaggaggaatctttatgctgataacttatggtgatccatcggtgagggtacctcatctgaaccaatcaggatgcaattggaaaattgtactatacattctgcccagacccgggttcaagggcaagacgaaaaggtctgtcttagatcctgttccaatgacagagagtggtgtactaccggatggctttgttccagaggaccctgactctcactatatctatgtctgcaaaaagttgcaaggatcaacagggacaagctccccaactatacactacgtagacacacaagatacagcagaatgaactttacactgattcatcttacaacgtttgtaaattgttataatttgtacaagatcaaatgatgtgatgttgccaccattgtggccatccaaagatgcaaagcgggcctttgcaggtacaaatacttgttgactgatcatgtgagaatcagcgagtcattgtattgtgctaccactgcttttttttgtgttgtgtgggaaggcacaaagaattggttggcacatttgaggaagaaaatgccctcagaaacatttgttttcattcgttggtaatgtgaaagcaattggcattttttaaggc

SEQ ID NO: 24095 - DNA, 1191 bp, Oryza sativa
  ref <308>: DATABASE ACCESSION NUMBER: AK099537
  ref <309>: DATABASE ENTRY DATE: 2002-08-28
gtgcagcacactaatcgatcaccgcactatacacaatacgaccattagctattactagctagctatatatccctcccttgtttctttcgagcaagagcgatggaaacggcgccggccgcgaacggttgtagtggcggccgccggctgcaggaagaagagcccgcagctcggtggtgcgcggtgaccggtggccgcggcttcatggcgaggcacctcgtggcggcgctgctccgctccggcgagtggcgcgtgcggatcaccgacctcgcgccggcgatcacccttgaccccgtcgaggagaaggggctcctcggcgaggccctccgcgacggccacgccgtctatgactccgtcaatgtttgcgacataacgcagttgaccaaagcttttcaaggggtggaagttgtttttcacacagctgctgcagaccctgacatcaacgacttccaactacattacaaggtcaatgttgaagggacaaagaatgttattgatgcttgtgtaacgtgcaaggttaaaaggctgatatacaccagttccagtggtgttgtatttgacggagttcatggcctttttgatgtagatgaatcaatgccatacccaaacaagtttcctgatgcatatgcacaaagcaaggcagaagcagagaagttagtgagaaattccaacggcatatgtgaacttctaacttgttccatacgtcctggtagcatttttggccctggtgacaccattgtaccacatttactttcccactggagaacgatgtttattatcggcgatggaatgaattgtgatgattttgtatatgttgaaaatgtggtacatggccacatttgtgctgagaaaactctctcgactaaagagggttcaaagataagtggaggcaagaatgtgtgaattcattttgcttcgaccatatctaagacctcatacatggagcaagttctattgctattgaagatgtaaaatttatttgacatggatgataaccaatggtcgatggcaatgatgtctacacatataagtttgatgtattttttttacaaatggctaagtattgtaatcttgttgggaacaatattgattcttattggagaatgggcttccacttgttgcagtcaacataattgtaatatatatctgtgagatttttattgctatatctctttatgcaaaaacattaagtct

SEQ ID NO: 24096 - DNA, 1006 bp, Oryza sativa
  ref <308>: DATABASE ACCESSION NUMBER: AK099538
  ref <309>: DATABASE ENTRY DATE: 2002-08-28
ggaaacacaaagagagcaaaacttaagctagctctgggtgctgcattgtctgcagtttacaaaggtagatcaattagaggagaatgaggcagcagcagcagcagcagcaggagagcaggttcaagaggacctgcgtgttctgcggcagtagccagggcaacaagaccacctaccgcgatgccgccgtcgacctcgccaaagagctggtcgcgaggggcattgaccttgtgtacggcggcggcagcattggcctcatgggcctcgtctcccaggccgtctacgacgttggcagacatgtcattggggtcatccccaagactctcatgacccccgagataatcggagagacagtaggggaggtgaggccagtgtccgacatgcaccagaggaaggctgagatggcgaggcagtctgatgcattcatagccctgcccggaggatacggaacactggaagagctgcttgaagtcatcacatgggcgcaattaggcatccatcataaaccggttgggctgctgaacgttgatgggtactacaactccctgctcacattcatcgaccaagccgtggaagaaggcttcatcagccccagtgctcgccgcatcatcgtgtcggctccaacggcacaagaactcatggacaagcttgaggaatacgtcccttaccatgatagggttgcgtctgggctgaactgggagactggtcatctagggttctaagctgttgcagcgagcttaattaagcttaaatgaattgaagaaaggcgaaccatcgagcagccatcaacattaagcattgcttgttaattgtgctcgatctatgtagtagtagtagcagcttgttaaccagtctagattgtcttttttttttctcctacgaagcatggagtttgtcatctcagtttgggtaagaaaaactagtagcacctaatcagccatatatcgatgttcaagatccagtaactgagaattaattgacactaaaccaagtgtcaaagattgacccg

SEQ ID NO: 24097 - DNA, 3101 bp, Oryza sativa
  ref <308>: DATABASE ACCESSION NUMBER: AK099539
  ref <309>: DATABASE ENTRY DATE: 2002-08-28
gcggcgtcacagtctcgcatcgcttcgcttcccagtttcgggtctctcgcttcccccgcgcggatctccacttcggctctccccggctcggctcggctccctccacctcggctcggctcaagtcgagtcgcttcgcgaaggaaaaggataagcaggagacggctcgactcgagaggaggaaaaagaaaagagaagaaaaaagagaaaaaaaaaagaggataaggcggggaggcgtctcgagccggcggccacctcgcgaccctcagatccgcccgtctccggagcagatccggctcgccggcggccgcacgggaggaggaggccgccgtccgccgcggatccccggcctagggtttcgccctcttcagatccggcttcttcagatctggcgcccgggcacatgacaccgacggtcctcatggagtttgggcagcagaggcagattaagcggggctacgatgaaatggcgttccggggcatggcgtcagcggcgccacggggttacgcggagaccgttggcgagtcggagggcgcggcaggcagccccgttcgtgttgactccgaggactcttcggcccccaagcgcaagtgcatcagcctaaacagcgacggcttcgatgtcaagcgggagattttcgtcccagccaagatgtcctcctccgagaggaggcatctccggaagaggttccgcacagagcttgattcggtccggaatctcctcaagaagccggagtttgctgtccctgtccctgtcaatagagctcccgcgctctcgtcctcggctgcccctcgaggtaagaagggacagcgtggtaaccatgtggtccgtggtgccaaggggcgtttcttgcctacaaagccccgacctgaggcttccacggtgttgactgaggatgcgatttttaagcaatgcgatgctattctgaaaaagctggtgactcagaaatgtagtaacatattcgactccccggttgatgctgttaagctgaatattccagattattttcaaatcatcaagaaaccgatggatcttggaactatcaggaataagcttgactctggttcctacacgagtccatctgaatttgcagccgatgtacggctgaccttttcaaatgcgatgacttacaatcctcgtgggcatgtagtgcatgattatgccattcaactaaacaagatgtttgaatcaagatggaggacaattgaaaagaagctggcttccattgccacagaggcgcacgtcgaggttgacagggctggctcaaagaggaggaagactccccctgtggactgcagtgaggtgtcaacagagtgtgtgaggccaacagagtctgttagaccaacagagtctgtaaagccaaaaatgacattcgaggagaaagaatcatttgggaactgtttggcatctttgtctgaggatccggaggtaccttcacacatcattgatttgttgcagcaatgcattgacaacaacacagatcagcttggtgatggagagatagagattgatatccatgctgtcagtgatgacctactattcgagttgaagaaacatgttgacaagtatttgcaagagagagagcagagccagcaggcaaaatctgagccttctgagaatgaggctgctaatgtatctggccttagccactcctctacaaatccctgcaaaggtggtgatccagttgaggaggatgtagatatttgcgggaatgcatcccctatattgatagaaaaagatgcacacaacaatcctaacaagtgtggtagcccaagtagttccagcagtgactctggatcttcttccagcgattctgagtcgggcagtgacagtgaaagcgaacaagaaaaaggtggtagcccaggaaagccgaagggaagtaagagatctgaacaactggtggagcaagaaaagagtgatgttataagtccagtcgatgccatccgtcctgctgatgatgtggagctccgtgagcaggataacgagtcaaagcctgccccagagggggagaattcaaaacccgacaggcaagtctccccagacaagctcttaagagcagccctccttaggagtcgttatgctgatgtgattgttaaggcacaggggattctcagccagggtggagacaaacaggaggagctggaaaagctccagaaggaagagaaagcaaggctgttggctgaaggaaatgcagctatggaagctcgaagagctgaagctgaagctgaagccaagcgtaaacgggaccttgagagggagaaagctcgccaggccctgcaggagatggagagaacggtggaaatcaatgacaacctccatctaaaggatttggaaatgcttggaacggcaaccacagaacatattgtgagttctgttgatgagactagtcctgagcattcccaggatggcatgcccagttttcttcctggatcaggcaatccattggaacagctgggactcttcatgaaagcagatgaggaggaagaggaagaagatcctagcagtgtccccagcactaaagatgcagaggaaggagagatcaactagtcccagtgcttgtgggctagttgctgaattagctgtgcatatggtagacgctccttccttctgcttccaaactagctcgaacaaggccctcaattttgatgctgctggatgtcgtaaattatgcgcctggagtatcgcggtaacctgccctacaaatcatcatatgtgcttggaggacggcacagccataatggccgcgacttgcggtactccgagctgttgtcgggtgtatgtatgtagccatctttgaagtgccatggccaggccgcaaggtgggtaagcaatgagaggaccaaatggttctttgcacatagtgaattagtgatccaggtgctaaagctcccagcggcaaaaggtgttgcccagcggcttatagatttttcgttcgttcgttctctagttttcggtttgtccaattgcttcctgctgtaaattcgaattttgatgtagtggaggaagcgatagttgtttgctgggcatatgggcaaataggaaaaagcttctgcttttcttgtttacagggaaaaaaaaagaaaattcatgcgtcttttagcgc

SEQ ID NO: 24098 - DNA, 2565 bp, Oryza sativa
  ref <308>: DATABASE ACCESSION NUMBER: AK099540
  ref <309>: DATABASE ENTRY DATE: 2002-08-28
gggttgcttcctccgaaaatcctcatcctctccattgaccagacggcggcgcaggcgcaggcgctcacctccctcctcctccgcggcatccccaatcgaccagctggctcccctgcctcctccgcgattttgatcctaatcacccatgtctgctgaagtcagcgaggaatatccttatttcctctcctgctacttctggttcatatattgcataaaattccgagatttcacttgatacaagtggatcacctggagttttgtgctaatacttcctatcatgtgaatcagttgtagttagcataattggcaagactcaagttttctctcatctgggttcagaaacatttgtcggttgagtgctcgatctaaactctgcttgagtcttgccgaagattgtttctcaacaatcacgtcttctgttctctctgaggttggaccaatctcccttttggtctgatcaacctcctgatctcccttaagtgaaccgtcctgctgtgttcacgcaatacaatcttctgaagtcctctcttgttccttctgtgctcaaacatcaaaagcagctctctcctaagttctcttgattgtttgtgctcctaaattctgttgtttgagcactcaaacatttcccttactggtcaatcttagatcacttgttgattattggtattggcattatttggtgaagcatttctgcttgtaccttaaacaaaggtctctgttgtcttattggtgctgaaggcaagatatacactgcagtgatggctcaaacttgcttgccacctggctttcgttttcatccaacagatgttgaacttgtttcatactatttgaaaaggaagattatgggaaagaagcctcttattcaagctatatcagatgttgaactgtataaatttgctccctgggatcttcctgctcaatcctgtctccagagcagagatcttgaatggttcttcttttgcccacgagacaagaaatatcctaatgggtctaggacaaatcgttccacaccaaatggttactggaaaacaagtgggaaagatagaacgattgagcttaactctcgcattgttgggtcaaagaaaacactgatttttcatgaaggcaaagcacctaaaggcaacaggactgattgggtgatgtacgaatacaaaatggaagacaatcaattggtctctgctggtttctcaaaggatgattttgtcctctgcaaaattttcaagaaaagtggccttggtccaaggattggggagcaatatggggctccatttaatgaagaagaatgggagcatgcagatgctgaaatgtttcccttgctgccaaatgttgaaacttctgtgtttccattgctgccctcttcagaggtagtaaattctactgatgatacacgtgttcagccttctgttgctgccagagctattgaggaactacctgtgcagcatttacctcatgtatgtgctgggaatggatcaacatatcaaaatattactgttactggtgaaagtgctctcatggaactgccttcccagcactctgttgaatctattggtgatgaggtagtttctgtggacaactgttctaatgtggtcaataatgcagacagtcctgtaattgaggggcttgtattggaggaactttctaggtttttaactgattctcctcatcatggcaaccctgttggggagcactctggtctcccaccaatgtctgaggctgaagctcatgcttttgaggttagcacaaatgatctgtacaatgaaattgcagggcttgctgaattgggtgtgccaaatggtgatggattttctccgtccaatgctggtgttactgaacaacagcccacatactttggagttcctaacagtgaaaattatgtaaatatggatgatatctttgctccagacacaagattatcctatgcatatcctttgccaaacaaccaattttggcattatcccatggatcagttcacatacagtactactctatctgctgcctttccatctggtgactcgcgtccaactatgcgcattgttgatgatttacctgctgctgctaataacggtggctttgcttcaaaacccagcatgcagttcccactgtcataactaagtccagaaccgttctagaggactctgatactgatgacctagtgggattccatatgctggcagtactgcgcaacagatgtgtcttcatggccacctgctgccgctccgagctaagccaaacctcgctgaatctttctcgtggactgttgctggatttaccagtgctcgaactggtggtcactgcaagcattgtgaggccaacaatgtacattgttttgaaggtttggcctagttctcgatggcgatgctctatgatccgaacttgtctagcctggcgcgctactgaggatcagatattcgctttgtgttaccttatttacttgctgctgaataaagtttgtttatcaaactagtgtatattgtgttatgactgcacttaaaccttatgtaagtttgcatggtttggcctactatttacttgctattaatcttctcctaagttcgttgttttggc

SEQ ID NO: 24099 - DNA, 1752 bp, Oryza sativa
  ref <308>: DATABASE ACCESSION NUMBER: AK099541
  ref <309>: DATABASE ENTRY DATE: 2002-08-28
gtgaggagacgacagaaggtgaaactacagctgaagtacaggttgcggagactacttcaactgagaaaattgtagaggataaagaactagctgaggagacaacagaaggtgaagctacagctgaagtacacattgaagaaacttcaacaactgaaagaactgtagaggataaagtggtacctgaggagacaacggaaggtgaagctactgctgaagtactcgaggaatgtacagccattgagaaaattgtagaggataataccatagctgaggagattacagaaggtgaaactgtagctgaagtacatgttgaggtagctacagcaattgataaagctgtagaggaaaacacactagctgaggagacagctaaaggtgaaactacacctgaagtacacgttgaggaaactacaacagcagaggaatctgtgggggacaaagcagtagatgagacaacaaagggtgaaactacagctgaagtatatgctgaagaatcaaccgagaaaactgtagaggataccacagttgaggcaccagatgagaaaactaaaacagccaatgatcctgtagaggatgccaccgttgaagagccagataagaaaaccgcagccaatgatcctgtagaggatgccaccgttgaagagccagataagaaaaccgcagccaatgatcctgtagaggatgccaccgttgaagagccagataagaaaaccgcagccaatgatcctgcagaggatgccacagtcgaagagccagataagaaaaccgcagccaatgatcatgtagaggatgctacccttgaagagccagataagaaaactgcagccaatgatcatgtagaggatgtgactgttgaagagccagataagaaaaccgcagccaatgatcctgtagaggaagtcatccctgaagagacagataagaacaccacaaccaatgatccagtagaggatgtgactattgaagagccagatatgaaaaccgaagccaatgatcctgtagaggaagccaccgttgaagagccagctgtggaagctgggacaattgaagagattgctacggctgaagcacgagatgagaaaaccatgataaccgaggaaactgcacaggatcccatggttgaagatgagaaaaccatgacaaccgaggaaaccgtacaggagcccatggttgaagatgagaaaaccgtgacaacggaggaaactgtacaggatcccatggttgtagatgacaaaaccatgacaaccgagaaaactgtacaggattcaatggttgaagaaggtggtacgaatatcgcagctgctgaggaaactgtagtgcatgctgctgctactgctgaggctttggctggacaagcaagttcaaccgagcagaacgggtagcataagctggattcttgtaggttttggatgatattgcggcagtcggctcaactgattcatccaatctggatgtcgtgtggaatcaactctagcaacatagcgatattagtttctagtaactacggcgtatttgctgccttctatataaaccttacatgtagttgtcttgggagcagcagcagtgtgtcacgaatagaagagtttcttcagaaacggtggtgcgacagccagtggaccagctactggattagcatccgaattaagccatgttctttcctactacattttaaggcctttgggccaatctaccggggactcatgattcttgtaccaatcttccattttgtaaactggctgtgttctgtaggtt

SEQ ID NO: 24100 - DNA, 816 bp, Oryza sativa
  ref <308>: DATABASE ACCESSION NUMBER: AK099542
  ref <309>: DATABASE ENTRY DATE: 2002-08-28
gtgctcgtacttcttcacgatcccctcacacttgtcaaagctcaccacctcaacctcagagggatctgccaagcaactgcatacttcaccaaggttaaatttgcctggaaattttatgaaaaggcatccatttggtagtatctgcgaaatacggcctgtagccagtcctccacctctctttcgctgccattcaaactgtgggcttgaaatattggctttcagccgcacaaactgcccaacacagtaggcttcagccatttgaaggtcagagtattcacccttccagagggtgtccactccaatcagacctacataaacagtaccactacggtcaatgctatgaagaattccaacctgagatcgcttcttctcatcctccctaagccgtacccagtctccagcagcgaaaccataggttaccctttccactgttgaagagcgaaccttcaaaggatcatgtaaaccatggatccttacaagaatgtagccatcacgctctccattatcctccattccaactatggttccatcagggacttccatggttgttggactacaagtgtttttaagctttctcgagcgaaccttgtctcccacttgcaacttgtccttgaagaatgaccagttagtgcggcttggcagggctggactgaccatccttagattttcagaatttccctggtcagtattttcgtaatctacatcttttgcactctcaaatgcatctaaaatatcagtcatctgggggcggtctctaaagtcatattcaaagcatccagaaaggacattctctattgctggaggcaaattgtatgg

SEQ ID NO: 24101 - DNA, 877 bp, Oryza sativa
  ref <308>: DATABASE ACCESSION NUMBER: AK099543
  ref <309>: DATABASE ENTRY DATE: 2002-08-28
gtccccgtccccaatccattcgagcttctcttctccaatcgattcgcgatttccaatccatggcgactctcaccatgcagccgatcggtcccctaccgtctactaagcaagaaggcacaaggggagagaagcctgcggagggtggtgccgatttgagtgacatcgactcgggctgggttgttcttgggaagtcggatatcgtcccggcggatttggcagcccagagcctgcgctcatctccgaagacaattcctacatgggctcggtgggtgattggaggtgtgctgcacacagtggtgccattctacgagagagcacggtatgttgaagatgagacggctcgaaatgtggagactgctgctgaggttgtggagcaaatagctgaggtcacagagaaactggcttctaacgtggctgatcaccttccagagaatggatgtctgcagaaagtagtggagaagattgaatacatagctgaggtagtggatgaagatgcagagaaggttgaggccattactgagaagattgagaatttcagcgacaagattgatgctaaagtagaacctatcttcacggagattgagaaggaattcgaagactcaacatcaaatgatggagtaaatgcaaatatataatcactagccctacgtagaaggaaatactctcagctccccattgtgtatagcatatgcttttttttttgaatgattcgttgtacatatgtgtacctttctgtatgagttataccatgcttattgtgacgcatggtggtgttgtggctggtgctcgaaactaaagtagagttagcattgactattgagactgttgagctgtgaaatttcatagactggtacaaaatagaatggttggtactggt

SEQ ID NO: 24102 - DNA, 3572 bp, Oryza sativa
  ref <308>: DATABASE ACCESSION NUMBER: AK099544
  ref <309>: DATABASE ENTRY DATE: 2002-08-28
ccccccccaaaatccccgatttcccgcccactccgtcccctccccctccgcctccggcggccgccgccgccgcaatgccggtgtacaggatccgcggcgtcgacgtcgacttcccctacgacgcctacgactgccagatcacatacatggaccgcgtcctcgaatccctccagcaggggaaaaacgcgctgctggagagccccacggggacggggaagacgctgtgcctcctctgctcggcgctcgcgtggcgccgcacctttggggagtttctgcgtggaggcggaggcggcgggggcgggggcgggggcgggggcgggggcgggagccagcagccgccgtatgggagccagccttctgggagccagcactcggggggttcggcgtcgcagtcgtctcggtaccccgtgatcatctacgcctcacggactcacagccagctccggcaggtcatcaaggagctcaaggccaccagttacaggccaaaaatggcagtactgggctcccgcgagcagatgtgcatccacgaggaagtgagcaaactccggggaaggcaacaaaacaacgcctgccactacctctgcaagaaacggtggtgccgccatcacaactctgtcgctgaattcatgaggaacaacagtgagcttgggagtgaggcttgcgacattgaagacttggttaatattgggagaactaagggcccgtgtccatattacatctcccgggaactttccaagtcggttgatattctttttgctccatacaactatcttattgatccaggaaatcgacgttctttaaatggaataccatgggataatgcagtacttatttgatgaagcacacaacttggagagtatatgtgcagatgctgcatcttttgacttgcttcccaataacctctcttcttgcattgcggaagctcaggaatgcatccaattgtgttcagcaaagaggacctttgaaaattctgctgataaacaatttgaccctgaaaattatgctattctcaaagcccttttaatggcacttgaaaagaaaattagtgaggtggtgattgattccaaggagctgggccatacaaaacctggcaattacatatatgagttcctctctgaactgaatattacttctgaaacatccaaaaagctaattgacacaattgatggtgcttctctattacttgaggaaggaaattctgctgaaactggacctgggatgaaggcgaaggctactgtctgtagattggaaacaatcagggacattcttgacataatttttagaggtggtggtcaaagccatgcaaagtattatcgttttcatgtgaatgaatgccaacaaaattctggagatgctcttaaagttttgggtaaggtatcaaggactcttagttggtggtgttttaacccagggcttgctatggaagagtttctcaagttgggtgtgcgctcgattatattaacatctggcactttatctcccttggattcacttgccctggaactaaacctggaatttccagttaggctagagaacccacatgtcattgcttcagatcaaatctgggttggagttgtgcctgtaggcccatcaggacatccacttaattcttcttaccggacgcgtgagactctgaaatacaaacaagaattgggtataactattgttaatttcgcccgcattgtaccagatggtctgcttgttttctttccgtcatattctatgatggataagtgtatcaactgctagaaagataggaaccatgaaaattcaagtgatgagcacacaatttggcaacgaatctgcaagcacaagcagccagttatagagcctaggcagtcatcgaactttccaaatgcaatcgaggattatgcagccaagctacgtgattcttctacaaccggggcaatattttttgcagtttgtcggggcaaagttagtgagggtcttgattttgctgaccgtgctggaagagctgtaatagttactggaatgcccttcgctaccccaactgatcctaaggttcggctcaagcgtgattatttggataagctgggttcagcatctaacaagaactcaaaggcttgacaggggaggaatggtatgtacaacaagcggcaagagctgtcaatcaggctgttggacgtgtcattagacatcgccatgactatggagcaattatttattgtgatgaaaggtttgtttggcaaaattatcaatctcagatgtcatattggctgcgaccttacatagaatgctataaaaagtatggggaagtagtccaagggttaacaagatttttccgagataaagtgtctattgattcttcaaagccaaatgagacagattttaatgataatattgtactgcttgcagacaaacataaacctcaggagactatatctgctttggctgtcaccacagcaaatgagaaccagagaactgcattatctgtgaatccaaccaccaaaagaagtaactatatcaagtttgcccagatcactcctgccaatcgctctaccctttctatgaaacatggctgttcatctacttcgcagctcttatactcaggagacaaactgtctacggatgctcaggttattgatttggctgctgatgtggcaacaagtcatcttgcaggatatagatttaagtccttaggacctaaaaaggctaaagtaatggttggatccaaagatgtttgttttgatgatggatctccaaaattgcaacataatgttgagtcaagagctttggctgggtgcttgggtgagcaatctacagcttcatcaaagaagagtaatattacacatgcacctggaaacagtggggctattcatgagaaatctggaggccaggaatctaatgcagggccagccttcttgaagctggctcgagaaaagctcagtactgcagagtacagagattttgttgaatatatgaaggccttaaaattgaaaaccatgcacataaaggactcacttgatgcaatagcaaaactgttttcgtctccagagcgactcccacttcttgaagggtttagggtttttgttcctaagaatcatctttcattatatgagcagcttgttcaaagctatactgtgccaaatacatgatttgctgcactatttaaagatcagtttctggaaacttctgtggtaaaatgcaacccgtgcttctcatatcataattgtgccctcgaggctttaatggtcaattcaaatagttctgttgaatttgttcccatcatctgggacagggggggcattgaagaagaaatgtaaagcctttagagttaactgatgtcatagttttctaagtgactaatgccctggcagttttgttaactaatatacattatccgattccactaggtatcatgccagccagtgcgttgcagatagtggagtatgtgtaccctactaggttaactaaaacatgtattttcttcatcgcgagtgaaactgcattattagctaaactagagtggattgacgggaattgcccacgcgtctctatatataggtccgtgtaaattactaaatcaataacttgaatgtaattatcttttg

SEQ ID NO: 24103 - DNA, 1073 bp, Oryza sativa
  ref <308>: DATABASE ACCESSION NUMBER: AK099545
  ref <309>: DATABASE ENTRY DATE: 2002-08-28
gacggagctcgagcaacaaccacccacgcacatcaaggagtcatctcaccactcaacgacagcctcgcacaagagcagggaggaattttcggttgttcctcgtcccaaggatcaatagatggagaaggcagcgtgcaacgagcatgtgatcgggatcccagtgagcaacagggctttcggcatcgaggagccggatttcccaagcgaaggagcagccgcctaccacgccgaggcgaaaagctctgcaaccgcgcgtacgagctccagatttggcaggacaggggacaggctcgctcaaggcatcaaagaacatgtgactctaggaccaaaactgtacgagaccatgaaaggcaagctgacgctgggcgcgagaatcctccaggcaggcggcgtggagaaggtcttccgccggtggttcgccgtcggcaagggcgagaagctcctgagggcctcccagtgctacctgtccaccacggccggcccgatcgccggcatgctcttcatatcgacggagaggatcgcgttccggagcgaccggtcgctggcgctgaccaccccgagcggcgacacggtgcgtgtgccgtacaaggtggccatccctctgaggagggtgaagacggccaagccgagcgagaacaagcaccggccggagcagaagtacgtccaggtggtgaccgacgacggcttcgagttctggttcatgggattcgtcagcttccaggtgaccctgaagaacctggagctggccgtcgcgcaggcgcagtgatcgatcgatctctgatgaaacaaacgtcgaagttgggtcgtcggtttcttggtcgtgtgccttgtgtgtggtctggttaatctgttgtgcatatgtggtagcgtcgtaggtgtttgtggtggattgcttggcgtttttggctttggagcaagtccggtacacatggtaggagaaattttagtgcatcaaatttcttgattggtgttggagaaaatagtgccacggcaaaagtgccatcatatacatgtggtatgtacaagatcaatgagaaatccaaaaatgtttgttcaacactacatactacagc

SEQ ID NO: 24104 - DNA, 1019 bp, Oryza sativa
  ref <308>: DATABASE ACCESSION NUMBER: AK099546
  ref <309>: DATABASE ENTRY DATE: 2002-08-28
ggcggcctcgcctccgcccaatgccattccgccgcttccccgctgagagatcgatccccaccgcgccgccgccgccgcagccgcagccgcagccgtcgccatgtcctcctcatcctcttcgctgctctcctcgctcgccacgctcggcctcgggtactcgatcgccatcgcgctgggattcctcgtcctgctcgcgtcgctcctcctcgcgtcatacttctgcttccgccgcgggggcggcggcgggcacttctccggcgtgctcaccccgagctccagctccagccacctctccatcaccgtcccgcgcgtgctcttcgtcgcggaggggtccgagtcccccgacgcctactcctcgggcgtcgcggccgcgtcgtcccccgtggggctcgaccccgcggccatcgcgtcgtacccgaaggtccccttctacagcggcgccggcgcggacgccgacgccatgtgctcgatctgcctcagcgagtacgcggacggggagatgctgcgcgtgatgcccgactgcaggcacaggttccacgtctgctgcctcgacgcctggctgcgccggaacgcgtcgtgccccgtgtgcaggtcctcgcccatccccacgccggtggccacgccgctggcgacgccgctgtcggagctcgtcccgctctcgcagtacgccgccgatcggaggcgcagcaggtgacggacacattggtgcaattcggtgctcttaaaaactggagtactactatattgctcttcttttttttatccttttacgtttattaaggatgtaaagtttatgtattgcttgattggtcaggcgggctttaggggaggtttgactgtagggggttgtgcttaggttatttagagaaggtaattgtttgtttgatattactatattacttcgagcaaattttgtcatctagaagtacatgtcttgagtaaggaatagttgtacatacattgtgtttgtttctgtggcagagttcctcatgatattctaatgtataatttccgttgct

SEQ ID NO: 24105 - DNA, 1020 bp, Oryza sativa
  ref <308>: DATABASE ACCESSION NUMBER: AK099547
  ref <309>: DATABASE ENTRY DATE: 2002-08-28
gtggacgggaccggcactggaggacctgctcccacaactctcccatgaggagcaactacgattgcacaaccacttgcgtgagcacgagcgtatcctcaagtggcacaacaagaattctcctccaatatcttctctgcactcagaaggggagcgtgacttcttcatcattatccatgtccgctacgctctccaccattacaatgccaaacacccagatgaggagtttgatgctgtgaagcctctgatggaatccagtgtacgtttcaggggccaggtgtggttccacatcaacttctgggctcgctcccgcaagagcaaaaagatcaagcgcttctttgctgaggtgcactacaagcctcccagcagcagcagctctgtctgctcttacctgccatttccagtcccaggagctgagaggccacccagcagcagctccgtctcctcggatctgctacttccactcccaattcctgtcgttgaagcatgcaccatcattgaagagcctcttgggcagtacaggaagagctgcgcgttttgtcgtggtcacttagacattttacaccccatgggtcgtaaatttgtttgtggaaacgacaaggaccggtttgagcaacaactcttgccgtgcgggtctatagggcttgagatgccattcacttgccgcctgggtccggcctctgtcaacagtagtcatggggaaaaagaagactagggggaataatgaagtggccccttggacgcccttttgctcgcatcgtttgtgccaatcaagtctggtgataacagaaattgaattgtcttgtactaccttcgtcctcaaaatataagaaaaactaaatgggacatatcctactattatgaacctggataaaaatgattctactcagattcaatagtttcttatattttcaacggagggagggagtaaaacgttagcagtcctcttatcttgtgcagaatatgattgtacactgttcagaactcttgagattcagaatattgtttgcctgagggaggttg

SEQ ID NO: 24106 - DNA, 1406 bp, Oryza sativa
  ref <308>: DATABASE ACCESSION NUMBER: AK099548
  ref <309>: DATABASE ENTRY DATE: 2002-08-28
gatcaaaatcttgcagcacaccaatccattgaagcaaattaacatttctcttgcaaatttcgatctagctagatcatttgcaaagcttgtttgttgatcgatcgatgatggggccgaacgtgtcgtcggagaagaaggcgttggcggcggcgaagaggagggcgtacgtgacgttcctggccggcgacggcgactactggaagggcgtcgtggggctcgccaaggggctccgccgcgtccgctcggcgtacccgctggtggtcgccgtgctcccggacgtccccggcgagcaccggcggaagctggtcgagcaggggtgcgtggtccgggagattcagccggtgtacccgccggagagccagacgcagttcgccatggcctactacgtgatcaactactcgaagctccgcatctgggagttcgtggagtacgagcggatggtctacctcgacgccgacatacaggtgttcgacaacatcgaccacctgttcgacctcgacaagggcgccttctacgccgtcaaggactgcttctgcgagaagacgtggagccacacgccgcagtacgacatcggctactgccagcagcgccccgacgaggtggcgtggccggagcgcgagctcggccccccgccgccgctctacttcaacgccggcatgttcgtccacgagcccggcctcggcaccgccaaggacctgctcgacgcgctcgtcgtcacgccgcccaccccgttcgccgagcaggacttcctcaacatgttcttccgcgaacagtacaagcccatccccaacgtctacaacctcgttctcgccatgctctggaggcacccggagaacgtcgacctcgaccaggtcaaggtcgtccattactgtgcagcgggttcgaagccatggaggttcaccgggaaggaggagaacatgaacagagaagatataaagatgctggtgaagaggtggtgggacatctacaacgacgagagcctcgactacaaggaggaggaggacaacgccgacgaggccagccagccgatgcggacggcgctcgccgaggccggcgccgtcaagtacttcccggcgccctccgccgcgtaggcgcgctcgtcgccggcagtggccgccgtcaagtcttgatagctacaataataattggcgcttattaaggagtgctagctatgattaattaggggacatgatctgcataaacattttagtattgcagatatatcggtcatggtcttacttttgagtgtgtttttttttcttttgtttagtacgagggaacacccaaagtctgtattcagtttgtaaatacgtacgtatatggttggtctaactataaacagatctgcctactatacatgtacgttactgctgatacattttgtagttaataaaggtttttcttct

SEQ ID NO: 24107 - DNA, 643 bp, Oryza sativa
  ref <308>: DATABASE ACCESSION NUMBER: AK099549
  ref <309>: DATABASE ENTRY DATE: 2002-08-28
tctgaacttgagaaaaaagttgttaaatcaagaaagccctatcttcatgagtctcgtcatcaacatgctatgcgaagggcaagaggaacgggtggacgcttcctgaacacaaagaaaaatgaagatggtgctcccagtgagaaagccgaaccaaacaaaggagagcagaactccgggtatcgccggatccctcctgacttacagctcctacagaaggaaacatgaagtagcggctcgaaacctagaacagtggcttctgtccaccggcattcactcttgagggtggattcttgctccagaattgtgctgccatctttcaaatgatcttcatcgtgcaaagtaattatatgtacattcctctgaatgatctatgcaccaattgttgatcctggcagggtaataatctggatgtattgagtccatcacagtgcgaatgtcacgggtagatctgctgttttcaggcaattcattcttggctttctatcccacccgttgttgttgcaagttaagctagcagtacttgtctcagtgtccgtgagacgtttgtgtaagattaggttaaactagaagttgtaatgctgtattaagtgtttgtatttctaatatgaaccgtaacaaggccagagcagaactcgttatacat

SEQ ID NO: 24108 - DNA, 2640 bp, Oryza sativa
  ref <308>: DATABASE ACCESSION NUMBER: AK099550
  ref <309>: DATABASE ENTRY DATE: 2002-08-28
gtgttggcacctataaaaatagagccttccaacctaacgtagaaattgtagctgctctcatgcaaatgtttgatgcccataacccaattgtcaagttatttagggttgcccgtgataggctttctagggcaggtgcacccgatgaccactattttataagattgtttggatctcctgacaagcatggcgatatatttaatgctccagtagcatcagaggttgttggattagttgttggtgacttaggtacaagtgatattggacgtgacctgatggtagaagacaaggctggcaatctaaggaaagttaaagaagatcactgtaaatttatggcgatgcagtacccaattttatttccttatggagaagatgggtatcatcaaaacattgcatatagacagtgtcgaagatcagcagggattaaacggaagcgtgtcacagaggtagaatattatgcctataggcttcatgatagaggtgatgatttcaacaccctaacgcgttgcaaaagaggtacacaagcctatgttattgacgcatattgttgcatggaagaatctcagttgagtcactttaggactaaatcatttcaacagaaatatagaactgctcctctcaaagaaattcatgatacaatacatagaggcattatagaagggtctgaagcaggccaaagaattataaaaccttcttcctatgttggagggccacgctatctataccaaaactaccttgattgtgttgctctttgtcgaaagtatggttgtcctgatttatttatcactttcacatcgaaccctttatagacaaaaattacttaggctttggctctaattcctgggcaacattcatcgaacagcctgatattgttgatcgtgtgtttcatatgaagctgcatctcttcatcgatgatatcacaaagaatgaattttttggtccaattactgcagttgtatacattatcgaattttagaaacgtggtcttccacatgtccatattattttatggctaaaaaaaactggtgcattgactgctgatgaggttgataagttcatatcagcacaattacctgatccttctgtcgatccaattggttttgatgctgtatctgcatttatgattcatggtccttgtggtgagggacatccatcatgtgcttgcatggttaacggcgaatgctctaagaactatccaaaagaatattgtgagaagacaacaatcttacaaaatggacatgttagatatgctcgaccaaagaatagaatatctaccaaaaagaatggtgttgctgttgataatgcatttgttctcctgcataatgtggatttatgtgtgaagtaccaagcacacataaatgtagagagagttagccgtgatgggatggaaaaatatttattcaagtattttaccaaaggttttgattgttcaaaggttggtctccaacgtaaaagagcatccggtgaatcatctacctgtaccaaaggtgttaatgagatccaagattacctagagtgcagatgtatagcttccaatgatgcagcttggcgcttgctccagtttgaaattcaccacactaacccttctgttgagcgtcttcctgtccatctaccactcggaaacagtgtagtatacaatgaggatgacagcctagaacaagtattgcagaacccatggaatcaaattacaaagctcactgcctggtttgaagctaacaagacctatcctgaggctgtgtgctacacatatgcagagttcccagagcacttcacttggcatgctgatggaaagtattgggattatcgacgtggtactggtaacgtcggaagactagccaatgtaggccctaaccagggggattcctactatcttcgtatgttgctatagtgaaggtggcaaggtcgtactcagagatcagaacaattgaaggccaacagtatccaacattccaggctgcttgccaggctcctggtctcctaggtgatgatcgtgagtggttgtccgctatagttgatgcagcgcattgggctcttccataccagctccgtgagttgtttgtcacacttctcctcttttgcaatgttacagatccattggctttatttgaagaacatttttctagaatgggtgaggactacatgcatcgcattgggcatagtatgacataccattctacaccttttacacaacatgttagatcatttgttcttgctgaaattgacaagttgcttagaaattctggatatagcttaccacactttaacttgcctgagcccattcttaccagtgcatgtgcagttggcaatagacttttaacagatgaacaagcttatgatattgataggatatcagtagaagcagctgaacaactcaatcaattgaatctgaatcaaaaacatgtttatgatgttgtccttcaatcagtcaacaattgcattggtcacacattctttgtgcatggctatggtggtaccgggaagacatttctttggaatgctttgcttaatgctgttagagctcaaggaaaaattgctttggctgttgcatcatctagcattgctgcacttcttctgccaggtggtcgcacaccgcattcccgcttcaaaataccattagatatacaagaacattcactctatgct

SEQ ID NO: 24109 - DNA, 3109 bp, Oryza sativa
  ref <308>: DATABASE ACCESSION NUMBER: AK099551
  ref <309>: DATABASE ENTRY DATE: 2002-08-28
gactggtatttgttcttcagttcttcatgtctctctgaacttctgaagctgaagtgagactgtgcagccatttcttgtgccaaactgtcactcttcagtttcttcttcgctggtctcctcttgtatttatgggtttggaggtttcttggttttggctcggctgctgcgcgtgaatcgattgttcggatttctacacatcaaggagaaacaaatctttggtgattcagctagggtttaatagtcctcccaagaattgcggcgctggaggttatcgaggattgcccaagatgaagatggagtctttcgcttggttgctgttgattcttgttctattctcgattttggaggatgtgcgaggatcaaaatccaagccgatcttgatcaactgcggctcagattccaccaccgatgttgatggcaggagatggattggggattcttctcccaagaacttcacactcagcttaccaggaacagttgccacagctccagattctgatgggaaagagacatatggagatttgtacaagaatgcccggatcttcaatgcatcctcaagctacaagttcatcgtcgccgctgccgggagctactttctccggctccatttcagtcagctacccactaatttcagcaccaaagaatcactctttgatgtttcagcaaatggcctgaagctggtctccaagttcaatgtccctgcagagatctacctgaggaactccaagatcaactccaccagccgcgccatcgtgaaggagtatcttctcaatgtcacctccagtaacttggagattgagttctcccccgatgccgaatcgttcgccttcatcaatgccatggagattgtgcctgtgtctggcaactcggtttttgattcggttaacaaggttggtggttatggcttgaagggtcctttcagtcttggggatagcgcggtcgagacgatgtataggatttgtgtggggtgtggcaagatagagagtaaggaggatcctggcttgtggaggaagtgggattcagatgaaaatttcatattctctatgagtgctgcgcgcgccatctccaattcttccaatataagctatgtgtcaagtgatgattctacctcggcgcctttgaggctctatgaaactgccagggtgacgacggagagttcagtcatggacaagaaattcaatgtgtcttggagctttaatgttgaccctgattttgattacttggtccggttgcatttctgtgagctggagtatgacaaggcggagcagcgcaagttcaagatttacataaacaacaagactgctgctgagaactatgacgtgtttgcgaaagccggggggaagaacaaggcttttcatgaggacttccttgatgccgcctcaccgcagatggacactctttgggttcagttgggatctgaatcctcagcaggtcctgcagctactgatgcacttctgaatggcatggagatctttaaggtcagtcggaatgggaatcttgctcatccaactgtgaggattggaggtttcaacagtgccatggggaaaccgaaacgtagccccaagtgggtactaattggtgcagctgctggtttggtgatttttgtgtcaattgttggtgttattttcgtatgtttctatctgcgatggaagaagaagacttcagctaacaaaaccaaggataatccaccaggttggaggccacttgtgctccatggtgctacaacacctgcagcaaattcccgctccccaactcttcgtgcagcaggtacgtttgggagcaacaggatgggaaggcagttcactgttgcagaaatcagagaagccaccatgaactttgatgattccttggtgatcggtgttggtggtttcggcaaggtctacaagggagagatggaagatggcaagctggtggcaatcaagagggggcatccagagtctcagcagggtgtgaaggagtttgaaactgagatcgagatcctctcaagactgcgacaccgacaccttgtgtccttgattggctactgtgatgagcaaaatgagatgatcttagtttatgagcacatggcaaatggtaccttgaggagccacctttatggaactgatcttcctgctcttacatggaagcagaggcttgaaatatgtatcggcgcagcccgggggcttcactaccttcacactggacttgacaggggtataatccacagggatgtcaagactactaatatcttgttggatgacaactttgttgcaaagatggcagattttggtatctcgaaagatggtccacctttagatcatactcatgttagtactgctgttaaggggagttttggttaccttgatccagaatattatcggaggcagcagttaacccaaagttcagatgtgtactcttttggcgttgtgctgtttgaagttctatgtgctcggccagtcataaacccggccttgccaagagatcagataaaccttgctgagtgggctctcaagtggcaaaagcagaagttacttgagaccataatcgaccctcggttagagggaaattacacactggagtccatcaggaaattcagtgagatagctgaaaaatgccttgcagatgaagggagaagccggccttcgattggtgaagtcctgtggcacctagagagtgctttgcagttgcatcaaggtcttctgcaaagtgcgaatactgatgatttatcacagcctgaactgaagctctctgatgcatcctgcaatttagggtgcatcgaagaagttgaggaatcctgccgtgcagggtcccaggatgtgaatgaggaatatgtggatgtcaaaattgaagttccatgataatggaatgctggtcaaactagtggcttcaagcaactgaatagggtgagtgtcaaattaacaaaaatgtttagatgcactgctatctagtattgtaacaccatatatgagtgtccctacaatgtactgagattattttggtacagttaggagaaaactctcttcatttcttttgtacttgtgctgatgtacaagtctttatgatgcaaatttcattgattcttttgtaaaattctagagccgtatgcaatgcaatactgagcattaactgg

SEQ ID NO: 24110 - DNA, 2185 bp, Oryza sativa
  ref <308>: DATABASE ACCESSION NUMBER: AK099552
  ref <309>: DATABASE ENTRY DATE: 2002-08-28
gcgctgggcacgcactaccggcagttcaaggacaaaccaatttgaaggcggctagcgccagcacaggcatgccgatctcgcatgagctgggcgagcctgacgaaagcttctacaatctatggaaggaagagtgtgaagaactgtgggaggaagaggacgaactgtggggggacgaagatgttgaggaggagctgtcgctgcgtcaccctggattcaacaagtggaccgtccagcagggtgctgcaggcggggaccatattcgcgccaaggacaagaacttttactgctttgaggtccaagttcacttcactggagaactagttgacggtacgcagttcgtgtcaagccgagaaaatgacattccagagaggtttatactggggcaagaggatgtgatgcatggtttcaacttagctgtcagttcgatgcaaccaggggagaaagctatattcactatcccttcagcgttaaccatgacaaaagctggctcccctgctagcatcccgtcaaacatacctcccaaccaaacactacggtttgagattgagctcatcgccatgtttactataattgacattttcaaagatgaaggcatattgaaaaagattgtcaagaacgcagaacccgacagaaaacaatctcactcaagtgattttgtatttgtgaaatacgacgcatgcctgatggatggaacttcagtgtccaaatctgaaggtgttgaattcagccttaccgacggcttcttctgtcctgcatttgcacatgctgtgcatactatgaaagaaggagaggaagcagtactaattgtgaaaccaaaatatgctttcggtgaacaaggaagaccttctcaaggagaggaagctgctgtgcccccagatgcaactctttatgtgcacctcctatttgtgtgctggatacggcgaattggggaagaccaagcaattgccaagaaaactctaaggatagggaactcacagaggatacacacacaaagtcaagctgtggtgaaagtgcggttgctcggcaaacttcaagatggaactgtttttgatcgtagaggttacggcgacgatgaaccgttcgagttcgtggtagatgaaggtcaagttattgatggcctggatgaatctgtaatgacaatggaggagggagaagttgccgagttcactattccaccccagcacgcatttgatgccgttgggtcagatcagcatcagtttgcctttgtgccgcgcaatgcaaccgtcgtctacaagatcgagctcttgtccgtcgttaatgagaaacatccgttgtacattccgagccgtgatgaaattgttgaatatgcaagtaggaaggaagaggaaggggacatatactttaacttgggtaaacatttgagagctcacaggagatatttcaaggccagacaaatcattgaatattcacgcttcggggtaaggagagggaaaattaatttaataaaactgctgtccatcccaacatcagaaattgatgcacagctggaagaaatgtggatttcctgcacttttaaagcggctaagtgcgcaatccagctagggtgctacatgcaagcatcgtgctattacagcgaggtgctgaactacgatgtggctaatgtgcaagcccagcagcagcaaacgttgttgcaggaatttcctgatggttcctcaagagacccggacgcaatgcagcgaggctttgagcaattcccaccagagtacgagtcagaattgcagctcaatgcaactttcactcctgcagctttttcaccgagacggaaaggtgagcatccgtatcgtggcgaaattattggcttccctgatgttcaggcaaacagcagccagcctgcttctactcctagtactgctcccagtactcccaaccctgctacaccacagacgaacgccctcgctactggcactagtggcaccccgagcggcagcgctgctcaaagctcaggaacaatcaacacgaaccgcgggtttctattcagatgcttcgggccatcgcccacgagctgaaggatccatcaagcttatatcgtctcaatcgttgtcgccgccgcagctaattactacttagtaatatcatatcatacttggaattgcagtatgctggtaatgtctacattttcaaatggatccacattaaataaaagttgtgattgattttgtactgc

SEQ ID NO: 24111 - DNA, 2232 bp, Oryza sativa
  ref <308>: DATABASE ACCESSION NUMBER: AK099553
  ref <309>: DATABASE ENTRY DATE: 2002-08-28
gaaagccgccgagccgcgcggccgagtgcaaaaaggaaaaatatcggtccccgcgagctagggtttaccacccccccctcgtccacctctctctctctccgggtgcccacgccggcggcgagctctcctcaactgcgccgccgagagccccccccgccccccctgttcgtgggggaagtacaggctgatcttagttgggggggtatactctgcggtctacttgctactccagcaatgtattgttctcactgtcaagataactgccccgtcgtaaaggaccctgacaaaaactacacatgttgtggtttgtgtgggaaggttcttgatgatcaggtttacgatggtgagccaactttccaaaagggcgccgacgggcaggcccggttggctggtagtattctatcaagcattgagagtggtaattcagtatcccatgaaagaactataaataaaggaagagaggagattaggcagattgtcagcagcttacatgtggctggtggagatactattattagcatggctcatcgctattatacactagctgttgacaagaattttacaaggggccgtcgaacaactcatgttgctgctgcttgcctttatattgcctgccggcaaagtaaaaaggcatatcttcttattgatttctcggaccatttgcagataagtgtttatgtcctaggtgctgtttttctgcagctttgccaagttttgctacttgcggaacatccagttatccaaaagctcatcgaccccagccttttcatacatcgttttacagaacgtttactggggaagagggacaatgccgtatcagatacggctttacgcattgtagctagcatgaagcgagactggatgcagactgggaggaaaccaagtggattgtgtggtgcagcactatatatcgctgctctctctcatggatatgattataccaaggcagatattgttgctgttgtgcatgtttgcgaggcaacactaactaagcgcttgatagagtttgaaaatacagattcgggtagcttaacgattgaagaatttttggcaaaggctgatgaacaagtgcttgttactaaaatttcaccaaagtctggagaagtactttgcaagcacaaggataaagctgagcattttgctcatggactctgtgaaaaatgctacaacaaatttatgaaactgtctggtggactggagggtggctctgatcctccagctttccaacgagctgaaaaacaaaggttggaggctgctaaaaatgctaaaggaactgctgcatctaaagaggcagcactggaatcagtttgtgaggcacgcgaatctgatgttgagaataacattacgacaccgccaaagaatataattggagataagcattcgacaattccttctgtgaaagttgctggtgattctgtagctacagaagatcctgaaggggaagttaaaaatgataaagcagatgaaggtcctgaaagtctctctgatattgatgatgcggaggttgatgggtaccttcacaacgaggaagaaacacagtacaaaaaaattatctgggaggaaatgaataaagagtaccttgaggaacaagcagcaaaagcagcattagcagctgagctggcagctagaggagtggttgtggaagaggggaagaggaaaagaagaagacaataatgaagatggcaagaacgcaacacccgctcaaaaaccagccaagaagcaacacagaacatgttgaagcggaagagacttggatcgaagatcaatgatgaagctgttaacaaactgtacaataccaaagatgaagatggcaaagcagataaagagatggacttcaacgatgagtatggacaggacacaggtgatggtgagaacattcgaaggtggttatgattatcctgattacaactatgatggctatggtgatggagcctacggcgattatgatggtgttgatttttaatacccgatatatcaatgctgggtagaattgttacaattttatttgtgtgtgtatggcaacaattatcaattttacatgaatagttctgattagttgacgaaaacggagttaatcagtactcagtagacagtatagcagtgtagctcgttgatttctctggtgatatgttgagaagctgttgtagtaactgtattatttcattcagcgacctatacttgcaagctgtatattaaaacaggcctcgaagaaaaaggaaaattttgaatgcc

SEQ ID NO: 24112 - DNA, 1159 bp, Oryza sativa
  ref <308>: DATABASE ACCESSION NUMBER: AK099554
  ref <309>: DATABASE ENTRY DATE: 2002-08-28
gacctccacaatcacactgagctaacctccatttccaccatctccgagcttcttgttgttgttgttgttggtttggtttgcgagtctgcaaccaatggacgcgtctccgagctcctcgtcgtcgtctcctgtggcgccggaggtggtgcaatgggccggcggcgccgacggctttggctcggcggcgatcggcttcgcgtgcagggtgctctgcgccgtcgccacctgcgtcttcgccgcagtggggtcggtggtcggggcggtgaccgggagcgcgatcgggctggcgacggagagcggaatgctgcgcggcgccggcatcggcgccatctccggcgccgtcttctccatcgaggtcgccgagtcgtcgcgcgacctctggcactccagcgactccgccgtctggtgcctcgtctacatggtcgacatcatctccagcctcctgagtggaaggctggtgcgggagaaggtgggtcccgcggttcagagcgcggttcagagtcagataagcgccatcagctcgccgttcgccgagaccagcgacctgttcgagaccggcggcaccaagggtttaccggcggacacgctccgccggctgccggcgatcaagatcaccggcgacaacgccgtcgactccgccggcgagcacatctgctgctccgtgtgcctccaggatttccgcgtaggtgagatggcaagaaggctaccaagctgccggcacgtgtttcacgtgccgtgcatcgactgctggctggtgaggcacggctcctgcccgctgtgccggcgagacatctgatcgatcgtgatcaaaatctcgcatctgatgaacgatcagttcatgtcatcgtactccgaatcggacacggcgatgaatggtggatcgagttcgtggtacataggttgtgtgtagtagagtagaacgaactactgcatcctgatatccgtaaggggaatgggtgtgagcaagtgattgcaatctcgtgaagatggagagagaatgagaccttccaaaaaaaaatcttttttactgtccttgagtagttaccggaagggaatattgtaccgtggtatctctgttgcgttgaggtatcggaatgtattgtaaatttacagtaaaaatcgttgtaactttaggtatcttttcaagaatactggaggc

SEQ ID NO: 24113 - DNA, 1365 bp, Oryza sativa
  ref <308>: DATABASE ACCESSION NUMBER: AK099555
  ref <309>: DATABASE ENTRY DATE: 2002-08-28
gaaggcttcttgatatccatgcaaagatgatgaaactaaacaagaaagaggatgttaggttgggtcttactaggtcagattacatgattgatggggccactgaccagcttcttcaagttgaactcaacaccatttcaacatcatccaacggtcttgcttgcggtgtatgtgaacttcacagaaacctgattaggcagcatgagagggagctcggtttggatccagagagtgttgttgggaacacagcaattgctcagcatgctgaagcattagctggagcatgggctgagttcaacaatcaaagttcagtagttctggtggttgttcaaccagaagaaaggtacatgtatgaccaatattggataactgtcgccttgagagaaatgtatggggtgacgacaattcgcaaaacaatggctgcaatagatgcagaaggagagctccgtcctgacggtacactaacaatagatggattgccagttgctgttgtgtacttcagagcaggttatacaccaaatgattacccttcagaagcggaatggagagcaagactcttgattgagtgttcctctgctattaagtgcccatcaatagcacaccatcttgttggaaccaaaaagattcaacaagaattggcaaaagaaaatgtgctcgaaaggtttcttgacaacaaagccgacatagaaaaagttcggaaatgctttgcagggctatggagcttggagaatgacagtatagtcatgtctgctattgaatcaccagaattgtttgttctgaagccacaaagagagggtggaaaacaacatttatggggacaatctgcgtgaaacactgataagtctgaagaaggatggaagcaatgaacttgcagcctacatcctaatgcagaggatctttccaccagcatcactctgctatctagtccgagatggcacatgcattcgggaaaatgcggtttctgaatttggaatttttggagcctacctgcggaacaaagacagggtcattataaatgaccagtgtggttatttgatgagaaccaaggctgcctcactgaacgaaggtggggtagttgctggatacgcatttttgaacagcgtattcctgacatgacatggtaagacatgcgaaacatgtgtatcggtttgaatatggataattctccaagcaggttatcagagaattcataatttgtatgctattacttttagcaggaatcataccaatgttatttccatgacacacttttttttatttggcatgatttcgctatcagccgagattgaggtaccattattcccatgtataaaaatgttatagctatcatattttaatgtatgagtatcaatttgcttatattgtccg

SEQ ID NO: 24114 - DNA, 1323 bp, Oryza sativa
  ref <308>: DATABASE ACCESSION NUMBER: AK099556
  ref <309>: DATABASE ENTRY DATE: 2002-08-28
gagtctgcttgacattttgtggtgggggcatcatccctttcactctcaaatgcttcagatttcagtcaatccacactgtaatccccattgctagtatctctctctcgctctctctccgcctttaaaataggctcttgtggattgttgagaaagttaagtgcccctgttgcaaggttctttgaggcttcgatcccgataagcgttcggactggtcggcctccacctattgtgagtaaaagccactcaattcctttctcatagtttccattttccttgcatccatctataaagatagctagggtgcaaaattttatatggttggtttgttactgccatggcagaaaaaaattgagcgtatgcatccatcgagagagagagagagagagagagcaatctgttgatctcgcactgtattttgcagctgtgatttggcttcaaagccagccaaaaaaggtctaattctccggccacaagaagatgtcaaggtacctgaagcagtacgagaaggaacacatgaagatggccatgttgaggcaggaggagacattcaagcagcaggttcaggagctgcaccggctgtaccgagtacagaagctactgatggacgccggctctgcaatcacaatgcaaggcatcagttgcatacctgaagacgattatcatgcagaggagaacgaggcagggtcgagcaggccatggcacaccttccctgggagcgacaatgacaagccacaggctcacactagtgttcttgaagagagcgagctggacctgacgctagcgatcgggaggacgacgacgaccaagaaggaggcgccgtcgtctagcgtggactcgaggacgagcaactcgtcgtcgtcgacggagtccggcagcaccaactgcagggcggtgatgccgcaccggccatctcggttggggtcgtcgtcggcggtgaaggttgttgctggtggccccggtgttgggacgacgcagcagcatttggacctggagcagcaggacgcgctgaagcagcctccttggctccaccgttgtctcaatttggcacgataagaggatgtatagcacacaacttcttaatttcttgccgtgtcatccctttactattctcaatcatgcttgctgctcgccctcgcatttctcgatcgtttgtcctcactttacttcacttttttttttacttcttattttttttacttccccaccaccgtcatgattaagaagtcgcgctcagcaggggaaagaaaaaagagtcgtgcacccggagccgacccgcttgatgattccaagccttatcgttttccttatataaaatcagccgct

SEQ ID NO: 24115 - DNA, 1140 bp, Oryza sativa
  ref <308>: DATABASE ACCESSION NUMBER: AK099557
  ref <309>: DATABASE ENTRY DATE: 2002-08-28
gaaggacgagcaacccgcaaccgcgaccagaggagaggactcgatcgaatcgaatcgaagcgggaggatttcgggggtccgtgactccgttcggagaaaaggattcagcttgtgggcagaagaagaagaagaagatggcttccgcgaaatccggggagagggggagcagcagcttcgccatggcctgcagcctgctcagccgctacgtcaggcagaacggcgcagccgccggcgagctcggcctcggcatcagaggtgaagccgatgcgaacaaggggaaggagaccatggagctgttcccccagaattccgggttcggctctgaagctgctgccgtgaaggagaccccggatgcgagggagcaagagaagcgccaattaaccatcttctacggtgggaaggtcctggtgtttgatgacttcccagctgagaaggccaaggacctgatgcagatggccagcaagagttcctccacagcgcagaactgtgtccttcttccatcttccgctactgcaaccgttgccgacaacactaaggtgtctgctgtaccagccccagcaagtgcacttcctgttgctcaggccaatgccccgaaacctgttcgtccaaatgctgctgatctgcctcaggctaggaaggcgtcgcttcaccggttcctcgagaaaagaaaggatcgccttcaggctaaagcaccctaccagggttccccttcagatgcttctccggtcaagaaggagctgcaggagagtcagccatggcttgggttaggacctcaggttgccgctcccgacctgagcttgcggcaggaatcgagccaatgaatcaatgctcaattctgagatgcccctctcatcagatgattcagtcatagaggttatcacaactcttgaattgggtgttttgtgttaggagatgatccgatgacaaggcgatgttcttctgatatatatactaggattgaatgtaaagaaagtagctgatgattatgaccagtaatctgaatcaaattgctatgatagaaagcagaagattctgtaatcagtacaacccaagaaacctcatttgtaccaattcaatatcgttttgctttggcattgccatgtagaagcaaagcaaatgtactgctaatatatacacatc

SEQ ID NO: 24116 - DNA, 1071 bp, Oryza sativa
  ref <308>: DATABASE ACCESSION NUMBER: AK099558
  ref <309>: DATABASE ENTRY DATE: 2002-08-28
gagccgcgcgtgcgtgcgaatcattccggccgcagcctacctctgcctctctcctctcctcgcggcgtcggcagcgagttctcctcggatcgggagtggaggagaagcgggaggaggaggaggaggagggatgagtctcttcgggctcggccggaatcagaagacgttccgtcccaagaagagtgctccttcaggaagcaagggtgcacagcttcggaagcacatagatgccactcttggcagtggaaaccttagggaagctgtaaggttgccgcctggagaagatatcaatgaatggctggctgtgaatactgtggatttctttaaccaagttaacctgctgtacggcacactcgctgagttctgcacacctgagagctgcccaacaatgactgctggcccaaagtatgagtacagatgggctgatggtgtacagataaagaagccgatagaagtatcagcaccaaaatatgtggagtacctaatggactggattgaaggccaacttgatgatgaatctatatttccccaaaagcttggcacaccattcccgccaaacttcaaggaggttgtaaagacaattttcaagcgcttgtttcgtgtttatgcccacatatatcactcccattttcagaagattgtcagcctcaaggaggaggcccatcttaacacgtgcttcaagcacttcatcctgtttacaactgaatttggcctgattgacaagaaggagctggctccactccaggagctcatcgaatcgattattccatactgagaagaatacagggacggaacggagcgtggataacgagttctttacatggacgatcgaggaatcaggctacttgcaacactattttactggcatagagcttactgttccagatatcagacataaaaaaggacatttgacattgctaatgctatgttttttgtgtactgatgttcgttcgtcctgattcagtattaccttgtgtaagcgtgcttgtaatgtaataacaggattggtggattgggatatattgcaaagaacgatctattaatccaatcgtgagttgcaattgttgcttc

SEQ ID NO: 24117 - DNA, 1102 bp, Oryza sativa
  ref <308>: DATABASE ACCESSION NUMBER: AK099559
  ref <309>: DATABASE ENTRY DATE: 2002-08-28
tgcgcttaccatttgcgccgcccatcgcgtccagctagcgcctggcgcggctgcagatgcagctgctgagctgcaggtgcatgcacctttcccacccccacctccctctctccccttcgtcttcctctatagcccgcgccgcgcctccctgtccccgagtccgaagcccgaatccgaagcgaagtgaccgcaagagctcacccccgagtccccccctcgccggatcgcgcgggccgcctacctcctcccgtcgcaccagctaccgcgggaatgcgaagatcttgcgatggaagctagtcaaatctgatttcgtttaagtacaagtaacaacaatggcaccaaacaaaatttcctcaatggatgctggagcagcttttgatgacgaagatgctagttccagcaattcactgcaggagttgtggccagttggcgagatagatcctaagagagcaagatttccttgttgcattgtttggactcctcttcctattgtctcgtggcttgctccttacatagggcatgctggaatctgtcgagaggatgggactgtcttggattttgctggttcaaatctggtgagcatggataattttgcatatggttctattgcgagatatctccagcttgacagaaagaagtgttgctttcctgttaatctcgcgacacatgtatgtgagcggtcctacaagcatgcagaagcaggaacggcgatttcctgggacgacgctctgcaactgggcatgagaagtttcgggcacaagttctataatctgtttacctgcaattgctactcatttgtggcaaactgcttgaatcggcttgcctacaatggctccgtgaagtggaatgtgttgaatgtggctgctcttgtttggttgcgtggccaatgggtggataaaatgtctgttgttcgttcattctttccttttctaactgtgacatgcgttggcattttaatggctggctggcctttcctaatagggatggcagccttctcttctctcttgattggatggtttgtatttgctgtatactgcatgaaggatctagtgtgctgactcttttaaagaacattggcactgaatcctgtgatgaattatgg

SEQ ID NO: 24118 - DNA, 1205 bp, Oryza sativa
  ref <308>: DATABASE ACCESSION NUMBER: AK099560
  ref <309>: DATABASE ENTRY DATE: 2002-08-28
gataggctgagctgagccaggacgacgtacgacgacgacgactatggcggcggcggcgttgctgttggcgccagtggcggcgccatggtcgcgtgtaccgtctgcagggaggagggttcggtgcgcggcgactgcgccggcgccgatgggggagaagacggagtaccgggacgggccggtggagcgcgccttcatggggctgttcgcgcgcaagatggagaagtacgccgtcgtctccagctccggcgggaaggggaaggagaagaagaaggagaagagctcgaggtcggtgtgggagtgggactacgagagcttcgtggacgtgtcgcggcgggtgatggtggggcggacgcgggcgcagcagcaggaggccgtccgcgaggtgctcctctccatgctcccctccggcgcccccgagcagttcaagaagctcttcccgccgacgaggtgggcctgcgagttcaacgctgccctcaccgtccccttcttccactggctcgtcggcccatcagaggttgtggaggttgaggtcaatggggtgaagcagaagagtggagtgctggtaaagaaatgcaggtacctggagaacagcggctgcgtcggaatgtgcgtcaacatgtgcaaaattccgacgcaaaacttcttcaccaacgagttcggactccctctcaccatgaatccaaattttgaagatatgagctgtgaaatgatttacggccaagtgcccccacccttggaagaagacccagcatcaaaacagccctgctatgccaatctatgttccatctcaacaccctcagcgccaatttgtcccaaacttcagacttagagcacatcacatcaatgctgaattcagatgttggacgttttcagtttcttatgaaaacgctcgcaccacagctcatagcccatagtagctacgccaatcgacagttcatacgttgtaccactctttatcatttggtatatagatagacagatcacagaaaaccgtcagtgatctccttgcctgggaaaattaaggttttgcctttgagctcgagaaatttccacataaatattttactagttagatagtttccgcaataatcccttatttattcctcatgtaaaaaaatgcagtgcttgtatacagaaattcttgtgcccactacctgtaattaaagatccatcatggtattaatatagtacaaatgcaatacttc

SEQ ID NO: 24119 - DNA, 1002 bp, Oryza sativa
  ref <308>: DATABASE ACCESSION NUMBER: AK099561
  ref <309>: DATABASE ENTRY DATE: 2002-08-28
gacactcaagctcaactgctcaagcatcgagtggtgggcagaaacaaatccttccacgatagtacttcgcagagcaagagcagcagcatagcaaagattaagaggagatgcttaatcttcacaccattaggatgtccattccttcgctacacagatcctccccataccgatgtgcgctgctaaagaggaagagatcttgtatccgtgcctgcagctctgaagatgatggatccgatgcttcgtcgtcgcttggcggagacaaacgccagcaggaggtccttgcgaagatcgcaatgcttcaggcgcagaaggtgcgcatcacaagcttcttggacgagcgctctgcttacctgaccaagtttgcgaaggatgcggacaccgagttcgatctgattggccagaacgccatgaaagagcttgatgaagttggggaccagataatggagaggctggacagcaagatgcaggcctttgaggagactgctgaagttcaaaggcaggagatagaaatgaacgagagggtgcttgaagacttcgaagattggattgagaaggagaaaaatgaaggtatgttcttcaaaagccttgggaaggtgaagcctcgcaacaagaagaaactcacagtaaaaccaatacccaagctagaagcacaaaaggtcaaagatattgcaaaagaaagtgcaggatcaaaaactaggatgaacatttaccttgggctcatggcaatactcgggcttacaattgcaaatgccgtcttcgcaacacctgaggtggagtggaggaaggttgcagctctgggtctaatattcattggtttggttgctcaggtcatctacgagcaggatatctcatcaccagaagctgaaaagaagggaggaaaagaagaatgaatgaaagacttgagagataagcatgaaaaagtagcagtagattttaatcaacattttcacaagaaatgtaaagtgtataaagttcatatgaatatatagtcttttgcaatcc

SEQ ID NO: 24120 - DNA, 1255 bp, Oryza sativa
  ref <308>: DATABASE ACCESSION NUMBER: AK099562
  ref <309>: DATABASE ENTRY DATE: 2002-08-28
ggtggtggccctccgcccccgcgccgccgccgcctccgccgcagtcgcccgcccggtcgccgtacgccgaggcggcgtctcctcctcatcccgctggaagctgcagggaagtatgttgaattggaaatctaaatgcagtaccagaagtccacggactacagttgctggtgcaaagcctgatgactctgaatttgaaagtgtcaatgcaccactcgagccccaaacgtgggaaggaagcttcttgtgtggtttgttgaagaaccagccacaagtactcccagttgctgcggcaaagcaacttcaagaactatctaatcaaagaaaggacaccttgatccgctgggaacatagcatcggttctcctgaggactgccttcacaggaggattgctgaaatgaaggagcatgagtgccagactgctattgaggatatcatgtacactttgattgtttataaatttttcaagattgaagttccattggttccaaatctatcaaagcttatcagcaataaaagactacaaatatggccaccaagggaggcagaactagaatcaattcatggacctgaggtgctaggtttaattagggaacacttgaccagtattatcagatgggtacatagaaatggtcccaagatcaatcgctcaacacttagaatcaaaagaatgcaatttagtcggatttattctgcttcaataatgtacggatactttctgaaatctgtcactacaaggcatcgtttggagctgattcttgctcagtcacaagaattttgcccaccaattcagtttctgaatgcacaatttaatagcacccagaaacaagaacaggaagagtccattggaggttctgcagaaatatcatcttcctcaaaaccgagttctgttgttgatctgcatgacttgaagagttacatgatgggctttgatccaaagaccttggagttatgcgcaaggctgcgctcatgcgaagcttctaatctcattgagaagcacagttgggcactgttcagagaaagcatgaaagatttcctagagcctgatgaggcagtgatactcgatccgtcatccctaaagagattgttgcttgaagccattgcatttggttcctttctttgggatgttgaggattatgttgacgagatttacaagttgcatgatagctgaaaaaagtacatgcaggaaactcctgatgccttgtaaatattcttgaatcttgtatatatgattagatatttagcttcttatgcatgt

SEQ ID NO: 24121 - DNA, 1147 bp, Oryza sativa
  ref <308>: DATABASE ACCESSION NUMBER: AK099563
  ref <309>: DATABASE ENTRY DATE: 2002-08-28
tcccctccttctccccgcgttacaatcagcacacgctctctgctagtctgatcgctctcgccatcgcacctctgtctcgtcgaacaatggcctccaccgccgccgcttcctcccctttcgactgcgtcctctttgacctcgacgacacgctgtacccgggaagcgcgggcatcgggctggcgacgaagcgcaacatcgacgagttcctcatggcacggtgcggcgtcacggcggagcgggccgccgcgctccgcgtcgagctcttccgctcctacggcagctcgctcgccggcctcatcgctctcggctatgacgtgcacccggatgagtaccacagctacgtgcacgggaggctgccctacgaccggatcgccgccgacccgcagctcgccggccttctgcggagcatcccgcagcgcaaaattctgttcaccaactctgatcgcgcgcacatgaggaaggcgctgcagcggctgagcgtcgacgagggctgcttcgacgccgtcgtgtgcttcgagaccatgaaccctcacctcttcggtgaggcgccgtgcgcctccggcgatgaccgccccggcgtgatcctcaaaccgtcccccgatgccatcgtcgcggctctgcgcatcgccggcaccaatccacaccggacgctcttcctcgacgacagcgagaggaacatcgccgcaggaaaagctcttagcctccgcaccgtcctggttggcaagagggtgaggagcaaggaggccgactacgctcttgagagcatcggcagcctccggcgagccatcccggagatttggggcggcgtcgccgtcgccgtcgccggcgaacagctcgaccacggcgccgcggagaagacgaagggaatgaggtccgatctggactccatcatccagccaacgtcagtcctggcgtaatcggttcctaatccattcgcacataaacaaatcgccactaataaaagcaagtactgtccattaattatcatgtaaattattctgattcctgatgctgagtgcgtgtgcagtgtatttgtatatgggcctggctgacaaggaaatatgcatgtgtatatcagttctgatgatcagcttttgtttgctgtaaaatgtaaatggcactatgagcaaggaatttgtctttgatt

SEQ ID NO: 24122 - DNA, 3444 bp, Oryza sativa
  ref <308>: DATABASE ACCESSION NUMBER: AK099564
  ref <309>: DATABASE ENTRY DATE: 2002-08-28
gattggaccatactgatgaggttatgccagtagatctgcaagtcaatagttgcaccaaagcaattcggcaaactgaggttgctgtaccctcttggcgatcgaaaaatcttgactcatcacgagagccatcagaaaagaagtgtaaattggtagtcaaagtaggatccttgacgcggacagaagaggtggcatctaattctagcacggtttcagacccgatggcctcaaaaacctgtcctgtttgcaaagtgtttgcttctacttcaaacacaaccttgaatgcccatatggaccagtgcctttctgttgaatctaatactgagccagtggaaaaagttatcttgaaaccgaaagttaagccaaggaagaagcgactgatggtggacatttacaagactgcccgtctgttcactcttgaggatcttgatcagaggaatggcactaactgggctatcgaattggctacacccaccacgaacaaggaggtttgcactgagaaccgtagcccagaagtggtgccgtttgacccaagagacgacgaaagagaaggcgatgtctatgttgattctaatgggataaaaattcggattttgtccaagtctagtgatgcgtctttggtgttgagggatgaacataattcaaggaaagttgccaagaacgagactggaaaaagtatgttgatgagcaagacgtgcttgaaatccaaaatatgcaagaataagaggctcaagtttccagggaagaagcacagcaaaactaaccgattgaatacccaggttcgaacacatacagatggagatatgcatgagcacacctctgaggacgaagaggagtccactatgcatgtgcagaaacctactgaaagcacaagttatggtggctccgaaactataaggcaatgggtgggctccaaacgctcaggtctctctaagaattgtgcccgagaggttactgataaagcatccaagagtataacgcctggaaccaagaagttggctaggagcagcattcgtggttttgatgattctcaaatatcagatagtcctcctgaggcattttcttcgcaaccgccggaagagatgacgatcacttcagaagctaatgatgatgacgagaggaatggtacttcgagattgctcagatcgattcctagatggtctttaaaaactactccatccagcaatgtcataccaaaagtacctaggtctgctgctgctctagccaaaaggaaaataaaggagatcggaaggagagagtcctataggtctgataactatgatacagtgaggaattccacctcgatcagaaactctgtacgtcggggtccttcctcctctgttgctgggctgagtgatggctcaaatagggttgcatctaccaagaagttccggaagaaccgatctctgttgaggactggtaggcgtgaattctcaccttctaacagtgggctagttcatggttttggtcaagaccatggatctaatcccaatcatacaaacaagaggttcagggttagtaacaaggaaacctccaagaagcttaagcacactcaagaagatactgcagataatgacttctcttatgaaagtgatgtaccagcattaggacaaggggatgatcaatacgatgcggctcaacaagcaggaatttcacagatgtattatgaaggtgaagagcctgaaactgaaatgcaatgtgcatcaccctccagaagtgatcctgtagactgcagcaatgatatgagcagcgattctttgagtccggaaaataatgagacggcagatgatgttttggtggaaggctatagtgtagcaattgtggatccatgctctaatgagaaatctgcatatcatgctcatatacccaacgacgttgccaataatgaggtggaagaatggcaaattgatccgtcttcaactaaggaatctagtgcctgcttgaccaataatagggacatgggtcttggagctcctcaggataactcatcgattacatcaaacagagaagattctaaccttgatcacggtttggtttttgatcgtggctcatccggctctcctgtttcaactgcctccacactgtctccttcaacttctttgagggactctaggactaacaggtctgagccaggtccatccactgttagtcttccaactgttgaggaacgggtttctgggagctcgaatcaagaaaccaagtcgacacctcttgccagagaaggtgaacagttgcctgaaaagtcctgttgttgcaattgtcgggagagcatttccagggattctcaggtgcacgatcaaagtgcgatggctagaccagtgccagcttttactggaaggccggttccacagttgaacataggtttgcgtgcgtcttcatcgttcagcacatatcaaagaaccagcacaaaggcaaatccttgcttagattcacatgatcagacattagctggtaaggtttcagctgagcctaccatgacccacccatcttatacgacagattgtatgagcccatcaatacaaactcagcttccttcaccatcaaatcctattttgagattgatgggcaagaacttgatggtgatgaacagtgaggagagtggacatcctcaggcacccagttcagattacatcatgagaggaaattacatggcacctggttgttttatgcctcaaaactaccaacatattggtgatcctgcatttatgaacacaacaccgtcaacagccaatcatcaaattcctctgtcaagtgtacaagctggcaacttttctgctcctacgttgcataatggttccatggtgcaatctgattatcattctccacaaaagccatacaggaacctccttccagtcatgcatcatccatcctacatgatgaaagaagtaatcatgattgatgactctcctgagcacagaagcgatccacaaatcagtatgcttcttccttctgcaccttctccagctacaatctcggtcccgaacactgtggcatcaaggccattttactgccttccatcccaaaaccagcttttaccaagggagagtgctgttggacccctgcctgtattcacaaacattaacccaattgttggtgttagctcatcaagtcaaggaaacaacgcagaagtagcacatccttacatgtcaaatccattctatgtgcaatctccggctggttacataaacccatcggtctactattcgcagaatttacggtgatgattcctcagtaactcaaatgaagaagagaactgcaattggtcatcaatgccaacgtgggaataatgagagctttgtgatgagtctaaaattctgagagtagtgaaccttcataagatgcctgactttttcatgaggttttttcacataggttgcctctttagtttttcgtttcaggtaaacttgtttgccttcaaagtacttcaattacatcctgcaaagttcc

SEQ ID NO: 24123 - DNA, 1177 bp, Oryza sativa
  ref <308>: DATABASE ACCESSION NUMBER: AK099565
  ref <309>: DATABASE ENTRY DATE: 2002-08-28
tcccatgagcgacacagagatgcttctgccaatcacggtaggagactacaccgacttcttttgttctgtgcaccatgcaaggaattgtgggttcatcttccgtgggccacagaccccagtcaacccaaattggtttcagcttccagtaggttatcatggtcgtgcatcctctgtgattgtatctggaacagacatcattcgacccaaagggcaaggccatccaacaggagattctcgaccttattttggtccttcttctaagcttgattttgaacttgagatggcagccattgttggaccagggaatgaattggaaaaacctatcgatattaatgatgctgaagaacatatctttggcctaatgataatgaatgattggagtgccagagatatccaagcttgggaaactatacctcttggacctttccttgggaaaagtttcagtaccacagtatcaccctggatcgttactatggatgccctaaagcctttcacctgtgaagctcctaagcaggaacctgaacctttgccttacttagctgaaaagaaccacgtaaactacgatattcctcttgaggtctggattaagcccaaggagcaaagtgaaccatcaatggttgcaaagagtaacttcaagcatctgtattggactttaacacagcaactagcacaccacactgttaatggatgcaatctgagaccaggggatatgtttgcaactggcacactaagcggacctgagacagaatctttgggatgtttgctggagctaacatggaatgggcagaaggagatatcagttggaaactcgacccgcaagttcctagaagatggggatgaggtcatcttgacagcttgttgcaagggtgaaggctacaatgtcggattcggaacctgcactgggaaggttctgcctgcacttccatgatccaacatatagaggatagcctgctttcatctcatcagtgtgtcaataatctctgaagaaagcatgcaatgaggcaatgtatctagctagttacatctatattttagtgcttagtgatggtaaaaatactaataaggtatgcttccctgagctttacagaagggatgtaattaatgttctccagttacaataagaacttatttgaagtcgtcattgtctcagtgattttggcatgcaatgctggatgcg

SEQ ID NO: 24124 - DNA, 3155 bp, Oryza sativa
  ref <308>: DATABASE ACCESSION NUMBER: AK099566
  ref <309>: DATABASE ENTRY DATE: 2002-08-28
gattgcttgtcttcaggctctcctcctagctcccagagaccagagtagtagagagagagaggaggcaaagcagcagcagcagccgcagccaatacgatccgctcctcctcgctcgctcctcgtcgacctggagattccccccgcgccggcgccgccgatttgattcgcccacccctaggccccagctagctagatctggtgcggatccctcgccgtcgccgccatgttctggcgcatgactggtctctccgcggcctcgccggtggatacaattctagacaaggagaacttcacattagaagaacttcttgacgaggatgaaataattcaggagtgcaaagcgctgaatactcgtctcataaatttcttgcgagacaaggctcaagtggagcaattgcttcgttacatcgtggaagaagtaccagaagattctgaaaagaaacgttcttttaagttcccattcattgcttgtgagatatttacctgtgaaattgacatcatcttgaggaccttagtagaggatgaagagttaatggatttgcttttctcatttgtaagacctggtcatccacatagcacattgttagctggatacttcagtaaggtggtaatatgtttgatgctgagaaagacttcccctctaatgaactatgtccaggagcacccagacattgttgtccatcttgttgatctcatcggcaccacctcaataatggaggttctgattcgactgataggtgctgatgagaccatatactcgaattatgctgacacattgcagtggttagaaaatacagatgtactggaaatgattgtggataaatttagctcatctgattcccctgaagtacacgccaatgctgcagaaattctttctgcagtgactcgatgcgcccctcctgctctcgctgcaaaaatatgcagcccaagttttgttgggagattatttcgtcatgctcttcaagaatcacgccccaaatctgtcctggttcattcattatcagtatgtatatctttgttggatccaaaaagactagcgtcagcctcataccaagcatttagaagtaacttgagccatgggacattggttactgctagtccagagacagttgatggtatgctggagagcctaggtgatttgctgaagttgttggatatttcttctgctgaaaatgttttacctacaacatatggatgtttgcagccccctcttggaaaacaccgcttgaagattgtggaattcatctctgttttgctgacgattggtagtgaaactgcggaacaggagctaatcaaccaatctgcagtaaaacgttccattgatttgttcttccagtacccttacaataactttctgcaccatcatgtcgagagtattatcatttcttgtctggaagttaatagatcccagctgattgaccatgcccttaatgaatgcaatcttgttggcaaaattcttgctgctgaaagaagttcctccctgtcaacagaatctaacacaccaacattactatctgaagggaaggtgcctccaaaaattgggaatattgggcacataactcgaatagctaataagcttattcaactgggaaatagcaacagcataatccagtctcatttgcaggagaacagcgagtgggttgaatggcagacaactgccctggtcaaacgcaatgaggttgagaacgtttatcattgggcctgtggtcgtccgacttctctacatgatcgtggtagggatagcgatgatgatgacttccgagacagggactatgatgtggcggcacttgctaataacctgagccaggcattccggtatggaatgtacagcaatgatgacattgaagaggcacaagtaattgaacgagatgatgaggatgtctactttgatgatgaatcagctgaagtagtaatatcttcgttgcgtttgggtgatgatcaggacagcagctccctctttacgaattcaaactggtttacctttgatggtgatagaggaataaatgaccgtttagctgcctctgtcccttcttcatctcccaattctgaagaaacttctctaaacacggaggaaactgatgaggtgcaaattggtgaggacactagcatcgagccacaactggaaagtgtctctcttgaaaatggccctgttgaggaggccggggacttagcagatgtaagtaaacaaacagattctaacacggaagacgagaaactattgtgcactgaagaggaagatttgtccaaagaagctgaagaatctgagcgacacgtggatgttcgagatggccaggtagacatacaggcagaagatgcagctgaaggatcatgcggggatatgggtacagggatagcagtggatgaacctgtcagcccatcatctgagcccaacaatgcttcggctggagcttcaccagacacaggtgatatccatactgctggctcaactggatccaacgattcaggtgcagagttgcatgccaaggaagattcacaggatggacagaaaactgatgagcccacaacaacagagtgaaagtatggttgtggtatggattgtaccatcagaccaaaagcagctactgctcggcagatccttccagaaggtatggtagtactcatgccaaagtccctaacctcacatcttggcaatcatggaaaaatcagaagcaatgagtgctgtgcaacaacataaagcttttgctatctgcagttgcaatttgcaaacgagcacttccatatgccgactgtctcacctcatctccagatgccttgtcctcaatttgcatgggactcgtaccacgtaatggtgggaaagttggttttccttttttgttcagacctcacctcaattggtggtagcttttgatgatccgtttcagctggttttggctacgttggtatttgtcttgtttcttacgctagggcactcgaactgtagcattggcagtgagttttttcccttgtttcttttaaattggattagctatctctgtattgcttaagagaaacatacggctggctttttctctagttaaattaagagtatatttgttcttctgttcgggagtggattctattcccatcgacgatgggataccctctcgtgtacctttacctttcaaatttgatgcaaatagttgtgaaaaattctg

SEQ ID NO: 24125 - DNA, 4016 bp, Oryza sativa
  ref <308>: DATABASE ACCESSION NUMBER: AK099567
  ref <309>: DATABASE ENTRY DATE: 2002-08-28
ggtgtactccacttatccactactcctccaccagtttgctgcagcttgctttgctcctacgcccgtgcagctcgcgcgattccggctgcagcgcacgttgggatcgatggagtcggtggccgttgaagcggcgcggtggatggtcggcaaggcgctgagcccgctgtcgggagggctcgtcgaggcgtggctggcctgctcggagctcggcaccaatgtcggcgccgtcaagctggagctgctctacgcgcaggtgatgctcgacaacgcccgcggcagggagacccgcagccccgcgctgaagcagctgctcctgcagctgcgtggcctcgcctacgacgccgaggacgtgctggacgagctggactacttccgcatccaggacgagctcgacggcaccgacgaggccgccgacgagcacaccagaggctgcctccatggcctcctcctcaacacccgccacaccgccagaaacattaagaagaggtacctttctgcttgttgctcgggcggaggtgacgagaaagctgttgccggcagtgacctctctttagctggtgaacatgatgccgatgacgactgtaccgatgaagacgacaacgacaccggctctactgatatcgaccacagctctactgcaacgcacatgcctagaaaagaaaaacagtggggatcacagagggaggacactatgaaaacaccaaagctgaagttcgatagggtggatctgtccacaagaacgaagcacatctctgagcagctgaagctagtctgtgccaaagtctctaccattcttaatctagagttgccggaatcaaatcgcaccattcgaagcagcattgctatgcttcgtcctgtgaccacttcagcgactatagagcctgaattttatgggaggaagggtgagaaggatagaattattaaagacataactcatggtgattgctgtgtcaaggacctgaccgtcattccaattactggtccaggaggaatagggaagacagctctcactcagcaaatttacaaagcagtaaagaacctttttgatgttaatgtttgggtatgtatctctctcaatttcaatgcgtacagattgaaacaagagattgctgattcaatacctaaagttgagaatgagcaactgggtgacctagatgagaatgagcaactgggtgacctagatgacttgattgagcgaagattgaagtcaaagaagattttgcttgtcttggatgatatgtggaattgcagtaatgaggatgattggaaaaggctattagcacccctcagaaacgcacaaacaaagggaaatgtgattctagtcaccactcgttttccagcagttgcagaaatagtacaaaagacttatcgtccaatacaattggaagggctggaatttgaagagttatgggaattgttccaagcatatgtgtttggtgatgagaaattaataaaccatcatgctatcttacaacagactggagaaatgatagccaaaaaactaaagggctcccctttggcagcaaaaactgtaggtcgattgttgagaaatcaccttgatttcaatcattggacaagtgtcctagaaagtaaagaatgggaattacaaactggtgacaatgatattatgccagcattaaagcttagctatgactatctccctttccatctgcaacaatgttttatatattgtgctttgttccctgaagattacaagtttgacagtgatgagttgattcacctatggataggactagacattttacaatcacatcaggaccaaaacaaacgaactgaagatatagcattgagttgtttgaatcatttggttgattttggatttttcaaaaaaaatgtgaatgaagatgggtctccttattacagtatgcatgatctactacatgagttagcattgaaggtttcatcctgtgaatgtcttgctgtcagtagttctaacgtaaggtttgtgcaaattccaccatctatacgccatttgtctattgtgatagatgacatggatgtaaatgatagagtgacttttgaaagcatcaagacggatttcagcacactaagtaagagactggatgttgaaaagctacactcttttatgctatttggacgattccatggaagctttatcagtcctcttggtgatttgttaagtaacgcaaaatcactccgcgtcatcttgttgtctactccatcatatgcagtggagaatatgttgcacaacttttcaaatctcgtccacttgcgctacttaaggattattaggggatattttccagaaataaggctacccaacaccatttcaaggttttatcacttgaggatccttgatgtacgaaaatgcaatggtcactttggtttaccaagagatatagataatcttgtaaggctacgccattttcttgtccccgatgacaatctccactctgacgttgctaatgtgggtaagttaaaatgtttacaagaactaaggagatttaaagtgaaaagacaaagtgagccatttgcattaagacagttaggacagttggagctgatttcttctcctcctactcatcatcttcctcatctttcccatttccttcctccctgaaatatctgtctattgaccgtgtaagtggcatggagactctgtcgctcctctctaacctcagctctctcaccaacttaggcatagaatgtggtgatttaagaggcgaggatttgtgttctctgctcgcccaaggccaactcacaaggctgcgagtcaacaagaaccccaaattcttcgtcgggatcaacccctcatcactgcagcaccttgtaacggatgacatcgcaggagtgcttgttgtgcccatctgcagactcctctccccctcactcaccaagctaaccattttttgcaataactaggtgaaacgcttcaccaaggagcaaaacatggcccttgagcacctctcctcccttcaggagctcagttttagtttttgccggctgcagttcctcccctctgtgttacacaggcttgttagcctcaagagattagagatctcgtgcagtgagttcatcagttcgttgcccaagagtggtcttccaagttcactagaaatactagatgtctctggaggcagcgaggagctcaaaaggcagtgccgcaagctaagaggaaccattccaatcatcaaagacagcgactgggatttgattgattctttcttggattagtatgtgccttattctagtcttggagaatcttctctgcatccatctccattgagttgataatcaacttgtgctgcttccatcacgtgtacaaaaactgctgttctgaataggtattggcagtgagagaattgtgggatttaatcccctgcacacagaaagaacttcaccttgtcgccgcctccaccgtctgtcagctaggtaacgagcaaacaatccttttccgggaggacaattggttgaatagatgctggacagccgaccgattgcggagtcggggattgccgcatcccgaccgctgcattctctgtgatcagcaggatgagagcattgatcatatcctagtcggctgcccagaatcaaggcagctttggtggtggactttgagagcaatcggccaccccaactgcctgctggtgaatgaagcttcttttcaccaatggatgtgcgatagcagaatggtgctaagtgagtcacatcgttgaggcttcgacacggtggtgacattggtagcatggacaatatggaaggaacggaacggtcggatcttcaatcagcagtgtagatcttgggcggatgtggccagagggatggtggacgaagcctctctttggcgtaaagcaaacccggcgatccttgcgctgtaattcaggagggagtttggtcgccaaaattagcgtgagagatagacttaggattgtctgttattgtcctgtatcagtcccgtgctgtttttttttctttcaaatgtaaataacttttatttctcttaatggaaaaaatgcgctccttgcgtattcccg

SEQ ID NO: 24126 - DNA, 948 bp, Oryza sativa
  ref <308>: DATABASE ACCESSION NUMBER: AK099568
  ref <309>: DATABASE ENTRY DATE: 2002-08-28
cctcccccttctccctcttctcttcttcctcatctcacatcgtctctatagctacctaccttcatctctctctagagctagagctagcacacaagagagagggagagagagagagagagagcgcttggttgttggcgtggtggatggcgcaagatgatgaggacgtgggtctagctctgggcctctccctgggctccggcggccacaggcggcagagagaaagtagagacgaagcgccgtcgtcggcggcggcgtccctgctgacgctgaggctcccggcagagagcggggggcagccgcaggtggtggtgaagagggaggtggtgcgggcggaagaggaggagtacgaatacgagtacgagagggcgctctactcgtcgtcgtcgccgcctgctagctaaattaatctcgatcatcatcctctccctgcatatgcatgctagcatgattaattaattaatcatcatatcagtgtgtagtgtacatatatatagtttatagtagtacatatattaattcttgcatgcgtgcttgcatctagtagtaaatatatatggctatagctagttagctcatcgatcagctggctctctcatgcatatgttcaccccctctgctttaattagttagcttcattttttcacaagttaattaatgtgtgaggaggatggactgagcactgccggccgcatctaggatcgatccagaaatcaaacaaaattttaattcaagttgttggttttgcttgcatctagctatagatggtcacttactggtgatgaattttattgtcaggggagttaagagtgttgtagttagatgacgacgacatgacacctagctagctagctagctcacacacatatatatactgtactctgtacgtgatccatgtattatattgatttgtttcagaaatattatatatcaatgtatattgatttgttt

SEQ ID NO: 24127 - DNA, 954 bp, Oryza sativa
  ref <308>: DATABASE ACCESSION NUMBER: AK099569
  ref <309>: DATABASE ENTRY DATE: 2002-08-28
gccttcgctgccggcgctcagcattttggctgccgcgactgcgcggggagggagcatcgttacgcgactgcccgccatggcgtctcctcgctgcgccgccgtcgccctcctccatcccgccggagtcgccgccggcggcggagctcgccggcgtgtcctcctcctcgaccaagagcggccgttgtgggggactgaggtgcgccggcgccggcgccggcgtttctcgagcctcgagacgccgccgcggtgcagcaagatgtacgtacccggcttcggagagggatcgccggagaagaaggcagcaagaaacctgcagcacttcttcaactacattgctgtcagggttgtgctcacacagcttgagagttacaaccgggaagcatatggtgagctgatggatttcgtgaaccgaaactccctcaacgacgctgatactttctgcaagaagttgatccgcgagtctccaaggcacaagcagctagcaatgaggatcttggaggtccgatctgcttatgtcaagcatgatttcgagtgggataatctgaaaaggttatctttcaagatggttgatgaggccaacacaaagctcatgagggactatgtcttggagaccagccacatcgaagacgataactgatgaattttgcagagtcccatcaggagatctatccattcatgacactaaatcaatgcccttccacggatacacagctacacgcgcgcatatctgacaatgttctgtcaatcttacatagtttgcatacaaggtgtatataaataacacaagctcaagccgaagctgaggaatctacaaagctctgtactgaaagtctgaagcatgatcccttagaacaccacaaagtgcagacagctgctacagatctgaaagatggcatgtacatggaacatggtatatgtagatagtcaaacataacttcaataaaaaccctggag

SEQ ID NO: 24128 - DNA, 512 bp, Oryza sativa
  ref <308>: DATABASE ACCESSION NUMBER: AK099570
  ref <309>: DATABASE ENTRY DATE: 2002-08-28
gaaaagaacaacaggtcgagcaagcggcgaagggaaaagaagcggagatcgtcccctccccgccgccgactggacgcatatgcgccacggctgccggtgagcttccccgccggcgacgagtggacctcgccccacgcccggctagatccggtgccacccccgccaccacgaggaatgttcttctggccgttcctagagggtcttttgattcttgcaaatgcattggcgatactaaatgaagaccgctttcttgcacccagaggatggagcatgtctgaagtctcaggaaatggacgatcaaagtcattgaagggtcagattgtaggactcatatatgccacacagttctttaggatgccgttgatagcacttaatgttcttatcattgttgtgaagttggtgtcaggctgatactatgaaggtttcagttgttgggcttgattgatttcaatttcaatgtgatgtaaaagtattcacgctaaatatttctgcagctatattaatttgtctat

SEQ ID NO: 24129 - DNA, 1066 bp, Oryza sativa
  ref <308>: DATABASE ACCESSION NUMBER: AK099571
  ref <309>: DATABASE ENTRY DATE: 2002-08-28
ttggtatcaaggataagcagccgaggaaaaggtatttgacggaagcctgcgatgtctgcggcgccggctgcgagcggctggttgcggccgtccgcgaccgcgcggctctgcgaggcggggttcttcaccgattacgccaaccccgccactacgcggatctgcatcggccggaggcggagcggtgcgccgagaaacatggcttcaagttgcatcatccaatttgggccgatgcaaaattgctcatgttaaaagtggagatgctgatggttacccaacgactgaagatttgtcaattgacgaggaaaccctgcagcgtaatttacagacagccatccaggaagaagattattcccgggctgcaaagataagggatgatctgcgcatcctccatgaagataccaaagcttccctccttgcagcaaacacacggttttacaatgctttcaagaatggcgatcttgcagcgatgtactctttatgggctaagggtgaccatgtatatgttatccatcctgctgcgggtcggatatcaggttatgacgtggtcatgcaaagctgggagatggtatgtggcgcagattatgagttcccactaaacattgatctgaaaaatgtagaggttcatgtgcatggtgaccttggttacgtcacatgcttggaagtggttaagaccaaaggaagaacatgggggaagcaagtcgccacaaacgtcttcgagaaggttgatggcacatggcgcatgtgtgttcaccatgcatcacacatagaggaatgaaaaccttagttgatttggcatggaaattttgcagaaaagctagacaggcaatacatgatttcgagatttctatcttagcagctgcatcattagtctatgttttctcgagtcaattgtatcgatgcttaagttttcaaactgaattttttgtggtttcgtttgagattccatagtggttggcatattatgtcacttgagattatatatgactagctatttttccatttctttttggcggctaactgggaatggacttgatctgcaagtaactcgtaccaggctacttcaccg

SEQ ID NO: 24130 - DNA, 1040 bp, Oryza sativa
  ref <308>: DATABASE ACCESSION NUMBER: AK099572
  ref <309>: DATABASE ENTRY DATE: 2002-08-28
gcttccgctcgctcgacggctcgagcttaaaaccctagagccgctcctcctcctcctcctcgcctaccccgaaacccaaatcccccccaaggcggacgcgcccgcaaagggtcgagcgcgctcatggctcgcgtgtacgtggggaacctggatccgcgcgtgacggcgcgggagatcgaggacgagttccgcgtgtttggggttctgaggagtgtatgggttgctagaaaaccaccaggttttgcctttattgactttgatgaccgcagggatgcagaagatgcaattcgtgatttagatggcaagaatggatggagggttgagctgtcaaccaaagctggtagtggtcgtggccgagatcgttccggtggttctgacatgaagtgctatgaatgtggcgaacctggtcattttgcacgtgaatgccgcttacggattggttctggaggccttggcagtggaagacgccgcagccgcagccgtagccggagtccaaggtaccgcggtcgtagtcgcagccgcagcccaagataccggaggagcccaagctatggtagaagcccacgggatcgttctccaaagaggcgcagctacagcaggtcgccaccaccagctcgtgcacgaagctacagccgatcacctccacctcctcgtgagcgaagctacagcagatcaccagcacagccagccaaccgcgaggagtccccctacgcaaataacgcgtaacccgcctagttccaatttgctggaaatgttaggggggctcggtgtgtttttgtaagcgcttgtgttatggagtcttgaaaagctatagggattgagtatgttcttcggaagcatttgtgtacccttcgggaaaaaccccgccgctgctgatacaattgttgaagcaggagcctagcgttttggtcgactgtatgactttgagaccccatgtagtccgtaagactaagttttgtaccattagatttttcacattgctggaatatttgtgctaaatactagtattattaattaatgtcttttgtaggtgctgctct

SEQ ID NO: 24131 - DNA, 1220 bp, Oryza sativa
  ref <308>: DATABASE ACCESSION NUMBER: AK099573
  ref <309>: DATABASE ENTRY DATE: 2002-08-28
gatcaggatcaagctcgtctcgttgatcaatggcatcagacaagtgctcatcgtttctactagcagcggcagcggctgcagtgctcgtcctcgcgtcggcgccggtggctcattcgtggagcaaggagggtcacatgctcacatgccgaatcgcgcaggatctgctggagccagccgcggcgcacgcggtgaggaacctgctgacggaggaggcggacggcgacctgtcggcgctgtgcgtgtggccggatcaggtcaggcactggtacaagtacaggtggacgagccctctccacttcatcgacacccctgacaaagcctgcagcttcgtctactcaagggattgccatggcgcggatggtgcggaggatatgtgcgtcgctggcgcgatcgcgaacttcacctctcagcttatgcactataatcacggcagcgccgatcgcaaatataacatgactgaagcactgctattcttgtcacacttcatgggagatgttcatcagccaatgcatgttgggttcacgagcgaccaagggggcaatacgattaatctacgctggttcaggcacaaatccaatctccatcatgtgtgggatagggagatgatactcacagctattgctgaattctacggcaaggacatggatgcgtttcaaaaggaccttgtgcacaacttcaccacgggaacgtggtctgatgacgtatcctcttggggagactgcgaggatctcctgtcttgctcaaccaagtacgctacagagagcataaatttggcttgcaaatgggcgtacaacgatgtccgtgaaggcgaaactctgtcagatgactacttcggctcacggctcccgatcgtgacacgacgaatcgcgcaggggggagttaggctggccatgttcttgaatcggctcttcggggagcacaaccgtgacgtcgcatcaccagcctgaactgatagctgcttcagaattcagaaaattcagaagttaaccacacgtgtaatctaacagccgcatccatttcattttatttttacgtgatacgtgactctatttttacgatgaatagttgatgccaacaatgctgattaattaaccacatagtaatacaagtaagcaacgcttgaaatcaacaggacatagcaaaccaattccattcttttctgatcataaagagatgtacatccacatgtatgattaattgtatctagacaagattcaatg

SEQ ID NO: 24132 - DNA, 947 bp, Oryza sativa
  ref <308>: DATABASE ACCESSION NUMBER: AK099574
  ref <309>: DATABASE ENTRY DATE: 2002-08-28
ccagaagccactgctgcagcgtgactctgctctagcacctcaccaagcagaaagctagagagctagcaatggcgcccaccgtgatggcctcgtcggccacctccgttgctcccttccaggggctcaaatccaccgccgggctccccgtcagccgccgctccaacagcgccggcctcggcagcgtcagcaacggtggaaggatcagctgtatgcaggtgtggccgattgaaggcatcaagaagtttgagaccctgtcgtacctgccaccgctcacggtcgaggacctcttgaagcagatcgagtacctgctccggtccaaatgggtgccttgcctcgagtttagtaaggtcgggttcgtctaccgtgagaaccacaggtctcctgggtactatgatggcaggtactggaccatgtggaagctgcctatgttcggatgcactgatgccacccaggtgctcaaggagctcgaggaggccaagaaggcatatccagatgcatttgttcgcatcatcggcttcgacaacgtcaggcaggtgcagttgattagcttcatcgcctacaagcccccgggttgcgaggagtccggcggaaactaagctagttggcaagccagcaagctcactcgtgagctctatacagaggagactcgattgatctattcggttttggcagctttgaacgttcgaatcgggccaccttgcattggtttcccctttcccagtttgttgcttcagtttttttttttcatcttgtttgtgtcaacatcagctgtgtatgtatgtacatatgtatgtatcaacataggttgaagagcatgcatatgtgaatgctagcaccaggctaatcatatgcacatacacatcgtaataaatatattgtacaaatcgtcaaaaacgatacttatatgtaatactatactcagaccaaacttgatacctctggtttcc

SEQ ID NO: 24133 - DNA, 979 bp, Oryza sativa
  ref <308>: DATABASE ACCESSION NUMBER: AK099575
  ref <309>: DATABASE ENTRY DATE: 2002-08-28
tattgtggcaagatgaaagcactagcagatgaaatcgctagttcagggaaaccccttgatgaggaagatttagtcgcttatgttctgaatgggctagatgatgattttgaacctgttgtatctgctattgtggcacgcaatgagtcgaccacaatggcggaagtgtactctcagcttcttaactttgagaacaggcaagctcttcggcaagctcatgcttcggcgaacgcggccgtggtggttttcagcgtggtcgcagcggcggccgtggcacacgtgggcgcagcaatcctgctgctccaggacgtgggcgcggcactggaggaaatcagactcggggtggtaatgaccgccccatctgccaagtgtgcctgaagagggggcacgtcgctgcagagtgttggcataggtacgatgagacctatgtccctgatgaaaggagtgcggctgcagcagctgcatatggcatcgacaccaattggtacctcgacacaggggcaaccgaccacatcaccaacgaactcgacaagttagatgttcgggagaagtacaagggaggagacaagattcacaccgcaagcggtgcaggatcgagccacgaggaacacgattcttaaggggagatgccgccgtcgcctctactcccttcctacatcacctgccaagcaagtccatgccgccacaactccttccttctcccgatggcatagtcgtttgggacacccacccgtgcccatagtcactagagttcttagcaagaataatttaccttgttctaccgtagcaaataaagactcaatttgtgatgcctgtcaaaagggcaagagtcatcagcttccctatcctaagtcttcaagtgtgtcaagtcaacctctagaacttattttttctaatgtctggggccctgctcctatttctgttggtggaaagaagttttatgtcagttttattgatgattatagtaaatttacttgggttt

SEQ ID NO: 24134 - DNA, 825 bp, Oryza sativa
  ref <308>: DATABASE ACCESSION NUMBER: AK099576
  ref <309>: DATABASE ENTRY DATE: 2002-08-28
ggggttgcagctgcaaacgagaaatggtcggtccatgcttgctcagcatgatcctgatctcttctgcatttgcatccatggccaaataatacacagctatttgtacagttgtagctgatctgtactgtctgatcgatttgtatatatctttgcatgcgcaggccggctcgctggtgaagctgggtgcgtggggcggcgaccacggcgggaaggagtacgacgtgacggtggcgccgcagcggctggagggcttctggctccgctacggcaaggtcatcgactgcatctcttctcctacctcgacaaggacaagaacctccacaccatcggccccctggggcggccaagggcggcctctccgagtagaccatcacgttcgagccatcggagtacgtgaaggaggtgcacggctcgtggggcccatcggggactacacccacgtcgtcacctcgctcaagctcgtcaccagccaacgcaccatcgggccgttcggcaacggcgccggcacgcccttcgccgtccccgtcctcaacaacggcagcgtcgtcggcttcttcgcccgcgcggggccctacctcgagtccatcggcatctacgtccatccattttgagttctgatccaggacgaacacgcagcatcatatccatctttcgattcgatttccaaattccaatcgatcggtccgcggcatcccaatttcagtagctgtggatctgtggttttcctttttaatttatattattgctttcgattatgattcatggaagggacttcttcgatcgattgtattcttttgccgtctattaatttgtcatctgaaatgc

SEQ ID NO: 24135 - DNA, 2693 bp, Oryza sativa
  ref <308>: DATABASE ACCESSION NUMBER: AK099577
  ref <309>: DATABASE ENTRY DATE: 2002-08-28
ggctcgcgcaacaacagcagcctcaaaaccctagctgccctcgcgaccgggtcagggccttcgattggatcggccattcggttcgttcctccaggatattgttggtacttgcattcctccgtctgttattcaagaaagccagtttacactgagagaaccttgctttatttggttcattggccttttgttttgcctgagtgaatgcaattggaaccttctgggtagaagctgaagcttagtttggaacttcatcatactgatttcatactcagaaagtggcgagaaatggatcgtgatgatatagctggtttcgtaggtggaggttgcaaggccttctgagttttctgacgaagcagatgataatagagttatgatatacagaagtcaggcaactggttcttttcatttactatttggttgacgtttgaagtttgttaactggaatggacaaagcatcatgtggccttgggtttggtgatagtatcaactccttagacacgtcccgtcattggagcactgttcagcatacttctgggcttaaagctactacaattgactattcaacgtattccagtttttctattgcaagctcaaaaacactaaaaaggaagcgaagtgctatggcaggaccagaaggtactggaaacccattacttactttgggtttagggcactcaccaagttcatctgacaatagcaaagttagttctgccacagcttatgcaatgtctccatcttcattgaaagaggctgatgaggagtcatcagctgatcttggcctgaattttgagctttgccttggcaatgatatggtacattgtcaaaagaaatcccctgttggtgctgagaattcaccattgacaaactctcataaattggatcttcagctgagtttgtctactggatcacctgaatcagctgtcaccaacacaaatatggtgtcaccgattattcacggtggcttggagatacctgttaccaactgttcaccagctattataggggaaggatctgtaccctgtacttgggttttcgagaagtcagtgatttcatcttcgtatgcctctgaagcaacatataccttcccattttcgaaggtacccaaaacaggggatgctgctatgtcttctccagtcatatcgtcaaccttggtaacaagtatgaaaagcccagttgcctgtacttctgggtcaattaatccccaacaacgcaacagtatcactaaaaactgtcagtttccaggatgtgttaaaggagccagaggggcatcggggcattgcatagcccatggcggtggtaggagatgccaaaaacctggttgtcagaagggtgctgaaggaaggaccatatattgcaaggcccatggtggaggaaggagatgccaatttcttggatgcacaaagagtgccgaagggcgcacagaccactgtatagctcatggtggtggtcgccgctgcagtcatgatggttgttcccgggctgcacgtggcaaatctggcttgtgcatcaggcatggaggtggcaaaagatgtcagaaggagaactgtatcaggagcgccgaaggtcattcaggcttctgcatctctcatgggggtgggaggcgttgccaatttccagaatgcacgaagggtgcacagggaagcacaaagttctgcaaggcgcatggtggaggaaagcgatgcacattctcgggttgcaacaaaggagctgaaggcagcactctcttttgcaagggccacggtggaggcaagcgatgcttatttcagggtggtggtgtgtgcccgaagagcgtgcatggcggaactcaatactgtgttgctcatggtggtgggaagaggtgtgctatttctggttgcaccaagagtgctagagggcgtacagagtactgcgtgcgccatggaggtggcaagaggtgcaagtttgagggctgcgcgaagagtgcgcaggggagcaccgatttctgcaaggctcatggtggaggtaagcgctgctcatggggccaggttgacttgaacttcggtgtcggcgcaccacagtgtgataagtttgctcggagcaagactggtctctgttcagctcactgtgctttagtccaggaccattgtgtccgtggtggtacattaggcgctgcaaccttccagttcgcaactgatgccaaattcgacgagatggaagtcaccccagtgaagggagatcctcacgcgcaggcaagcagcgacgaccagtctcatctcggtggtgctcatcctcctgctgtaccggcgatcacctcggatcgattttctgaaggaagagtgcatggtggtgggctactggccttactttcacggggtggaaaccatgcgaatgcaggtaactcaaagaatggcgcccttctaccatgatgacatgggagtgagattctcttcaagaaattggtggctcgcagttttgatctgtttccaagagtttgtgctgtgacggacgggaaaaactagtgttttcacatttcaccagatgttcttgtgatgcttggatttgttgttatggccctctcccgtgtgctatatataaataaggagctcgtagagcgtggagtaccgggctttctgtcttccgtgctattgtagttgatgtcgttgaactgcccttctgtcagaattcatgtaatcttggtacttcgtgtttatttgtattgtcagtgatttgccttg

SEQ ID NO: 24136 - DNA, 1487 bp, Oryza sativa
  ref <308>: DATABASE ACCESSION NUMBER: AK099578
  ref <309>: DATABASE ENTRY DATE: 2002-08-28
ggggcggcggccaacttcccaccccccaaacctcaccgccgctcgatcccatccaccgcccatggccgccgccgccgatgacctcgcgcgccgcctcgccgcgttcataccgctcccgcagccgccgcagaaggagcagctctccggcgtggccgcggcggtgctcgacgccggcggccgcctcggacgcgctgtgggcgacgtgttccgacgcctgcgcatcgacgaaggcctcgacgtcgccttggcgcagcggcaccgcaggaacgggggttccaggatcgccgccgccgccgccgccgttgatgcgcgggtcagcaaggacagcggcggcggcggcgtcgccgggcacgatccggtcggcgtctccggccggttcgcgcggtcgcaggggagcatgaacctgtcggcgacgtacgacagccggacgagcgacgtggagagctcggtggtggcgaggggggacctgtggcgcgccgaggcgtcgcacagcagcgccgccgcggccgcgccgccgctgttcatggtgcagctcggcccggtgctgttcgtgcgcgacaccacgctgctgttcccggtgcacctgtccaagcgccatctcatctggtacggcttcgagcgcaagaatggtgtgcattcagtctgtcctgcttactggtcagctcacagaagatggttcttcatgtcaatgatttgcctaaatccttttacttgttcattcatggacatgcaatttccaaatggacaactaagatatgtagccggcgatgggttcactactcgcgcatttcttcctctatgtcgcgggatctttcaagcccatgcgaaattcccaggagagaagaagtttagttactcattcaagaacaggagtggaggaagcatcactccaatggtgcagtggccagataagtctttctcactggggactatccaaacactgtcatggaagagatgtggccttatgttgcaaccagccctgcaattcagcatatgccctactttcggtggaagccgtccgggtttgtccatggagttgatccattcggtgaatgagaatgctggtgttgtttgtggctactctcacactgcttctccttctgcctatgcgtctatatcgattgggagatcaaagttgaacgggagtgcagcaagttcagggttagtgttgagagttgacgctcccctccatagctttggccggccctggttctctattcagatgaacagcggtctggagttctgaacttctggttgttcagtgtttttcttcaaactgaacaatgcagaaagtattacattgaagaaacacttgtatagacagtcaaatgttgcaggaaccgattgcttctttgttggtgatcggtggaatgccagatctcctagccaaaatttacaaaacaaaatttgtggacagtgatgtgtgtatatatgtgtgtcagaaagtatatatattttttaataatgaaattcatttcgacccttgc

SEQ ID NO: 24137 - DNA, 2315 bp, Oryza sativa
  ref <308>: DATABASE ACCESSION NUMBER: AK099579
  ref <309>: DATABASE ENTRY DATE: 2002-08-28
ggtcggaaaccctcgaccaatctcacaaccctctccatggccgcctccgtctcgcccgccgcctcccctccccgccgccaccgccaccgccacgacgactcccctccccgccgccgccgccgccacgacgacgactccccgcgccaccgcgacgaccgcaagcgccgcgcctccccgtccccgtccccgtccccctccccctccgaccgcgacgccgaccgccaccgcggcaaatctagggcttccccgccccgccgcccccgcgattccgaccccgccgagagcaacggaggaggagcacccaagcctggcggggacaacggcggcgaccgctccccccgccgcgctagggtgcccgatgcggaggaggagggtggtgaccgcaggaggaggccgtcccgggtttccgacgacgacaaggagggcggccgccgccggaggaggcgctccaccgactccgacgacgagagaggcgaccgccaccggaggcgccaccgccgccggagccccagctcggagtcctctgatggtggccgtagccgtcgccaccgtcgtgacgagagctccaggcggcagagagatgagaggcgccgggacaggggcggtcgcgaggagcgacgcaggagccctgataggaaggagccgactccgccgctgcccccgccaccgccgctcttgccggagttgatacccggccgcacaggaggaatctacatcccgcctttccgcatggcgcagatgatgagggaggtagaggacaagtcgagtcccgagtaccagcgtctcagctgggatgctctcaagaagagtatcaatggtctggtgaacaaggtgaatgccaccaacataaagaatatagtgcccgagctgttcgccgagaacctggttcgtggaagggggctcttctgccaatcgtgcatcaagtcgcagatggcttcgcctggcttcacagatgtgtttgctgcacttgtcgcggttgtaaataccaagttccctgagattggccgcctgcttcttgttcgtgttgtgcttcagctcaagagggcatataagcgaaatgacaagccacaattgcttgcagcaaccaaattcatagcacacttggttaaccaggttgttgctcatgagctcgtggcgctggagcttcttaccgtgctgcttgagaacccaactgatgatagtgttgaggtagcagtggggtttgttaaagagtgtggggcaatgctacaggacttgtctccacaagggcttcatgctattttcgaaagatttcgaggtattcttcatgaaggtgaaatagacaagcgtgtgcaatttttaattgaaggactgtttgcaattagaaaggctaaatttcagggattccctgctatccgtccagagttggatcttgtggagcaggaagaccaatttactcatgagatatcccttgaagatgagctagacccagagactaatctaaatgttttcagggcaaatcctaattttgctgaagatgagaaggcgtatgagaacctaaaaagaagcatcctgggagcagaatcttctgatgatgaagaagggtctgatgatgcttctgatgaggacgctgaagaagaatctgacgatgaagaggatgaagagcagatggagattagggatcaaactgagactaatctcattaaccttcgaagaaccatatatttgacaattatgtcgagtgttgattttgaagaagctggtcacaagcttctaaaaattaaactcgagcctggccaagagatggaattgtgcatcatgcttctcgagtgttgcagtcaggagagaacttatcttcgatattatggattattgggccaacgattttgcatgattaacaaagtttaccaggagaactttgagaagtgttttgtgcagcagtattccatgatacatcgtcttgaaacaaataagctaaggaatgttgctaaattttttgcacatctgttgggtactgatgcacttccttggcacgttttggcctacatcagattgactgaggaggacacaacgtcttcatctcgaattttcattaaaatactcttccaggagttgtctgaacatcttggtattcgtctactcaacgagaaactgaatgatcccaacatgcaagattcatttgattcaatattcccaaaggatcatccaaagaatacaaggttctccataaattttttcacctccattggtcttgggggtatcacagagaccctgagagagtacttgaagaatatgcctcgactgataatgcaacaacagaaacccgcctcttctgagtcgggatcaagtgattcagg

SEQ ID NO: 24138 - DNA, 2080 bp, Oryza sativa
  ref <308>: DATABASE ACCESSION NUMBER: AK099580
  ref <309>: DATABASE ENTRY DATE: 2002-08-28
gggtgcagtagtagtagcatgcaaaggatttgccctgctcactgctcggtcactcactcactcaccatgaagtccatgaggctttcctacatccctcctgctgcttctgctgctccacagagccccagctatggcaggaagaagaacgcctccgccgctccgccatcggctgccgcctccaccaccgttctcacctccccgctggtgaccaccacccgcactccgaagcagaccgagcaagaggacgagcagttggtagccaagaccaagactacgagaactgttattgctacgacgaatggcagggcggcgccgagccagtctcggcctcgccgccggcctgcccccgccgccgcggcgtcggccgcttcgctgccgatgacgttctgcaacgcgctggaggaggtgatcaacacgttcatcgacccgccggcgcttcggccggcggtggacccgcggaacgtgctgaccagcaacttcgtgcccgtggacgagctgccgccgacgccctgccccgtcgtgcgcggcgccatcccgcgctgcctcgccggcggcgcctacatccgcaacgggcccaacccgcagcacctcccgcgcgggccgcaccacctgttcgacggcgacggcatgctgcactccctcctcctcccgtcgcccgcgtcgtccggcgacgaccccgtcctgtgctcgcgctacgtgcagacgtacaagtacctcgtggagcgcgacgccggcgcgcccgtcctgcccaacgtcttctccggcttccacggcgtggccgggatggcgcgcggcgccgtcgtggcggccagggtcctgaccgggcagatgaatccgttggagggcgtcgggctcgccaacaccagcctcgcctacttcgccggccgcctctacgcgctcggcgagtccgacctcccctacgccgtgcgcgtccacccggacaccggcgaggtgaccacgcacggcaggtgcgacttcggcggccgcctcgtcatgggcatgaccgcgcaccccaagaaggaccccgtcaccggcgagctcttcgcgttccgctacggccccgtgccgccgttcgtgacgtacttccggttcgacccggccggcaacaagggcgccgacgtgcccatcttctccgtgcagcagccgtcgttcctgcacgacttcgccatcaccgagcggtacgccatcttcccggagatccagatcgtgatgaagcccatggacatggtggtgggcggcggctcgcccgtggggtcggaccccggcaaggtgccccgcctcggcgtgatcccgcgctacgccaccgacgagtcggagatgcggtggttcgaggtgccgggcttcaacatcatgcactcggtgaacgcgtgggaggaggccggcggcgaggagctggtgctggtggcgcccaacgtcctctccatcgagcacgccctggagcacatggagctagtgcactcctgcgtcgagaaggtgcgcatcaacctccgcaccggcgtcgtcacgcgcaccccgctcgccgccgggaacttcgacttccccgtgatcaacccggctttcctcggccgccgcaacaggtacggctacttcggcgtcggcgaccccgcgcccaagatcggcggcgtggccaagctcgacttcgaccgcgccggcgagggcgactgcaccgtggcgcagcgcgacttcgggcccgggtgcttcgccggcgaaccgttcttcgtggccgacgacgtcgagggcaacggcaacgaggatgacgggtacttggtgtgctacgtccacgacgaggccaccggcgagaaccggttcgtggtgatggacgcgcggtcgccggacctggagatcgtcgcggaggtgcagctgcccggacgcgtcccctacggcttccatggcctgttcgtcacgcaggccgagctccagtcacagcaccaatgatacaaaccaacgtagcaatgtatagaattcacgtatacattttccatacgaaattacgagttactgtggaacacgtagtataagtgcacacatacttcgagaaaattatgtagagtacatatgaaatgaaagaatgattttaacc

SEQ ID NO: 24139 - DNA, 2999 bp, Oryza sativa
  ref <308>: DATABASE ACCESSION NUMBER: AK099581
  ref <309>: DATABASE ENTRY DATE: 2002-08-28
gacattctctccctcatcttcttctcccttgagatgttcttgctgttcttgctccaatctcctcttgttttcttgctgggagttgtggtggctgctgctgctgagctaggagtagttcacatgtgtgtgagctgaagctgaggttggttgcttgcttgcttggccatctggaacagtcagtgtctctgcttttttcctcccatttttttagtttatttttttggctgcagagagagagagagagagagagagaactctgctttcttctccaactccctcccttttgctttcccacctctttgcctcaataatgatggggtggtggagatggtggtgggtttggtcctgaagctccatgcccactctctccagctctctcctctccctgtccaaatccaccaccagcttctttctttccattttgcttctccctttctcttttcctgttctagttggggagcagcagcagcagcaggaggagcagtagtagtaggttgttggttttgtacctttgggctctttgcctttgctttcttgctggggattgggaggcctgccttgaagctgaatcccaatcttcccctgcccacatctgcttcccagcatcctgcaactttggttataaggtggttggtttttgttcttgatttgcttcatcgattgggaggtttcttgctgttcttgggttttgtgctgtgaattggattgggaggttttttgttgccatgagggcggcggaggagaggaagggtgtggtgccggcggcgaggaggagggaccagttccccgtcggtatgcgtgtcctcgccgtcgacgacgacccggtgtgtctcaaggtgctcgagaccctgctgctgcgctgccagtatcatgtgacgacaacaaatcaggctgctatcgcgctgaaaatgctgcgggaaaacagggacatgtttgatctagttatcagcgacgtccatatgccagacatggacggctttaagcttcttgagcttgtggggcttgaaatggacctccctgtcatcatgttatctgtgaatggagagaccaaaactgtattgaaggggataacccatggtgcctgcgactatctcctaaaacctgttcgaatcgaagagctcaggaatatctggcagcatgttatcaggaggaaattcagtactcgcgaccgtgctaatctcgatttctatgaagagtgcaacaagccaccaaatgcggattcagaccatgtgcatggccatgttacatgtggatcacctgatcaaagtgggaggcccagcaagaagaggaaggagtactgtagtgaagaggaggatgagggtgaggtcaatactcaagatattgatgatccctcggctccaaagaagccgagagttgtttggtcagttgaactacaccggaaatttgtcgctgctgtcaaccagcttggaattgacaaggctgtgccaaaaaggatacttgagctcatgaatgttgagaaactcacaagggaaaatgttgcaagtcacctacagaagtacaggctctatctcaaacggctaagcgctgtggcgtcgcaacaagttagcatcgttgctgctttgggaggtagagacccctttctgcacatgggtggatttgaaggactacagggttatcaagcttttacctcttccgcagctctatcatcttttactccacatggattgttaaacagtcctagaaacaatccagcagctcttggaactcagggggtacctgcttcaaaatcgattcagactatgagcggaagccatacattgagccattccattaatgatgcaaataagtaccaccttagcttaccaggaaaccagaaaggaaacttgggacaaggtttggcaacatcgcttgggcagacccaaatgcaacagaagtggatccatgaagaaaccgatgatctgtccaccatcctttctgggaatggcctatctaatggtatgtctggcacactccaaagtgtcacaagcagtcctttgctgcctcaagaactagccgagtgcacacaagccaaaattgtcagtcagccatcaattcgaacttcctctgtaagttcagaacatattgaaggcgccgttggagtttcatctggtctgcttgaatctcgtgtatcccagcagagtactattcctttatcaggattttccgccaacgggttgctaatccatggttcgtttaacaatacctgtgcaaacaaattgggtggtacatcttcatcgtgtgcacctgctcgctcttcaaatgaccttatggtagcaagagacacaaaaggtggagctagctcttttggtggcgcgatgcttttacctccagatacagagcaaaagtacttgaattttggaggtggaaacggtttgaaacagaagttcgatgataggactgcagacagtctgtttgatctcaagttcgtatggagttctgtaccgagctctcaattggcaagcaacattggggctcatcatgctatgagccaaagatggaacaatagcagtagtaacagtagcaatattggtgccagaatgattgggcaagcaacctcaagtggttcaacagttatcccacaaatgaagacagatttcctcgtttcgggagatatggcgatgccgaagaacgcctccgatttgagcatcccgaaacttcagagcgaacttagctctagcagctgcagcttcgacggccttctcaattccatagtcaaagtggagaaggatgatgttaccttcagcgacgacctggggtgcggcgatttctactcccttggagcttgcatatgacagatctctcgtctgcatctgtgtacatgtccccccattgtatgctgtgtactagctagcagtgttagtttgtgatgtaatctagtctaggcctgtgtatctatgtcaatatatgtattgtagtagtaatctggaggacgagatgggttgccaactcgacctagaaagagagacattgatggcttgtataaacctgagcttactgtc

SEQ ID NO: 24140 - DNA, 3073 bp, Oryza sativa
  ref <308>: DATABASE ACCESSION NUMBER: AK099582
  ref <309>: DATABASE ENTRY DATE: 2002-08-28
gagtatttcttctgctgatcgagccactgaatcgatcagctccatggcgccctctcctgttatccttgttatggctgcactgtttctccaagctgcaacaatggcggcaacaaccgcgctaaccgtatcgctgccgggctgcccgagctcgtgcggcagcatggtcatcccctacccgttcggcgtcggcgccggctgccacctcgccggcttcgccgtcacctgcaaccgctcctaccacccaccgaagctcttcctgcgcgacgccgacgccgctgaggtgctcgagatatccctcctaaactccacggtgatcgtcagcagcgccgtccggtacgacgccgccaaaggcgagggcgcgtggggccgcggcctcgccggcgcgttccgcctcagggagcggcggaaccggctcgtcgtcgtggggtgcaacctgcaggccgtcctcctggacggcgacgacatcgccgccgcgtgcaccaccatctgcggcggcgccggcgccacctggccagcagcggccgacggcgagctcgcggattactcgtgcgcgggcgttggctgctgccaggcttccatctacctaggcctcacgtcgtacggcgttcggctgtcgccgttcggcacaagcaccgggccgccgccgccgccgccgacctcctccgcctcgtcgtctaaccaatcggattcggctctcgtgttcgtcgcggacaacgagtggttcggcgggaacgcgagtaagctcggatcagcagcagcgacgatgcgaccgggcgtcggcggcatgccggtggcgctggccgtgctcgactgggcgatcgggaagtcggggtgtccgccgcatgggcccgacgacacggcctgtagcagcagcaacagctactgccgcaactctaccagcacctcgcttggcggctactcgtgccagtgcgacaacgggtaccaaggcaatccgtacgttgcaaatggatgtcaaggtaatttgttactccctacttccctaaatgtttgatgccgttgactttttaaaacatgtttaaccgttcatcttattttaaaaacttttgtgaaatatgtaaaactatatatatacataaaagtatatttaacaatgagtcaaatggtaggaaaaaattaataattgcttaatttttttgaataagacgaacgatcaaacatatttcaaaaagtcaacggcgtcaaacatttagggatggagggagtataagggtgtaaccatgtaagtggagaaacaactgagggtcttctgattagcttcacaaggtggtgggctagctgttctgggttcgatgcctcacccttctatttagtttgatattaaatcatttcctaatattttagcttataagtgtgtttaacggattagtcatttacacttgaagttgcataagtatagcctctcatcgtttgcttgctagattatgagccgcggctaaaatctaaaacctaattttaaagttgattttagttttcttattatagtcaatcttttgccgttaaaattttaaaccgctattaatagttttatttataaattatttttgttcgtttagtatatttttctatggcttaccaaccatagttcaaatgattagtggaatttagaacagaatggtacaaaatttttctaaattctccctttcagatatcgacgagtgcgctctgccagaagaatatccctgctacggtgaatgcacaaacaagccaggatcgttttcgtgcatgtgtccgggtgggacgcacggtgatgctatgaacgaaggaggatgtgaaccaacgactctccttgtggcgataggaggaaccatcggcataggaattccatccgtgttcgtgataggcatggcaatgacgaacatgatcaaggcacggagggccaagaaactgagagccgtattcttcaagcagaaccggggtttactgctgctgcaacttgttgataaggtgattgctgaaaggatggtatttaccttggaagagctcgaaaaggcaacaaatcgattcgacgagatgagaaagctcggcagcggcggccatggcactgtctacaaaggcaccttgccagacagacgtgtcgttgccatcaagaaatcgaatattacggttcgtaaggagatcgatgatttcataaacgaagttgtcattctttcgcagatcaaccatcggaatgttgtgcggttattcggatgttgccttgaaacacaggttccactactggtctacgagttcatatcgaacggcactctttccgaccatctccatgttgaaggccctacattgttgtcatggaaaaatagattgaggattgctcttgaagctgcaagcgctttagcctacttacattcatccgcttcagtatcaataattcatagggatgttaagtctgctaacatattgcttgatggtcgcttaacagcaaaagtttcggactttggagcctctcgaggcattccggttgatcaaggtggtgtgacaacagtgatccaaggcacatttggatatcttgatcctgaatactatcaaacaagtagattgaccgataagagtgatgtgtacagttttggtgtcatactcgtggagatgctcacaaggaagaagcctactgtttttgaatcatcagataatgtcagcctaattgcactttttaatttgctaatggtacaggacaacatctacgagatattagaccctcaggtaatttcggagggcatggaaaatgtaaaagaagtcgcggcgctagcatcggcatgcctaagattgaagggggaagagaggccaacaatgaggcaagtggagataaggctggaaaggctgttaggcggtgacattttgcaagggctttcagctgagctgcactgtctaccacctcaactgagcaataccgacactactagcaagctatacaacatggagcgggattttttgctatcgtcgagcttcccacggtgatcttactacatgtgtacaaactacatacaactttaccacttaaagttgtttagcatgtgtttgatttgaagatgaggtgagatgtgttagatgaattgggatc

SEQ ID NO: 24141 - DNA, 2791 bp, Oryza sativa
  ref <308>: DATABASE ACCESSION NUMBER: AK099583
  ref <309>: DATABASE ENTRY DATE: 2002-08-28
gaattacggaccagagtgcccagagcgcttcatgctttgcctttcatcttcattcattccaccgtgctttgcagctgagaacgcaacatggcggaatcgcttcccggtggtgcgcggggtggctggcaaggcggcgaacgcgctcgtccagagcgtcacgcgcgtgtgcggcgtcgacggcgaccgccgcaagctggagcgccagcttctggcagtccagtgcaagctggccgatgccaaggcgaagagcgagactaagggtgtaagtgggtcagccgcgaacctacttataggtcaaaataagcgggctcgcggcttattttagcctataagtgggtttcacgggttagccacttacaaccctaagcgagaccaaccccgccgtcaagcgctggatgaaggacctcaaggctgtcgcctacgaggccgacgacgtcctcgacgacttcgagtacgaggctctgcgccgcgaggtcaagatcggcgactccaccacccgcaaggtactcggctacttcacgccgcatagcccactcctgttccgtgttaccatgagtaggaagctgggcgatgtcctcaagaagatcaacgatctggttgaagagatgaacaagtttggcctgatggagcacacagaggcgccacagcttccttatcggctaacacactcggggctggacgagtcagcagacatatttgggcgagagcatgacaaggaggtgttggttaaactgatgctggatcagcatgatcaacagaatttgcaggttctccccatcgtggggatgggcggtttgggcaagacaacgcttgcgaagatggtgtacaacgatccgattgtccagaaacatttccaactgaagatgtggcactgtgtttcggagaactttgaacctatttctattgtgaaatccatcattgagttggctacaaatagaaaatgtgacctacctgactcaattgagttgttgcgaaggcgacttgaaggagtcattgacaggaaaaggtttctacttgttcttgatgatgtatggaatgaggacgacaacaagtggaatgaacacctaaggccacttctgaattctgtcgggggtccagggagcattatagtcatcacaactcgcaatcggcgggtggcatctataatggaaacccttcaaccctataagccagcatgtctaagtgaagatgaatcatgggaattgttctcgaagagagcgtttggtagagacgtacaagagcaagaagatttggtcaccattggcaaatgtattgtacataaatgcaaggggctgccacttgctctgaagacgatgggcggtctaatgagttccaaacaccaagtcaaggaatgggaagccatcgcaagaagtaatattggtgatagtgtcaaaggaaaagacgaaatcttatcaatactaaaattgagctacaaacacttgccatctgaaatgaaacaatgcttcaccttctgtgcaattttctgcaaggactatgagatggagaaggacatgttgatccaactatggatagcaaatggttttattcaagaagagggcacaattgagttgtcacaaaaaggcgagtttgttttcaatgagttggtttggagatcatttcttcaagatgttaaaacaatattattcagaagcttagattatgactttgttgtatgtaaaatgcatgatttaatgcatgacttagcaaaagacgtttcaagtgaatgtgcaactacagaagaactgattcaacagaaagcaccatctgaagatgtttggcatgtgcaaatatcagaaggtgaattaaaacaaatcagtggatcattcaaaggggaattgaggagctcaaacagttgagataccttaccaatatgttggggctgtacaatttgagaaaaataaagagtacatcgaacgcgaaagaagccaatctccatcagaaacaagagctgagtatattacgattattttggggctgcatgtcatcctacatgcctggagacaaagacaataatgaggaagaaatgttggaatctcttaaacctcacagcaagcttaaaattttggatttatatggttatggtggaagtaaagcctcagtgtggatgagagaccctcaaatgttccggtgcttaaaaaggctcattattgaacgatgtccaagatgtaaggacattccaacagtgtggctatcagcctctcttgagtatttgtccttgtcttatatgactagtttgatctcattatgtaagaacattgatgggaacaccccagtgcagttatttccaaagttgaaggagttgatattatttgttttaccgaacttggagaggtgggcagaaaacagtgagggggagaataatgatgtgatcattttcccggagcttgaaagcctagaattgaagagttgcatgaaaatttcaagtgttccggaaagcccggctctcaaaaggctggaggctctggggtgtcacagcctctcaattttctcactttcacatctcacatcattgtctgacctttattacaaagcaggtgatattgactctatgaggatgcctttggacccttgttgggcttctcccgtgagcttagatgttagctcaccagcgaacatgatggtgcctctggaagacaagaaaagccgtagacccttcgaagccctacggagcttgactctgcgtggttctaactgcttcttagcaacgtgcagtttgttttttgccgggacggccaaaggtaggccggccaatttcattaagattgggggaaataaagttttaattacaatg

SEQ ID NO: 24142 - DNA, 1230 bp, Oryza sativa
  misc_feature (528)..(528): "n"=any one base of a, t, c, or g
  misc_feature (679)..(679): "n"=any one base of a, t, c, or g
  misc_feature (694)..(694): "n"=any one base of a, t, c, or g
  misc_feature (762)..(762): "n"=any one base of a, t, c, or g
  misc_feature (835)..(835): "n"=any one base of a, t, c, or g
  misc_feature (953)..(953): "n"=any one base of a, t, c, or g
  ref <308>: DATABASE ACCESSION NUMBER: AK099584
  ref <309>: DATABASE ENTRY DATE: 2002-08-28
gagagtgggtacgaacgaggtatacatacatacatagcttaattagcagcacggtagctctaagacggatcgatcgatgcagagcagcagcaggcaatggcatcagcaatggcgtcgtcccagtcccatctggatctggtacagctgctaatcgtggtggtgatgactatgacgatgctggtgggtggcggcgaggcgctgagcctggactactacgccaagagctgccccaaggcggaggcggcggtggcggcggcggtgaagcaggccatggccaaagaccgcacggtgccggccggcctgctccgcctgcatttccacgactgcttcgtcagggggtgcgacggttccgtgcttttggactcgtcggggaacatgtcggcggagaaggacggcccacccaacgcgtcgctgcacgccttctacgtcatcgacaacgccaaggccgccgtcgaagccctctgccccggcgtcgtctcctgcgctgacatcctcgcgctggccgccagggacgcagtcgccatgtcncggtggtccttcttggcaagtgccggtggggtcgtcgtgacgggcgcgtgtcgctggcgagcgagacgacgacggcgctaccggggccgacggcgagcttcgaccagctaaagcaggcgttccacgggcgcgggatgtcgaccaaggactnggtggtgctgtcggngggtcacacgcttggcttcgcacactgctcctccttccagaaccgcatccagccgcagggcgtcgacnccgcgcttcacccctcctttgccgccaccctccgccgctcctgcccacccaacaacaccgccaggtctgcggnctcctccctcgaccccacctcctccgccttcgacaacttctactatcggatgctgctctccggccgtggccttctctcctccgacgaggcgctgctcacccaccccaagacgcgcgcncaggtcacgctctacgccgcgtcgcagcccgccttcttccgtgacttcgtcgactccatgctacggatgagctccctcaacaacgtcgccggcgaggtccgagccaactgcaggcgcgtcaactagctagctatttccactagcatcatatcgatcacactatcttatcttatccaccacaccatccctgcactgcatgtatggcctcaactcaactcaacttatgtacaacaacaatataacgtcgaatggctatagcatcttttaatttgttacc

SEQ ID NO: 24143 - DNA, 957 bp, Oryza sativa
  misc_feature (126)..(126): "n"=any one base of a, t, c, or g
  misc_feature (136)..(136): "n"=any one base of a, t, c, or g
  misc_feature (142)..(142): "n"=any one base of a, t, c, or g
  misc_feature (163)..(163): "n"=any one base of a, t, c, or g
  ref <308>: DATABASE ACCESSION NUMBER: AK099585
  ref <309>: DATABASE ENTRY DATE: 2002-08-28
gtcctgttcttggacggacaagggtgtttatccaaaagaaatccatcccgagatttgcttctcttgcgcgcacactggcaccgtccggatcgctgaatcttgctggtggtggtggtggtggtggtnggtggtggtncacggncatgtcgacggcggtggcggncgtgccaccggcggcggcctacgggttccccggatcggccaagagagggaagcctgaggaggtggtggtgctgatggggatcgggctggtgttcgggcgctggacggcgctgcagatggcggtggagaaccagtggggcggccgcgactcccgcgccaaggccgaccagctcgccgaatccatcctctcgtggttcgccaactccaagggtaaacattattatgaagatttggtggatatgatgtatgacacagtgtccaaatccttcaatgcggactttgaggatggtagtgttgaagagacaggtcgctgaacaattgttgattatgcatgaagaatgcctgcaaagcaactattcttcagttgagaagcttaggaactcacgtgctcaagggaatgctgtttcccagagtagaaagatggtggttgatggagacgatgatagctcagatgacgaggacgacgatgacgatggtgagccttcgatgatggataatgaagcaggcagcgcggagaagatggcggtggacgagccaaaaccttccaagcctgttcctgacgctgatggttggactacagtgccacctaggcgtggtcggggcaagaattgaaagtacagaagcaaaaaccttggcaaagactttgcacttgcaaagacagtttgccaggaggttctcagtgtcaagttttgttctagttttttttcgagggatgattatgttgtagtatcctttacttgaactgagctgtaatcgtgtgactgatctataattctacattcaggaaactgtctt

SEQ ID NO: 24144 - DNA, 3025 bp, Oryza sativa
  ref <308>: DATABASE ACCESSION NUMBER: AK099586
  ref <309>: DATABASE ENTRY DATE: 2002-08-28
gatctgcttctttctttagcttgctagctactagtactagtaattgtagtggtgagtcgttgccggcgaggtcggagcagcagcagaagcagccatggcggacgacggcaagagcagtaaccagatcctccaggagctcgacgcgctcagccacacgctgtaccaggcgcacaccaaccgccggaccgcgtcgctcgcgctgcctcgctcggcctccgaggtcaatggcggcggcgccgatgtcgtccgggccgagtcgcgcccgcggtcgcggcggctgtccctgtcgccgttccgctcgaggcctaagcaggacaagaacgcgatcgtcgacgacgacgacgacgacgacggcgacgacgatggcgacaagggggcacgccgcgcgccgtccaagagccagagcttcgcggcggtgacgaccccgggcggcgaggcggcggcggtggcgggagagaagaaggggatatggggctggaagccgatccgcgcgctgtcgcacatcggcatgaaccggctcggctgcctcttctccgtcgaggtggtggcggcgcagggcctgccgccgtccatgaacgggctgcgcctcgccgtcgccgtgcgcaagaaggagacgcgcgacggcgccatgcagaccatgccgtcgcgcgtgcagcagggcgccgccgacttcgaggagacgctcttcgtgcgctgccacctctactgcagcggcggcgccggcaccggcaagccgctcaggttcgagccccggccgttcctcctgtcggcggtggccgtggaagcccccgagctcgactttggccggagcgccgtcgacctgagcctcctcgtgaaggagtccacggacaagagccagcaaggggagcgtgtccggcaatgggacatggcgttgccgctcgccgggaaggcgaagggcggcgagctcgtcgtcaaactgtcgttccagatcatggacgacggcggcgtcgggctgttcaaccagaccggagcagcaaccaagattaactcgtcgtcgtcgtcttcttccttgtttgcacggaagcagagcaagctatccttcagcatcacgagcccgaaggtgtcgcggtcggagccgaagctgacgccgacaaagggctcgccgtcgccggacttgcgaggcattgacgacttcaagctcgacgagcccagtttgccatcgctggcagaggccaagcaagagcagaaggagccagagccgccggagccggaggagaaggtcgatgactcggagttcccggagttcgacgtagtggacaaaggagtggaagggcaagaagagaacgtcgttgaagcgaaaggcgcggcggaagaagaagccaaggaggagaaggcggcggcggaggaggcgcccacgtcggccgccggcgacgaggtcgtgaaggaggtggtgcacgacagcgcgcacgcgtggcgcatcaacgagctggaggcgatcaccaaccagatcaaggctctcgagtcaatgatgctcggcgacgcgccggccgccggcaagacggaggatacgcgggacggcgacgcggcggcgctggacaccgacgaggaggaggtgaccagggagttcttgcagctgctggagcaaggagacggcaaggccaccctcgccaagtcggtgtcatcgctcaagtccggcgcgaagcgggacaccggcggcgccgccgacgcgtcggcggcgtgctacatctccgacctcggcaaggggctcggccccatcgtgcagaccagggacggcggctacctggcggcgaccaacccgttcgacatccccgtggagaggaaggagctccccaagctcgccatgcagctgtccaagccggtcatcctccgcgaccagaggctccccggcggcggcgccgagctgttccagcagctgtgcgccggcggctgcgaggccctgttcgagaagctggcggcgctcgtcgggacggacgaggtggtcggcaagacggcggagcagatcgccttcgagggcatggcgacggcgatcatcagcgcgcggagcgcggcgctcggcgcgagctccagcgcggcgcagaccgtgtcgctgcttcggacgatgtcgtcggcgatgagcgacgggcggcaggagaggatcgacaccggcatctggaacgcccacgagacgccggtgaccgtcgacgagatcctggcgttctcgctgcagaagatcgaggccatggccatcaaggcgctcaaggtgcaggccgacatggccgacgagcagtcgccgttcgacgtgtcaccggccagcgacaagcggggcggcggccacctcctcgacgccgccgtgccaccggaggattgggcgctcgcctgcgtcggcgccgacacggtgaccatgctgctcgtcgcccagctaagggatcccctgcgccggtacgaggcggtcggcgcgccgtcgatcgtgatcatccaggccgtcagaatcgccggcaacgacgacgacgacgagccgaagttcaaggtggcgaacatgcacgtcggcggcctccggctgaagtcggccgaccggcgtaacgtctgggacggcgagaagcagcggctgacggcgatgcactggctcgtcgcctacgggctcggcaaggccggcaggaaggggaggacggcggcggcggcggggaaatccggccatgacgtgctctggagcatgtcgtcgagggtgatggccgacatgtggctcaagccgttgcgcaaccctgacgtgaagatccctctcaagtagatgctgcattgctgcctctgtgcttctctgatgctgaaaaaaaaagaacatattcaagcccggttctctttatattcttctgaattttgaaagctcaagattgtaatttatacttggttcctgcattgtgattgtattgtaatgaggaaatgtgagtgtctaagaattagattccaacactgtttattgtgttgtaagtattcatgtcatgtactgaaagaggcataatactgtttctgtaagttcacaaagcttagttcaaaatgtacaaaaattttg

SEQ ID NO: 24145 - DNA, 1551 bp, Oryza sativa
  ref <308>: DATABASE ACCESSION NUMBER: AK099587
  ref <309>: DATABASE ENTRY DATE: 2002-08-28
gactcgccccactcagaccgcccgagctcgccgccgggaaaccaatggccgccgccaccgtcgcagcctcctcccgcttcggccccgcccacctgcttccccgctcccgcaggaaggggagggcccccgcgccgagcgcgcgcgccacggcctgcggagccgtcgggcgaggccgccggctgcgctgcgagttcgtggccggcggcgggaacggcgcgctctccggggaggacgacccgcgcctcatagaccgccaaaaagctcttgatgcagccatgaatgacataaacagctcctttggaaaaggcagtgttacaagattaggaagcgcgggtggtgcctttgttgagacatttccaagtggctgcttgacactagattttgccttgggtggtggccttccaaaaggaagagtagtagaggtgtatggtccagaaagcagtggaaagactactctagcgctgcatgccattgctgaagtacagaaattgggaggcaatgccatgcttgtggatgcagagcatgcttttgatccagcttattctaaagcacttggggtagatattgaaaatctgattgtatgccagccagacaatggagagatggcactagaaattgcggaccgcatgtgcagatctggagctatcgatctcatctgtattgattcagtgtcagctctcactccgcgtgcagaaattgaaggtgagatagggatgcagcagatgggtttacaagcacgtctaatgagtcaagcattgagaaagatgtcaggcaatgcctcaaaggctggttgtactcttatgttcttgaatcaaataagatacaagattggagtattttatggtaatcctgaagtcactagtggagggatagctttgaaattcttcgcatcagttcgactagagatacggcccattggcaagataaaatctgccaagggagatgaagatgtgggtgtgaaggttcgtgtcagagtgcagaagagtaaagtctccagaccctacaagcaagctgaatttgagatcatctttggggagggcgttagtaaactgggatgtgttcttgattgtgctgagctgatggaagtcgttgcaaagaaaggctcatggtatagctacaaagaaatgagattgggtcaaggcagagaaaaagcactgcagtatctccgagagagccctaccatctgtgatgagatagaaaaggctgttcgagccatgataccagaaggagcaagacatatgagcctgctcgctttcgggcggtcatcattgaccgaagaagaacaagtagacgatgagtgatggatgcatctaattttgaagatgaaagtgctgagcaattccaagcttttgggtcccctggtgaacggagaagaccaagagtggctctttcttgaactaatcaagcattgcattgctggtagtggtagggagttgggattccttaagagtttgatttgtgagcaatcatttgctgcaacagcattgtgatgacatatgtaccgttgttggtatgcacttggtgtaaggaaaaggtcactgattctcaatc

SEQ ID NO: 24146 - DNA, 1534 bp, Oryza sativa
  ref <308>: DATABASE ACCESSION NUMBER: AK099588
  ref <309>: DATABASE ENTRY DATE: 2002-08-28
gacttgaaacaggcgaagatggcgccaccgtgcggccgcgtggtcctcttcccgatgccgtacccgggccacaccatccccatgttccacctcgccgccgtgctccgctcccgtggcttctccatcaccgtcctccacaccgagctcagagcgccggacccggcggcgcatccgccggagtaccgcttcgtggccgtggccgacggcaccccgcccgagctcgtggtgtccgaggacgccgcggcggtcctgacttcgctcaacgagacctgcgccgcgccgttcgcggaccggctggccgcgctgctcgccgaggagggcggcgtcctgtgcgtaatcgccgacgtgatgtggtacgcgccggcggcggcggcgccagagctcggcgtgccgctgatgctgctgatgacgagcagcgcgtcgagcttccggacgttcatggagtaccctcttctgcttgagaggggcttcttgcctgtcgacgatgcccaaaaggacactctagtcgacattctcccccctttccgagtgaaggatctacagcgcattgacacgacaaacctctacagcttcgccaacgtgcttgccaatgtagtcgccgcagcgcggctgtcatcagggctcatactcaacaccttcgacttcatcgagggtgacaacatttgcaggatccgcgacgagctctccatccctgtgtttgccattggtccactcaacaaactcataccactcgtcggaagaagcagctttcttcccccagattgtgattgcctgaggtggcttgacacacaagcccctagctctgtgttgttcgtgagcttcggcaccatggccaccattgatgctcaggagtttctggaggtggcatggggcttggctggcaccaagctaccatttctatgggtggttcggccaagccttgtccgtgggttacggctgcattccagtgagctccctagtgatttgcaggaagagatcaatggtcgaggcaggatagtctcttgggcaccgcaagaaaaggtactaggtcacccttctgtccgcgcattcatgacgcataatggatggaactcgacgatagagagtatatctgaaggcgtgccgatgatatgtaggccatgttttggagatcagatgggaaatgcgaggtatgtttgtgctgtttggaggttgggtgtggagatggaggtagggagtgttctgcagagggcaaaagttcaaactgctgttgagaaattagtgaatggggaggaaggtcaaaatgtgaaacagagaatgagaaatctgaggatagaagctgaaaaatgtgttagtaaaggaggatcatcagacaccggtctacgtaacttagtagattcgatattatcttttggaaaatgttgattatctgcacagatataacgtagtcatgtcttcgactaatacttgtagcctctttaaatgcggatggtattgagaagatcattaaatgttgtaatatctagttttcatctactactaataaccaggttcaaaaattgccgaatagaatttc

SEQ ID NO: 24147 - DNA, 1493 bp, Oryza sativa
  ref <308>: DATABASE ACCESSION NUMBER: AK099589
  ref <309>: DATABASE ENTRY DATE: 2002-08-28
gtgttcacctatggccggccatgggacgcaagagatggagtgttgcttcgtagtgcccagcgagaagacgccgaagcatgtcctctggctttctcccctcgacatcgtcttggccaacagaggagccctcaccccgctcgtgcacttctaccgccgccgccatgatgccgccggcggcggcggcggcttcttcgacgtgggcaggctcaaggaggctctggccaaggcgctggtggccttctaccccctcgccggccgcttccgcgtcggcggcgacggccggcccgagattgactgcaacgccgatggcgtcttctttgcggtggctcggtcggagctcgccgtcgatgacatcttgactgatctcaagccgtcgccggagttgaagaggctgttcatcccccgtactgagccgccgtctgccgtgctcgccgtacaggtgaccttcttgagatggggcggtatagtgttagggacggcgatgcaccatgccgccgtcgacggccatagcatgttccacttcttgcaaacatgggctgctttctgccgggacggcgacgccgccgtggtggagctgccctgccacgaccgcgccctcctccgcgcgcgcccccggctcgccatccaccctgacgcctcctccgtgttctgccccaagctaaacctccgtccgccgtcggcgtcgggctcgggcctcatctccgccaagatcttctccatctccaacgaccagatcgccaccctcaagcggatctgcggcggcggcgcgagcaccttcagcgccgtgaccgcccttgtgtggcagtgcgcctgcgtcgcacgccggccgccgctgtgctcccagacgctcgtccgcttccccgtgaacatccgccggcgcatgaggccacccctcccggaccgctacttcggcaacgcgctcgtcgaggtgttcgccgccgccgcggtggaggacatcgtatcggggacgctggccgccatcgccgcccgaattaagggcgtgattggccgcctaaacgacgacgagatgctgcggtcggcgatcgactacaacgagatggcggggatgcccgatcgtccggacaatggcagcctgccggagacggagctgcgggtggtgagctggctgggcattccgctgtacgacgcggtggacttcgggtgggggaagccatgggcgatgtcccgtgcggagtcattgcgcggagggttcttctacgtgatggacggcggggcagcggatggtgacggcggggacgccgccgccgtgcgggtgctcatgtgtatggaggctgcaaatgtggaggagttcgagcgattgcttcgtgccaagtttgtgtacccgaggatttgatttagcatgtgtcggttggctttgttggagtctctcttctctgtgttgtgtaagcgcatatttattgggactagctacacaatttatgacagaaaatcccacgttgcatcttgaaattctagaccgttgggttggcttt

SEQ ID NO: 24148 - DNA, 1206 bp, Oryza sativa
  ref <308>: DATABASE ACCESSION NUMBER: AK099590
  ref <309>: DATABASE ENTRY DATE: 2002-08-28
gaaactcgtaaacctctccctctccccactctcgcgcctcctcccatggcttccttcccgaccaccgccgccgccgccgccgcgcaggcattcgccttcgccctcgcgccgaagccatcctcctccgccgccgcaccatccgcgctcttcccccgcaccgccgcggcggtggcgttcccgacgctggctgtgcgaggaagcgggaaggcgaggcagccggtggtggccgcggcggcgggggcggggacggggagcgagcagagggagacgatactgctccccgggtgcgactacaaccactggctgatcgtgatggagttccccaaggaccccgccccgacgcgggagcagatgatcgacacctacctcaacaccctcgccaccgtccttggcagcatggaggaagccaagaagaacatgtatgccttcagcacaaccacctacactggtttccagtgcactgtcgacgaggaaacatcagagaagttcaagggtttacccggcgttctgtgggtgcttcctgattcctacatcgatgtcaagaacaaagactacgggggtgataaatacataaacggagagataattccatgcacttacccaacctaccaaccaaaagagcggaggacatccaaatatgaaagcagacggtatgaaaggcgaagagatggacccccagcaagcaggagaccaaggccgcagactgctcagcctgagtcagcctcttcttcatgaggtcagttttgcaggcactcatccacgtaatggaaagaaagaacttgcttactagctaattctaccacttggcgtcgcatacgggaaagctctgacagacaaatctatcctcaacccaaaatatcatccagagctgtgcaagcgattcatgcaggctgcatttggaattttggatcatgtggatcatcatcattcttgatattttgggtggactatgacctctgaatgtgacaaaagacggaaattctgatctatctaagaatgttactgtctcaaatatctagtgatatttttcttgtgttaccctgctacctagtagttgtgttgctggtttgtgtgtggaatttcttgatccttatccatgtgagttttcttgaactgaggttgattttttggcctttgtattggcatttgttctgctcagagcctgagacttgcaatttgggatgaccattgaatcgaagtgagatt

SEQ ID NO: 24149 - DNA, 3949 bp, Oryza sativa
  ref <308>: DATABASE ACCESSION NUMBER: AK099591
  ref <309>: DATABASE ENTRY DATE: 2002-08-28
ggaggcaaatttccaaatcccaaacccccccaaaaattttgaaaaaaaaaaaaggaaagtcctcagatcccctcacggccgcactaccacgccggaatctctcccgaatcggaccgacgccgcgcccggccgcactgcgggggcttctcctctcgcggcgcggccggggctacgcggggccctgcgccgccgttcgcggtgaatgcctgagcccgaggtcggcgtcctcggtggccggggcctgcaccgcgacggcctcaaggggtggcctgacctgcggtcgctgtccgggaagaagatgacgacgccgccgccgccgccggtggagaagcagcagcagcaggcgcggcccgcggcggtggcgccgccggaccaaaccctagagttctcggacgggctcctcctccgcgtcctcgcctgcctcccggagccccacctcacgggcgccgcgtcgctggtctgcaggaggtggatgcgcctcgcggggcgcctgcgccgccgcctcgtcgtcagggactgggcctttgtgacccaccgcctacaccaccgcttccccgaactggcggacctcgacctgttcccggcgtccattgtcgctccggccgtgccgtccccgacctcccctctcctcacctgcgccgaggtgtcgctaaccctagacaccggcgcggacccgccgctcgtcgcctgccgtttcctcgcagatgacgtgctcgacaggggccttgttgccgttgccgccagtttccccaacctccgccgcctctcagccacagccgcctcggagtccgggggtctgatggatatcgctggcggctgcgcaactttgcaagagctcgagctccaccgatgcaccgacctcgccctccgcccagtctccgcctttgcgcatcttcagatcctccgccttgtcgcagcctcctctgcgttatatggcaccagtgaagatggtggtgtcaccgacatcggcctcaccatccttgctcatggatgcaagagattagtgaagctggagcttgttggttgcgagggaagctatgacggcatcgcggctgtggggcggtgctgtgcgatgcttgaggagctcaccatcgccaaccacaagatggacaatgggtggcttgctgcgctcgctttctgcggcaacctcaaaaccctaaggttgcaaggatgttgcaggattgatgacgatcctgggcctgcggagcatcttggtgcgtgcctcacgcttgagagcctgcagcttcagcagtgccagctgcgtgaccgtcgtgccctccatgctctccttttggtttgtgagggtgcccgtgagttattggtccagaattgctggggccttgaagatgacatgtttgccatggcaggactgtgcaggtatagtaatcaccaatctcatttttcaatctaggttgttgatatattacaatgatcgcacaatgtgggcagattgtgtatttgaactttgattgtttagttattcctgctttatatttgatctgtcagactgtgatagtgacttgctgccaattgaagtagtcgtaggtaactgatgattggttgttctgaccctggtttagtgtcaggagatataatgcttgcaaattgcaatgcatggacccctccatgtttggagtcagtatgccactattgcttctgtggtaattaattaaataacagttatcatgggacttgagggcgcaaaatttattattcggtagtgtcgtaaaaacctcacttagatagcctccatcattattccttttgtctactgattatgtctgtgtgagctttgataagctccataatctagtcaacctctgttcagtatactgcatgtttggctaacattgtcatttttggttgttttagcatatgattgcttggaaaagatgcaattatttattacagatgtgttcaagtgaaagtattccataattgtgtatttgcgttatattgtttgtcataatcacttttattcttcctcttgtgttgagcaagtcacatgctgtttgtgttattcactatattgccattttaggatgtgcgttatctagcccctcgtgcactttctccttttgtgtccagataattgtgactggtaaaaatgcaaaccatgacttagatgtctgagcgatggatttcataaagatgtaggtcgcttcaattcttcgaacacaaaccgtgcaccactacctgagcaaatggattcagtaaagactagctgagtgcccatactttgttatggaattaaaaaaaaaaattgcaatgtatgtagtagaaataaattattgttgacatatccttttgccccatgccatgctctctacgttttttttcttcacagacaataggcagtggtggggtggtgtcagattcaccataaaccactaccacctattgccatgccgattcttccatcacaaaccgtggattgatgttatggaatattcgttggaggatatttgcatttttgctcatggatcttctgccaaactatgcagtaaaggattacttgttctaaaagggccaacaaattgacagtgtctcggtagagtcttttgatgtagttctttgggctactaaatgtagttatttatgatgcgtaaatgttatccgcctacacttccctgtatttgtttttccctggactagagtcttataactgttactagtactgatcaatgccaagatttgcattggaagtgccagggctaactagggtaggtagtttctttatatacgtggaataattttcagtttcttctgacccattatttgcttatatgccatcgattgtggcatattatcattttttgtgtgaatatggcagcaatctactgcaatgaattagtggaataaaatgaacgaataacctctaaagctctaaatcagatgcattcgtgtaactggaattcttagagttgacatcagattacctacaggctaaaaccatgttttaccttcatccacacttccacagtagcacgacgaccatctcaaattttcatctgaatatttcaatagtttcctctcaaaacgctttagcaaatacttactatatattttcactggcaatagtattgtaataatgttttgttcttctggaaatggtgagccattttacatacctagatatggtccacaacctacatttttcgtggaaagtgtttcttggcttaattcaggatcttgacttatgtctgctgcgttctctttgtttttcaggagagttaagttcctctccttagaaggttgctcacaactgacaactcgaggtctagaatcggtgataacctcatggagtgatctgcagagcctaaaagttgtctcttgtgataaaatcaaagatgaggaaatcagccctgccctctcagagcttttctccactttcaaagagcttaagtggagacctgacaacaagtcacgtctcgctgcaagcctcgctggcactggaatgggaaagaagggcagggtgctttgcaaaagggtatgaagtctgatcaccttggtgctccattcccctgagctgcgcttcatctgtctatggattgaacttttcttgcagcagatcttaccaggccatcaacgagtcaaagggacgatgctgaactattcaacaggtgttgctgcttagtaggattgcaagtccagaagctctgcgtgctcctggaatattcttgatcttagaagttgttacaaattcttccaacttagggcaaaaggcgccttgccaattcccctatacccacaagtttacagtatgaaaactcaattgaggtgcaaatttgtctttgcgccggagttgtagcaagctaaaagccacacatggcacggaatattgtttcataagttatggcagaacttgttagttcctgactaacagtagagccaacagaaaatttgtgttcgctgcacataccatcgcaaatgatgtattcatattgtc

SEQ ID NO: 24150 - DNA, 1235 bp, Oryza sativa
  ref <308>: DATABASE ACCESSION NUMBER: AK099592
  ref <309>: DATABASE ENTRY DATE: 2002-08-28
gaattttttctttcaaccccatccacctccggactccggttgcgttgcgccatggcgctgcagcttcaggccgccactccgcatccccctcttcctctccgctcctcacgccgccgcttcgctgctccgccgtcgcctctcgttctccgcgccgtagcttcctcccgcgatggcccctccacgcgcctctcctctcctgcgcccgcgccgcctcgccgccggcggcgtgcgagcgtgagggcccgcgccggcgcgggcagaggcggccggggggagtccccgtacgacgtgctcggcgtgcctccgtcggcgccgcccgaagagatcaagcgcgcgtaccggcggcttgctctcaagttccacccggacgtcaacaaggagcccaacgcgcaagagaaatttctgcggatcaagcatgcgtacaacacgctcatgaattcagagagccggtccaagtacgcgagcactagcagcaacacatattattcgtccaggacatacgggaagagcagcactacttcagctgatgaagaagagccattctatggctttggtactggaataccttctcttctgcattagtgagctatattatggtttctgtggttaggaatttcgtgctagtgatgagtaaaatgaagtttcaagagagatcctttctgctaagaaacaactggtagattagatcacatcataatccttgtattttgaaacttcagtagataaatggaactctagggtgtgtagttactagatagttgaactaaaaatgttccattatttgacattatactgtggtcatggatctgcaggggatttccttagagatcttcaagcagaatttcagaactgggaagccggtctgaattcagaacagaaacctaaaagcttgtgggaagagttggcagccattggtgaagaatttgttgagtttctggagaacgaactcaagatcgatgactcaagtgatgcggaagacaatgcaaatgatccgtacacacagtctggaggcaaaaacaagcaagatgttaatacatcgacaagtagctttgatgatagcgtatctgagatagaggctgctttggagaagctgaagaaggaacttgggctcagctgagccatttgataccgatagcatagcatatcatactgctgcaactataggtctatagccatctgcaactgacttggtgttcttacgaagttatttcttatactcaaatgttcttggatgc

SEQ ID NO: 24151 - DNA, 1590 bp, Oryza sativa
  ref <308>: DATABASE ACCESSION NUMBER: AK099593
  ref <309>: DATABASE ENTRY DATE: 2002-08-28
gagagcaaatcgaggtagccatggcgatgcaggccgccttcgccgcctcgatgttcccgcagctggcgcagcggaggggaagcgatcgcgcggtggtggtggcgccgccggcgccggcgccggtgagggtggcgatgaggagcggtggggcggcggcggcggcggcgagaggggtgaggtgcagggcgagcctgatcgagcccgacggggggaggctggtggagctggtggtgccggaggagggagggcggcgggaggcggcgcggcgggaggcggcggcgctggcgcaccgggtgaggctggggcgggtggagacggagtgtctgcacgtgctgagcgaaggttgggcgagcccgctacgagaattcatgcgcgaggccgagttcctccaagcacttcatttcaacgccatccgcggcggaggcggggccatggtcaacatgtccgtgcccatcgtcctccccctcggtgacgcccagcgccgcgccatcgaggcgtccggcgcccgccgcgtcgcgctcgtcgacgccgccgaccgccccctcgccgtcctcagcgacattgagatctacaagcataacaaagaagaaaggattgcacggacatggggaacaactgcacctgggctgccttatgttgatgaggcgattacaaatgctggtgattggttaattggtggtgacttggaggttatagaaccaatcaagtacaatgatggtcttgatcagtatcgcttgtctccagcccagctgcgtgaagagtttgccagacgcaatgctgatgcggtattcgcgtttcagcttcgcaatcctgtacacaatggacatgctttgctcatgactgatacacgcaaacgccttcttgagatgggttacaaaaatcctgttcttctgcttcatccattgggaggattcacaaaagcagatgatgtgcctcttagttggagaatgaagcagcatgaaaaggttcttgaggaaggtgtcctcaacccagaatcaactgtcgttgcaatcttcccctctccaatgcattatgcagggccaactgaagtgcaatggcatgctaaggctcgtataaatgctggtgcaaacttctacatagttggaagagatcctgctggtatgggccacccaactgaaaagagggacctgtatgatgctgatcatgggaaaaaggtgttgagcatggctcctgggcttgagaagctcaatatccttcctttcaaggtggctgcatatgacacaaagcaaaagaaaatggactttttcgatccatcaaggaaagatgatttcctgttcatctctggcacaaagatgcgtactcttgccaagaactgccagagcccccctgacggattcatgtgcccgggtggctggaaggtccttgttgaatactacgacagcttgacgccatcagcggacagcagcaaactgcgcgaggcggttgcggcctagaaagctgaaactacctcaaataagcaagaacattgcatcttgcaactgtaaaatggttctttcagagagagaaccaatggtatatgtgtatactactggtcgcaaggcctaaacatttgggtttgattggaagcgc

SEQ ID NO: 24152 - DNA, 2469 bp, Oryza sativa
  ref <308>: DATABASE ACCESSION NUMBER: AK099594
  ref <309>: DATABASE ENTRY DATE: 2002-08-28
gaaccagagagaccgccgccgccgccgccaaaaaaacccgtaaaccctagctcacgacggccggcgtcgcgccgccgccccatgcctagctgctgctgcctcctcggcctcggcttcccctcgccgccctccgccctccgcatcctgcgccgccgcatggcctctcgcgccttccagctccgcctcaacccgctcaccggcgactccgaatggctcgtcgttgaggaggaggaggaggaggaccaccacccgacaccgccacccaagcagcttctcgccaccacctcctacctcgacatgctcaacgactccgcccggaaccgcgcataccgccgcgccatcgaagccgccgtcaccgacccttcctcgcgcgtcctcgacattggagctgggactgggttgctatccatgatggccgcccgagctttggcagctgttgggggtgaaactagaggaggaagtgtttcagcatgtgaatcttacctcccaatgggaaaattgatgcgaagggtactgagagccaatgggatggaaaacagggtcaaagtctttcacaagcgttcggatgagctcaaagtcagagatgacctggattcaccagctgatatattggtaagtgaaattcttgattctgagctgttgggcgagggtctgatacctactttacagcaagcatatgacatgttattggcaaaaaatccaaagatagttccttatcgagccactacatatgggcagctagttgaaagtacattcttgtggaagctacatgatttgcacaacaatgaagcaaatgctgcagacggtgtatggcttactcctggtgagatggagaggattgtgtctgtgaagccacaacaacatgcaatgcaatgtgatgcactagaagatgagatacgattgctgtcagaacccttcaaagtttttgaatttgacttttggaaacggccagatagtcatcgtgaggccaatatcaagatacgaacaacacgagatggatatgttcatgctattatttcatggtgggtacttcaattggattctgctgggtcaatcttctactcaactgctcctagatgggcgagacaatcaagtagtgaggggccgcaacgcgacatgaaggattggtgtgatcactggaagcagtgtgtatggttcatgcaaggcaaggggatccctgctacggaagaccaagttctttcgttacgagctagacataaccaaaccagcatctcctatcagctgaacatcaatgatgaagcatgtgatagaagttccaaaggtgaccatctaacgttgttgccagaacggattgcactttatggtgataaagattggagatcagctctgataaataccattaaaaatgctttaactgtgaaatcttccccaacttgtgttgtggctgacgacagcatgttcttggctctcttaatttcctccatgtcacccacttcaaaagtcatcgcgatgtaccctggtctacgggacaagggtgcagcctatcttcgatctgttgcagatgcaaataatttttccatagaccagattcaagtgattggtaaaagagcctcatctattacagctgatgacctgaaacataaaaaggttaatttattagtgggggagccattttatcttggaagtgtgaatgcttccgtggcaaaatctacgtttctggagtgtgaggaccctacttgactcgatgttatctgaggatgcattcatcatgccttgtaaaggaatactaaagctatgtgcaatgtcacttccggacttatggaggagccgtagcagccttaaagatgtagagggttttgatcactcagttgtcaatgagactttaggagcctgtggttgcctgcctggagaccagcaaggtccttgtctgccgtattacgtatggcaatgtggttataccaagaaattaagtaaagtgtactctctgatggatttcaacttttctgagccaatccactcctgttttgggaaaacaaagatcgagttttctcatgatggaacatgccatggttttgcggtttggattgattgggttcttgatgagagaaaatccgttgtgttaacaaccggaccagataaccgatactggaaacaaggagtacagctctttagcaagcctgtagaagtaaatccaggcaagtcggtgatgcatgtagaggcgtccttcgatccttccacgggtgagataacgttcagcagttcatcaacaacctgctcctgaggcgatgctgtattgctatgccatctgtgtgtgcgcctatgcaacatgggaagcatattgcttgcgtaattcggcccagcgattacggcgcaccgtaggacattagtgttttcatcccgcagatatttggcagtggttatttgtgcgtaggccacaaaccgttcagtccaaaacgtcttaacttttgttctaaaattgagatgcaaaaaaggggaaacaaagagacc

SEQ ID NO: 24153 - DNA, 3378 bp, Oryza sativa
  ref <308>: DATABASE ACCESSION NUMBER: AK099595
  ref <309>: DATABASE ENTRY DATE: 2002-08-28
gaagagtctcggttcatggtggctagctagggtttcgcggccccgcgacgtccagcgactgaaggaagcgtccccggcggcggcagagggaggctctctcgttcgctttggaggctccggaagaagaaggcggcggcggcggcggcgaggccgcggcggcgaacaccagcggtatgcagcgtgtgaaagtataccgtttgactgatggagggaaatgggatgatcggggcacagggcatgtaaatattgacttccttgaggattctaaagaacttggtttgactgttttggatgaagaagacaatgaaacattgctcatgcacaacattacttctgaagatatctacagaaagcaagaagatacaatcatctcatggagggatccagaatatctacagaattagcgttgagctttcaggaagctgctgggtgctcatacatatgggacaacatatgtgacattcagagaaacattcagtttaataaccttggtgtcggtcctcgtccaacttcggtttctctagaagcctctagagtattgcattcaaatgatgaatccttccgctccgttaatggtgagctgagggagcttccacctgttgagttatccaatcttcctttaattttaaagactatattggagggtggcattacagatcagatgcgcgtggcagagttgataacacaagatcgcgagtttttcccaaagttactggacatttttcgaatatgcgaggatttagagaacttagatgatcttcacatgatcttcaaattagtcaggggaatcatattgctgaacagttcatcaatctttgacaagattttctcagatgagtttattcttgacatcataggtgcccttgaatatgacccagatgttcctaaagtacaaaagcatcgcgcttttctaaaggatcatgtagttttcaaagaggccatacctattaaaaatgtttctgtggtttcaaagatacatcaaacatatagaataggctatctaaaggatgttatattacctcgagtgttggatgatggcactctagctagtcttaacacgatgatacattcgaacaatgccgctgttatttccttactaaaggatgattcttgctttatccaagaattgtttgctaggatgagattatcaaatatttctatggaatcaaaaagagaattggtgctgttcttgcatgaattttgcactctcagtaagagtttgccgcttgttcaacaattacgactgttccgggatctttcaggtgaaggtgtatttgatatcatttcggatgtcttgcagagtcaagatagaaagattgtttcagctgggacagatgtcctcatactttttcttaatcaggaccccaacctactgaggtcatatattgtccaacaagaagggaattctcttcttggacttctggtcaaaggaatggtaactgacttcggtgaggcaatgcactgtcaatttctggaaattcttcgtattttgatggattcttttaccatgtctggagcacatagagatgctgttattgaaattttctatgaaaagcatcttgactatttggttgatgtaatagcatcatcatgtcctccgaggaacattttccagagcatctaactctgctggaaataccgaaactgaagtgaatcgcactaagcctgaaattttgttaaatgtttgtgaactattatgcttttgcatagttcatcatccctacaaaattaagtgccactttctaatcaacaatgcaatagagaaaatccttgccttgactcgacggagggagaagtttttggttgttgcagcagttagatttatgcgaactactatatcgagaaatgatgattttcttattcgtcatgttgtcaagatgaatttgttcaaaccaataattgacgcctttgttgaaaatggggatagatataacatggtacagtcaggagtactcgaacttttggaatacatacggaaggaaggtctaaaacaacttattatatatgccaatgagtccttttgggatcaacttatgaagtttgaacactttgggagtattcaggcctttagacttaagtatcaacagtacttggagagtgctgaaacgaagttaagtgccaatgtacctgatattagaaagaaagcggaagaaagaggccttgagaaggaagaggaagactatttcaatgaggacagcgacgaagaagattcagtccggcggacgaaacatgctcagaaacaagatggtggggctaagttaactaatggcagtgaagctgatgatgtttcctcaaggcctaaatctggtggactagtggattatgctgatgatgatgatgaggacttcaatcctccacctaaggagcctgacaggcctgaagaggatgatgaacccctaactatagccaaattgaagcgaaagttaatgaatagtaaagtggatggcaaacagtctgatggggagttccacaagagacaaaagatagaaacgagaattactagtgttaagattggagcttcgactaacctggttagtagacgcatggatgatttagagaagcaggaaccccgttcacctgcctcaagttcgtcaggctctgaagccaatggcgtttttggggagcatagtgttcattctgaggagcatcaacgttctgcagacaacacagaagcatcacggcaagctggtggtgattgtgtcaatgccatgggcaatttgtctactgagaagtcagtaaataccacaaatacgaatgattcagagccttattcagtgagatgacaaagtgatatcaagaaacggtttatccctaacccaaaccatcaatgcttgccaacaagaaggaaccacggtgtgttccgcttcagagaaggccaaaaacattgctccagagaaggccaaatagagtaatctcaaacctgatgcaaatggttcaaggtgatgtagatcgctcttacctgtatatgttgcgtgaaattgcagcaaccatttgtgagcctgtaaagttaactgtccgcaaggattagatctgaacaactgagagttggcatgcccttcggttcagcattgacacgagccacgctcctgatgatgcataattatttctataaatatgagcttctggagaagcagtgaatatgtgctcttctccattatttctttctagtgtcattggctgagatgtgactgttgtaaaacaaataggaaggaatagtttttcttttttaattgagcaccattttgcagcagtttgtgccctcgtatcggtatcatacacaattgtaattcgtttattcatagttttgcagggtatactttgtcttggatgttcatatgtttttcaactcaaatcaacaaccatatcttgaatctggcc

SEQ ID NO: 24154 - DNA, 2141 bp, Oryza sativa
  ref <308>: DATABASE ACCESSION NUMBER: AK099596
  ref <309>: DATABASE ENTRY DATE: 2002-08-28
gagatcgagggtacctgcatcgctcctttctttctttcattcgaagctggttctgttccttacttcttcctcttagttcctgttttttgtggagacggtactttccctagtcgcatcatcccgttgcgcggccaacccttaccgagacgtggttttactgctcgccgagccatccgcgttgcccccttccacttctcggcatccgctcgtcgtcgtcctctccgcatccgcatctcttcccaatttgtttgttcccctttatgttcttcactgtggctgcacgtacaacaagcttgaatagcatcacatactccccatcccgtcctcagcatcggcgtgccgcatggcatcgcagcgtcgccttcttattcggcatcaaggtcgactcggtggctcactgctagcacagatggcgggcggggagtggatctttcaattcttcctcagcgacttgcccgacggtgttgctagctgacacaaccatttcctcaatggcagaaatcggcgtacggtctacctgtcctcctccggtacggtttcccttctcttatctctcatctagcataaattgaagataatgttctgaatttaggctaaatttatcagatgtttgtttgggaagttcgttcaaagattcagatagaacccagcacatttccgaatattggtgcctccagatttctctctctatttcttttttaaatgttgccttctgataattcgaactctgcgccaattcctcttatggaaagagagtcgatgtgatgtcatgaggcaaaacatgaactggtgagcttccctgaaacctgttgattccctggcaacattgatgttttattaggatgaattctcacattaatagcttccttccattagggctttcaatgttctaaacttttttttagagaaatcatgttctaaacttttgattggtgaaagaagttacaattactaaggagctctcatcctctcctgcgaatgagattctattcatttttctgttcctgtactttaagcatgtcagtatgccactacttcattgtccaaaactgagctccaaagaaaggtcaaagtggccagcttaggattaaaacaagtttagcagaatcttcttacacaaattatttggtgtttttcagcatacaggtaaacagacggctagacttcatgatacatgctaatgttgggaggggcaagccactatgctcagctcatggatcttcaggaacggagctgccagcatattactgacaaacaaatacaaggtaaataggcagaagagatccttcatgtgctttgctctccgatgttctccgtagagaaaagaaaagttaatcatttcaattatttatttttattcattaattatatgtaattagtaaattgttgtgttgtatatgtgttaccattttgacaaaaaaaagagcactccgattgatcattttctgaaccatacaggaaaaatactccatgcttttgtatgagctgttcttagtctcttatagaatgtgctgtggtcttaatctctgaaggctgagctgtgttagattggagcactccgatccaactcttttgcccaccaaatcaacttaccaatgcctgttagatagatctctctccccttgagcccaacggctcaagggggccttgaccgcgccctgatcgggggcgcccagcccaatggctggtgggcccccgtcacactgcgccatataaaagaggggtggaggccggcacggcacatggtacgagattcaccgccgccgccaactccaccctacaaaccctaatccgatcgagagggggcgcagccagtgacgggaagcgccaccgccgcgccagacctcatcgccgggacatctacgaccgtcactcccgcagccgtcatcgccgtcgacctcaccggcgccgcatccacgacaaccgagcgccaacgacgacgatggccggcacttcttcatcctccaacacctcaaccggtcggtctatctaaaccctctcccgttttcaatctctatagttcaaacatcaaacccaaatagaaccacccgactagatctaacctaggtgatcctagtgcaaagtttaacaatggtatcagagcaaccctagtgtttagatcgtttcggggaaagaaatcc

SEQ ID NO: 24155 - DNA, 1507 bp, Oryza sativa
  ref <308>: DATABASE ACCESSION NUMBER: AK099597
  ref <309>: DATABASE ENTRY DATE: 2002-08-28
gagtccactccctctctcgaaacgcatctcgccggccggtggcggcggcgcgcgcagctccggcgacctcccggacggccgccgccatgctactgccgaggcgtcttcctcttcttgctggtctcctgcgctcggcctcctccgacgcctcctccattcctccaaaccgaaagaatgtctcaggtagagaagggtttctatggagttcatgttattttcacagcacaaggcatcagacatccagagaaggggagcagatggctaagtaggagctgctagacccccttgcactgattaaagatgaagtatctgaaatctcaaatagattgcgctcaatggtggtagctgaggtaccggaactgacgttagcagctgggtacttcttcagagctggagctgaagggaaaagaacttgccccactcgcctggtcattgatgtgtcaggttctactattgatggcttcatctataagcatggacatggctgacccaattgttggttcaaagaatgagattcgtgagagatatatgcgtcttgctgagataactgaactgattcatgtaacaagccttatccatgatgatgtcttggatgatgctaataccaggcgtggcatggactcactgaactgtgttatgggaaagaagcttgcagtgctggctggtgattttctactctccaaggcattttctactgctgcggtgtctcttgacaatgctgaggttatattgttgctagcaacggctgtaaataaccttgtaactggtgagtttatgcagatgagaataactccaatacaacgttgcagaagtcatattacaagacagctgcattgatttcaaacagttgcaaagctgttgcggttcttgctggccaaacagctgaagttgcgacgcttgcttatcaggtatagcttatcagttgatcgatgacatcctcgatttcacagggacatcagcttcactaggcaaaggctccttgtctgatatccatcaaggaattgtgacggctcccatattgtttgcaatggaagagtacccgcaattgcgcgtaattgtagaacagggttttgatgacccctcaaatgtagacgcagcccttgcataccttgccagaagtaagggaattgagaggacaaggttacttgctgctgaacatgccaaattggcagcagacgcaatcgatgctcttcctgagagcaaggatggatctgtgctgatctcaagacaggcactcaaagatcttacagaaaagctcatcaagagaacaaagtgaaaatatatttataatcgatgagaagtgccattgggcagcagaatccttaaaagatctcatcatgttcttctttgtcaaatcattacagctgaaacctgcaagctaagctttggatgcatgttctacttctccaaattttaatgggtcagttttttatgggctgactccatcagttctttaggtctttaatgggctgaattctttcacacgctaaattgatttgcttgttct

SEQ ID NO: 24156 - DNA, 1281 bp, Oryza sativa
  ref <308>: DATABASE ACCESSION NUMBER: AK099598
  ref <309>: DATABASE ENTRY DATE: 2002-08-28
gaactccacgagccgccatttcccaaggaggagcaaggattgttgttgtttcgctgtcagatcgattcctgacgggataatgggtgagaccatcgccaaggatgtcaccgagttgattgggaacacgccgttggtgtacctcaaccgggtgacggatgggtgcgtcgggcgcgtcgcggccaagctcgagtccatggagccatgctccagcgtcaaggataggattggatacagtatgatcactgatgcagaggagaaggggctgatcactccaggcaagagtgtgctgattgagccaactagtggcaacacaggcattggactggccttcatggctgctgcaaagggttacaggcttgtactcacgatgccggcctccatgagcatggagaggagaatcatattgaaggcttttggtgctgaattgatacttactgacccactcttgggaatgaaaggagctgtccaaaaggcagaagaactggcagcgaagacaaacaactcatttatcctccaacaattcgagaaccctgctaacccaaagatccattacgagaccactggacctgaaatctggaaaggaacaggaggtaaagttgatggtttagtttctggtattgggacaggtggcactattactggagctggacgatacctcagagagcaaaatcctgatatcaagatctatggtgtggagccagtcgagagcgctgtcttatctggtggaaagcctgggccacacaagattcaaggaattggagctggttttgttcctggggtcctggatgttgacctcatcaatgaaactgtacaagtttcaagtgatgaagctatcgagatggcaaaggctcttgcattgaaagaagggttgctggttggaatatcttcaggtgcagctgcagcagcagctgttaggctcgctcagaggccggaaaatgaaggaaaactttttgttgttgtcttcccaagctttggtgagcggtacctttcgtcggtgctcttccagtccatcaagaaggaagctgaaaacatggtggttgaatgaaatgcacaatatccgggaatccacaggaataaaagtttggtatctctgcttgtgtgattaaacatacattgtcctgccattttcaagttgttctgcttgtgtagcaatggggaacacagtgtgttagccttgtagtgttaaacagtttacattttatcttccctgtatatcagaaccctttacatgggcatttgtcagccagtgtgaatgaaataaagcatcatatgatttgtctc

SEQ ID NO: 24157 - DNA, 2261 bp, Oryza sativa
  ref <308>: DATABASE ACCESSION NUMBER: AK099599
  ref <309>: DATABASE ENTRY DATE: 2002-08-28
ttggggcggagagacgggagagagaggagaggagtcgaactagggttagtgaggtgaaggggggcgattttgctcatcgccctccgcctagatcgaatccgaatcccgcctcctcctcctcctcctcctccccccgcgccgatcttgccccgctccctcgccgcagctgcgggcttgccctagcccgccgcatcgccgacgtactacgcccgctcggctccaggctccagatccggcctccagggcgtgcccgctgctggacggcgctctcccgcgtccgtggctacctcctcctccgggtttgcgttgccgtcgccgaagcgatccgttggtggattgtgtgtagctctgtaacaaaggatcttggtccataggagtgaaccagaaggtacaaaacttcttggctattatgacatcggtgggtctagtagattcttcatcaggtttcccggaaacgagtactagtggagccactgatcgtctgacagatgatatcagcgagatgagcataagagataaggaagttgaagctgtagtggtcagtggcaatagtatggacataggtcacactattgtgacaactgttggtggaagaaatgggcagccaaagcagacaattagttacatcgcagagcgtgctgttgggcgtggttcatttggagttgtcttccaggctaagtgtctagaaactggtgagagagttgctgtaaagaaagttcttcaagatgcgagatacaagaaccgggagctgcaaacgatgcaagttctcgatcacccaaatgttgcatgcttgaagcattacttttgctcgactactgcgaaggaggagctatacctcaacttggttcttgaatatgtgccagaaactgttcatcgtgttattagacattacaataagatgagccaacgcatgccattgatttatgttaaactttatatgtaccagatttgtagggctttggcatacattcataactgtgtgggagtatgccacagagatataaagccacagaatatattggtgaatccacataatcatcagttgaaattgtgtgactttggcagtgcaaaagtcctggtgaaaggggaaccaaatatttcatatatctgttctagatactacagagccccagcactcatatttggggctacagagtacacgacagctattgatgtgtggtctgctggctgtgttcttgctgaactacttctagggcagcctgtttttcctggtgacagtggcgtcgaccaacttgttgaaattatcaaggtactgggtactccaacaagggaagaaatcaaacatatgaatccgaactacactgagtttaagttcccccaaatcaaagctcacccatggcacaagatctttcataaaagaatgccatctgaagctgtagatcttgtgtctcggcttctgcagtactcaccacacctccggtgcagtgcattggaggtgttaattcatccattcttcgatgaactacgagatccaaatgctcgcttaccaaatggccgtactcttcccccactattcaatttcaagcctcgtgagctgaaaggagcatcaatggaatttcttgtgaagttggttccacagcatgctaagaagcaatgtgccttcttaggattatgagcagacagttcatacactaatcgggtattacgttggtctacttggttccgtagaacagcatggcctgcagtattattgaatgggccctaattttgttctacgtgcaccctgcttgggcatgccttctaccatcatattctgtaaagcagatgaagacatggagtgagtggttattgattggggcttgtatattggtctgcccttgacttgagaactttattcactctgctgtatcaagcaagaaagaacacgtatgtatgcttgagccatatttcattccagagcctctatcaggtttcaccgaccatcagatttaagtcttccagtttgtagggctaagccaaaaaagttctatgtgtgaagagttggagacatctgtttggttacaagctatttgattgtatttgatcattcttttgtattaacactctgataaacttacatgagttaattctattgttatgtgatatagttgtgtgccacttttaaacacctaaacaactctgttcaatgttgaaatgtttggcatgtatcaacatatcacctcattatttcgaggttgattttgtacacctgatatctgttagcttgaatgcttgattacaagcaaatgattaaatatttt

SEQ ID NO: 24158 - DNA, 3085 bp, Oryza sativa
  ref <308>: DATABASE ACCESSION NUMBER: AK099600
  ref <309>: DATABASE ENTRY DATE: 2002-08-28
gaacgacctcccaaaccccagccacttcgccgccgcagccgccgcagcagcagccgcctctcgccggcgttgaccgccgccgccgcagccatcatggacccgcgattcccgccgccggcgccgtccgggggagcgccgccgagggggcaccaccggcgggcgcactcggagacgttcatccggctgcccgatgccgacctgctgctcgacccggacggcgagttcggattctccgacctcgacttcccttccctctccgacgactcccccgcggcgtccgacccgaccccgcctcctcccccgccggcgctgccgcaggcggcgccgcggccgcctgggggtgcacacctgaggagcctctccctcgacgccgcgttcttcgatggcctcgcgttccagggaggaggagggggtggtggtgctgggagtgggagtagcggcggtggggctgggcataagaggagcgggtcgatggatggggagagctcgctgttcgagggcgagtccgcgccgcccgactacgccaagaaggccatgcccgccgataggctcgccgagctcgcgctcctcgaccccaagcgcgcgaagaggattctggcgaacaggcaatcggcggcgaggtcgaaggagaggaagatcaagtacaccggtgagctggagaggaaggtgcagacgctgcagacagaggcaaccacgctttcaacacagctcacgctgctccaggtatgcattatagctcaagcttgtggtgcctctgcaactactaccataaaagtgaggctagtgctctatctgatcagttgattttttgtttggctatgcttttcttattctcttgtatcagacctgatattagcagctggaataaccggatttccctttagatacattgatgcagtattgtttcagcttacacatcatttgactaacatcaatttctacttgacactgtccagtgcaaccaatttactgtccactagcagtttttgggatggacgatcacaaaaaaattactgtattctttgattgcttcaacattgattgtttttacttgattgttacagctgttgtacattggcttctgagtttttctttctttaattttcctttttaacaacgagctcctgcacagaaccacctctagttccttcgagttcaaagttgctagctcttctggagttctggtacgattgttcaggcgtactgggatgctatgatcataaaaagtgttagtctctgtttggttgtatttattctcaactgtgagtaccgctatagttctgtacttgcaaattgcactttccaggacaagcaggtttaggaattttcttgctattttgaatttataattttcactggtacttgactatttacatgaaaaatgttaggctgcttagatgttcgctttgacaagaccaaattattactttttcatagtgtactaaaaataccatgaacagatatagttctctccctgcatattctgtatactaaattggatatgtaatgggatcagaaggattttttttcttgcaaactgccactgcatacatttgtatttcagagaatgtcagtgagaattgaatttattgatatgctagcttttgtaacggcttatcccaaaaattccataatatcttatctaggtcatctagcccttgaacagttaagcacatcctatcagttcacactttttgaaccagagatttttgattttggagagagcctatggtagtcctgcttacagggagaataagctgatctaccggctttatatgatttgtaaatatggaatagctgtcttgtgaatttatcattcgagagctaacaaattataatgagtaaccataagttttgtagtcttttactccgcaaatattacaagtttgtttcaggaaaacatagttgagcctgaacacattatgcattttttcttaattttcttttgtctgcaagtgttcttgtagccgatgtgacaactgaaggatttattgcacccaaaagtagggtcataatgctgatgcctatatactttataggttggtcatgtcagaaacagggttattgatgctatatttgaaagctggtttgattaaagatgatgaaattaggtggggggttgaaactttggtttggtggtcagggataacagctggtgtttatcttgctccacaaagcttcactaagttttttatatagggaatcaagaagtcaggactagtgatttttttttggggggaaattagtgtttttactccttgttaatgttatttctaactaaaatcactttaaattttactctgctgctaacaataaagatcatgtttctgattgtgcatcagtctcatccgctaatgttaatgttttcagcgtttgaatgttctatcttatggttttttgattttctaattatcttttgctcacacattcctaattttataccctttttcatcttggaatttacttatggtcagagggacacgtctggcctaactgctgagaacagagagctcaaactccggttgcagtccatggaagaacaagctaaacttcgagatgctctgaatgacgccctacgagaagaagttcagcggcttaagatagcggcaggccaagttccaaacatgaacggaaactccttcaatggaggactccagcagcagcagcagcagcagatgccgacctatttctcgcagcagcagcagatgcactacttaagtggccaccagggacgtcatcaccacccaaataatccccataactctttgaacggaggccaatcgatgagcggccagaccctaaatgactccatggatttcatgtgagcaggactcaagcacacctcaagttgcacgctaactgcaactcatgtactgtaaagatagctgatgtataccatatgcatatatgaatcattcgtagggtagctagctgatctttgtaccattactgaaaatgcaattcatcctcctgttcaatcatctgttaatgccttagtctgaaggttgaaagaactgtgtttaacatgtttgcgacggttgttttgtaaagatgttgttatagtgaatggaatgggttctgattg

SEQ ID NO: 24159 - DNA, 2247 bp, Oryza sativa
  ref <308>: DATABASE ACCESSION NUMBER: AK099601
  ref <309>: DATABASE ENTRY DATE: 2002-08-28
gtgggattacatgtttgatttccaaattctctctctgtcttgtccaggtgcacgcagactgcgcttcaccatgcagagggggagaaagaatggtgccacacctgaaggagatgtacagcagcctggccgcgtccaaggagctcgtcaaggctctcttcggtatctggggccccggcgatggcctgaacctgtcgacggcgtcgatgctctacctggcacgcgcccacgcgcggcagctcgccaaggaggaccggcggcgtggcgacgaaacggtgcagatgagggcgcagctcgccgaggaggcgcgggagtggaggagccagcagaggaagaaggttgcggcgacggtgcgcgtggcggtgcggggctcgacggcgagcggagttcgaggcatcacgccgagagggtgaacgccaagctcgggaaggcactggccgacgcggagagggagctggagagggagtggaggtcgagggagcggctggagaaggtgtgcgacgagctcgtcaggggcggcctcaccggcggcgtggacggcaacaggggaggcaaggaggaggtggaggagatgaggcgggaggccgagagggcacaggaggagctggagaaagagagggagatgttgcgcctcgccgacgagctccgccaccgaggccttccgacccgcggcgctgctcaccgtcacaccaaggcgatgaattgtggcgaccagcttcggcgaagcagcacaggggcgtactctcacctcagtttctctctccgttttccatgaaaataataaacacgagtgtctgatagctaattaacattttttttcccgacagcaaattcgcgtttttacggtatccacaaactaattacaggttttttcgatgcactgtgacaaatttcgccaaactaattgggttttgttattatttttttttaatatcactgacaaatcttaagattctcaactcaattacaggttttttggatgcactgtgacaaattttgccaaactaattgggttttgttattgtttttttttaatatcactgacaaatcttaagattctcaagtcaattggtgattggtttggatcgtccagttgagtgattgtatcccaaatcctgtagaagatagtcggaatagctatgagtgcacggtacagcaattacttacagacgcaacggtgacagaacacaatcaatattacttcagaaaataggatactaatcagactgccggtgcctacgatttccaacggtttattctacaatcatatgcctgatgtagtgcaaatgaaaagaaaaccaacttaaaagttagtgacctaaccaaacaaaactacacttgaatcaaccgcgagttgaagttagagaccaaaagaatcattgtcagtgaccacaagaaagtgaattcagacgtcaggtaacatgatgctaaaggtcacttttaacagcagcatcataacactgcacccaaatcatattccaaggcagctatcttttctaaaagaacaaaaaggagtgcataaacacatacaaatataagacctgttacaacttgcaaatatcccaagtactttgcttgttgtagcataaacacaggtagctgatgggcacagaatacatccgaaggccaaaaggcacggtgcctgggatccaaaaattggctaaggcattctagtgtcagacaaatatatacatacaccgcctgactggcctcccccacaatactacagaggggcaatatgtcacaagaattgaggccctcctgcattctgccatatatgtagatacatctagtagacatatagttggttaaacagtgaggctcctgattagtgctaacttgtcagcagcaaagcatctttgagcaagatggcagagtcacaagattggcctgttctccagactctaaaatcttccttgaagtatccagctttcgaccagtgacgcagaatccgcagcggaaatggcccctgttcgtcaccttgaggatcattgtaataccagacacttgcgtgctctgagatttcttccttcgcttcgacagctttctgaccactgcataatttaggcttagcttcatgttgtctcgtaccatggtcctcacttccatcagaatccagatcaacagtcatgtctccacttttaccatgcagatcatcttcaccgtcatcaatgtcaataacttgacctgggttgacagctgcagtagctacaataatagtatgaacaagtagaaaaacttggagaaacc

SEQ ID NO: 24160 - DNA, 2891 bp, Oryza sativa
  ref <308>: DATABASE ACCESSION NUMBER: AK099602
  ref <309>: DATABASE ENTRY DATE: 2002-08-28
gttctatattaggatatcagctttggtagaaaaggaggtctcttccttaacagtggctgatatctctagaaggtgtgtcattccttcaacttatgcatgctctggccggcagattgacaaaattgttgtacgaggcaagcttgagcgttcaattcaggcagtgaaagctgctttacaaaaactggaaaatggaggcgctgttgatgacgctaaagcagtatgtgaatctgaagttttgaggcagttaacaagatggcatgtatgtggatactctgcttttgatatctctcttaataatgatcttccttaggacctgtgctatgctaatggtagggctttctgttcttctttctgatcaatgcaaacataaattctaatacatttcccatcatccactgaaactatccatggaagctgtaagttaacaatcctaataagtttatcttttgcgtcttattaaacataattttggcatcctaatcttttttcatctcttcattcatgaatatgctgtcaaaagacgtaggtcaatgttgtgtattggatatcatgtaaagaaaatattaagtctgaagagtggtggaagtacttcttagatgttactgtatctggctattatgctgatcttaagtttctcatcagctgcaaaacatattacgccactagcttcccagtgcactaattaaatactatgttctatatatcatgttttgaccagaataagctcagagtttaccttgcacctttcattcatggcatgcgctacacgtcttttggacgccattttacaaagaaggagaagctcattgagattgccgagaagcttcattggtatgtgcaacctggagatatgattgtggatttctcctgtggtacaaatgatttcagtcaattcatgaaagaaaagcttgataaagttggcaaaagatgcaacttcaaaaattatgatgttattcaaccaaagaactctttcagttttgaaaagagggactggatgactgtccgccaaaaggaactgccacatggatctaaactgatcatgggccttaatcctcctttcggaccaaaagcaatgcttgcaaacaaattcattgacaaggcgttgaccttcaagccaaagctcatcatattaattgttcccaaggaggctgaaaggttagatcgaaagcagcaaccttatgatttggtatgggaagatgatcaaagactttctgggaagtcattctatttacctggttctttggatgtgagtgacaaacaaattgaccaatggaacaaatctccacccccactctatttgtggagtcgccctgattggacacagaagcacaagagaatagcagaacagcatgggcacaccaaagccaatgttttctcccataatgaagaagatttggtttatctttttgaggatagagctacacagaatcatgatgtcaataataagaactacacatctggaaacgggaacttcactgctgagaaaccagtacaagcagacgccttccctccagaaaagctagtagaagttgcatacgaggaaatgaaggttgcttctaacagaagcagtatgtatcaatcagatcaaattagtgttcatgatgagagagatgcacattctgacttgccgatgtctcggcacaacagtatgaaagcaaaagaggtttcaaatagctcaagagacagaaggaaatcagataagacaggacatgaagcagattccgatatgagtatcttgccctcagattccaggaattttctacacaaatcaggcaaccttgaacctccaatatcaagtagaagtggatataccttggagaggttgagatatcatgataatcatttcgatcatcttgtaggagagcactcatcatctagccttcagatgccaatctttgaggacagctatttcagatctgtgaatgaatatggagttgcatctgtagaaaataacattgccctttcgactgataatgttggtgccggctcaaggatgtatagtcctgatccagagctgaacgggtatgctgttgatcctactgttaatgcttatggttcagtatctggtggaaccggtggcagcttttacaggaggcagaacctcgaggattacaccatggacagtagtgagtctgctcagatgaatccagttcctggtagagatgtgcaggaatatgcaagaacatactatggacacaacagggatgaggttccccaaacagcaattaacacaccttccatggatattcgaacacacataagaatgtacggcaggcacatcagggatgatcatacccaaacaaccatgaacccacctgccaatgatattcgggcacagataagaatgtatggtcaacacgctacctccgatcaccagcatgcaagtagatactcttctgggtctccagatgctagatttgagcagcaaccttctttcacttcatatggaatgccttctttgggttcgacagggaggtcgatgatggataggtatagtccctccattgatgaaacaagctataggactggccaaagaggcccatacaatgcttctgactttcggagggatcggcatcctgatgacatgaattttgctctccataaccagtatccatacccacatccaggttcctctggtggctggcacgactagtaactgaacttttgatgttcacacagaattatggtctggcatcctctggcagatgtaatataaacaagataataaagagatgatctagaggatgcaaagttttaaaaggtaaaccatgtgtaggaatgtttatgtaggttataccatttgtcgttctttgagcttttggaataccaattttgtttgcatttaatgtacaaaaacttaccttttgttttgaaatggaacctttttcgtg

SEQ ID NO: 24161 - DNA, 1038 bp, Oryza sativa
  ref <308>: DATABASE ACCESSION NUMBER: AK099603
  ref <309>: DATABASE ENTRY DATE: 2002-08-28
gccccaaggccacaagcctccatctaccgctctcacttctctcgcagagatggcgcacgccttcgccggcggcacctccgccatctgccgctgcccccacgaccccggccgagccgccctcgtatcccgccctcgccaccgcctccgtgtcctcgcgtcgtccctacccacgccggccatcgagggccagggcgtcgagttgtcggtgacgactcggcgggggcgggtgctgccggtgctcaaggactgctccctccgcgtccctccgggtcagctctggatgctcctcggccccaacggctgcggcaagtccacccttctcaaggttttggcaggatttttaaatccttcttctggtacagtgtatattaacaggccatgcagctatgtcttccaaaatcccgatcaccaggttgtgatgccgacagtggaatcagatgttgcatttggtcttggtaagctcaacctttcgttggatgaggttaggtcaagagtatcacaatcactggatgctgtgggaatgttaagctactctcaaaggccaatccaaactctgagtggcgggcagaagcagagagttgcaattgccggtgctttagctgaagcatccaaagtactactactggatgagctgaccacattcttggatgaatacgaccagatgggtgttatcaaggcggtaaggaaatctgtaggtgctggtggggaggtttcagcattgtgggtgacccatcgactggaagaactcagatatgctgatggtgctatttatatggaagatggccagacaattattcaaggtgatgtgtctacaatatccaaatatataaagaaaaagcaagcccgctacttcggtcactttgagctttgatacttggaatgaatatgaagctatggggaaatttgcctactcctgtacacatcatattgttgaaaatcagtttatttttttaggctatttccccgcaaatttcttacctcaattccaagctgtattctactctcttgctctttacttatagcaatgtcgatttgggc

SEQ ID NO: 24162 - DNA, 1228 bp, Oryza sativa
  ref <308>: DATABASE ACCESSION NUMBER: AK099604
  ref <309>: DATABASE ENTRY DATE: 2002-08-28
gaatctctctcctctctctctctctccagctcgcctccccctcgccggcgacgagctctcccccggctagggttagaccaggtgcccctcttgtctgcggcggaggaggtgggaggaaggatggaggagtccgtgggctcgcgcggcggcggcggcggcggcctggacgcccagatcgagcagctcatggagtgccgcccgctctccgagcccgaggtcaagacgttgtgcgagaaggcgaaggagatattgatggaagaaagcaacgttcagccagttaagagcccagtcacaatttgtggtgatatccatgggcaattccatgatctagtagagctctttcggattggtgggaagtgtccagatacaaattatttgtttatgggagattatgtagatcgtggctactattctgttgagactgttacacttttggttgcactgaaggtgcgctacccacagcggattacaatccttcgtggaaaccatgagagtcggcagatcacacaggtgtatggattctacgacgaatgcctacgaaagtatggaagtgcaaatgtctggaagatcttcaccgatctttttgactattttccattgacagcattggttgaatcagagattttctgcctccatggtggtttatcgccatcaatcgacaatcttgatagtgttcgcagcttagatcgtgttcaagaggtccctcatgagggaccaatgtgtgatcttctatggtctgacccggatgatcgatgcggttggggcatatctcctcgtggtgctggctacacttttggccaggacatatcggagcagtttaaccataccaataatctcaaacttgtagcccgggctcatcaattagttatggaaggatataactgggcgcacgaacaaaaggtcgtgaccatattcagtgcacctaattattgttatcgctgtggcaacatggcatccatcctggaggttgatgactgcaggaatcacacatttattcagtttgaaccagctcctaggagaggtgaaccagatgtgacacggagaacacctgattatttcctttaaattatctgttgtaatttgtattgttttgtttcttttgtttctctaagaccgcaatagtgagtgctggtcagtaaaattttgttggatccctttggtaactaaactggccagcgatagcatgagaatgccgatgcccaaaaaaaatgtgaaacttatgcccccc

SEQ ID NO: 24163 - DNA, 1121 bp, Oryza sativa
  ref <308>: DATABASE ACCESSION NUMBER: AK099605
  ref <309>: DATABASE ENTRY DATE: 2002-08-28
gtatgtaacattttactttacagtttgacagcagtggtatgtgcatagtgtttgtttctcctttgcagcacttacaaagtttttgatctgaagaactacaactttctgtattctatatgtgataagaacatccaggaaatcaaaataaggttcggttatcactgatgactgattacataaaaaaataagttttcatctttgatttgacattttcttacattcatgaaacctctctctccagtcctggaatcatgctcgtaatttatcagaagtcagctaatcatgttccattaaagatactctcaattgaggatggaaccccactgaaaaccttcacccagttgcttcatcggagcagaaaggttgacttcatcgagcagtttaatgaaaaacttcttgtgaaacaagacaaggaaaacctacagattattgatgttagaaactccaacttgattgaggtcaacaaaaccgaattcatgactccttcggcattcatcttcctctacgaaaataatctattcctgacattctgcaataggacagttgcagcatggaatttccgtggagagctagttacttcatttgatgatcatgagttgtggcattctaactgcaataccaataatatatacatcactgccgaccaggacttgattatctcatactgcaaagcttcaaaggaggtcagagatagtggcggctgcgagggcatagctccccccacgggatcaatcaacatgagcaacatcttcacgggaaagtgcgtcgccaagatctcccccctcgaccctactctcacaattgctcctcgaaaaagaggtgacagcagcagatctaccattcggagcactgtttctgatgctcttgaggacatcaccgcactattctacgacgaggaccgcaacgaaatctacactggaaacagcaaaggcctggtgcatgtctggtcaaattagtttcacctcccctcatcatcaaccttgtagataccttctgtacctgtgtttctttttactgcccataacaaatgtaacgatcatccggtctgatatagtggaactgtgtgctccctgacattatacgattcgttagaataatctgagtgtagattttcttgatgt

SEQ ID NO: 24164 - DNA, 1346 bp, Oryza sativa
  ref <308>: DATABASE ACCESSION NUMBER: AK099606
  ref <309>: DATABASE ENTRY DATE: 2002-08-28
gacagaagagagacaggggagaaaaccctaatctcaaggccgcggctgtgagcgctcctcccgtctctcccccaacccgccgccagccaccgagctcgccaccgtctccgttgcctcgccgtgctctaggttctcggatggaggccgaggcggcggcgaagagggcgcgggagagcggtgacgcggcggcggccggtgccggcgagcaggcgggtatctctgccgtcatccctggatggttctccgagattagccccatgtggcctggtgaggcacactcattgaaggtcgaaaaggtactattccaaggaaagtcggactaccaaaatgtgatggtgtttcagtcctccacgtacggcaaggtgcttgtgctggatggagtgattcaggtcactgagagggatgagtgtgcttaccaagagatgattacccacctccccctttgctctatcaaagatcccaagaaggtgttagttattggaggtggagatggtggtgttttgcgtgaagtttcacgacattcctcggtggagcaaattgacatatgtgaaattgataagatggtggtagatgtctccaaacaattttttcctcatctggctgttggatttgaagacccccgtgtgtcattacacattggagatggcgtggcctttttgaaaaatgctccagagggtacttatgatgcagttattgtggattcctctgatccaataggaccggctcaagagcttttcgagaagcctttcttccagtcagttgccagagctttgcgtcctggtggtgttgtatgtacccaggcagagagcatatggttgcatatgcatattattgaagatattgtagctaattgtcgccaagtttttaaaggctcagtgaattatgcttggacaacagtaccaacataccctagtggtgttattggttttatgctttgctccaccgaggggcctactgttgatttccagcatcctatttttaacattgaggataatgagttctcaacaaaatcgaaaggaccacttaagttctacaattccgagatccactcagcatcattttgtttgccgtcttttgcgaagagagtcattggatccaaggccaactagatcaaagatcactgagcccaaggccaactggactggaatccctccgacaagagatttggttgtagcagaaagagcaatgaccccttttttcccatttaaataaaaattggagatgtaaacggttatccaagtgcttttgaattttgtctcagtatgagaacgttttgtatttggtaactgttttcccgcatctcccttaccatttaccaaaatgagtattgctgtagttttcatctg

SEQ ID NO: 24165 - DNA, 1343 bp, Oryza sativa
  ref <308>: DATABASE ACCESSION NUMBER: AK099607
  ref <309>: DATABASE ENTRY DATE: 2002-08-28
gaacttctctcccatctctttcctcctcctcctctctgatatgtctactatctacatgagccagctacctgctactctccctctaatggagggggatcaggatcaggggctctacccagccttccatagagcaaaggaccctcctatcttgttccctttcatgatcgacagcgccgtcgagcaccaagggcaaatctatggagatcagggcttgaggaggcagcaggttttgggtgaatccaatcaacagttcaatgatcacatgatgatgggcggatcagatgtcttcctcacaccgtctccgttccgaccaaccatccaaagcatcggcagcgacatgatccagcgatcatcttatgatccatacgatatcgagagtaacaacaagcagcatgccaatggatcaaccagcaagtggatgtcgacgccgccaatgaagatgaggatcataaggaagggggcggcaaccgatcctgagggcggggcggtgagaaagccaaggagaagagcacaagcgcaccaggatgagagccagcaacaactgcagcaagctttgggtgtcgttagagtgtgctcggactgcaacaccaccaagacccccttgtggagaagtggtccttgtggccccaagtccctttgcaacgcgtgtggcatcaggcaaaggaaggcgcggcgggcgatggccgctgctgccaacggcggagcggcggtggcgccggcaaagagcgtggccgcggcgccggtgaacaataagccggcggcgaagaaggagaagagggcggcggacgtcgaccggtcgctgccgttcaagaaacggtgcaagatggtcgatcacgttgctgctgccgtcgctgccaccaagcccacggctgctggagaagtagtggccgccgctccgaaggaccaagatcacgtcatcgtcgtcggtggcgagaacgccgccgccacctccatgccggcacagaacccgatatccaaggcggcggcgaccgccgctgccgccgccgcctctccggcgttcttccacggcctccctcgcgacgagatcaccgacgccgccatgctgctcatgaccctatcctgtggcctcgtccacagctagctagctagctgatcaaaactagctagctactagtaccgttaatttgatgagggcaacaaccagagtactatgtaccactactagcaatattttgtgtgtgccttgtgatcttttgttgttttgtgttgttgaggagatcactagatcaggatgaaggagagatagtgatcacatgtctaaggacgaaataaacgagaacaaactcgctagctagctactagccgggatcaggattatattt

SEQ ID NO: 24166 - DNA, 3073 bp, Oryza sativa
  ref <308>: DATABASE ACCESSION NUMBER: AK099608
  ref <309>: DATABASE ENTRY DATE: 2002-08-28
ggctgcctcccctctcgttgctttgcttcccccgatctgcagagccggaggcgctccgccggcggcgaggcaggcacggcgtggacggcctcccccatctcccgtcgccaccgcgccctagccttctcactccctcccggcccccgcgcgcgcgcgcgcggccgaccagccggtggtcggcttccgtctccactcgaatcgaattcgagtttgtttggagagaaatcgggggttctaggtgaacccccatgcccgacgttggcgcggtgatcgaaggatcctcgcggcggagatgaacgtggttgggcgggtagggtcgctgatctcgcagggggtgtactccgtcgcgacgccgttccacccgttcggcggcgcggtcgacatcatcgcggtcgagcagcctgacggctcgtacaggagcacgccctggtacgtccggttcggcaagttccagggcgttctcaagggcgcggagaaggtggtcaccatcaccgtcaatggcgtgtacgccagcttccacatgcagctcgacaactctgggcaagcctacttcatgcgggagcttgtgcctggcagtgaaaattctgggacaagttcggaggaagaggaagctagctgtgagcctgaacctccggcgcggagtaagagcgacggggatctttacatcggagcgaaaggcagaccaggtagcccggagtcgaatgtagagtgtcaagagaagcaagctatagaggagtttgattcatacggttatagcaggatggaggtagcggaagattcggcaaagcaacctgatgggagcaattcagagatggttttggttagtgtggatgggcatgtcctcaccgcccccatttcctcgaccgaggagaatgtggaggatgtgcagctaagtgaaccccaattccacttgggacctggggagagctcaagtggtgatttcagccgcagtggtgaggtgtgggaagctggcattgtcggtgatttatacatgccacaggaaaaggttaagtttgattctggaaatcaacaagaggctttggaagaacttggtgatgtaccaattgagacggataagtcacatcatgtccctgttactggagatgaagtgctccatacctcagtttatgaagatgtgactagtgcattgaccaatgaagtcgaatctctagttgtcccagagttagggaataatgatgaggactatcaagccttgatcaatgtagatgaggtccatgacatctcagagaacaaaaatgagggttgccgacccccttctagccaatatgaggtttgtgatgtctccaagaccgatgatgagggatatcagcccttggccactgaagaacttggtgatgtaccaattgagacggataggtcacatcatgtccctgttactggagatgaagtgctccatacctcagtttatgaagatgtgcctagtgcactgaccaatgaagtcgagtctctagttgtcctagagtcagggaataatgatgaggactatcaagccttgatcaatgtagatgaggtccatgacatctcagagaacaaaaatgagggttgccgacccccttctagccaagatgaggtttgtgatgtctccaagaccgatgatgagggatatcggcccttggccactgaagatgaggctcgtgatgtctccaagaacaatgatgaggggtatcagcctttggccactgaaaatgaggcttgtgatgttccactgcttgagaatgacgaggcttgcagggtgccagctaatgtagacaaggtttgcgatgtcagcaatgaggacactgagttagaaattgctagtcctagttttggtaaatatgatacttttaaaagttgcttagacctctcatcacaaatagatgacggagattcgggaactgaaccattttctcctgaatttgatcatcagcagggttttgaatttagtctgagtaatcgttctgttgttgacatagatctggaggaagatataagtaaaactacccactgtgatcgaaatgatccattacagtatctagaggaggataataaaacagaaggtgaagatagttctgcccactgtcgcaaggtatctgatatgtccattgtaggaggttctcatggcaagaccaaggagacagcctcttctgaaaatgaggcgaataggcctgatggtttacattcaaccattggaaccagtgacaaagacaaattaggtagcattccagagaactcagcagctgaagaggaactaaataaagaagagcatcccaaattacaaaagggcttggggttcgaaatttctctttgtgggcacatgctacggccaggaatgggccaagcatcagctgaagaagttttccaacaacatcttgttcttgaggaagatttcaagttatcaggatcatcaattatgaaaaatgtaaaccttgttgtcaaatttgatagtcagtatttcttatggagtaaaatttctcatattattcttgggaaagctgtctttggtccgaacttctgcacagaacatattgatgctattccggttgaacaccaagaaacacctacttcaagagattctcttgggctgtctccctcaagcaggagatggaggctttggaacataccattcaggatatcaagatcccttcagcgcagtaacagtgattcatccgaggacatttttcttgacacagaaactgtcttgagtccaatggatgagcaaactccagagaataatataaatcagtcaccaagaaagcaatttgtgcgaacattaattcccactagtgaacaggtggcatcactaaacctgaaggagggccaaaacattgtaacttttagcttctccaccagagttcttggaaagcaacaggttgaggcacatatttacttgtggaaatggaatgctaaaattgtcatttctgatgtggatggaaccattacaaggtaaagttcaacttagtatgtttagatgctcagtcttgtttaattaacaattcagctagttatctgtcagactgtcacaccaaactgtaagttaaggacttgttctgtttgctgcccaaacttgccatgc

SEQ ID NO: 24167 - DNA, 3722 bp, Oryza sativa
  ref <308>: DATABASE ACCESSION NUMBER: AK099609
  ref <309>: DATABASE ENTRY DATE: 2002-08-28
gagctagcccgcacgcgattcgctcgcctcgcctcgcctcgcctcgcgcgacggtgagagaggtgcgcgggcgggaggtatcggcggtggaggctggtcgtcggcggagcagcgctggtggctggctggtcaggggcggagcagggcggcgcttgaggtcgaccggcggcggagcagcggtgggagtcgaaggcgcgcccgacgaggttgcccaccgccggcgtcgggtcgtcgtatggttgtgaagaagcagggtgagagggggagaggtggcaatggtggctccaaaggagggcactttgcaggcgttggcgtacttcatagttcccagtgagctccctcccgggatcgatcctgatgcggcgtttattgtgtgtgttcggtttggtcagtacacagctaagcttgatgatggtagtagtgttcatgtgccaagcaaatacgctgaatgggttgtagactatcgacaatgcacattagagagcttggaaaaggattttgcagccagggtaaaatggggtaggtgccaacaggttgtggtgtatggatatgacaagagaactggcaaggaaacaaagtttttggataatatggatctagcgcatgcattatttgattggaagagggagaggaggctgattttatttgtggatgtggaggataaatctggtcaattagttactagctcttctatttcagaggtaaatgagttagtcatgggtgaggttgtgacagccaagcaaggtgatgctctagactcaagcaatcaacatctcattgattgggatagtttcaagatatctccaattctagaggagcaaataggttcttcagtgcccatgatgaaggaagatgaaatgtcaattccacaagagcaagttcctcagcatgtcattgattgggatggattggagatagctccaattccagaggagcaaattggttcttcactacctgtaatggaggaagatgaaatgtatgattttcttggactcagaactgaggatgagagagcggatcaagctaggcttgaagctgaaaagcagagggattctgctcctggtccagctccacgtcttgcacagcgggacttgaaccttgatgaggcagagatagatgctaggtttgaagctgaaattttctatgatagggatgaccctccaatgatagttggaagctcatatggaagtatggttgagtttagatcagctgtgaggcaacacgctataaaggggcaatttgagcttgggacagagaagtctgatccagaaaggttcaggggctattgcaaagctgagggatgtccatgggctattgtggcaaggttgatgcctgatggaaaatctgtgaaggttactttgaacagatttgcacatgcttgtacatctattgagggagttaagacaaagatggtatcatacaagtgggttgcagagaaggcaattccttttctaaagaaggatccaaatatgggtgcaaagaagctaaaagaggagttagagaccaaatacaatgtcacagtaggatactcaaaagtgtggcaaggtaggcagaaggctgtggagcagatatttgggtcatgggaagagagctatttgtttaacttcaaggctgaggttgagctgaaaatgcctggaagtgtggtggagatagatgtacaggaggatgatgatgggatttatttttgtagattcttttgtgcattcaaaccttgcattgatggtttcatgaatggatgccgaccatacttgagtatagactccacagcctttaatgggaaatggaatggtcatctaccttttgttacatccatagatgggcacaactggatgtttccagttgcatttggattctttcagagtgagaccactgacaattggacttggtttatgcaacagcttcacaaggcaataggcaaaccatcacacttagcaataagctcagaagcttgtaaggggctagagaatgctgtgaaaagtgtttttccttgggcagagcatagagaatgcttttgtcacttgatgcagaatttcgtagagaagttcccaggtccgatgtatgggaacatgtaccctgcagctagatcttacatgcaagataggtttgagcactacatgaatataatccatgagactaattcagatgtgaaaccatacttggaaacctatcacaaactgctttggatgaggagcaagttctcagaagagataaaatgtgacttcattagcaataatctggcagatttatggaacaaatggattaaggatatgaaggatcttccagttgctgagcttgcagatgctatcaggtcaaaaataatggatctattggcgaggagaaagaagataggtgagaagctagatggtgagatgctccctattatagttcgtcaactcaatgcaatgactagatccttgggccacttgagggtggttcaaggtgatagagaccaagcagaggtggctgagatcactcctgaacatgagattattaggcatagggtcaatcttgcaaaacatacatgcacctgtagagagtggcaagtttctggcaaaccatgcccacatgcattagctctcataatatcaactagaaaccccagaatggctgattatttggatccttgctattcagtgcaaaagtataagcttgcatatgcaggtgttattcatccactttcagataagtcccaatggccaaaagtcaatcttggtttcaatttgttgccacctctgactaagaaagacgtagagaagcaaaggaagaacatgatagttgggtgtcttgataaagaacaaggcaagcttaggaccaaaggcaagtggcaggttcagtgcaagagctgtcttggcatgggccatagggcaacatctccaaaatgtcctttaaattcccagaaaataatgaagaatagtgacaaacaagggagaccactaggttcaactagttgtgcagcgggtgctagcacacccaaaagacaaaaagtttcaaggaatgattccagcaatgctagtcctggacctgtctctgaaaggcaattggcgttgaccaaggctgctggagaagacaatttttattgtgcttgatcagcatgctgctggaaattttttgtgtgtgatcagtatgctgctgaagctttttacttgtacatgatgctaaaagttctgtaagctccaagtccttgatcaatcctgcacagctcgtagtttggtggtgcagcatttggggataatgcggatcctgctgtaaaatgccttctgcggatacaaccatcttaagagtgcgtgtcagttacaggatacgagggcacagcaggcccgcttgaattccttctccatgtggtggaaaatgcacctgcactggagattttaacagtagatgcagcctgtgcctgataaaaggggaactttttaatgctttttgtcaggcttctcgacatcacctcgttcggaggctgccgcctagcaaagttggtcctgctgtgagataaaaggatttatttgtactcaggaagtcaggatatgcgaggtttaagtagcaggtcattagtcaattactactactacctcccatctgttgctaggtttctatatattgtgacagaagtagtaaaattgcttttgccaatttcatttaacttcactatgtaatgctgaatgaagtatatgtatgttcatgaagcaatcccccgagaaatgctaatcttgaaattagatataacg

SEQ ID NO: 24168 - DNA, 1745 bp, Oryza sativa
  ref <308>: DATABASE ACCESSION NUMBER: AK099610
  ref <309>: DATABASE ENTRY DATE: 2002-08-28
gtctacctggagcgcgccgacatgttcaagcacctcgggaggctgctgtcatggcggagccagggcggcaaggacctgctcgtccgcacctgcgtcgtggcggcgctcgcgtcggcgctcttcaccaacgacacctgctgcgtcgtgctcaccgagttcatcctcaagatcgcgcggcagaacaacctcccgcccaagccgttcctcctggcgctcgcgtccagcgccaacatcggctccgccgcgacgcccatcggcaacccgcagaacctggtcatcgccgtccagagcggcatctccttcggccagttcgtgttcggcatcctcccggccaccctcgtcggcgccgtcgtcaacgccgccatcctgctctgcctctactggcgccacctctccgacgagaagtgcgtcgaggtcgtcgccccggtccccaccgacgtcgtcgaagaggaggacgtcacctcccaccgcttctcgccggcgaccatgtcacacccccgttcctcctcccaccaccaccaccaccagcagcctggcagctcgctgtcgtcgcctgactgcgaggtgttcgagccagtgaagcccgtccctgtcaccagcaatggcgactccaacaacaagccggacgccgccgacgccgccgtcgtcgtcgggatccaccagaggcgcggcggcgtcggcggcggcgtgaggatgaaggaggaacatgcgttccggtgggtggaggagaaggaggaggccatggagcaatggaagagcacggtgtggaagacgggtgtgtacgtcatcacattgagcatgctggtggcgctgctgttgggtctcaacatgtcatggagcgccatcaccgccgcactcgccctcatcgtcctcgacttcaaggatgcccgcccctgcctcgagaaggtttcctatccacttctactcttcttctgtgggatgttcatcactgtggatggattcaacaagacgggcattcctagcgcattctgggaattcatggagccctatgcacggatcgatacaccgaccgggatagtaatcctcgccctggttattcttctcctctcaaatgtggcgtcaaatgttccaactgttctcctgcttggtgctcgggtggcagcgtcagcagcggccatctcccctgcagcagagaccaatgcctggctcatcctggcctgggtcagcacggtggccggcaacctctccctccttggctccgccgcgaacttgatcgtttgcgagcaagctcgcaggtcggagcagtacggatacaccctctccttcttcagccacctccagttcggcttcccggcgacgctcatcgtcaccgggattggcctactgctcatcagaagcaactgaaaaatggtacagaacatatatatgaagaagacatggatatcaggacatgtacaaaaagaatgtgaattttcaggtcaggtcgattgtatttctgcaaagattcaattgtgggataaaagaaaaatgtctatctttgcctcggaattaagcacggatatcatggtgcttggaggctttttgagctgtacatttgttagttcatattggggggagaagatgtatatgttgcagtagcaaggatcataaaagggaaatgtatatttttgttcagcattctacttgtaatccatatatattttttgaagtcgaataatttgtataggcaggagaagagaaaatcaatgaaatgcatgcccctatcgatgcagctaatgtgtctt

SEQ ID NO: 24169 - DNA, 1921 bp, Oryza sativa
  ref <308>: DATABASE ACCESSION NUMBER: AK099611
  ref <309>: DATABASE ENTRY DATE: 2002-08-28
gtgttgaccagccaggcaggctcgactcaagcccgaccccgccggccgccgcaatgccgcgagccccacctccgcggccgtcggaggacgcgcgcctcgccgcctacaagcccggcgtcgacgtcgcccgctcgcgccgccgccgcgaggaccgcctcctcgccgtccgccgcagcaaccgcgatgccggcctcttcaagcgccgccgagacgaacccactcccactcccatcccgcccgcgagggccgcgaccccctcatctcaggccgatgatgtgcccaccaccaccaccgccacctctcccccttcctctgcaccctcttcgcccccgtcctcacctcccgccgaatccgttcctccgactgccgccgactctgagctagcttgaaggcctatcagaaatggtggagaaggtctggtcagatgataccactagtcagttagaagccacgatccaattcaggagactcctttcagatgagaagaacccaaccgtgataaaaatcatcagagcagatgtcctgccaaggttttctgatttcctctcaagacatgagcatcctcagctacaaatggaggcggcatgggttcttaccaacatagctgcatctgactatacattgctagttgcagaatgtggtgctgttccaaggttggtcgagctcttagaatctgcaaatgctaatatcaggcatcaggctatctgggctcttggaaatatagctgcagacgtgcctacctgcagagagatcgtccttgatcatggtgctgtgacaccattacttgcccaatttagagaaggcatgaaagttccagttctgaggactgccacttgggcgttgtcaaacctttgttttggaaaattaccagctgaagtgcaagtgaagccaatactggatataatcagccagcttattcattcagtcgacgaaaagatactgggtgatgcatgctgggctctttgttatatatgtgacggtgtatctgacggaattcaacatgtgctagatgcgggtgcttgccctcaacttgtaaatcttttgatgcatgcatcagctaatatcctgcttcctgtcattacggtacttgcgagaatctcttctggagatgatgctcaagtgcaggtcctagtagaaaatgacattcttaattatttggccccgttgctagcacgaaattacccaaagagcatcaagaagcaagcttgtctaattgtttctaatatctccactggcagcaaggataatattcaggcagtaattgatgcagatgttataagccctctcattttcctattaaagacctccgagaaggatatcaaggaggaagctgcttgggctatatcaaatgctgcgtctggtggttcaaatgatcaaattcaatatttggtgagtcgaggatgtttggagccactctgcaatgttctcacttaccaagatgctgacctagtatatgcgtgcctggaaggtcttcaaaacatacttcaggcgggtgcagtggggaagcaggggcagggttccacggtgaacccgtatgcacagtttattttagaatgtgggggtttggataaactggaagatctgcaggaagtcgacaatgatgccatttacaagttagtcatgaagttgctggagggttactgggacgaggaagtaagtgatgatgacccaaatttaccaacttcaaatgactctgcagagaccgtggagacggcatctgaagatgctgcgcagccaacagagccatcggccagcccaaatgaaagcgaatgacttgtaatgcttccttcctgtaagatgtaaccatctggttcgttggtgtcatgccaaaccgtcactctgccgaatttataacattactacaatttatgtattatatactaatgaaatttttgtgaatgtttgagcaggaatttgatct

SEQ ID NO: 24170 - DNA, 1414 bp, Oryza sativa
  ref <308>: DATABASE ACCESSION NUMBER: AK099612
  ref <309>: DATABASE ENTRY DATE: 2002-08-28
ggagttctttctacccgtctccattggaggtggtgggtgcgagttgggaaaggcgagagggagggagatgctgcgagagaggtcgtcgcggaggcggatggcgagctcgagcaccgccgcggcggcgctggtagtggcggcgcttctgctctcgtcgtctccctcaccggcggcggcggccgcgggacgaggaggagaactcaggatggagcattctgatggtggctattcttataaccgcactctcgcccatatttttgtgcaatatgcatctgctgtgtatacgtctgacttaacctcacttttcgcgtggacatgcccaaggtgtcaaagtgacacaaagggttttgagatgatagagataattgtagatgtggagaactgcttacaggcttttgttggagtcgcccctgatccacaatccatactcattgcttttagaggcacacaagaacacagtgtctcgaattggattgaagatctcttctggaagcagcttgatgtaggttatccaggcatgccagatgcaatggttcatcatgggttttatactgcatattataatacaacagtgcggcatgagatcttggaatctgttcggtgggcaaggaagacatatggaaggctacctataaatgttgtaggtcactcgatgggaggggctttagcatcgttctgtgcccttgacctctctgttaagtatggatcgcaggaagttcaactcatgacttttggacagcctcgggtaggcaatccttcttttgctgcgtacttcagtgaccaagtcccgagaacaatccgtgtgacccatcagaatgacattgtcccacacttgccaccatatttttgctaccttggcgaatggacatatcaccacttctcgagagaggtttggcttcatgagaccatagtaggaaatgtagttactaggaatgagaccatctgtgatggatcaggcgaggacccaacatgcagcagatcggtctacggcagaagtgttgcagatcatcttgaatactacggtgtctcactacacgctgattcaaggggaacctgtcaatttgtgattggctcaaccaacatggcatatggtaccattcttgaagttgatagaaccatcatcatgacaagatatccgcaagagtggcacgccgtggaatctatttaaccctttgcccgagggtaaattgtatataattattttccttttgtgcatatagctcatgtaatgtaggtgtactgggttctccaggagctctcctgaggataaggagaggtttcatttttaatatgtgcccccctttactcaagtgagaattgtacatggaagctccatatgaacattgtagacacgcctttattgatgtacatagcaatatcaatggaataaataatagaaggatttgatggtatt

SEQ ID NO: 24171 - DNA, 1124 bp, Oryza sativa
  ref <308>: DATABASE ACCESSION NUMBER: AK099613
  ref <309>: DATABASE ENTRY DATE: 2002-08-28
gtgtgaagccgctagggtttatcgccgccgctccgaccacttcactagggttttgcacgcggcggcggcggcggcgagatgctgcggcggaacacgcggctccggcgggagtacctgtaccgcaagagcctcgaggggaaggagcggcagcactacgagaagaagcggcgcctccgggcggcgctccgcgagccgaagatcctactcaccacctctcgcaatcccagcgcgcccctcactcagtttgtcaaggagctcaaagtcgtcttccctaactcgcaaagaatgaaccgtggtggtcaggtgatatcggaaattgttgagtcttgccgttcgcatgatatcaccgaccttgttttggtgcatgaacatcgtggccagcccgatggtttaatcgtctgccatcttccatttgggccaactgcatattttgggttgctcaatgtggtgacacgccacgatattaaagataggaaggccatgggtaaaatgtcagaagcgtacccccatttaatactagataacttcacaaccaagactggtgaaaggactgctaatattgtcaagcatctctttccagtgccaaagccagattcaaaacggataattactttcgctaacagagatgactacatctcattcaggcatcacgtatatgaaaaacatggtggcccaaaatcccttgacctgaaggaggttggccctcgattcgagttgcgactatatcagatcaagcgaggaactgtcgaccaagcggaggcgcaaaacgagtttgtgctacggccatacatgaacacagcgaagaagcaaaaatctcttggtgcctgattagcctgcaaggctgcaactgctgtagtacatcaattttgagtttctgtttcatccttgtaacgttagctcagtgtgtctaatgtatcctgctgtgataatggttccatcgaaatagttactgggtccaatttgttggattgtttttacacctctgctgtggattggggcccaataacggccaatttttgtagaaatggcagcccacatcatgcaagatagaacttccaaaatcatttaaaggaatgttttactgatgttataattgatgaatctgaatgcatcagattcagagt

SEQ ID NO: 24172 - DNA, 1965 bp, Oryza sativa
  ref <308>: DATABASE ACCESSION NUMBER: AK099614
  ref <309>: DATABASE ENTRY DATE: 2002-08-28
gtctccctccgcatccgcgactccgacgacgacgagtcacgagaggggaggctcgttcttgatccatggcgggctcctcctccgagctgatctaccgccgcggccacgacgcgcagccggccgcgggtgacgttgacggctgcggcgtgatggccgccgccgggtactcatcatcggccaagccgccgcacaagccaccactcggcccgctgcggtatctgctcgccgagcagcggctggtgttcgcgctcgtcggcatggccatcgcgtcgctggtcttcctcctggcggctccgtcgtcggggaacggaggccgccacgaggtgatgaacggcggcgcggcgcggctggcggcggcggggctggcggtgcggcagtactccggcgtggcggcggcggcggcgggggcgcgcgtgccgctggggctgaagaagaaggggctccgcgtggtggtgacggggggagccgggttcgtggggagccacctggtggaccggctgctggcgcgcggcgacagcgtgatggtggtggacaaccgtgcactacaagcacaaccccgtcaagaccatcaagaccaacgtcgtcggcaccctcaacaggctcggcctcgccaagcgcgtcggcgcccgcttcctcctcaccagcaccagcgaggtctacggcgacccgctccagcacccccaggtcgagacctactggggcaacgtcaaccccatcggggtgagaagctgctacgacgaggggaagaggacggcggagacactgaccatggactaccaccgtggcgccaacctcgaggttaattggttgtgctcatctcagctcctttaatcatttcttcatcactcatccgcctcttcaactttactggaaaccaaagtaaaacacaattagtagttaatagtactaccagtagtattataattaatgtctagctaagtctctagtagtcatgagcagaaagctaattaacttaacttaaactaatccaattagagaaagtgatcagttactgaatacggattagttaattgctttatgttaattatttggcgtgcatgcatgcaggtgaggattgctcggatcttcaacacctacggcccccgtatgtgcatcgacgatggccgggtcgtcagcaactttgtcgcccaggcactgaggaaggagcccttgacggtgtacggcgacggtaagcagacgaggagcttccagtacgtctccgatctggtggaggggttgatgaagctgatggaaggggagcacgtagggccattcaacctgggaaacccaggggagttcacaatgctggagcttgccaaggtggtgcaggacaccatcgacccaaacgcgcggatcgagttcaggccgaacaccgccgacgacccgcacaagcggaagccggacatcagccgcgccaaggagctcctcggctgggagcccaagatccccctccacaagggcctcccgctcatggtccaggacttccgcgaccgcatcttcggcgaccacaagccccactccgtcgccggcgacaactgaatctgaatctgaactcgatcgatcttatctcaccggcattttctgtagaagttgatcaagatatacacagtactaccagcatagaagaagcaggagcagcagctagcagtactggtgagtggtgactgatagatccatgaatggctgcattgcaagaatggggatgggatcgcgtcagaatcgaaccaatacgcaagctcatgtttgtaggagttgaatattttatctatgctgcggaattaagcaagcatgatacaagatatatgtaggtcgtcgctggagtggtagctgggatgcagcacgagatcgccctgttatttcttagttttgcgtttttacatgtccgatgttttactctctttttgggggaatgcatgatagctgtaagttattcgttctgttgttttacgtgctttcgttatgtgg

SEQ ID NO: 24173 - DNA, 2494 bp, Oryza sativa
  ref <308>: DATABASE ACCESSION NUMBER: AK099615
  ref <309>: DATABASE ENTRY DATE: 2002-08-28
gaaccgaccacgacgagctcgaaccatcgaagccgaagcgcgcacgaagcgaccccccccccccctcctctctctctctctctctttctctctctcgcctcgcgaaacccagcgagccctagccgatggcctcgccggagcgggaggaggaggaggccgcgcgatcgcctccgccgaagcgcccccgccgcgacggtgacgccccgccggaaccccagcctgcccgcgtgggcctcaacccggcggactgcgacctcgatttcgacgtcggcggcggcgggctccggggggaggcgctgcatgatggcgggttcgcctactgctggtcgggcgcgcgcgccacggtgggcgtgaggggtggcgggaagtactgcttcgggtgcaaggtcgtcgccgagcaggccgtggagatggaggacacggccgcggaccagcagcacctctgccgcgtcggggtctcgaggggcggcgaccccgtgggggccctcggggagaccggccacagcttcgggtttgggggcacggggaaattctcccaccagggcaagtttgtggagtatggcgtcaagtttggggttggggatacggttgtctgcgccgtggaccttgattccaagccgttggcgtcgatcgggttctccaggaatggggagtggcttggcattgccaagcacttcgatgcaagtgacaaagggctgggtttggttgaatctcctgtgagctcaatgcaatgggagtcggcaatctttccacatgtgttgctgaagaatgttgttgtcgagatgcaattcagcaaggaggatggattgcagcttgttgatggttatgagctctggccctcagcttgtgtcgatgggaatgcggtatctggccctgtgtttgcagaacaaaaagagtgtgaaatcatgatgatggttggtctcccagcttcagggaagtcaacatgggcagagaagtgtatcaaggagcacaaggagaagcgctttatccttctcgggactaatcttgcattggtgcaaatgaaggtgccaggattgctgcgtaagaataactacggtgaacgctttgaacgtttgatggatcgtgccacaatgattttcaacacattgctgaccagggctgcgaagatccctcgcaactacatcatcgatcagactaatgtttacaaaaatgcccgtagtcgcaaactaaggccatttgcaaactaccgtaagactgctgtggttgtgttcccatcgccaagtgaactcaaggtccgggcagcaaagcgtttcaaggaaatggggaaggatgtgccagctgatgcagtaaatgagatgacagctaatttcgtcttaccactgtccaaggacatgcctgattctaaagagccctttgacgaggtaatctttgtagagctttccagggatgaagcccagagaaacctggatgagatgaaacgtttgctgccaaaagcctcaactcccagctatgccaatttcagtaaccaaaatgtgagctcaacatatagtgggactattgctgggacaatgccatctctgtcaccaggttatcaccgacaaatggacagtccatatggaagtggtgtgcagacagccaagggccttgacacaccaacaggcagcatggggtgttcagggtttccagagtccagcagggattaaccaccatcaagtccacttaagcagctacccaaataccccataccaacatcaacaaatccaatcaaaccatccaagcaccccataccaacatcaagcccaatcgacaagctacccaagtaccccttatcaagatcaaattcactcgagctacccaagtaacccaacccaacatcaaattcatctgaactaccccagtaccccaaaccaataccaaagccattcaacatatccaaataccccatttcccggtcatggaaatagcgtatatgattccaatggtggcccaggtccatacaatcctaatccttacagcatgaacaccgatatgcaacaaagaattcaagctcccattggtgacaggaaccagtcctatgcagttgtgtcaaatgaagcctatgggagatctggctatgaagcggcaaattctgttggaaggcctatcaatacacatcctgccgtgtacaattctggcagtggcaattacatgccctatatgcagcattctcacgatgtgcacaactctggatcacagtactcagctccagtccccaggcctccttacggagctcctccaccaaactatatgaatccacagacgagcatttggcatatctagcaaggcagctaatttgtggcgataagcgaacactggacatggtaccaagaaaagtagtttaagtagatatgcgcgagtgcgtgacctataggttccagggaaccttttggcagttcggctcgcagatttttgtatagttatatgcacgcataacccattctccgtatgtatccagtttacgacttttgcatgatcaattagtattggtttggcc

SEQ ID NO: 24174 - DNA, 1197 bp, Oryza sativa
  ref <308>: DATABASE ACCESSION NUMBER: AK099616
  ref <309>: DATABASE ENTRY DATE: 2002-08-28
ggtattcttagtgaccaccccccatatcacatcctctccttcctcttcctctgctcactcagctctcccccgcgcgcgccaccgtcgtcgccatgtcgggcaacatcgccttcggccgcttcgatgactccttcagcgcggcctccctcaaggcctacgtcgccgagttcatctccaccctcgtcttcgtcttcgccggcgtcggctccgccatcgcctacaccaagttgaccggcggcgcgccgcttgacccggccgggctggtcgccgtggcggtgtgccacgggttcgggctgttcgtggcggtggccatcggcgccaacatctccggcggccacgtcaacccggccgtcaccttcggcctcgccctcggcggccagatcaccatcctcaccggcgtcttctactggatcgcccagctcctcggcgccatcgtcggcgccgtcctcgtccagttctgcaccggcgtggcgacaccgacgcacgggctgtccggcgtgggcgcgttcgagggcgtggtgatggagatcatcgtcaccttcgggctggtgtacaccgtgtacgccaccgccgccgaccccaagaaggggtcgctcggcaccatcgcgcccatcgccatcggcttcatcgtcggcgccaacatcctcgtcgccggccccttctccggcggctccatgaacccggcgcgctccttcggccccgccgtcgccagcggcgactacaccaacatctggatctactgggtcggccccctcgtcggcggcggcctcgccggcctcgtctaccggtacgtctacatgtgcggcgaccacgcccccgttgccagcagcgagttctaattacccatttcgccatcggcaacacgcataaaaatggtggtcactccatcgtcagaatcttgtgaggatgtgttgtgaaggactgatttggttcagatggggaagaaggcttttgttgcgaggatgtgacacttgggtgatgatcgatccatgtttagtttcttcttgattaatttgtaatgtgatcagtgtggagcaagttggatgagatgcatgtttaagatcgaacacttctgttgagtttcattgtgagatttcatttgattcgggccatgtcatttcagtttgtttgtagcctccaaaataagcttgtgtcttctcctcgcaaataggaaatcagaaataaaattgttccggg

SEQ ID NO: 24175 - DNA, 1213 bp, Oryza sativa
  ref <308>: DATABASE ACCESSION NUMBER: AK099617
  ref <309>: DATABASE ENTRY DATE: 2002-08-28
gttaattttgattgattttatgacttttttgttgccatgcactaatttcgttttgtaattcatgaatgaacttagggagagaataaaggttttcttgtttgcaagaaaaagatggcaacctctccagaatctttatgtggcattggtccaccaccatttcgtcaatttgttgagtatgttgtgaacttgaagttcgacgaagagccaaactatgcaaagtgcattgctctttttgatggcattgttggtccaaatccagatggaagaccattaaacaccgatggtgcccagaagcttgtatatcaggttggtcagaagagaggccgcctcacagcggctgaagatgaggagcaacctaagaaaaagattagaatgggaatgccagcgacccagtggattagtgtgtacaatgcccgtcggccaatgaaacagagataccactacaatgtagcagatgatagattagcaccacatattcaaaaaggaaatgaagatggtttgtttataagttcagtttcatcctgttcagatctgtgggctttaattatggatgctggcactggttttaccgcccaagtacatgaactctcccattactttcttcacaaggaatggataatggagcagtgggagagaaattactatattacttctttggctggttcaaataatggaagctcggtggtgatcatgtcaacaggaacgccatatgcacagcaatcctacaaagtaagtgattcatttcccttcaaatggataaacaaaaagtggaaggaggggttctatgtcactgccttggccacagcaggaagccgatgggctgtggttatgtcccggaacgctggtttcacacatcaggtagtagaacttgatttcttatatccgagtgaaggaatccatcaacgctgggatagtggttatcgcataactgcaacagcagccacatgtgaccaggtggctttgatcttgagcatacctagaagaaagcctaacgatgaaacacaggagacactgagaacatctgcttttcctggccagcatgtaaaggaaaaatgggcaaaaaatctttatttaggctccatatgctatggaagatcagtgtcgtgaagtgcattttcccgagctggtcctttgtaagattaagatctaataatatgaacaaccggttttgtgacaagataatggggggattttgaagtgcaaactttaactt

SEQ ID NO: 24176 - DNA, 1179 bp, Oryza sativa
  ref <308>: DATABASE ACCESSION NUMBER: AK099618
  ref <309>: DATABASE ENTRY DATE: 2002-08-28
gagggaaggaaaaaagagaagcaaccagacactgcacacatcatcatcttctcccccgagaccgggtgatcttgggttagcttagctagctaaattaagctgcgtgcagcatggggctcctcgaccagctctgggacgacacggtggccgggccgcggccggactccggcctcggcaagctccgcaagtacgcctccttctccccttcctcctcctcctcgacgatggcggcgtcgccgtcgcccatctcggcggcggcggcggcggccgacgcgccggccgtgacgcgcagcatcaccatcctccgcccgccggcgctgtccgtgacgtcgccgcgcggcagcgagtcgggcccctccacgccgtcgtcgccggccagcgtcccggactcccccttcggctcagcaccgacgccgaagggatcggagggctggaagaagctgcgccgtggggcggcgaggatggccgacggcgtggacgccagcgccggcggccagccgagaagccccaccgtatacgactgggtggtgatcagctcactcgacaggtgaaggcgtgatctatctaatcgagcagctaagctctgcatccggcgagaaactgcacctgcacaatatgaagcagctagaaactgaaggcgagcaaagaagaaaaaaaacactaaattctgctctttttcagttaagtttcagctcgtcgatccagagcatgaaatgttcagtgttcagctatctgcactactacagactgccgattttgtagccaaggatgtataaacgtatgcatgcttgtactaccaccgtataatatacgtacgtgtacgtagtagatcgatgcagacaaaaagtcttagcagaagaggggatccttgtacgtacacaacctgtagtgtacgtacacgatgcgatcgatgatgaactgatagtatatgtatatggcgcagctggtgtattatattacatgcgctagctggagggagagtgtgctaatgttgtactagtactacgactgatctgtttgcttctcctctgctttctttgtctccagaaaagagggagaggagagaagtttttcccctgtttttgtggaatatgtaaaagatggctgcagtgcatgcagcagtgtaaaagtgtgaaaagaagtgggcaataatgcatggccaaataatgttatgaacct

SEQ ID NO: 24177 - DNA, 1978 bp, Oryza sativa; identical to SEQ ID NO: 15583
  ref <308>: DATABASE ACCESSION NUMBER: AK099619
  ref <309>: DATABASE ENTRY DATE: 2002-08-28

SEQ ID NO: 24178 - DNA, 1808 bp, Oryza sativa
  ref <308>: DATABASE ACCESSION NUMBER: AK099620
  ref <309>: DATABASE ENTRY DATE: 2002-08-28
ggtttgttgtattccccttccttacccccaaaatcgaaatccctaattcgacgccatggccgcgactggcggcgccgccggggagaagacggccagcagcctcctgctcggcgtccggggctacacgtccaccctcaagaacgcctccaccgccagctgcaggttgagcgccggccatcccatcgaggtgactttgtgggaggcgtccccgcctgccctctcccacttctccgtccactgccccgatctcccatccttcaatggcaatctgcttggcgcgcctaaagccatcgccgccgccgtcgacgacgccgacggccagctcctcctcctcctccgagtccccatcgatcagcttggtgccccgcatgacaacgactacttggtctaccatccggatcccccgtctccgaaactggatctgctccccaacccgcctccccctaccctcggtgaccaccagctcgccatactcagctgcggcgacgaccgctacgtcgtggccgccctccacgtctggagtgagttcacttccacgctgcgcctgtacagatcttcttgttcgtctgggagttggacatcggaggaggtgtccgtggaggagccggtgagggacaggctgtgcccgatcccggactcagccaagaggcagctgtaccacgtcaccaccaagaccatcacgctcggaggtgcgaagggcaccgtgggctgggttgatctctggcgcggcatcctcctctgcgacgtgctcgacgaaatgtctccaaggaagctccgcgacatgccgctgccgtggccggccaagggcaattggaggatgtacctcaatggagatgtgtccttttgtcgggacatcgccatcagccaacacaaggattccatcaagtatctggagatggagatcgtttcaccaagaacggtgaccaccaccatacccacctccacctctgcagatcctacttcataccttgaatgggttcgccgcagcagagaacctcagccgacacggcgacgctccgtgttccaccctggttcgtggagaatcactacatggagcatgcctatcccggtcacttcatgggacgactggcgccgtgactgcactgctgaatcgcgtgaagtccatcttgacaccaacccaagtcaccattacgagttgcttcatagcctcatgctcagcaacagcggtgatgaacacagggaggaggctcaaggtcaaggggcaacctcttccttgtccctaggtcgcctgcgtttgtgttacccggccttgagttgcatcgatgatgatgttgtttacctcttgggcaacgctgctggcaggggtgctaagacgggaggaatgatggtcgctgttgacgtcaggaacaaggagctgcgaggagtggccaagcttgaccccgaaaagaacaccctctactccatgcgatgctaccttgcaactgggatctccaaacgcctcaacactaccacagacacaagagttggacgacctgaggaggatgcagaagccgccgagtagaatgtgcgaacccagtgacatatatgcatcatactgcagcctgcctggatgcaaatattatcgtatcagtggtttgttggcttgaatgggggttaaggagttgtgctgttgctgggcatatatagttttgtgacaagaatcttatccaggttgcttactttgggttgatgataaaagtaggagtagacgtgaataacattaatatatgttggcttattttttgaggggatgttggctaaaaaaaaaaaaaaaaaaaaaaaaaaccaaaaaaaaaaaaaaaaaaatt

SEQ ID NO: 24179 - DNA, 837 bp, Oryza sativa
  ref <308>: DATABASE ACCESSION NUMBER: AK099621
  ref <309>: DATABASE ENTRY DATE: 2002-08-28
gatgtacacaatacacaacccgacgcgtggtggacaggttacacgagcgtggagcaggcggacgtgtcggggtcgaagagcgccgggaggaggtatttccggccgtgcgcgccgtgcgcgttgtagctggcgccggtggccttgtccaccagcagcgcgccggcctagcccgggtacgcgcccttgccgtacacgcccgtgcacgccgtcgcggcctccagcgccgcgccgcgctccccctggtagaacccgtcgccgaacgggttggtcaccgcgccggccaccatgctggccacgttgatcaccatcccgtccatgcccacgtcgccgctgggtggcaccagcggcgccgcctggggaccgtacaccggctggtggaacggccacgcgcactgccccgggcactgcgtcgccgagttgcccacccacgcgagcgagaggacgaagtcggtgacgacggccttctgcgccggcgtgaaccggccgtaccagaggatcgacacggggatgtcgccgctcagcacggcgccattgtggtacgtgagctggttcggctggggcttgaccaaagacatcagcttcctatccgccatcgccgacacagccaatcctgcgacgacgagcatcattgcaagcaacaagctctgcttcttcgccatcccggcaagaagagctcagattaatctaggagaagactgtgtatgtgtgagtgtctgagtgataatgtgagaagcaaagctaaagctgtgagctgcttatatagacgagttgagctgtgtcaagaatgtgaagcatctggatatgcatgtgtaaaacaaaagtaattttaatttctcc

SEQ ID NO: 24180 - DNA, 787 bp, Oryza sativa
  ref <308>: DATABASE ACCESSION NUMBER: AK099622
  ref <309>: DATABASE ENTRY DATE: 2002-08-28
tccctcctctctcgctctctctctctctcttccccttccggcttccgcctccgcgcctcgacgaccagggtagctcggccggcgactccgcgagcggcggggagggagctggagcatcatcgcacgtgactggagagggaggaccccccccccccccccccgaagatttgattcgagatgaatgctcccgaccgctacgaacgctttgtggtgcctgagggaaccaagaaggtatcatatgagcgggatacaaagattgtgaatgctgggtcattcacaattgagcgtgaggaccacaccattggcaacatcctccgcatgcagctccacagggacccaaacgtcctctttgctggttataagctccctcatccccttcagtacaagatccttgtcagggtccatactgcaaaccagtccacccctactcaagcgtacacacaggcaatcaatgatttagacaaggagcttgagaatctcaagcaagcttttgaggatgagaagatccgctacgaggaaaggcctaagcagggatactaggccaacactccttaaaatgcagaacctctgttgatgttagatctgatgcctgagcattagtagaaaaaaaaatgctactatgctgatcaatgaactcttttaagaaacttgtttatgcttaaactcgtacaacgcagttcatcctgatgcatttctgttgtctgtgcttggagcatgctctattaagacttgtcatctctgaactgccattgcatgaaaaacattaaaattgaagtgctacacatcg

SEQ ID NO: 24181 - DNA, 1713 bp, Oryza sativa
  ref <308>: DATABASE ACCESSION NUMBER: AK099623
  ref <309>: DATABASE ENTRY DATE: 2002-08-28
ggaacagatggcggtgctgtacgtcaccttcttgaggttgattgactaaaaaccttgaaaatactccctccgtttcacaatataagtcattctagcatttcccatattcatattgatgttaatgaatctatacatatatatatatctagattcattaacatcaatatgaatatgaaaaatgctagaatgacttacattatgaaacggaggaagtagttggcaagggaggtggatgtggggaggggttgagttgctctatgtgctcactggttgaagctgattgttgcgctcctatctacctcacttatttaccaggaggtgttaagctcattcggtgagaattttacctactcctttcactgcattttccttgaccacacttagattaaaattatagcttccttcctggtagtagcaaattgtggcaccaatgtggcacatatttattggttatctaaattattttcttatattgtgtcttgactctatttggtgttgtaaggcaggttagtggctgattaattagctgcattatgctaccccgttattactagcttaaataagttgatctgttcttgatgcaatttatacatctatgagctggtcacttcatcagctttactcaggtaggggtctttcctacatgagtggctattctctccaaactaataaaaattcatgtgagttttgttggtattttagcacaaaaaaaagtactcaaatagctgtttgcctggatgctatacccaccaatgaattttcaattatgggatggttcttattttttttgtacatgtaaacagaacctgaacatcagatttgatgagagattcaaccaagaagctaaaattttttgcgactgatgtgcattgctgaaccagttttctgttgcataaagagtcctgaaacttcttgttgcaaactgaagtggtgttctaaccagttttcttcttgctttctcattagcttctcttgaatctttctgtaggtttctttcctgtagggaaaggaaaggtgatttcagttgcctgactgttgctggaatctgtgaagcatctacaagcgatgccatcggttcaggcagctggcacagcaatgccggttccccttgccccatatccaactcctgtgccatttacacctcccaatggggcccaaagccagctcgtttgctctgggtgccgtaatctgctcatgtatccagccggagcaacgtcgatttgctgcgcagtctgcagtaccgtgaccgtggtgcctgcccccgaaatctagctgcaatgttcacgaaaataaagagagattaaaggggaatacaaatggcttcagggctccgcaacagtgcgcgtcgcgttgatggtgtgcctgcactcaggtcgctcgagaagaagtacacactgaagttgctctggtcatatttacattattgtgtgtaactcttccttgtttgcttttcagtctaggatagagatttacatgtcaaagagtcaagtgcacttttgaaagtgtaatgcgatgcaagtaaaaacaattttggacaagatcaaaaggatccatgtcatttgctgtcagaatagtaatgtttgttacttaatgaggtttgttacaaaccttaattacaggaatatcattgtagtagttcttaactttttacactcctatttgtagatgtacatatatttatgtacaattatcagatggactattttatacact

SEQ ID NO: 24182 - DNA, 2513 bp, Oryza sativa
  ref <308>: DATABASE ACCESSION NUMBER: AK099624
  ref <309>: DATABASE ENTRY DATE: 2002-08-28
ggtggagtttgatttttggtggtttagaggttgggggaggtcgcggcgaggatgtccgtgccggcgattgccgtgtacaccagcccgccgggggcggtctacacgtcgtcgtcgtcgtcggagcttgaggcgagctcccggggctcggcgccgtgcgccaccgcggctcccccgtcgccggcgagctcccaccgccaccaggccatcgctggtgggctatcctgcctcttctcctcacctaccgccgcccctcgcgccgccgcggctcaggacgagctgggcgcgctctggcacgatagatccggcgaggcgacggccgtcggcggcgggggcgggggcgggggctactcctacccgcagccgtcgtcgccgttcaagtggcgggacatgctccaccacagccccgtgccgctgttccacagcccggcctcctcgccggcgtcacggagcccctcggcgtcctggctcgccggccgcgagcgcgagcggctcttctccagcttcgtgcgcaacgcgctcggctcctgcgtcgattacgcgccggtcgccgcgctgccgctcggcgtctcggctgctgtcggtgtcggtgccggcgagctcgcgttcgagctcgacgagcacctctccgaggcggagccgtcgtgcgagccgtacgctcgcgacctcctcgccggcgcccaggctcgccaccgcatcttccacgacgagctcgtcgtcaaggccttcttcgaggctgagagggcgcaccgaggccagacgcgggcgagtggtgatccgtacttgcagcattgtgtggagaccgccgtgcttctagccaagataggcgcaaacgcgaccgtcgtctctgccggactcctgcatgacaccattgatgatagcttcatggattatgatcagattttccggatgtttggtgccggcgtggctgatctagttgaaggggtctccaagttaagccacttgagcaaacttgctcgggacaacaatactgcaagcagaaccgttgaagcagaccgcctgcatacaatgtttcttgcaatggctgatgcaagagcagttctgataaagctagcagatcgtctacacaacatgaagacaatagaagctttgcctttggtcaaacaacaaagattcgctaaggagactatggagatatttgtgccgttggctaatcggttaggaatcgctagctggaaagaccagctggaaaatatttgctttaagcatttgaacccagaggagcacaaggagctttcctccaaacttgtcatatcttttgacgaagcacttcttacatctactctggataaacttgataaaggtctaagagatgaaggtatttcgtatcacagtctttctgggaggcacaagagcctgtacagcatatactccaagatgataaagaagaacttaacgatggatgatgttcatgacattcatggtctacgtcttgtggttgatacagagcaggattgttaccaagctcttgacattgtccataagctctggccccgagttgctggacgatttaaggactatatcctgcatccaaaattgaatgggtatcggtcattgcacactgtcatcatgtgtgagggcatacacccatttgaagttcagatccgaacaaaagaaatgcatctacaagcagagtatggatttgctgcacactggagatacaaggaaggtggttgcaagcactcttttgtactccaaatggtggaatgggcaagatgggtgctcacatggcaatgcgaagcaatgagcaaagagcggtcctcaggtttaggccgctctgatgccattaggccaccatgtccatttccctcgcattcggaggactgcccttattcttacactcgccagtgcaaccacgatggacccatctttgtgattatgcttgaacatgataagatgtctgtccaagagcttcctgcgaactcaactgtagtcgatctgatggagagagtgggggccaatagtccaagatgcagcccttacagcttcccactgaaagaggaattgcgcccgagggttaaccacaagcccataagtgaccctaaccggaaactgtgcatgggagatgtggtggagctgacgcctgcgctcccacacaagtcgctaactgagtatcgggaagagatccagcgcatgtatgaacgaggcgggtttgccctcgccaccacccgggacggtccggcaagctgacggtgtcacgactaccatgttaacctcctgttgtacaatgccctcaacctccatttgcttccttgtatatatcccagatactaattcttgcaggagagagccaaatgaacacccccagctgaattgtcaaaggtgtggagttaggtgttcagtgttctgatccaaagctgtctataacagtaaacagtttacaagctgatcaaatctgtactagaaattcagatcctcccaagattcaggagggggggacattcactgccttgtccgtgtgttgttgtaatacatctactgtatattccagtggc

SEQ ID NO: 24183 - DNA, 3038 bp, Oryza sativa
  ref <308>: DATABASE ACCESSION NUMBER: AK099625
  ref <309>: DATABASE ENTRY DATE: 2002-08-28
ggtcttcgccacttctccccccgtctccacttgccccatatctgcggcagcctccctcctcctcgcggagatttgacccctgcgggctcgccttaaaatagaggcgcatcccattcccaagtggctgcttcctgcaaccacgaggtccgccgctctcgggagctccagcgagccgcgtcgccttctgcgcccgccgcccggtggccggcttaaatttgtgcgcggaggcgagccgtcgtcggtgccgcggggcttcctaattcctcccgggggagtgtggtcgagtgggggtttctggggttcttcgccacttcgccgcccgccgtttagtaaattcaacattttggacctacatgagttgattaacaagtccattccattgtccttcatggaggcttcatcttggttgtgctaccaagctcgtggttttggttcatccagagtatggttatggcttcttctagctcttgttcttctgaattgcagcctggtactctcagcctcgccgtatctggtcggtatggggagcttcgacataacaggacctgcagcagatgttaacatgatgggatatgcaaatactgagcagattgcatcgggaattcacttcaggctgaagtcacgtgcatttattgtggctgagcctaatggaaagcgtgttgtgtttgttaatatcgatgcttgtatggcatcacagattgtgactataaaggtgcttgaaaggctaaaagcaaggtatggtgatctttataatgagaacaacgtggctatcagtggcatccacactcatgctgggcctggaggttatcttcagtatgtagtttatattgtcacgtctcttgggtttgttcgccaatcctttgatgtaattgttgatggcatcgagcaaagcattgttgaagctcataacaacctccgtcctgggaaaatatttgtgaataaaggtgacctccttgatgctggtgtgaatcgcagcccaagtgcatacctaaataatcctgccgaagagagaagcaagtacgagtataatgttgataaagaaatgaccctcatcaagtttgtagacgatgaactgggtccagttggaagtttcaattggtttgcaactcatggaacatcaatgagccgtacaaattctttgataagtggtgataacaagggagccgctgcacgcttcatggaagactgggctgaacaaatgggcttgcccaaacagtcagctcatgcaaattctgatgatttgagatctttgcacaagacatctgtacttcctcggagagtttctactataattcctgaaccaaatgagataactgatgacttgatacaattggcatcatcctatgaggcctcaggtggcaggcggttggcaggttcaagtatcactaggcgcattagaagtactcaacaaaacaaacctaaatttgtttctgcattttgtcagtccaattgtggagatgttagtccaaatgtccttggaacattttgcatagacaccaatcttccctgtgacttcaatcacagcacatgtaatgggaaaaatgaactttgctatggacgaggcccaggataccctgatgagtttgaaagtacccgtgttattgggaataggcaatttctaaaggctagagatctctttgattcagcttctgaagaaatacaaggcaaaattgactataggcacacttatttagatttctcaaaacttgaagttaaagtttctacaagtgcaggcggtcagcagaccgtgaaaacatgcccagcagcaatgggctttgcttttgctgctggaaccacagatggccctggagcttttgatttcagacaaggagatgtcaagggaaaccctttctggaagttagtaaggaacttgttaaagacaccagggaaggaccaagttgaatgtcattctccaaaaccaatattgctagacactggtgaaatgaaggaaccatatgattgggcgcctgcgatacttccagttcaaatgattagaattggtcagctggttatcttgtgtgttcctggagaattcacaacaatggctggcaggcgtctacgtgatgctgtgaaaactgttcttacaagtggaaacagtgaatttgataaaaatattcatgttgttcttgcggggctaacaaacagctactctcagtacattacaacttttgaagaataccagatccaaagatatgagggagcatcaacgttgtatggtccccacaccttgagtgcctatatccaagaatttcagaaacttgctatggccatgattgcaaacaaagaggtcccaacaaatttccaacctcctgatatgttggacaagcaaattggactacttcctggtgttgtttttgactcaactcctcttggtgtcaagtttggggatgtcaactcggatgttcctggtaactcaacattcaacaagggtagtactgtgaatgctacattttattcagcatgcccaaggaatgaccttcttacggatggtacctttgcactcgtcgagaagctagatggtaacaataattgggttcctgtctacgatgatgatgattggtcattgcgtttcaagtggtcaaggcccgcaagattgagttcaagaagttttgcaactctagagtggacagttcctgaagacgctgctgctggtgtttacagattgaggcattttggtgcctccaaaccaatgtttggttcggtcaggcattttacaggaacctctcgtgctttcgcggtgcgttagttgatacgccttgagctttttatggcttatgaaggtttacagcaccaacttcatacatggaaaccctgccattatatccatagggcttatctgcttcttatttacttgtatttgagggtaataacactgttcaatcttatggaagtgtgaaactgctgtcccagtgcatgaactaagaatgggaaatatacagaatgtacataggtgctctttttatgtaaacatgcatgcttcttgtgatttcccgtgggattttggccaagagatcttgcatccattgatcttcctttct

SEQ ID NO: 24184 - DNA, 1784 bp, Oryza sativa
  ref <308>: DATABASE ACCESSION NUMBER: AK099626
  ref <309>: DATABASE ENTRY DATE: 2002-08-28
ggcagctttaccgagccaccggagtagcctcgtcttctccggcgagccaccggcgatgggaagtcgcagcggcggccgccaccgactcttcctccgattcatcgccctctggtcgctgctcctcatcgccgccggggaggtcatcttcgaggagcgcttcgaagatggttgggagtcccgctgggtgaagtctgattggaaaaggagcgaagggaaagctggaacgttcaaacacacggcaggaagatattctggagatcctgatgacaaaggtatacagacaacgttggacgccaggcattttgctatatcggccaagatccccgaattcagtaacaagggccgtacattggtactccagtattccataaagtttgagcaggatattgaatgtggtggtggatatattaaacttatgtctggttatgtcaaccagaagaaatttagtggagacactccatacagcttaatgtttgggccagatatatgcggaactcaaacgaagaagctccatcttatactttcttatcaagggcagaactaccctatcaagaaagatctgcaatgtgaaacagacaagttgacgcatgtttacacattcatactaaggcctgatgcgtcctatagcatactagttgataaccgtgaaagagaatcagggagcatgtacactgactgggacatcctccctcctcgcaagattaaggatgttcatgccaaaaagcctaaggattgggatgacagagaatatattgaggatccagatgcagttaaaccagagggctatgattctattccaaaggagattcctgatccaaaagacaaaaagcctgacacgtgggatgatgatgatgatggcatatggaagcctagaatgataccaaatccagcatacaagggaccatggaagcgcaaggtttgttttttttgtctttggcaaccaatccttcttggtgcactatcttttaagagttcatattcatacattcttttgtgtacagaaaatcaagaatcctaactacaagggtaaatggaagatcccatggattggtaatccagagtttgaggatgatccagacctatatgtgctgaaacccttgaaatatattggaattgaggtttggcaggtaaaggctggttcggtttttgacaacatcctcatttgtgacgatccggaatatgcaagaaaagctgctgaggaaacatggggtgcaaacagggaggccgaaaaagaggcttttgaagaagctgagaaggagaggaaagctagagaggataaggaagctgaacgagcaagggaggaaggagagcgacggaggagagagaggggtgatcggcaccgtggcagggattacaaggacagatacaaaagacgtcatagggatcactgggatgatgactaccatgatgagctttgaaatcacggaaaaatgctttcttcctaggagaagctggaatttgcatggtcattgcttataattgttaccaataaatgatctgggaggccagaatagccgcaagtgttccttgctgcgtgtgctgaaaatttgaatatccggattggaatgaaatgaacaaaagcctgaagatcattccttttggacagcagggcatacgattctacttaccagcaacacgttgtttttagttgtgaattggtgaaatgttgacgttgtaacgttgcgacttgcgaatataatgtgcacggggtgatgttctgccactttttgaacactgaacattttactgcatatcaagctagcaactgcaagcagcttcctgcc

SEQ ID NO: 24185 - DNA, 2453 bp, Oryza sativa
  ref <308>: DATABASE ACCESSION NUMBER: AK099627
  ref <309>: DATABASE ENTRY DATE: 2002-08-28
gagtcgcgcagacaggcagcagctgacgcgcgcgcgggggcgagggcaggaacccgtcgcgattgggcggacgacgaaccggtcgcgcgcgggcgcgttcgggaatcgtggtggatctgacgccaccaccgccgccgccgccgccgctcggttgctcctctcctcgccgcgccgtcgcgtgcgtcgccgtcgcctccttgcccctagcgggcggccgggcaattccccgcgcgcctgctcgatctgcctcggtggtcaatgcgggcgaggagatgagcggcgccgaggaggaggaggaggaggaggaggtgtcctatgaggcgcgggaccgcgtgctctcctcctcctcctgctcctccacctcggcctcggacgacgacgaccacccgcggcgaggtcgggatgcggcggctgctgctgctgcggcggcggcggcggcgctcgacgtgtggacgtcggagccagcgcccgtgcaggaacgacgccggaggcttctccagatgatggggctctccggtgacccctctctggcgcgcctcgagatgggtcgatcggcctcctacgacgggcccatccggccggagacggtgtcgcccatctcccgatccagatcggatggcagcgtgccggcctccgccaccaagcccccgctcgcggcccggtcgcgccaaacatcgtccgactcctccgaggccacgccagggggagatgacgcggaccccaggtgcctaatccgaaacctcgacgacggcagcgagttcgtggtgaaggaggagtccgcgctccgcgaggtgggcacggggaggcagctcaccatggaggagttcgacctctgcgtcggtcgctcccccatcgtccaggagctcatgcgccgccagaacgtggcaagctccggttcgagcaacggagcgtccgctctcatccagaggtccagctctgattcaagcaacggcgcgacgcgccacaggcggcgcggcagctggctccggagcatccgcaacgtcgctggctccatggtggtcggctcccgcgaccgccgaagcagcgacgagaaggacacctcctcggaaaagggagggcgtcggtccagctcagccacagacgacagccaggaaagtgccagcgccgtgcgccgtggcccggagcgtgtcaaggtacggcagtacgggaagacatgcaaggagctcagtgggctgttcatgaaccaggatatacaggcgcacaacgggtccatctggagcataaagtttagtcacgacgggcggtacctcgcgagtgctggggaggattgcgtgatccatgtctgggaggtgtcggagcttgagaggaaacgggagggaaatggggtgtgcaatcaacttgttgccgtcgtgtgcaatggttcgccggagccgatattggcattggcaagtgttgatggaagctgttgggagaagaagcatcgggctagaatcttggaaactcggaagtctgcgagctctgaccggttgatgtttccagagcatgtgttcgcactatcagaaaaaccggtcaaaacttttgaggggcattcggaggatgtgcttgatctctgctggtctaaatctcagtgacatgcatccaattcaaccctgttgatgatagatacttcattagtggttctctggatgaaaaggttcgcatatggagcattccgggacgtgaaattgttgattggaatgatctgcatgaaatggtcactgctgcttgctatacacctgatggacagagagcattagtcggttcccacaagggcagctgtcatatttatgatacatctgataataagcttctccaaaagaaacagattgacttgcaaaataagaaaaggaagtccaatcagaagaaaatcacagggtttcagtttctcccaggaagttcttcaaaggtgctcatcacatctgcagattcacgaatacgagttgttgatggttttgaactagttcataaattcaaaggtattaagttttgtgccttggaacttattcatatcagattgtttttgttcaaggtttagtatcctttttctcagatatacaaatactcctgaatgttacttacctgcttcttttcggttgtactaagtacagtcccagtcaaacttcttattcatccataaaccacctttgttacttgttacttttaccactcctttttttgttgcagtgttgcactggaatccaggtgtatagagttatgctaggaagtcataataggtctgcagtaaccaaatcatgctgtgatcatcagatcacaaatactgcaattccctgctcattgattaaaattttgaacgtgactagttaaaactagtttctcctgtcgttttctttcaacaaagtgccaaaactgtcagaatccactttgttgaggcaatagttgtaatgttcacttaacatgttataaaatagttatatccatctttcgatgagtcc

SEQ ID NO: 24186 - DNA, 1474 bp, Oryza sativa
  ref <308>: DATABASE ACCESSION NUMBER: AK099628
  ref <309>: DATABASE ENTRY DATE: 2002-08-28
ccacacctctcctcctccacgcattgcttcttgattcttgattcttgctgcttcttgcttcttgttgctgttgttcttggttggatctttgatgaaggtggggaggggatcgagggggggaggtggccgcgatggcggcggcgtggtggaggaggagaggagtggcggggtggaggcggcgccgccggtgaagaggaggcgggtggcggtggcgccgtcggctggggccggggggagcaggcgggtgcaggcggaggcgtcgccgctgcagcggctgttccgggcttgccgcgccgtcttcaggggcaccggcaccgtcccggcccccggcgaggtcgacctgctctgctccatgctcgataaaatgaaacccgaagatgttggccttagggcagaccaagaattcttcacggctagagatgatgacgaaggaatcccgctcattaaaaacactacattatatgaatgcgacaactttacgatgattatcttcttcttaccacgaaatgcgatcatcccactgcatgatcaccctggaatgacggtgttcagtaaactacttatcggatcgctgcacataaggtcgtatgattgggttgatcctgagcctgccttaagttgtagttcatcgtcgggtgatcaattgaggttggcaaagagagtggtgaatggcgtttttacagcaccatgtgatacatcagtcctgtatcctacaacaggagggaacatgcaccggtttcgagctattgcgccgtgtgcaattctcgacattcttggccccccttattccacggaagatggccgagactgcacatattaccgcgctattccctactcacgtcattcggtgaaaaatggcgcggccgatcagctcaccggagtcgacgaagaaggccatcgcctctcatggctaacggagaccattccgcggatgctgaggatgcgccagatccggtacggcggcccgccgatctccgatgacgaatgaccgccggcttgtcctgatctgaaagagtgatattccgacatggacggccagcccagctgtgaatccgtcgacgtctaaccatgtagtagacagcagatagccatagatgcaaatgcgaatcaatcatgcagagttgagctttcagttcttgcatgcctgatgctgtctttcagtctcagtgatgcccttttcttaatctttggtcagtagttcgttcagtacttcagtacatgtatgcgtagactccaatatttcagttatgttggatgccctttttgtattgaaaagtaagaatcgatctattggggttaaaatgtaagggagtaaatttagacattctctctcttcttttaatttttcagaattgtaaagtatatggttgggatacgactgataaaccgtataacttttctaagaaggcaactactccctcatttccaaattgatcatgtatcaagaccaagaaaaatttaaatcacatcaatt

SEQ ID NO: 24187 - DNA, 2439 bp, Oryza sativa
  ref <308>: DATABASE ACCESSION NUMBER: AK099629
  ref <309>: DATABASE ENTRY DATE: 2002-08-28
ggctgcgtttcgtttcttccccaaaaaccaagggggaaggcaaactttccccaaatctcaaccccaatcccaatctagggcacatgagccacccctcgtcgtcgtcctcctccgctcccccggcggcggccgaggccacctccctcgcaccgggattccggttccacccgacggatgaggagctggtgtcctactacctgaagcggaaggtccatgggcggccgctcaaggtggacgccatcgcggaggtggacctgtacaaggtggagccatgggacctccccgcccgctcccgcctccgcagccgcgactcccagtggtacttcttcagccgcctcgaccgcaagcacgccaaccgcgcccgcaccaaccgcgccaccgccggcggctactggaagaccaccggcaaggacagggaggtccgcaacggccccaccaccgtcggcatgaagaagaccctcgtcttccacgccggccgcgcccccaagggcgagcgcaccaactgggtcatgcacgagtaccgcctcgacggccaaaccaccatcccaccacaggattcattcgtcgtgtgccgtatcttccagaaagccggcccaggtccacagaacggggctcagtacggagctccttttgttgaggaggagtgggaggaggatgacgaggatgttggtttgctaccggtggaggagaaggacaactctgatgaccaggaaaaggaaatttctggtgctatggagaagggctatctccagatgagtgacctcgttcagaacttggttgatcaaaatgagaatggtaccattgccttgccagtttctgacaattcaaacaacagcaaccattctgaagacgtggatggaaattcaggggacattttaagtgaccaaaaccttgggtctaactttcttcaccatgttgagcctgtggagcaaaatggcctagtgcttaatgaaaatatgttttctagtgccaatgctggagacctttttaatatatctagccccaatgatggattcctagaactgaaggattttgcagatattgcagatttggagaatcctttagccaatgaatccaccatctggccttctgatggttggccctggaaatcaactgattccatggaggctgtgaatggggctagcaatgaattttctcccttagctggtgaacagatattccagccagaagaattggaacagttgttacagtcactgcaagaagactctcatatgggttcaactatctctgatcccccacattcatctataacaaatttagctaagccagaggaagattgtctaatgttctatgatgcaccctttgattcttcaatgtgtgatgatggttttagacagctcaatggatttcttggctccccatcgaccaatctatctggtattgacatggtggacgatggtatgccgtactatgatgcgatggatgataacttgtttaatgatcttctgagctcagtacagccatcagctggtagcagttcccatgcttttagtgggccagtccttactcaagaggtcaacaattcaacctatacatatagtccaactcaaaaggttttagaacctaattttgtagttggtgccccatcatctgctaggttacctgaagcgggtagtcagttaaattatgttgttttaccagattcccagaccaagagtagtctgatcgggaagcgttttgtaaagatactggattcaatctctgctccccctgcttttgcagcagcagagttcccagctagccttcgcaaatccttggctcctatttctggagctcatcacaacactatccgtgtctctgctgaagtaatcagcataggaagtttaactcctgattctcaagataagtggtcccttgagaaggatgaaggcatggagctgctcttctcggcaggttttgagcctgatacccgtgtacactttggctgcaacacaataaccgcagtactgcgtggtggcttctgcctcttcttcttttcagcaataatgctcttggtgagctacgaggtgggcatgtgcatctatggcaagtaggcctgctggtattggagacgttaagaacatgacgttaggtaatcctatctgtatttgaggcaaactagggacctcctgctgctggcttaatgtattgcactgcatgacattacatgacctccatgtgttgaacaagggctgaggctgtttaactatagcactagcagtaccgttttgcagctcgagagagctagtagtgtatgtatgaattcctcaggtgctattcgtagtagtaagcgcgaattgattattatcagttcatgatggtgctactattcatattcatgtttctggttggcatgggcggtgctagtgcaaactgcagagtgctgtaaatattccccaaatctgcaatgaattgaacgagggtgcatttgcccttatg

SEQ ID NO: 24188 - DNA, 1197 bp, Oryza sativa
  ref <308>: DATABASE ACCESSION NUMBER: AK099630
  ref <309>: DATABASE ENTRY DATE: 2002-08-28
ggtatcatcctcttcctcccgcccccgacctctcttccctatccaccccatccatggctgcctcctcccactacgccctcctccaccaccacctccccaaccctctccatccccgtcacctctcctcctcctcctccccttctcctccccctcctctccacctccacctccacctccaccgccaccgcctcgccctctccaccgcccgtttcttccgcctcgcggagcggcgagccagcgcggggccactggtgttcgaaacggaggaggagaggagtgggtggtcgggtgcggaggcagcggagtcgaactacgacgatgaggaggatgaggaggaggagcaagggtgggcgggcggcaatgccgcggggtggcgcggggagagccacgaggatgatcaggaggagggttccggttccggggaggggcggaggccgcggcggtcgcggccgcgcgagctgttcgtatgcaatcttccccgccgctgcgacgtcgacgacctctacgagctcttcaagccctacggcaccgtcctctccgttgagatttcccgtgaccctgagactggacttagccgaggatgtggtttcgtcacaatgcgttctctcccagaagctcggacagccatgaacgctctcgatggatttgacctggatgggcgtgaaatgcttgtaaaactatcatccgacgttgtttctaaaaggagaaacatcaacatgactcatacgccacctgtgaaagaccacatcttcgagagcccacacaagatctacgttggcaacatcgcgtggtctgttgagccacaagaattgcgagagtacttctctcagtgcggaaccgtcgtcagtacaaggctgctgacagatcgcaaaggagggagaggccgtgtctatggattcctctcatttgcttcagctgaagagcttgaggctgcattgaagcttgacaatacgcattttcatggacggaacatcctcgtcaggcaagctcatgaagagcgtcaggcacactgaaccgtccagggattattggagacctattgcaattttgtctagcttatttgctgattgagttcgtccttgggcgcaatgctgcacatcaagactaacatgtgttttttttttttggtatgtattgagtattctgtattctagtgacttgagtacaatgcgaatgggtactagcaatctttccact

SEQ ID NO: 24189 - DNA, 1666 bp, Oryza sativa
  ref <308>: DATABASE ACCESSION NUMBER: AK099631
  ref <309>: DATABASE ENTRY DATE: 2002-08-28
ggtgggattttggtcgaacaggcggcgcggcggcggcggcgcctcgtccgcggtacaagcgtgcgttacccatggcctcgccggcgacggcgacggcctccctgtgctgccgcctcgtccgcctccccttgttagtgccctatgcccgccgccgctcgccgctctcgacccggtgctccgccgcgcagagccccgacgcggtggacagggagtacgccgacctcaacctccgcccgctctaccccaacgtccgccctcttcttcctccccccggtcttccttccttaccccccccaagtagagcgcgagcgccacccgtctcaccgctctcttctcgtggttcacgcagaggggccatcacctgcgcatccggcagcacgtcaacccgctcagctcctctttctcgcccacggagccaccggagtggaaggaggtgttcgaggatcccctgctgccactcatggtcgacattggctgcgggagcgggaggttcttgatttggcttgccaagaactccggtgaaaggcgaaactacctcggcctggagattcggcagaagttggtggagcggtcgcagttctgggtaaccgagttggggcttaggaatgtttattttatgtttgcaaatgcaacagtgtctttcaaccagattgcgtcgtcgtaccctggtcccctgtcacttgtttctatactgtgtcctgatccccattttaagaagaggcatcacaagagaagagttctacaatcgcagttggtggattcaatcacaaataacctctgtttaggtggacgggttcttttgcaatcggatgtactcgaagtggctgcagacatgagggaaaggtttgatgaatactcggatgtgtttgagcatgttgactgtattgataaagatcttcgatgtgacaatgaaggatggcttctggacaacccaatgggcatacggacagagagagaagtacatgcagagttagaaggagcaaccatatacaggaggatgtaccaaaaaactagagatgtttctcactagagatgttcatcggttcagtggacacaggagttatccaagcggtaatggttaatggcgttcagctttaatcttgcatcctaaatcaaagcagccatctttcaccctcggtcgtctattactgaagcaagtttcattcactgcgtgcaattcagacagtcttgattttttcttgtcagatgtgatgagcgaaacctgccaatggttcgcatctctccaatgttttggcccatcttttttctgtcggatcattcctacgacagatatctgcggtggtaaccatatgtaagttcagcgtctgctagtccatgatcatgagctaatgaacagctttcagggttggggttgttctctaggaatcgaagtgtaatgtgtcttggcaatcttgatggtgactttgattataaggaaattttacaaacttgccgcagcaaactgaccatttttgagacgcagctgctaaagaatggtgtttacaatagagaacttggctctcactggtgaagtggtgataataggagagaaggatgatcatgtttttttcacattacactgtgttatgatgtagatccctgaactttgtatggcctgtaaattgtaaccttatgaatgtgtggcagcagtggacattttgctagc

SEQ ID NO: 24190 - DNA, 1017 bp, Oryza sativa
  ref <308>: DATABASE ACCESSION NUMBER: AK099632
  ref <309>: DATABASE ENTRY DATE: 2002-08-28
tggcccccaaaccctaacacacacacgccgactctccaaaccctacacccccccaacccccaaccccgccgatccccccgctcgccgccgatgggtcgcaagaagaacgtcgccatcgatgacgatgagtactccttcccgcaggaggacgccgcccccgcccccgccgccgacaaggacaagcccatcaagaagggcggcggcaagaagggcaagaagggcgccaaggccgccctgcccgacgacgacgactacgagccccccgcgcccccgcccccgcccggggacgacgacgacgacgaggagcccatcaacctcgtcttgaccggtaagaagaagaagaagaagggcggcggcggcgccgtgagctccttcagcgccttcgacgccctcgcggccgacgaggaccagggagaagacgacgacgaggcccccgcccctgcccccgcccccgtcgagcccgatgccgccgccaaatcagacgccgaggacgacgacctcgatttcgacttcagcaaagccaagaagaagaaaaagaagaaggacaagggagctcgcccagtccctctggaacacgacgacctcgacctagataagcctgccccgccgcccccagccgccgctgctgatgaggcagacgacgacgaggctgctgcagctgcagcttccaaaaagcctcagaagaagaagaaaaagaagggcggctttactgtggacaatgaggacattgacaagctcctcgccgagatcgacgatacttctcctcccaccgaagaggctgagccggtggaagaggtgcctgcccctgatgcagatgatgccttaggaaagaaatcaaagaagaagaaaaagaagggaggctttaccgtcgatggtgaggacgtagacaagatcctcgcagagtttgaggaccagccacctcctgtcgacgatcctgagcctgagcctgaggcggtgaaagatgtgggtaatgtggccgcctcaaccagtgtggatgatgcggaaggcaagaaatcg

SEQ ID NO: 24191 - DNA, 1962 bp, Oryza sativa
  ref <308>: DATABASE ACCESSION NUMBER: AK099633
  ref <309>: DATABASE ENTRY DATE: 2002-08-28
gaaaggaaaatctcgcgtctcgtctcccctccttgcgccatctcgcggctgacagggtaggggcgccgatctccatctggcgagcagagcagagcaggcgaggggaggggatcctggtgcataattcttgaatccattttaagtgcagcaattctgagtaccaaaaaatccattcaaaatggtggttcttgctgcttccatcatttcaaagtccgggaaagcacttgtttcaagacagtttgttgacatgtctcgcataaggattgaaggattacttgcagctttccccaaactggttggaactgggaagcagcacacttatgttgagactgaaaatgttcgctatgtttatcagccaatagaaggcctgtacttgctacttatcactaacaagcagagcaatattcttgaagatctggacaccttgaggctgctctctaagcttgtgcctgaatattctccctctcttgatgaggagggtgtttgtaaaacagcatttgagcttatatttgccttcgatgaggccatctgtcttggaaataaggaaaacgtaacagtccaacaagtcaaacaatattgtgagatggagagccatgaagagaaggcgcacaagctgatgatgcaaagcaaaatcaatgaaacaagggatgtgatgaagaagaaagccagtgagcttgataagatgaagatggaaagaggaaaacttgacaaaggaggatactcggcaatatcaggtcccagggtagttgaaaaagcatttggtgacatgagcattactggtagtggatttggaagtggttctggattaggtggactgagcatggatatggactcatttgctagcaagcctaaaggccgtccatctgcagctgctactgctcctggtaaaggtcttggaatgaaattagggaaaacacagaagacgaatcagttcctggaatctttgaaagctgaaggagaagtcattctggaggatgtacaacccagttcagttcagtcaagggtgtcgcctcttccaccaagtgatcctgtcacagtgacaattgaagaaaaactcaatgttacagttaaaagagatggaggtgttaataattttgatgtgcaaggaacccttgctcttcaggtccttaatgatactgatgggtttatccagttgcagattgaaaaccaggatgtacctggacttagcttcaaaacacaccccaatatcaacaaagatttgtttaacagtcaacaagttgtgggggcaaaagatccaaacaggccattcccaagtggtcaaaatgaaactcctctggttaagtggagaattcatgggatggatgagtcatcgttacctctatcagtcaactgctggccatcggtatctggaaatgaaacttatgtcaacattgaatatgaggctgctgagatgtttgacctgcacaatgttgtcatatctataccattgcctgcacttcgggaggctccgagtgttagacagattgatggagagtggaggtatgattcgagaaactccgtgttggaatggtccattcttcttatcgatcagtcaaaccgcagtggctccatggaatttgttgtccccccagctgatccatcaacatttttccccatatcaattggattttccgcatctagtacattcagcgatttgaaggttactggaattcgtcctctaaaggatggtaacccaccaaagtattcgcagagggctcgtttggtaacagccaattatcaagtggtttaacgcccaaataagggagattacctcacttcagcacacatgtttgcgggcatttcctttcggcaatgagctgtttagaagtcatggagaagaaggattgttttgcatttataaagaatgtaattttgtctgtttcatatgtagtaacatgtttcaccgaattgctgttaatttgtactgccacctgatgagaaataaaagcatgtcttttcctt

SEQ ID NO: 24192 - DNA, 2343 bp, Oryza sativa
  ref <308>: DATABASE ACCESSION NUMBER: AK099634
  ref <309>: DATABASE ENTRY DATE: 2002-08-28
ggcacgcgcacacacccaatcaaatgctcctcctccgccgcctcctctcgctgagctgagctgagctgtgaaatagtgccaccgagtgagcgctgagctgagctcgaagcaagagaggaagaggaggaggagggaagagggggggcgaagatgattacggcggcggacttctaccacgtgatgacggcgatggtgccgttgtacgtggcgatgatactggcgtacgggtcggtgaagtggtggcgcatcttcacgccggaccagtgctccgggatcaaccgcttcgtggcgctcttcgccgtgccgctgctgtcgttccacttcatctccaccaacaacccgtacacgatgaacctccggttcatcgccgccgacacgctgcagaagctgatggtgctggccatgctcacggcgtggagccacctcagccgccgggggagcctcgagtggaccatcacgctcttctccctctccacgctgcccaacacgctcgtcatggggatccctttgctcaagggcatgtacggggagttctccggcagcctcatggtgcagatcgtcgtgctgcagtgcatcatctggtacacgctcatgctcttcatgttcgagtaccgcggcgcccggatgctcatcaccgagcagttcccggacaccgccgccaacatcgcctccatcgtcgtcgacccggacgtcgtgtcgctggacggcaggagggacgccatcgagacggagacggaggtgaaggaggacggcaggatacacgtcaccgtgcgccgctccaacgcgtctcgctcggacatctactcccgccgctccatgggcttctccagcaccacgccgcggccgagcaacctcaccaacgccgagatctactcgctgcagtcgtcgcggaacccgacgccgaggggttcaagcttcaaccacaccgacttctactccatggtgggccgcagctccaacttcggcgcggccgacgcgttcggcgtccgcaccggcgccacgccgcgcccgtccaactacgaggacgacgcgtccaagcccaagtacccgctcccggcgtcgaatgcggcgcccatggcgggccactacccggcgccgaacccggccgtgtcgtcggcgcccaagggcgccaagaaggcggccacgaacgggcaggccaagggcgaggacctccacatgttcgtctggagctccagcgcgtcgcccgtgtccgacgtcttcggcggcggcgcgccagactacaacgacgccgcggcagtcaagtccccccgcaaaatggatggagcgaaggacagggaggactacgtggagcgggacgatttcagcttcgggaacaggggcgtcatggacagggacgcggaggcaggggacgagaaggcggcggcggcggcgggcgccgaccccagcaaggccatggcggcgccgacggcgatgccgccgacgagcgtgatgacccgcctcatcctgatcatggtgtggcgcaagctcatccgcaacccgaacacctactccagcctcatcggcctcatctggtccctcgtctgcttcaggtggaacttcgagatgccggccatcgtcctgaaatccatctcgatcctgtcggacgcggggctcggcatggccatgttcagtctcggtctgttcatggcgctgcagccgcacatcatcgcgtgcgggaacaaggtggcgacgtacgccatggcggtgcggttcctggccgggccggccgtgatggcggcggcgtccttcgccgtcggactccgtggcacgctcctgcacgtcgccattgtccaggcagctctgccccagggcattgtccccttcgtcttcgcctaggagtacagcgtgcaccctagcattctcagcacagctgtcatctttggcatgctcatcgccttgcctatcaccctcgtctactacatcttgcttgggctgtaatcgagttgcatgcatgtaaattcctgctcctgacaaccagccatgttaagaagaggggagaagaagacagagctggtacactgtttgcaaagtcaggactctttgatttttcttttcttttctgtatttcttgaagtagaatttgggaggagggggattggaagggagtcaaacgagtcaaggggaggacaggatggtagctagcttagctaggacaatggtgagtcacaaaagagcaccaaaagcaagtacaagtacaaagcttggggggacacaggatccagttcaggtcacagaaacggttcggttttgggaggggattgtgggagttttggttggctgcgctgcgctgacccttgtaaaacggacgccgattctgacaagagatcgaccttgttttgttcg

SEQ ID NO: 24193 - DNA, 1665 bp, Oryza sativa
  ref <308>: DATABASE ACCESSION NUMBER: AK099635
  ref <309>: DATABASE ENTRY DATE: 2002-08-28
ggggtggcgccggagcgcgacgctccatgccgcgctcgtacccctccagcgcgtgcgccgcgagctcccgcctgtgctcgtcggagcgcaggtactcctgcaccgccgccgccttcgccgccgcgagctcgcgcagcgccttctcctcgagctccttccgcacggcgtccgcctccgcggcggcgtcgcgctcccgcgcacgcagcttctcctccagctccagcgcgtagccgaacgagaacgacgcgtagttcgccgcctgcgccaaacaacgacgacatgaatgaaggcaagtgcacgcgacgattcttgagcggttcgcgtcaatggcggccgcggcggaggcgtacctgaagcagtgtcaggtagctcgacgcgacgacgtcggagggcttcgccgccgggaaccggcgctcccgtgacggcgtgacgatggcctggagcagctgccgcgcggccttccagtcggccgagtcgccgtcgtgcttgtcgggcacgtgcgccgcgaagcccggcggcggggaacacatgccggaagccgaccacgaccacgagccgccatgcggagcaggcggcgtcggcgtcggcgacggcggcgggttattctcctctgcttcaaaccccctcttcttcccggacaacggcgaccaccacggcatgtcgctctccggctcggtcttcaccttctgtgcgttgaactcgccggagaaaggaaacttacctttagcacgagcaggacgaggaggcggcggctgcggtggtgcggcgccggcgaggttggaggagaacaccgcggcgaggttgctctcgcagagatacgtcctcagatcaaccgcggcgccgccatgcaagtgcagaagctttcccgccaattccatctcctcgccgctgagcaccggctcggcggtagagctcttggacggcggcggcccgccccatcgcacttggcacggccatggcgacggcgacgacacgaagaagaagcctcccttccaccctttgagcttgggcaaccccgtgaagagcaccccgtcggcgccggcgccgcgcttgccccggaagtggtaccagccgttcagcttggacaagaacagcctgaagaagcgccggaacacggcgagcgacggcggcgcggcggcgtggtgggagagcaggaggaaccccgccacgacgcgccacccgttgggcgtgatctggctcggcgcgacgccgagatggcggagaagctcgcaggcaaaggggtgcagcgggaggcgcatcccggcctccagcgcccgcgcgtacacgcacgcggcgcccggcggcggcgccgagcacgcgcgcaggtcgccggcggggcgcgcggcgaactccgccaggacaccgtacttcttgcagacggcgtcgaccgcttcctgcgtgcgcagagacgaggcgatgtggtcggcgacggacctcgggaacggggagtcggcggcggcggcgtctgcgcggcggtggtcggggtcggtggagcgagagcggaaggcgtcggcgtcgatgatctcaacggaggacgacggggaggaagaggaggaatgcatcgtgttttgtgcgagttttctcagtccatccagcaacggggcattcactcctgtatccctgtcaaaaattttcacatcatatcaaaatatttagacattcacg

SEQ ID NO: 24194 - DNA, 2207 bp, Oryza sativa
  ref <308>: DATABASE ACCESSION NUMBER: AK099636
  ref <309>: DATABASE ENTRY DATE: 2002-08-28
gacgcacagccaggaagcaaccaaggcaaggggttaaacctcccttctcacaaccaccaccaccaccaccaccacctttaaaagaaggtgctaaagggggtgtcctgcaaagaaaaggagaggagtgccccctaacctttccctgctttccactgaaatctcctatccgcaaccatacagttgctcaattctggtctcagccaaagccccaatcattcatcgttatataggtcactataccctcccttgcatttcccaccaccaccccttgaagccatgaatcgctgaagaagtcgtctgcgctactgctaccaccggggaaggattagctgcgcagaattgtgcgagcgaagcctgccagccgtgcgaatttcaagctccgaggtcctgcattgcactgaaatggggaggcattcttgctgctacaagcagaaattgaggaaggggctctggtcccctgaggaggatgagaagctcatgaatcacataaccaagcatggccatggctgctggagttctgttcctaaacttgcagggctccaaagatgcggcaagagctgcaggctgaggtggataaactatctgaggcctgacctcaagagaggtgcattctctcaggaggaagaagacctcatcattgagctccatgctgtccttgggaacaggtggtctcagattgcagctcagctgcctgggaggactgacaacgagatcaagaatctctggaattcttgcatcaagaagaagctccggcagaaaggcattgatcccaacacccacaagcccctcaccgaggctgatcgcaggggagcagcacccacagtcagcaccgagaggacctcagggtccagcgacgtcaacccgtcaagtgctggtgctctagggaacttgagccacctcctcagcgagacagcacaatcatcaatgctgctgccggtgtatgataagaatcaccctgaaactgcaagcttgccacgccctaaggtgccaccaaaggggtttgtttcttgaccagcttactgccggtcacgagagcccatcaagttgccgctcatcaggtccaaccctgtattttcctttccagcaaccattaggctacagtaatgaatgtggcactggggatggtgcgagtatgaattcactctggttcaaccagaatgatttcaactgcagcacaatctccaccgtgatgccaccagtttcaccatcagccctctcaacatcaatggggctgaatcttcccccagaaaatcctcgtcacggaggcactggcattggcaacaccccgttctactgggatggttccaatcctagcagcagcggcagtactgggagcagcggaagcaacagtatgggattcgagccacagagcacaacctcaattttggagaacagtgtattcccatggacagatatcggacaagagaaagataccagagttcacttagtggaggaactcaagtggcctgatttgctccatggaacctttgctgaggcgacgacagccatgcagaaccagagccaatcattatacgatgatgtgatcaaggcagagagccaattcaacatggaagggatatgtgcctcttggttccagaatcagcaaccacaacaacagctgcaagcagcatcagacatgtatgataaagacttgcaaagattgcccttgtcttttgaacatatctaggtgcaatgctacgccatgcatggaacagagcagagatcagaagaagcagaaacttgtaactctcgcatattgattggcaggcaaaacactgaagtgtttgatgttttgacacagaatcgacctcaacactttctcctcacttaaagatcctacagtgtcatggaaaagacagctctggccttacgagtagcagaagaagggatagaaaagtacgttctagagtctccctcttttctcttgaaatttgctgttttttgtacacgacaactcaacttttggatacttgagttttggttcactctgtttatcaaataaatatagacacgcatgggcaaaacatgtgtcggtagctctcacaaaccatacaagtagtcccaagcttttcaactgctaccatgcacgtacatgcaaattaattattgcatgttgtatttttatttcttttgagaagttgccgacaaagtgcagttgtatatttgtaaaggaaaaaaattggaacattgacccaagagttattttc

SEQ ID NO: 24195 - DNA, 1752 bp, Oryza sativa
  ref <308>: DATABASE ACCESSION NUMBER: AK099637
  ref <309>: DATABASE ENTRY DATE: 2002-08-28
gatacggagatcgtcgtcgatcggcaaaccgaggtgaagccgacgaaatggagagcgaggtgtgttggctgctatgcgcagcgctcgccgccgcgatggcttgctactacctcaccggcacgatgcgccgccgatcgcggcggctgcctcctggcccgacgccgctcccggtgatcggcaacgtgctcagcctgcgcggcaacatgcaccacgctctggcgcgcctcgccggcgagcacggccccgtgatggcgctgaagctgggcctcgtcaccaccgtggtcgtctcgtcggccggcgcggcgagggaggcgttcaccaagcacgaccggcgcctcgcggcgcgcgcggtgccggacactacccgcgcgcgcgggttcgccagccggtccatgatatggctgccgagctccgacccgcgctggaagacgctgcgcggcgtggcggccacccacgtcttctccccgcggagcctcgccgcggcgcgcggcgtccgggagcgcaaggtgcgggacatcgtcggccacctcgccgggcacgccggggaggtggtcgacgtcggcaaggtcgtgtacggtggcgtgctcaacctccgccggctcgacctgcagggatggcgtcgctgggcggagaagcgctacgacaaggtgttcggcatcttcgacagcgtaatcaacagccgcttggccgacgcctcgaccggaaagcacgccgacgccggcgcaggcgacttcctggactccctcctcgacctcatgtccgccggcacgatcgctcgcgacgacgtgacaagcataatgtacgacttgttcggcgccgggaccgacacgatcgccatcacggtggagtgggcgatggcggaactgctccgcaacccgagcgtaatggccaaggcgcgcgccgagatgaaccacgtcctcgccggcaaggtgaaagccacggagatggaggagaacgacgtagagaagctgccgtacctccaggccgtggtgaaggaggtgatgcgcctgcacccggcggcgccgatcctcgtgccgcaccgggcggaggaggacgacgcggagatcgggggctacgccgtgcccaagggctcgacggtaatcttcaacgtgtgggcgatcatgcgtgatccggtggcgtgggagaggcccgaggagttcatgccagagaggttcttggacatggcggaggaggtggatttcaggggaaaagaccacaagttcatgccgttcgggaccggaaggaggctgtgcccggggttgtcgatggcaaagcgcgtcgtgccattcattttggcgtcgctgcttcacgcgttcgagtggaggctccctgctggtgtgacagcggaggctttggatcttagcgagaagtttactactgtcaatgttcttgttactccaattaaggccatccccatacttgcctctgatcaaatttaagtgaaattgttgcaacttaatttgaaggcagcgctagctatgcatattggtgttaatatgttaaatttgggatatcaccatgtacatacacatacaccggcgagaataccgcatatcagttcttgtattatggagataaattctcaaatagggataaggtcttgagcagataagggagttacctattcaaggcggtatccataatggttcctgtattcttgttggatttgagggcatcgattgtttaataatttgtttggaatttcatatgcacaaatcttctatatcagaagttcttgtgtacaaagtttat

SEQ ID NO: 24196 - DNA, 2688 bp, Oryza sativa
  ref <308>: DATABASE ACCESSION NUMBER: AK099638
  ref <309>: DATABASE ENTRY DATE: 2002-08-28
gagcgagtgcgagtccaacactccaacatcgtcgggagaatggcggtggcggagccatcgccaccggccgcggcggcggcggcggcgggtcagacccacgcggggagggtggatgcgctcgagcggatgctgacgaggctggccctcaccgaagactccgtcgcgtcgctgctctgccgctttctcccctacaccaccatttcgctcgtctcccctggcgcgtctgtccgtgagctccttatggaaaatggcagtctctttgacaaactggtaaagcaaaggcctgatatttcaatgatgatggatctatggaggatctacactgaatctacctcaacagttgttcaaaactattgcattgtttatgttgagatgggctttgagcgtctactaagtgaggataaggcaatcatagcacctgatcttttaatcaacatatcaaatgttccagagcaacatcagggaattatcctgagacttgtgttgaaggctattggtgaatgggatacacataaggtggatcagactgttgcttcaaagtacaaatccataagcgcatctaatgatggcctagtctttgctgatttctgtctgcacatgatactgtatcaaacaccacctcagggtatcagatgctcggcagggctttcagttgctcaatcggatcgtgttactggaaatttgccactaaaaggcgatacacttgcatcaagaaagttaggaatcttggatgtcattgaaactatgcagttcaaactagagatcgtctaccctctttatttagcggctgcttcagatagtcaagaggcagttgctaagagaggagaggaaatgctaatactcaaagcttcagctgtgaatttagaagattccgaccttatcaagagattgttcacactattcaatggtactgcaagctcagaaaatatagcttcagagttggaagttgccccagcacatagttcattgcgagtccgccttatgggtgttttctgccgatcgattgctgcagcaaacgcgttcacacacacatttcagtgcatttttggttgcatctatggaaatggaaccacttcaagattgaagcagttagggatggagttcaccgtctgggttttcaaacatgcaacaaacaaacagctaaaggcaatcagtccatttattctcagtggaatattacattcacttgatggttcttccactacagaagcagattcttccagtagggatatcagaatatttgcataccaggccattggtttgcttgcctttcgcatgcctaatttattctgcaacaaaactggcatggctatacggctgtttactgctttaagattggaggagcaatctcttcgttcaataattcaggaggcggctactgcccttgctacagcatataagggtgcttcgaatatagtactgaaggattttgaggcacttcttctggaatattgtcaagcggagcaaagtgaggtccggttttctgctgtaagatgggcagtgacgttatacaatatgaagcactgcccaagccgatacatttgcatgcttggtgcttcagatgtgaagctagatataagggaaatggctctagcaggtctaaatctgttaaatgatgaaaggcagtcatctacaatggccacggatataagctatcctgatattgcggaaatggtgaattatatttacagccaacagcctcagctgctgcattgctatgagcagaggaatggaaaactgcttttcccaacagacacatttcttgcaatgataaagtttctgatgaagtgctttaacacacatgatggctcagattttcttcaagaagatctatctaattctacactagcaaaaatgtgtgtgcttttagaacatgccatgtcatatgatgggtctagtgaacttcatacattggctttgaagtcattggttgatatttcctctcgtcaaccaaagatggtatcctcgttctatgtcaatcgattagattggccaagaactttactgcatgctgatactcatgaagaagccccacgtctgcttgggtacggaagacaatgtcaaaacacaactgacatcaatgaggagcttggcagctgctgcaatggcaggaccaaccatagcctggagcatgaggtttgtgggggcgggaacaacagtgacaatttgggtggggatggctgtgatgaggagctcgtcactggctgccatcaccggcatggcaggattgaccacaacctggagttcttgattgaccggatgatgtcctggtcagtgcgagacatcttgaaggcgccacctgtgataaagaaggagaggcaaacagggaagaaacttgggactggcgtcaggcgtgatggactttggtatttggatcgaaaggagacaagtgaagatgtatgtcttgcattgatggcttctacaagtaaagaagaggctaaggtattacttttgcattgtcgattggggcatatatcttttgaaactatgagtaagatgtttccagcagaactaagtagagtggataaacataagttagtatgtgatgcatgtgagtatggaaaacatacaagaacatcatatgtgagtagaggactccgaagtatgttaccatttatgctaattcactcagatgtttggacttcacctatggtctctatgagtggaatgaagtattttgttaccttt

SEQ ID NO: 24197 - DNA, 1866 bp, Oryza sativa
  ref <308>: DATABASE ACCESSION NUMBER: AK099639
  ref <309>: DATABASE ENTRY DATE: 2002-08-28
gttccgcctcacgccgcgcctccgccctcttcctcccccctcggcttcgagggttttttttttttcttcttcttttttctttttttcttcttctccttttttgtttctcgtttctttttttttcggtttcgggggagttggattcttgattccttcctccccctgaggccaaaccctaataataatctgatccctgacacgagagcggaggcggaggaggaggtgggggatcgatcgatcgcgatcgatcgattgagtgattggttgattgatcgacatgcagcatcagcagcggatgaagcaggcggcggcggcggcgcagcagcagcagatgatgcagcaggcgctgctcatgcagcagcagcaggctgcggcggtggcggcggcggcgcagcagcagcaggcgcccttgttccccccgcaccacccgcacccgggcctcctcgcggcgccgcagatagagcccattgttagtggcaacctgcctcctggatttgattcaagtacatgccggagtgtgtatgttggcaatatccatcttcaagtgacggattcactgctacatgaggtcttccaaagtattggtccagtagaaggatgcaagctcatcaggaaggaaaagtcatcctttggttttgttgactattatgaccgtagatctgctgcaattgcaattgtatcactcaacggtagacaattgtttggccagccaataaaagtcaattgggcatatgcaagtactcaaagagaggatacatcaggccattttaatatttttgttggcgatctttgcccggaagtaacagatgctgctttgtttgctttttttcgctggatttaccagttgctcagatgctagggtaatgtgggatcagaaaactggacgatccagaggttttggttttgtttctttcagaaatcagcaggacgcacaaaatgccataaatgaactgaatgggaagtggctcggcaaccgtcaagttcgttgcaattgggcaacaaagggtgctaatgctggtgaagagaaacaaaatacagactccaagggtatgatagagttgacaaatggttcatcagaaggtggaaaggataatgcaaatgaagatggtcctgaaaacaacccacagtacacgactgtttatgttggcaatcttcctcatgatgtcaacagcaatgatgtgcacagatttttccattcacttggggttggttcaattgaggaggtgcgtgtaacgcgtgataaaggttttggctttgtgcgttacagcacccatgaagaagctgctctagcaattcagactggtaatggacaacttattggcggtaggcagatcaagtgttcctggggaagcaagccaactccaccagggacagcatccgcgcccctaccccctccagcaccagcaccattcaatcctggcatgtcggcgaccgacctcctagcctacgagcgcaccctggcgctgagcaagatggcagcgaacccggccctgatgagtcagcacgccgccctaaagcaggctgccgccatggggatgggcgccggagccagccaggccatctacgacggcggctaccagagtgccaacgccgtcttctactagagtgacctgagtacctgaccccccatgaagcagaccaccaccattgcctgcctgcctctgtatgaccaaggaggatgatgatgacccctccacccccttatacatatagtagatgaagccttacctgaacctctccttttctacctttgttatttgccaatctagtaatcttctcttcgctggatgctggctatatatatatatctagaacatatatataatgtttttctgcatttttagagatatggaaacgacctttggt

SEQ ID NO: 24198 - DNA, 2348 bp, Oryza sativa
  ref <308>: DATABASE ACCESSION NUMBER: AK099640
  ref <309>: DATABASE ENTRY DATE: 2002-08-28
gagtagtagtgggggcagtgggcgagttcttgctgcgagttcgtcgcgagagaggaagcagcagagagaaagagagcaaaagcagcgagaggttgtggggagagagaggagcgaattgattagtgtcgccacatcgtctccaccaccaccacctccgtccttcctcgccaagccaccatcattgcgccaccgccgcaagatctgagctcgactcctcctctcctcgcccccgcacgggcgcacgacgctagcttcttaagtatttttcttcttaccgcgcagcgcgcggcggctggctggctagctagcttctcggcaaaggcttgttgcggttgcggttgcagtacaggggcgtgtgtgcgcgcgagcggcggtggtacggtgcccgcacccacccaccaccacccccgccattaaaggcgctcacgcaccgcctccagcttcttcgtccacgagaaagcgaggtgatcagagagagagagagagagagagtgagtgaagcggagctcacttcctcccctcacgggagcagccaacgcccagcgccgccaccacccacgccgttcgcgcgctttaaagaaggcgcgccaccttcgcataagcttaaaagattccccacaccacctcctctcacctcgcgccacgagcgttgatcggtgcttttcatttcttccttgctgcagaagagacagagagagggagaggcagaggacgaggatgatggcggtgctcgcgcggctgggcgtcattgtggtgttgtgggcggtggtggcggaggggattcttgaccccgtcgacttcctggcgctgcaggcggtgcggcggtcgctcgacgatatgcctggctcgtcgttcttcgaagcgtgggacttcacggccgacccgtgcgggttccccggggtgttctgcgacggcaacaaggtgtcggcgctggcgctcggcgacccgagggcggggtcgccggggctgtccgggcggctcgaccaggcgctggggcggctgtccgcgctcaccgagctgtcgctcgtgcccgggcgcgtcgaaggcgagctcccggagtcgctcagctcgtgccggaacctccgattcttggccgtcagcaagaacctcatctccggccagataccggacggcctcggcgggctgtccaacctccggacgctcgacgtcagcttcaaccagatctccggcaccatcccggcgtcgatcgccacgctgccgtcgatcaccaacctcatcctctgccacaaccatctcaccggcggcatcccgtcgttcccggactcgtcgccgctcatccggctcgacctcaagcacaacgacctctccggcggcgtgccgaacctgccgagcacgctccagtacctctcgctctcggcgaaccggctcaccggcaccgtcgactccgtgctcccccggctcactcggctcaactacctcgacctcagcatgaaccagctcgacggcccaatcccggcgtccgtcttcacattgccgctgtccgtgctccagctgcagcgcaacttcttctccggcctcctccagccggcgaacgacgtgacgatccaggtggtggacctgagctacaaccgcttctggggccccgtgtcgccgctcctcgccggcgtggggcagctgtacctgaataacaaccggttcaccggcgaggtgccggcgcggctggtgcaggagctggtcggctccggcgggctccaggtgctgtacctgcagcacaacttcctcaccggcatcgagatttcgccggcgtcgtcgctcccctccagcgtctcgctctgcctcatgtacaactgcatggtgccgccggtgtacgcgccgtgcccgctcaaggccggctcgacgaacacccggccggccgaccagtgcccggagtggaggggctaatcaaagctggcaacacaacgccgacgccattgccggatcgcctcggatcgtccaagctcaagaaaaccggaaaagaatggaggagattgcaaatggcggtctccgattctttgattaatttgtccagttactagcgttccaatgtggattactattctttttggttggggggagatggatggagatagtcacagacaagaagtaagttccttaataatcttgggtttataggcgtaatttctttctcctttttttgtgtttaggtggtgtatgttcttttgtgtcccctgctgtatagttgcgtgagtagtaaaacattggctcttgatgttatgtgaggtggcgacgatcgattgatgtatctgatgatgatcatgatgatggtggtgttagaaatctgtgatgttatttatatatcgcattgccattgggcaagcatagtatcg

SEQ ID NO: 24199 - DNA, 3210 bp, Oryza sativa
  ref <308>: DATABASE ACCESSION NUMBER: AK099641
  ref <309>: DATABASE ENTRY DATE: 2002-08-28
ggctcgctctcctcttctccacgctcccagcgccaaatcccagcagcttccccgcacgccgcgaatggcgcctcccgccactgcctccgcctccgcctcggcaccggtctccctcctcttcctctccctcccgctctccccttcctcgtgtcgcggcctccccgcgccacacacccacctccccccgcgccgcctcgcgctcgcgccggcccgtcttggcgccgcgctgctctccagcctcggcgacgcgcaggaggaggaggagtacgatgacgaggaggaggaagagctagtggtggtgggatacgtgagcggcgcgcacggggttcgcggcgacgtcctcgtgtcgccccgcaccgacttcccccaactccgctttgccacgccggggaagagatggctgagggcccgtgccgctgggaagcagcaggtaaaggaatttgagcttgttcgaggaagagctcataccgggaagaagagttggatcgtcacctttgatggggtcgattccgtggatgaggccaggcaaatagttggttcagctatacttgtgaaagttggggatagaccaaaaatggaggaagatgaaatctattcacttgatcttgttggcatgagagttattgtcaaggacacgggcaagcttgttggaacagttggtcaggttttcaactttggagctggtgatcttctacaggttatggttggtggcactgaggatactgtttctcagccaaattcagaaaatcaaggttccaccccatctggtgagcatgtgtggattccatttgctgaggatattgtacctgatattgatatggagagtagagaaatgtggattacacctccaaaggggcttcttgagctcaacgcgcgttctgataagagatcaaagaaagaaaggcgtgctatggttaggtctgcatcatccttttcttgcatgttatgttccatgtataaagcattctttcgcacataaaagtaaagaatatgtcaggtctaaagaatttcacgtcattatagaagggggccacccctgtttcagaaaataaaaggttctaaaaaactcaaacgtttatttcagcagctgcacagcttttgcaaatattgaatgcacatgtcacattttttttaatgaatagatgcagtaaacacattgaactctcttgcttgtggtgctaaccaagaacgatgcaatcatatgaaccacctgatattttgcaaataaagcgtgaccagatgtgaaatatcacaggaatggaaggaaaagaagaggttacagcgtcgtgtaattgcagcaaagaagatactatctgaaatggaccagggtcatgttctggaaggtttgctatctggggacaaggttcagaaggcttcacttgcagaacagattgggtccattgactttcagttgttccgacatgcaatgcatagtgttagcagaccaattggcaggtgcagacttctgacaaccttttctgttctgcctaaatccttttcaagagaagctgacttgtgctgcaatttttcactaaatagatgtcagtaatttgcctctagttcttaatctagcttccttttttcgaacatgttactatttgcagcttgtcaaaagatgtctttgtcaaatcctcttcatcgaggaaaaaattgatgagaataccttacgaaaccctcttgaaccatgaagagaatgcgaacttcgctagtgaactcaatgaaggcgctgggatcattcagaagtcgaaagcagccaccatacttattacaaatgactctgataccctggatgctgagtttcagggattgcttaattcttttaataagttaatgaaggttgaagaaacccgaggctctatcccttttgttattgtttgtcctgctggtcatgtggggtcagttcagaattgtttggtagagaatgactattttggtttagacactcagaaggtaaatgttgtcttaaaatggtcctcacgtggttctatgttttgtgtagtgcgtagaaagaagtttcagccaagatgactagttgtttctttttttatatattatattagatcagttgaaacttaatcttgttattatttttcacccattgaacacaactcagtacaaagaaatagttgttttgtgttccaatttgtaaaatgtatggagaacctcgaattcgttatggtggggacaagcttacttgcaatatacagttgtacacgtactttttttcatgcctgccttctccagagttggcgtatcttttcccccctttgcagatcctaatagtgccttattctttttcctgaaaaataaatggtttcatcatggattctttgatatttttagtgattatttctttatttataacttggaatctggatattaccgattctccttttgttttttcaatttttttgtggaatccatttgcaggtatgggttctggaagaaatgaaacttccgattgtcagtatgtcctctaagctaaacagcaggaagattctgttgaagtctccatgggagatactacagaagccagcaggaactggggtgattttcagcttgctatcatcaaataaaattttagatactctaaatgaaatgggtgtggagtatgtacagatatgcagcttatccaataagccaaaccttgggcatccgttgctgtttggggctgtcagctcctttggcgcggatgctggcctcatgcttcgcaagagcagcaaggaaacagaagatgattttgatctgattctttccatcaaccacgtaaacaagatgtgcagagatgttactaagctcaggttctctgcgcagcaggagcaacatgtgcacgtcgagcatgtcgatggccaatgggtcgatgtccaaccagaggcaacgaactgtcatcgcttgcatgcagaggtcactagtgtcttgaactactgctctcctgacaaggtgtgtgtcatagagattgtccagcaataggttctacctgacaaggtgtatcatagaaatacagtaagcacaaggtagtagttttgtttttgagaagtgttggatggtagatttaacaccagttgacccattcatgtgcggcctacttgtatgttcttcggcaaatgccacagagaaagatggcccgctagaatatgggtcgtgaataatatttgtggcttgatccacttaggagtttggacatcaaaattcaacgaatgatatttttgc

SEQ ID NO: 24200 - DNA, 1814 bp, Oryza sativa
  ref <308>: DATABASE ACCESSION NUMBER: AK099642
  ref <309>: DATABASE ENTRY DATE: 2002-08-28
tatggataatactgaggaatgcaatactcgatcttcttccttgtatagcatggaaatgctagaaaatgagcctgtagattttgaaaacaatagctcactctggctgcctcctgaacctgaggatgaagaggacgaccatgatggtgctttatgtgatgaggatgatggggaggatgccacaggagagtggggatatctacgctcaaacagttttggcagcggacattgtcgaagtagagataagtcagctgaggaacacaagagagccatgaaagacattgttgatgggcattttcgggcattggttgctcaacttcttcaggcggaaaaggtacagttggttgataaatctggcaaacagagttggctagatatagttacttctctatcttgggaagctgcatctattctaaaaccagataccagcaaagggggacggatggaccctggtggctatgtgaaggtgaaatgcttggcttgtggtcgtccaagtgatagttttgttgtaaaaggagttgtttgtaagaagaatgttgctcatcggcgcatggcgtcacggaaagaaaagccacgcatcctgatccttggtggtgcacttgaatatcagcgcatatcgaatttgctttcaagttttgatactttactgcagcaggaaacagattatttgaaaatggcagttgcaaagatcaaagcccaccaaccaagtgtagtgttggtagagaaatctgtgtctcgatatgctcaggatttattcttggagaaaaacatttcacttgttctgaatatcaaaaggccacttctggaaaggatatcacgttgcactggtgctcatatagttccgtcaattgattacgtgtcatcccaaaagcttgggcattgtgatctattccatgtggagaaatatgttgaagagcatgggactgctggagaaggtggaaagaaaatgctgaagacccttatgttttttgaaggctgcccaaagcccttgggttgtacaatattgctcaaaggagctaatggcgatgagctgaaaaaagtgaagcatgttgtgcaatatggagtctttgcagcctatcacttggctctggaaacatcttttcttgtggatgaaggtgcaacacttccagaactccctcttaagtcaccaattattgttgctttgccagataagccttctagtgccgatagatccatttcaactatacctattttacaaatgcctactgcttcatcaccaaacgatagcttgcaagcatttgatgtgcaaacggatggttcaacatttaatggttttcaaacaatggaccaaacaatggtaatgtgctctcctgagtataaaagctgcaaaaaactgggagctggttctgcccaaaccgaatctgcccatttcaatggccaggataaaaatattgcctgtttgcatggtatggttccttggtcatctactgatcccttggttcagcaatcggccagttcactttgtcattgtccttcttgttctagagatgtagttaataaaaagcattttgaagaacgtcaacctgaaacatctggacataccctggataatgatttcaatgcgttgtctgcacatcgaacaaatttggagtctgttgagagcggtcacttatttgcctataattctgagaatggtgacaagataagagctaaactgtctgttcctctcaatgtgcaaatttctcttgatgatgacagttcaaaggatgattcagtaataaaaaaagatgaaattccggcatctcctgctgacaaccagagtatagttggtttctctgtcttcccgttgtgtttgg

SEQ ID NO: 24201 - DNA, 1623 bp, Oryza sativa
  ref <308>: DATABASE ACCESSION NUMBER: AK099643
  ref <309>: DATABASE ENTRY DATE: 2002-08-28
ggcctggtccccaacgtccccccggcctccggcgcagccctcctcctgtgcctcctctggtcccggcctccgcccgcgttgcgacggcggtggcggagcctgtgctggtgtccccctcccctcttcttctccctcccctcaccctgtcccttctctggatcgacggagccagcagtaccggcggtggcggaggtggcgacggggggggggggggggaggacgaggtggcggtgaggaggtactggttgccgtcccctcgcgcctccgcacgcgctgcgcccgctcggacctgccgccgatgccgcctccctccttcttcttactccccttgtggtggcatcggcgggggaggacggacgcggcacccgtcggagctagcgcaggtgcttccttactccttctccctccacttggtggcagctgcggcagggggagggcggatgcggcgcccgtcgggccctgcggtggcggcggagctgaccgcgcgaccgccactacctcctcgtcatttccctagccgtcgtctccggccgtgaggaggctgttggcctgttgccactggatccagcgaccccggccacttcgccggcggctctggtcgaccggagtaatttgacgctggccggtgccgtgctcttcgtctccaccatgctgtcgcttcctctatcctgccctcttgccccgctcggtggggtgccggatttgcttctaggttcgtcggatccgatgacctcggtctcccccctgcactcttcttctcttcctccccgtcctccaccgtccctctctccctttccccctcttccttttgctcttcactcctctctatgccagatccggctcatggactgcgtggtctgttacaaggatggtgtaggagcgcttggtttgtggggcggccaagcaactgctgcgaggccgggccgtcggggagtagggagagagagcggcagttccgcgacgactacaacgacgactttggcaaggcacgacggttgcgatggcgaaggccactatccgggtattagctgctacacaaatgccaggggaggctgctggttggttccgggatacagcagatgcagttgaaaattttttctgggcacttgaggactatatagcacattttaagcttgtcaggggatcagctttatcgtatggattacatgaagctcatgcagaaacattttgacaacagtgctgacattacttcatcatgtgctcctgttggaaagaggcatatgtcttcgctgactactaggaagacattggaacgatcagattgttctttgatgcaaacatggcactctgtgaggaggaagctcttgatgttcttcaagaagggcactgagcagaaccgtggagaataatctatgttaaaattataatttgtatgtttacatgtgtatgcttgttttcgattcatggatgtctgcctacctacctgttgatgtgttgttactttgcacgtccgcgtcccactgcagcaactgtcgtcgtggcatgagcgaaaacttggtctcgataccacgccatctccttcattcgctcacatttagctgcctatgtttgtttgtaacaaagaaataacagggtgaaatttatctttaccagtatttagcc

SEQ ID NO: 24202 - DNA, 2049 bp, Oryza sativa
  ref <308>: DATABASE ACCESSION NUMBER: AK099644
  ref <309>: DATABASE ENTRY DATE: 2002-08-28
gagcggcggcttctcccctcccgcatctccctgatctcctcgcgtcgcgccctcccctcgaatggcgatacctcctccaccctcgcgccccaatccctaaccctagatccctcctcccacgctctctcgcgcacgaccaatctccctcttccttcctgtctctctccttctcgcactgctcaatctcccaattcattatggaggcgggggcggggagcagcagcgccaagctggtggcggcatgcgtcatcggcgggatcgtgctgggggcgtccgtggtcgcgctccacctcgccgggcccgtcgccattcccgccctgccgcccgtcgacgcgctccgccgcaggttccgccgcggacgccgacgtcccgtgcgcgtctacatggatggctgcttcgacatgatgcactacggccactgcaacgcgctgcgccaggcgcacgccctcggggacgagctcatcgtcggcgttgtcagcgacgacgagatcaccgccaacaagggcccgcccgtcacgccgctccacgagaggttgataatggtccgtgctgtaaaatgggtgcacgatgtcattccagatgcaccttacgccataactgaagattttatgaataaattattcaatgagtataatatagattatatcattcatggcgatgatccttgtctgctcccagatggtactgatgcatatgctcttgccaaaaaggttggtcgatataagcagattaaaagaaccgaaggagtgtcaacgacagacattgttggaagaatgcttctttgtgttagagagagatcagcttctgatagtcacaaccactcttcactacaaaggcagttcagtcacgggcatggccagaaaattgatgatagtggatctggaagtggaactaggatatctcattttcttcctacatctcggagaatagttcagttctcaaatagcaggggtccaggtccagattctcggatagtgtacatagatggtgcatttgatctattccatgctggacatgttgagatattgcgcctcgctcgagagcttggagatttcctgcttgtgggtattcacacagaccagactataagttcaacaagaggaccacatcgcccaatcatgaacctccatgagagaagtttgagtgttttggcttgccgttatgttgatgaagtgatcattggtgctccatgggatgtttcgaaagatatgattaccacatttaatatttcgttggttgttcatgggacaattgctgagaatatggactttatgaaggatgatttaaatccatatgctgttccaagggctatgggcatctaccgtaggctggagagccctttagacatcactactagtactatcataaggaggatagttgctaaccatgaagcctaccagaaacggaacgagaagaaagaagccagtgagaagaagtactacgacagtaaaagctttgtcaatggagagtaacttaggaacaggtcttgcattaatgctattgcccagaagtttagttcacaaccttctggcacaaatgcagcggttagatgatccacaattttacagtcttgtggtaactattctcatgttgctgatatagctcaggaaacttcagatgctgatgatggtgctgacttgggtgatgctggagaccctattttcctgtatatggggctttgtggctgccaataccagctgtgttattttgagatgggtagttttttttttgttctggattgttgtagagtatgaatgttaagcttgattaactattcctgatgctttatttcggagttgccaagtatatgtggcatcatcttatgagagtctgtcatgtggggaatgcactacgtccgcaggcgcaaggatcagcgacaacagcaaaacggcaaacagtagatatgcaggatttgttttcgtttgtttcagagtctgttaaagtttgttagtttgatctttatctctaagagtttgttagatggcattgtaatctttacttaaagggccagtatggcgcatggaataaacaagcaatcagaaaaccacc

SEQ ID NO: 24203 - DNA, 1361 bp, Oryza sativa
  ref <308>: DATABASE ACCESSION NUMBER: AK099645
  ref <309>: DATABASE ENTRY DATE: 2002-08-28
ctggagcgagcgagcgattcacggtggccgcgggcgacggaggcgaggcgaggaggagatagagcagcagcaagccagccatggcggcctcctccactgctacccgcctctcgccgcctcgcctccacgcacccactaccccttctccccatctcccgcttcgccgctcgcgcttctcccctcttcgcgccgccaagttggaagctgtgttaactattggaactcatctaataccacacccaagaaaggctgagactggcggagaagatgctttctttgtgaacggcgatgatggtggagtgtttgccgtcgcagatggagtttcaggatgggcagaaaaggatgtcaatccggctctgttttctcgagagctcatggcacacacttctactttttcaaggatgaggaggtcaatcatgatcctcagcttcttctaatgaaggctcatgctgcaacaacttctgttggatctgcaactgtaatcattgcaatgcttgagaagacagggattctaaaaattgcaagtgtgggagattgtggtttgaaagtaattagaaaaggccaagtaatgttctctacatgtcctcaagaacattactttgactgcccataccagttaagctctgaagcaattggtcaaacgtatctggatgcactggtttgcacagtaaatcttatggagggtgatatgattgtcagtggctcagatggattttttgacaatatattcgatcaagagatcgtttctgtcatttccgagtctccaggggtagatgaagctgcaaaagcactagcagagcttgcaaggaagcattcagtggatgtcacctttgattcaccctactcaatggaggctcggagtcggggttttgatgtcccctcgtggaaaaagttcattggagggaaactaataggtggtaagatggatgacattacggttattgttgcacaggtgaaggcagtgatgatcccagatgatgagggtgttgatgaagaaaagggtcaaggggatgagcaaggcagtgctgttgccgttgcatcctctgaacagaaggaagactcaattaccacataaacagtaaaatcaatgataccgcaatcacaatgtaactactgattcttcaaagcgacgttcttcgtgcgccgccattttctattttatgtcttcctccttatcttttctctaaggatgtacatttgtaagtttctactggagggaatacaactcaatcaaaatactcatgtacagccgaattccctgcagaattgagtcgctacgaatacacctctctttcatttattgctgaaaattgtgactttccttttatacaagtcacccatttacatatgcattctatctc

SEQ ID NO: 24204 - DNA, 2091 bp, Oryza sativa
  ref <308>: DATABASE ACCESSION NUMBER: AK099646
  ref <309>: DATABASE ENTRY DATE: 2002-08-28
gggtctccacttgcccccctcaccctcaccctcaccctctccccctcgcgccgccggggcgaccaggggcggcttctccccgttagctttcccgcatcggcggggcccgccgcccccccgcccgccatgcgcgcccttcgctcccgcttccttccgtggttacaatttgctgagggatcctcgctacaacaaggggcttgccttcaacgaaagggagcgcgaaacgcactacctccgtgggcttctgccaccagcaatcgtatcccaggagctccaggaaaggaaaatcatgcataacatccgacaataccagctgcctctgcagaaatacatggctatgatggacctccaggaggggaatgagaggcttttctacaagctcctcattgacaatgttgaggagctacttcctgtcgtttacactccaacagttggtgaggcctgccaaaagtatggatccatatttagccgtcctcagggtctttatatcagcttgaaggagaagggaaagatccttgaggtgctaaaaaactggccagagaggagcattcaggttatcgttgttactgatggtgagcgaattttggggcttggagatcttggctgccagggaatggggatccctgttggtaagcttgccctttacactgctctaggaggagtgcgtccatctgcttgtttgccaatcacattggatgttggtacaaataacgaggcgctgctgaatgatgagttctacattggcttaagacaaaagagggccactgctcaggagtatgctgattttcttcatgaattcatgactgccgtgaaacaaaactatggggagaaagtactcattcagtttgaggattttgcaaaccataatgcatttgaactccttgcaaaatatggaacaactcaccttgtattcaatgatgatattcagggaacagcttccgtggtcctttctgggcttgttgcagcactaaaattagttggtggttcattgtcggagcacagttacctgttcctgggagctggagaggctgggacaggcattgcagaacttatagctctcgagatatcaagacagaccaaagcaccaattgaggagtgccgcaagaaaatatggcttgttgattcaaagggcttgattgtcagttcacgaaaggagacccttcaacacttcaagaaaccatgggcccatgagcatgaacctgttggaaatctcttagatgcagtcaaaactatcaaaccaacagtattgattggcacatctggaaaggggcaaactttcactcaggaggttgttgaagccatttcctcatttaatgagaggcctgtcatttttgccttgtccaacccaacatctcagtctgagtgcaccgctgaacaagcgtacacatggagcaagggccgcgcggtgtttgcaagtggaagtccatttgatccggtggagtatgatggcaaaatatacgtgcctggccaggcaaacaacgcctacatcttcccagggtttggccttggtgtggtgatgtctggtgcaatccgtgttcatgatgacatgcttcttgcagcttcggaagcactggctcagcaggtcacacaagagaatttcgacaagggccttacttatcctcccttctcaaacatcagaaagatctctgcccacattgcagccaacgttgcagcaaaggcatatgaacttggtttggcaagcaggcgccctcggccaaaggacctggttaagtatgcagagagctgcatgtacagcccactttaccgcaactaccggtgaatctggtcatccggtatccggatctattccagtcatgtatatctatgaactgtttcctgcaaaatcttactacttgttcagtactgcacgctgtaattctgatgagtctaccggagttacttcaagcctttttttccccgtgtcgttcatgcctgtattgtaatatttccttttcgacgtgatgtgaagttccttgtatccagttaccttaagcatgggcatatgtattttcatcacaagaatgttaccgtcctagggatgggtaataaatgataaatctggaataaagtttctacagttcctttctcggt

SEQ ID NO: 24205 - DNA, 2872 bp, Oryza sativa
  ref <308>: DATABASE ACCESSION NUMBER: AK099647
  ref <309>: DATABASE ENTRY DATE: 2002-08-28
gagtgtgaagcccttcgacgcttcactcccctttcgtcctcgtcgtcgccgtccgccgccgccgccgccgccggtggccggggatggcgagccgcgcgccgtgcctcctcgctgctcggggcatcgcctcgtcgcctcacctcgcccggaggttaaagcaaacagaaaatgagattgttcaaatgttccgaaccccatctcctcggaacgaggatgcggtagcagctctttcgccaaggtacacaaattccgttcgtgtgttggatgagagattcattaggatcctgaaaatattcaagtggggccccgatgctgagagggcattggaggtactcatgctgagagttgatcactggttggtacgagaggttatgaaaacagatgttggggtcaatgtgaagatgcagttttttagatgggctgcaaagaaaaggaattatcaacatgacacatccacttacatggccttgatacattgtttagagctagtggagcagtatggtgaaatgtggaagatgatccaagaaatggtacggagtcctatttgtgttgtcaccccaatggagctttcacaggtaattcggatgctggggaatgccaagatgattggcaaggcaattacaatcttttaccaaatcaaggcacggaagtgtcaaccaactgctcaggcatataatagcatgataatcatgttaattcatgaggggcaatatgagaaagtgcatgaactttacaacgagatgagcaatgaaggccattgccacccagacactgtgacttatagtgcactcatttctgctttctgcaaactcggtcgccaggattcagcaattcgtctgttgaatgagatgaaggagaatggaatgcagccaactgctaagatatataccatgataatatctttgttcttcaaactggacaatgttcatggagcattgagtttgttcgaagagatgaggtacatgtactgccgacctgatgtgtttacttacaccgagttaatcaggggccttggtaaagctgggagaattgatgaagcatatcacttctaccatgaaatgcaacgagaagactgcaagccagacacagttgtcatgaataatatgataaatttcttaggcaaggctggtcgtttggatgatggtttgaagttatttgaggagatgggagtgtcacactgtattccaaatgtggtgacgtacaatactataataaaagcactttttgaatcaaaatcccgtgtttccgaggttttctcatggtttgagagaatgaagggaagtgggatctcccctagtccattcacgtactccattctgattgatggattctgcaaaaccaaccggatagaaaaggccatgatgctactagaggagatggatgagaagggcttccctccatgtccagcagcatattgcagtttgattgatgctcttggaaaggctaaacgttacgatcttgcatgtgagcttttccaggaactaaaagaaaattgtggttcctcaagtgctcgagtgtatgcagtgatgataaaacacttggggaaggctggccgtctggatgatgctataaatctttttgatgagatgagcaaacttggttgcactcctaatgtttatgcatacaatgctctcatgtctggattaggcgagagcatgcatgctcgatgaagctcttactacaatgagaaaaatgcaagagcatggatgtcttcctgatattaactcatacaatatcatcttgaatggactggccaaaaccggggggcctcatcgtgcaatggagatgcttactaacatgaaaaattctacaataaaaccagatgctgtatcatataatactgttcttagtgcgttgagccatgctggcatgtttgaggaggcagctgagctgatgaaagagatgaatgcattgggatttgagtatgatcttattacatattcatctatacttgaggcaattggaaaggttgatcaagaataaactgaaaaattcactgaagaactggattctttgcttttgttcatgttcacaagaaaaaatcttgatccaaggcttcttttgcatcacaagttttactctagaatttcttctggctgatatacatcaaaagttatgcctccttgtctccttgagtgcaaatctggcaaaccattattggagaaatcttagaagacagacttagaaggaacttactcaattttggacagtagtaagcttaccaaatcggcaatctggcactaccaatccaagagcaactgtgcggaacattctcagtccaagtgtccagatggggctttacatatggatggccattgcttcacaatgacggacctaggaattttctagagctcgtgcagaagcatgcgaaagcaatctacagtggagctatccaccggtggtgagcctcgcacagccttggatccaccctgtgcttcatggcaaagtacttctcgcttataaaactgtcatataattttggaagttcaaacattataacagcatcgaagcttgtttttctgaggaccaaagtcaagaatccagatgtggtggacatgtgctccatatatgttgttctaccttggtctcgaaatataagagaaccagatacttcttcaaaatcccttatattttggatagaggtaataaaaattatgtatagtggagatctgagatcctcaagagttaaggttcttgtcatgttgtatgatctgtttctcgctggccccctgtctgtgctcttttgtcattctatagaaagatatcattcttgtgaatgctgtcgctgttgcacctatagctcaactgtacatgataagggcatcatgtgtaaactatgatcttttttataaaaggtgaactgaatgtcatc

SEQ ID NO: 24206 - DNA, 2500 bp, Oryza sativa
  ref <308>: DATABASE ACCESSION NUMBER: AK099648
  ref <309>: DATABASE ENTRY DATE: 2002-08-28
tttgaggttcttcgctgtcttgttaagatataccaaacattgccacatccagattacctgagtatttgccaatgcttaatgttcttgggcgagcctgaaactgtggcaaacatattggacaagctgctttctggaagcaaggatgatgctctccttgcgtaccaaattgcctttgatctcgttgaaaatgaaaatcaagctttccttttgaatgtgaggaatcgtctggcttcacaaactcctgagtctaaccctgatagtggatcggctttaccggatgatcaagctgctaatgcgggtacgggcagcacagaaccagctggggatgttcagatgagagatgacacagctacaccaaatggtagttctcacacagtagatccaaatgaggtagcacgtgctgataggcttgcgaaaataaaaggaatactgtcaggggagacatctatccagttgacactgcaatttttgtatagccacaataggtcggatcttttaattttgaaaacaataaagcaggctgtggaaatgaggaacagtgtttgccacagtgcaacaatatgtaccaatgcaatcatgcatgctggaacaactgtagacaccttcctaagagagaatctggagtggttaagcagggcaaccaattgggctaaattcagcgcaaccgctggactaggtgtcattcacagaggccatcttcaacaagggcgagctttgatggccccctacctacctcaaagtggtgccgttggtggtggtagtccatactcagaaggaggtgccctatatgccctgggtttgattcatgctaaccatggtgaagggatcaaacaattccttcgtgaaagccttcgcaataccagtgctgaggtgatccagcacggagcctgtttgggccttgggcttgcagctttgggaacagcagatgagtgagatgcttgcttatgctcatgatacacagcatgaaaagattattaggggtttgtcacttggcattgcgttgacagtttatggcagggaagaggaagctgacaccctgattgaacaaatgacaagggatcaagatcccatattacgttacggtggcatgtatgcattggctctagcctacaggggaactgcaaataacaaagccatacaccagctgctgcattttgctgtatcagacgtcagtgacgatgttcggaggactgcagttatggctcttggatttgttctagacaatgaacctgagcagactcctagaattgtgtccctgctctctgaatcatacaacccacatgtccgttatggtgctgctttagctgttgggatatcatgcgcgggaagtggattaagtgatgcaatttccttgttggagcctctcacatcagatgttgttgactttgttcgccagggagctctcattgctatggcgatggtcatgattcagactaatgaatcctttgattctcgtgttggaacattcaggcgtcaattggaaaagatcattcttgacaaacatgaggacaccatgagcaaaatgggtgccatactggcttctggtattctagatgctggtggcaggaatgtcacaatcaaacttctctcaaggaacaagcacgacaagcttactgctgtggttggccttgctgttttcagtcagttctggtactggtatcctctcctgtattttattagcttggccttctcgccaacagccttcattggactcaactccgatcttaaagtaccgaagtttgagttcttgtcacatgctaaaccatccctctttgagtatcccaaaccgacaacgcaacagactacgacttcagctgtcaaactgccgacagccattttgtcaacatacgccaaggcgaaatctagggcaaagaaggatgcagaaagcaaagctaaccaggagaaagcaaccgaagatgcttctggctctagttcaagcaaggccaccaaaactcaggagaaggatgccgatgcaatgcaggttgataacgcggcggagaagaaggctcctgaacccgaaccaaccttccagatcctcacaaacccagcacgcgtcatccctacccaagagaagttcatcaagtttatcgagggcagccgatatgtcccggtgaaacctgctccatctggattcatcctcctccaggacatgcagccaaccgaggcggaggtactcgcactcaccgatgccccctcaactgtggctgcgaccactggtagcgccgctgctgccacaggccaacaggcctcatctgccatggctgtcgacgacgagccgcagccaccacaacctttcgagtacacctcgtgatggtagaaatgtaggaggcttgtaatagagatctggactcgcaaatcctttctttcctactgtatacgttgcttattcttttttgagtatgtaatgcgcggaaatttgttgctgaaaaaaaaaataactgatgaatcgtccgtagagaactttgatggagattatacgatgggtcttttgagttggggt

SEQ ID NO: 24207 - DNA, 1689 bp, Oryza sativa
  ref <308>: DATABASE ACCESSION NUMBER: AK099649
  ref <309>: DATABASE ENTRY DATE: 2002-08-28
gtctcatctctacatctaccctgcagatgcagagaatggggggtggccacaacccatgggggtaggggtggcttccagttccagcggtcaagcagggagagatggcagcggcgacggctagcagggcgggtctgacttcagcggctgccatccggcaacgattgttgtaagtgcttgatttgccatttcgtgattctcggtctgatttttcataatttgtttcaggctttagcctttgcccattcctatgtggatgctgcttctttctgccaaaaagagttgaatgctcctactgctcttggtagggacgattctatgggatgcatggcatgaaccatgatcggtttcatgttgttcttgaaatcctctttgattggaccatgatataacagagcaatggacaatggtggtagataccatttagtggttcgcaggtaatctgaaaaattaatctaatcttgttgtacatatcatatgctgaaaaggttttcagtgagaagaaacctaagacatcattatgtcgctacttagaaaaggccaatattttacgatctccattctggtttatgtttagttagttaaaccctgacattattatcctgggaaaatacatgagatgcttcagtctaaatgttttggttcaagtatttcttaatgagattttgttcggtacttttaaattgcagaattgtctattttgtgttgtagttcatcatcttcagaatgtgatggactaatggcattgtcgatgcctcagtggtaagcaagaaccagtgatattaaccttgtgaattaagaaaattaatgtatgcaccactggtagatcgctttagaagcagtgatattaacctggagtattaagagagttaatgcctgcaccactggtatatttatttatgtcatgcatgttccattgttgccataaaaaaggacccatataattaaagtggaagaataataaaaattgttgtggccatacatcttctatttttcctttttttctctctgcaattgttctgttaattatgacatatgtgcttcttcacaccagccaccttgtgctaaattgcagctcagtggtggactagcagctcatgtttaagcatgaatgatgtgtactcagccaaaataacgagatgctcttgcaatataggaaccatgtgcacacaatatggtggaactacggaagttgctatcttccacaccatcaccatatgccccatctccaattcatcctccattcaccggcgggcagtccatggcgaagtcctatgcaattccaaatccaatatcaggatactgaggacctcctggtgctccaccactctgaagttacaaagttcgagtctggaactcgggatctatcgatggagtttggctgttccattgtgatttacccggtgcagttctccttggtggcacaatgatgcatcgaaagcagtaatgtggtgctgctctagctcttttaatgagttccaaaaaaaaactactatacggatgagactaacatgtgaatatgcagatgaaatatgcagatttagagaccttggaatttttctgaaagaaattcagaaagcaacatgagttattattattttttctgtattttatggtttaccacattgttgtaacaagtttaggtctaaatgactacaaccatgctcttgaaaaaagcattgatgacaatcc

SEQ ID NO: 24208 - DNA, 1933 bp, Oryza sativa
  ref <308>: DATABASE ACCESSION NUMBER: AK099650
  ref <309>: DATABASE ENTRY DATE: 2002-08-28
gctgcctcgattgattgattgattccttggagaagaagaaggaggaggaggagatcgagcagccgctgacgctcgtcgtctacctcccgatctgatccgaggagcgaagcgaacaggggcaagatgcattcgacgaatctgctgctggaggagcccatcaggatggcatccatcctggagccatccaagccgagctttttcccggcgatgaccaagatcgtggggacgctgggtcccaagtcgcgcgccgtcgacaccatctcctcctgcctcaaggccggcatgtcggttgccaggttcgatttctcgtggggagacgctgagtaccaccaggaaaccctcgaaaacctcaagctcgccatcaagtccaccaagaagctctgtgctgtcatgctcgacactgtcggcccggagttgcaggtggtgaacaagagtgaggctgcaatctcccttgaagcgaatggcactgttgttctcacccctgaccaggggcaggaggcctcctccgaattgctgcccatcaacttctccgggcttgctaaggctctgaaaccaggtgctacaatttttgtggggcaatacttgttcactggcggtgagactacttcagtttggttagaggtttctgaagttaaaggagatgatgtggtttgtgtgataaaaaattcggctactctggctggttcactgttcaccctgcattgttctcagattcatatcgacttacctacactgtctgatgaggacaaggaggttatcagaagatggggagctccaaacaagattgacttcctctctctgtcttatacaagacacgcggaagatgtgcgacaggcacgtgagttcctctcaaagttaggcgaccttagccaaactcagatttttgccaaaattgagaatgttgagggtttgaatcattttgatgaaatcctgcaagaggcggatggtatcattctgtcaagaggaaaccttggaattgatcttccacctgaaaaggtgtttttgtttcaaaagtctgctctgcacaagtgcaacatggctggaaagcctgctgttgttactcgtgttgtggacagtatgactgacaacctcaggcctactcgtgcggaggctactgatgtggcaaatgctgtacttgacgggagtgatgccattctccttggtgctgagactctccgtggtctgtacccagttgagactatctcaattgtgggcaaaatttgcgctgaggcagagaaggtattcaaccaagatttatacttcaagcggactgtgaaatatgttggggagcccatgacccacttggagtctatcgcttcttctgcggtgcgagctgctatcaaagtgaaggcttctgtcattatttgcttcacatcatctggacgcgctgcaagactaattgccaagtacaggcccaccatgcctgttctatctgttgtcattcctcgtctgaaaacaaaccaactgaggtggagtttcactggcgcatttgaagcaagacaatcactcatagttagaggtctctttccgatgcttgctgatcctcgccatccagctgaatcgaccagcgctaccaatgagtcagttttgaaggttgctcttgaccatggcaaagcttccggtgtgatcaagtcgcatgatcgcgttgttgtctgccagaaagtgggtgattcctcggttgagaagatcattgagctggacgattagacgaccagcttgtgcttgttgatgatactacggcaagtcatggtttgccagattttgactaggccaaaaacgatgcttcttggctatatgtataattcctatataggctttccaatgagcagtttttcctatggtgtaatcataggatttgccttactatttgaaacaactacgttttagttatgtaagttatcagatttcaatgcatcatatcacttcgatgggc

SEQ ID NO: 24209 - DNA, 872 bp, Oryza sativa
  ref <308>: DATABASE ACCESSION NUMBER: AK099651
  ref <309>: DATABASE ENTRY DATE: 2002-08-28
gagtccttcgccccgccgccgaactcctgcaaccaggactgcctcggcactcggcagccaaccggttgaagcttacaggatctcgtctgggttccagatgacggagtaggtgtggaaatcctgggtaggatcaaaccagagccggtactgcacctccctgccgccttcgccgttggcaaagatgttggtatgcagggtgtacggttgcccggtgacgttgcccaggaactccaggtgcagctgctgtttcatggtcacttacgtatatcgtggtgacggtgccggcggagtcgtcggcgacgagcttgatgtccatgtcgatccttgcaaagaggtacgaggtcttggacttgaacgccgaccccatctcgcggtctagcgtcagcgcaattgtctggtcgccattgctgtcgttgagcagctgcgtctggccaaacagtacctcgagctggtccgtcatgagcccaccgccggtcaccggcgtggcggcggcgagcagcgcagaagccaacaggcaggctaggaggtggtgcgccctagccggcgccatggcttccggccggtggtgtaaactgtgaagtgagtgagtgagtgatgtactgctgtgtgtgaggggcagtgaggccatggtcaagtgcaggctatatgcagaacaatagcaccagggtcaaaagactttcagatcgatctcatcgaactcggcgatggatgcattagatatttggtttcttggaagatgtaaagaagtttggattatgggctggctagtgaagacctaggcatagaaaatgatggaagagtatgtagctaaaggtgagcagagctgggaaaacaagcaagaagttgacctgattaagtgttcgtcacatgtc

SEQ ID NO: 24210 - DNA, 1526 bp, Oryza sativa
  ref <308>: DATABASE ACCESSION NUMBER: AK099652
  ref <309>: DATABASE ENTRY DATE: 2002-08-28
gatatggaagcagctgtggcagcttcggtagccatggtagctttaatgacaatgtaggtcttgcaagcagctatggaagctatgatgtcaacagtgtgaacatgtatcattcaccactaggcccttctggattcaatttacattcacaagccggaggaacatttttgggatctagtccagatattagacgacgatcttatctctatcatggtggtggcattcgattaagccctgggtgtccagggcctatgtctcttggggcaagtccatcacaatttactccaccaaattctcagatgcaaatcccaagtactgctacaggaaagtatggttccacttctcctgcaaggagcagtcatggctcattgggaaaagctgctgctgtaggccaatacaatagaagaagaaatcttggtcacccacctatatcaatgccgcctcatgaatacacatctcagctgactcagggacaccatggggatggcaccattagtaatcactttgatggctatgctcgtggacattctggttacccacaaagtgcactccctaatcctggtcatttcagttggagaccacatacatgcgctggcagtggtttatcaacagacacttcgaaccatgggtcctttccaccatctcgatacggtggttttcctcctacgcactcatccaatgtgtcagcagatacactggcttccacctcatcaataccggatccagctgattgggatccaaactatagcgaagagtcacttctgcaagaggacacttcactatcagatgcgttgagcgatctccacctgaaggatgcaagtggtcaaacaaaccaatccagcagattggcccatatccaaagccatgctattgcaaactcaaactctttatccatgaatcaaagaggtgaccgcctgttccatgcatcaactcttacagagagtagtgcctctacaggccatgtgacctatgatggttaccataatgcaaactattctcagctgaattttcaaagtcgccatggacaaccatttcagcggtataaccatatgactgcgagctacctacgtccaatggggaatcatcacaatggtcagcctgtatggcctaattatggcatggcagaacctccacctgctactatggctgacggaatgccttggggaggaaggcctggtcactcttttacagcaggcggactgccgtcttcctttgcaggaaaggattttggaaggattttctagtatggatctggaggaatgccattcaattggttgcattagtagtttgtatttgcaactcttggttgcattgcttacgggctgttgattttgcagtttgttgcattcctctaattgatcccttcgcaatgctccggctcatagaactgtatggtatgggtctgtaattgtagcattctctgttggtttcttcttttcgtttttggtttatttgttatacatcgagcggaggcttctgcctgctgcaaaaacccagcgggaaaaagaagttgagcagcccctactttc

SEQ ID NO: 24211 - DNA, 1284 bp, Oryza sativa
  ref <308>: DATABASE ACCESSION NUMBER: AK099653
  ref <309>: DATABASE ENTRY DATE: 2002-08-28
gattccattccactcgccaacccgacacgtctctcatcttcacgcaacgaacagcagcagcagctcaagctaagctaagctaaagtactacgtgttctttcgtcttcgtcggcgccggagtttgattcgtcggagctagctagcaagaggaagaagaaaatgttggccatattccagaagcaggtggcgcacgcgccggcggagctgaacagcccgcggagcagcgcggcgaagcccaagaaccccgacgagatcctcagggacttccacgccctccaccccatcgaggccttctccacctccttcggcggcggcgccgccctcgcctgcgtcgccggccacgcccgcaatggcctctctggctacgagaggatgttctgtgggctggatgacatctactgcgtgttcatggggaggctggacaacctgagcagcctgatccggcagtacgggctgtgcagccgctccaccaacgaggcgctgctcgtcatcgaggcctaccgcaccctccgcgaccgcggcccctaccccgccgaccaggtcgtcaaggatctctccggctccttcgccttcgtcgtcttcgacaacaagtccggcgccgtcttcgccgccctgagtacggatggggaggtgccgttgtattgggggatcgcggcggatgggtcggtggtgatctgcgacgagagggagatcgtgaagggagagtgcggcaagtcgtacgcgccgttcccggtggggtgcatgttccacagcgagggggggctcaagagcttcgagcacccgatgaaccggctgaaggcgatgccgcgggtggacagcgagggcgtcatgtgcggcgccaccttcaaggtcgacaccttcaccaagatcaactccatgccccgcgtcggcagcgccaccaactgggccgccacctgggacgacgctgccgcctgatgatggcgctccgtacgccgtcgtctcgtcgccgtgcgcctgccctcgccgccggcctcctcgccgtttgccgccgccgctcatctcttcctcctcttcttcctcctctctatatccgatgtgcttctccgtccgaagcatgcagattattagagcgatatttgcagctagcgtggaagcgcgccaatctatttttctgcggtgtttttacttaattttcacctcttctttttaaatttttatgtccatctttgggctctcgcctctcggcaatgtatattctcggtcgcgggtggcatgtcatggtacatactatgaatgatgaataagaaagagtttgcttcaccc

SEQ ID NO: 24212 - DNA, 3489 bp, Oryza sativa
  ref <308>: DATABASE ACCESSION NUMBER: AK099654
  ref <309>: DATABASE ENTRY DATE: 2002-08-28
gagtagccaggaaagagaagaagaagcaattggggagaagccaagccaaggttggggaagggaagggaagggagaggagaggggctcgccgatcgatccctctccgcctccgccgtcgaaccgccgcgtcgagtcgagtcgaaccgaagatcgagccgctcctccacatctcccactcgcggtcgccatcctccagcgtcgccgcgcgcggctgctccgcttcccgacgccgctcgccgctcctccagctcagctccccctcgcgcgcgtctccttctatctctctctccagcgaccagcggtggtggccgtctctagcgccggctgtcgttaggggagaagccgggtactcgtagtaggttctggcgtgacgttttgaaggactgtgatgtgtgatccccactggcatgttgcatcctaggttcctggttgcttgctcaggctccaagttgtgcttcatctccagttgccgtggtagctatggggacatggctaggcgtggcaggatgatacctttccgcctcatgggctcgagtaggctgtacgagtgtagctccaccctcccggtgttgatcggtttcagttgatgatttctttggagactgaaagaaagattcttagggagttcatcagaaaggattggataagtgcattgtagttgtaggagtgctaggagcccaaatcggtgacatttctttcagcgtttcgctgaacatagtgtagatttgcctgcaatgggtttgcctcaggttaatccagccgaggaagcgcctacgccgtcaagtaggcctgtgtcgagccctcgtagcttcgagggtgttggcgcctgtgatttggatgggcttcttggaggaagctcaagtagcagggtattcgaatacccgtcaatcggtgattctgatcggaagactgcattagacatcccgaatggatcaactgagtattctagagacagccattgctttgatagacctgcaggtctccgaggactaagaattgattcgagggatgcagattctagatcttctcataaattggatcctactgtccatgttcccacaatgagggttgtgggatttgagtcgggttctgttggaggttctgctataatagaaactgataattgtcatactccattcgatcagcatgaacttcaggcaaggaaaagactgctctcaccattgaaaaacgttcttaatagacagttccacggtgatatactgaatatttccgctggtgatgctagatttgaactttctgattcagccaggaaacttaacatttcgtgcttccaagatagtaaaaaagcaaacactggtatgctcgattcttttgagccacaagcctggacaaattctagatgctccaatggtagtccagaatgggatgccaataagattaattctaatttattcactgatggtcctttacttgggagcaaggagtccttagcttatcttgatcatctagctgctagtgcaaaattagcacattctccactctccttgtccccgcttagccctaaatttatgaacagaactaaggctacaggagctcaatgccgtacaatgagagatattgaacatcattttctagattcaagggaaaaagggggacccgatggaattagaatgctgagtgtgctagaagaaactaacatattacatgatgaatacaatgtcatgacccctaaaagaagttcatgcagaagatatcaaatctggggtcctgaatccacccctacttctccccgggttggttatggtcggagtttgagtctcccagtacgacggtcactagttggctcctttgaggagtcccttctatctggccggctttcttatggaaaagacaatcagataattgatggattcttagctgttctaaatattactggtggaaacttctctcctccaactcagaagctgccgttcgcagtaacaagcattgacgaggatagctccttattgtactattcttctattgatcttgctgggaggtcgtcagcaactaactgtagaagcccaaaactcgaaagaagcttaagcaataatgattcacgatcagccaaaagtcgcttacggatccctgttaagggcaggatacagctggtcgtgagcaaccctgagaagactccacttcatactttcttctgcagctatgacttgacagacatgccttcagggaccaaggtacaagacattatgactaatttcagttttaaaaataaattgtgactaatagactttttctttggctcaaattcgaaatagccttgaagcttacttgtcatatgattgccttatttcttgttgacttggtggcaacatatgtatttgctttgggttattgttttggtcagctgagccaatattaaacaaagtcgaatacatggttgcttgcaagctttgatcttttcctataagcttagtcaaaggttatcacacacataatgggtcagaatgtaatattacattattaatcattcacaatgacagagaacaagtgttttgaagcttgcagttttggtttctccatctccatccccaattctcatcttatttctcttgttgtaatgggacagactttcatgcggcaaaaggtcactctgtcccccactctttcctcctctaatccaatgaaagaaggaagtaatgccggtgacattaatattggccccaaggctgagtctgtctcatgtggagaagttacagaacgggaaagttcagaatgtaatggtgctgatagcccgatacgactagtagctcagctccaaactacttatctcgagtcaactgatagattattttgtctttgcaggctcatctgatggatcagaggagaaagacgcaaatgcaaaacgttgttcgttggacagtaacatgatggaatcaaataaacataactctcctgtgaataagaaaaataacaccgattctgatgattgttgctgtcagatggacaatttaggtggcaagaattattgctgtgcatcttctaggattaatgatagctcgggtggaggtgtgattcgctatgctctgcacctgcgctttctatgcccttcctccaagaaatcctcaaaatcgatgctacgatgcaaatccgatccatcatcggtgccatatgatagtaatgccgcgaaagaggacgatcgcagattctacctttataatgatcttagagttgtatttcctcaaaggcactcagatgcggatgaaggcgagctgcgtgtggaacatgacttccctgctgatcccaagtacttcgacataagcaattgacacctctgcttctcctccttgtgcatgcagctaagctctcatgtcatttgtgtacatagcatgcgctttcttgcgcacaaaaaaaaaatgtaaatatctttttaatccttcttaacttgtcatcactcatcagcccccgatgtatttatcagtcgcaaccaactgtacagtttcagtcttcaaataaaatgcaacttttagttcc

SEQ ID NO: 24213 - DNA, 2105 bp, Oryza sativa
  ref <308>: DATABASE ACCESSION NUMBER: AK099655
  ref <309>: DATABASE ENTRY DATE: 2002-08-28
ttagaacctgagttgtgtggctgccttctcatctcaacccatagaagctatttctgatttttttttttttggcctgcttgttttgggggctgacatgcatagcatcagtaataccttcttaacataagctgcgcctactattttactatcctcttttatgtttaagatggttgccagttcaataacacatctgcatccatagcgattccatcatgttgcttcgtttgtccatgcagggaaaggagaccgcacaaagcatccgttaatttatccattcagaataagataccaaggaaacccactaaaatgatagttggcaacaacctagcaagaagaacctaaggtggttctttttatttttccaacatattatgtctgcttttgatttgggtttaatagtttttgttggtgaccatagtattgcgttttcttaaaataagctctcacgttagtaggtggctatgagctaccatgaggtggtcactgttctttgctcctgattaaatgcaagtgttgcttgtgcaggtgatggaaaaagcaacaagtacttagcgtttgtcattctctccagcaggtgatatgctattcaatttattatttcctgtgattttacggtgccactaccttcgttctgttctcggaagcaatatagctaattgcctataatagattacttcctccgtttcacaatgtaagtcattctagcatttcccacattcatattgatgttaatgaatcattgattcattaacatcaatatgaatgtgagaaatgctagaatgaattacattgtgaaacggagggagtacataataaaagtttagcgcatctgccaggtagcattttcatacaatgttagatacttacatgctatgcatctattcaagatcccttttcttctgtcatgacctattactggcagtacttatttttgggcactcatatggatcttttctaatggttctctgttaaagctacgcattgttcacacatgaagattaagtgaaaaagatgacacacccatcttacctttatttgatggatatgctatattaaaacccaattgtatgtccttagcctcttaggtcattgtattgcacaacaccgtttgcagatgagctcagtatatatattgcttatatcattgtgtttgcataataaggttttggtactaatatgaggttactatgctcagagtggttagatatagaattcattttgttattggtctgtagtttgcttttggctcttgttttgtttttccacaggcccagcaaatatgatataagataatgttagtcatggtccctcatcttgaaaaggtcgctgctgacattcctcaaacaaatatatgagcctgtatataccgtactatttaatggtcgtctcaaatgataaatatatgaaagtattatatgtttaccgtgtattatgcaagagtacatgagcttgtcaggttgtgtggcgagatcaaatatatcattgctgattgctgatttgttggctaccttgatgatgtccatctgagagcatctgaacatatatccattgaaataatctagtttcacgtccttagaatgcatatagactttgttggcggtatggcatgaggcccttcaaccagaatctaccgaaagctatgcgaagagtggggattcaagcccgagacgtcaaagttagtcggggcgaagccccctatggcgaagactatggaacaaggacggcgagaggcgagggatcgcgcgggtactctgccaagccagtggcctcttgggcgaaggatgtagggcgaagagtatatgccgaagggagacgatttcgccaaagcaagcttgcccccgcgagggccgaagaagccttttccggcccatcaagcctaggggctattgggccgacgatcgcccgacggcccatcaggggctcataaacctctattacactatatacccatgtaaatgtcccttaaccatgtaaattcccctgtataaccaaaaccctagtagtaagaacctgtaataggggctataaatagtctcatagggccatgtgatagggggatttaagaaaaaattctctaatcaatacactttacttgttttccaacc

SEQ ID NO: 24214 - DNA, 3054 bp, Oryza sativa
  ref <308>: DATABASE ACCESSION NUMBER: AK099656
  ref <309>: DATABASE ENTRY DATE: 2002-08-28
gggaggaatccagaagcggggggctcccaccttgttggcgacgatgctgcgcgcgggagggaggcggctcttggcccccgggctccggcgggtcctcggcggcggggcggccgctccggtggccgtgggcggggcgaaggcgtaccacgagcgggtggtggaccactacgagaacccgcggaacgtggggtcgttcgagaacgacgaccccagcgtcgggacggggctggtgggggcgccggcctgcggcgacgtgatgaagctgcagatccgcgtcgacgagagctccggcaagatcgtcgacgcatgcttcaagacctttgggtgcggatccgccatcgcgtcctcctccgtcggtgagccccccaaccccaactattcccctacctgttcccccccaccttcccttggatgatatggtttaggcttcgttttcgtcttcgtgaggttttctgtatttttcaattgttgggccatttgccaacgatgagaaattgtcggaacgtacgaggaaggattgtgatttgctttgtagtatgatagggaaattccgggggccaattctgagtgtgagatatagctacatgagatgcttgttgaaacaggaaggctgtttggatcagtgtaggaattatagtactaacagcaatattttttgtgtctgtgtccaatagctgcctgtgttttttcaccttagaaatcatgttcaattcaaatatattcaatgtaatgttatcttgatttggtgcagagagtattaatactatgtgtatgttgtaaacctgtggaggcagatgtggttgattaatcctgggtttaatttgattgagttatgttaatttggtggtctagggtagatttggttgattaatcctgggtttaatttgatttgagttatgttaatttggtggtctagggtagatgtggttgattagtcctgggtttaatttgataagtatgttgttttggtggtctagggctaaggtgctcgttctgcttgtctggtacaagcggttactgttttcagatgctcccctccccctaatgattttctgttttggtgagcttatacttatggattatttgtcctaattagtagcattgaaagtttttacatttcccaagttgtatgtcctaaacgaaatttgacatgattgggccccaccactgaacaaacaacttgagaaaggtgtattatcggtgaaatacttttgatagtcagcagctcaaactgttctcaagatgatcgcaattttgtggaagaaaacagaagagtctttacagaattgctatttatgttatgtgcattattctgttgtgaggcgaattcctgtatgtaactttattcatgttatgttacggcaaatgtcgccatgatatgatgcatactgtatgtattgtttgctagttataagccaaaaactagaaccaattgcagcttgaggttaatattaacttactttaatgcatttgcatattttccacatgaaaatcatcatgttcagatgcctggagttcacccctgttctcaaccaatagagttaacaacatcagttgcccagctggtggattaactcttatgattgttctctagaatctctttactatggaagattgtttgtgctgagaaaatttgggtcccaacaacaaattcaattcctgatccggcttttgtccttgcagctactgaatgggtaaagggcaagcaaatggaggaagtagtgactataaaaaacacgtaagctattccccttcctggttgtttgcactgcaatactctcagtggttacattaacatgctatgcttatatggccttttggatgtcattgaactactgtggttcgttattaccttgtggtaattaagtttctggctggtatgtgcaatttccttttcagaccatactttttcatcaaaattttcaatactaaatgtcggtaaaggggttccatctgtgagattttctttgtcattcgttgtcgtaatgatgaccgtctttcagttaatgcttcagcatttggacatgtctgaagcactttggtaaaattatttgatatgcacttgactaacatgatgtttccagaactgttttgtatagatcatattggtttttctgtagttccttggcagtggagtgtgtcatgtgtttgcattgattcatgaacttatttgtgtttaatggatgcattttcattcagagacttgatttgcctgtttgctaagagttgtttggctgctcatattttcttatgaatgtagatggtaatcccatcaggataaccatgcagcatacagtttagcttatgccctttgcttgcatggaagactaatatactttccctttatttttactaattttgtattttgtctatcaataagtttgtgtgtgaggatgctgtcaaatgctttcaatcaagttctgtaaggctgtaacagggttttgtgctctgctttgcagtgagattgccaagcacttgtcacttccaccagtaaagctccattgtagcatgcttgctgaggatgcaattaaagctgccgtgaaagactatgaagcaaagaaggcgaagctagcacaaaagggtgaagagaaggctgccgaagcatgagtgccagaggttctgtcatgaagaatgttgcagtgccctgcgtactcgtagtaaagaacctgtcatgaagaagtctctgctctgcttcttgctggcgggaaatagtgtgtaacgctcacaaactctatgcagcatgtatcataaggatgaaggcaaacatttttgaataaatgtgctgtcatcttgaaagaaaaaaaaaaggtgtatgcgtgtgtatggcctagtaatgaacatatggtacggaattacggtcgcgagataaggcacattgtttctctttggttgtttcaattagtcttaggttgagttggtagatgctcatgaacttgagttgcctggtcacttgcatcatttttctttttttttaaaaaaataactgtttagtagttctccgtgtttctccatccaacaggaatgcagaatagttattgttttgagagttctcct

SEQ ID NO: 24215 - DNA, 4073 bp, Oryza sativa
  ref <308>: DATABASE ACCESSION NUMBER: AK099657
  ref <309>: DATABASE ENTRY DATE: 2002-08-28
gaatgttaggcaacaactgctttcctaagatcgccgaactccaacatcgccggcatggctccccgccggcgagcgatcgtcgtcgtcgtccatcctcgccgtgcaccatcaccaggccatctcccttcgccggtcacatcttcaggtcatccccggccacatcggtcgttgccggggctcaacattaccggatccagcgtcgcccagccatccccggccggatctgcagccgtccgtcctcctcgtccgtcagccgccggttgctcgcggatccgaggacaccgctcttctccgccgggcagccgccgtccatcgccgtccggtcgcagcgctcgtcgatctgtgcagcagcagcaaaatgttcgtcgtcttcgtgttcatcaaatcaagcagcagcacgtcgtccatctgagcatcgagaagcagcagcagtagcagactagcagtcgtatctcttcaagcagcaaacaacgagcagcagcaacagcagctcttcgtatcccttccagatccagctccaatcgtcgtcggtctcgtcgcccatcactgtgagccgccgcctccatcgccggccaacccatcctctccatcgttgtcccatgctcccgccgcggatcttgtcaatgccttctctgttgctctgctgatttcgtggattttgttgtttttggcaattggtctgcagctcttttccaaaacctcaatcaggaacgcatcaaactgccatggtgctcgtccagtcgtcctcctcaaaatgctgctgccagaaaatcagtaagcgtgcacttgtttgccatggatctagagtgcatgcttgctagtgctagctagtttagtttgcacctgtcagtaccactgtccactgaactagtagctgcaacttgcaaatggttattagtttagttagttgcaatggtctcaattgggagtatagtccatgtccatctgagatatgcatcacgtgttcttccacaggtgtccagtgtccactgccgtgctactgtcgtctactagttcaactcctttgttatccattgagttcaccaaagtctattgcatatcatcaattcatcgaagtcattcctgtcaatcaccatcatcgtcatcaccttatcatcatcaatgtcctatcatcatcgctaactccctgtcggagttggtatatcacgtcaccagcttcccgtcgaagttggtatcatcatcattcagtgaaggtccgaagaacagtttgtgaatggccttcatcatcatcgtcattgtctctgaatcaatgaagagccaaagaacaatttgtgagggctttttgtactgagggctgaagaatagtttgtgaaggcgcaagatccacttcacatcatcaatgcaatagtttgttaagggtatagatgttaaggggtattttggggattttccaatctcttctgtacaacatacatttgccttttgggcctaggtcaatgcaatagttcaatccccaatttatctcttctgcagcatcttcatggaaatgagaattaaccttacaacttagcacagaaacaaatccatttttgtagcttaagtttatgtttgttcaagctagactagacaatatctaaatattgctatggaaacatgaagtataagaacccttttaatttttgatactgttcattctacctaggaatttggtggcaaacaattttgtggacaatgaattaaataatagtatcttaccttcaatgcagtacctgaactgccttcagagaagtacaccctgttttcttggttctccaaagactgcctccttcgctgtgaactgtggtggccctctcacctcaggctcagataatttgcggtatcaaagtgatgaagtcaatcttggagatgcatcatattatattacaggagaaccaacatggggtgttagcactgttggaaggttcatggatgcatcaaatggaggttacacaatccgcagctcgcgccagtttcagaacacattagattcagaaatgttccaaaatacaaggacgtcagcatcatctttaagatactacggtattggacttgagaatggaaactatacagtcactcttcaatttgcagagtttgggtttgaagacacacagtcttggaaaagcctagggagaagggtttttgatatatatctccagggtgaacgtaaggagcagaattttgacatcaggaaggcagcaggtgataaatcttacactgttgttaagaggtcatataaagttcctgtgaccaaaaacttcgttgagattcatctattctgggctggcaagggtacttgctgcattcctactcaagacaattatgggccctctatctcggctctgagtttaatccctgcagatttcaccccgacggttagtactagcatttcaccagaaggaaacaataatactagtaaagcaggtgtgagtactagtaaagcaggtgtaattgttggagttgtagttggtgtaacaattttaggtttgatagcacttgctgcaattttgatatggaggcagaacaggagaaagagaaagttatcattggagcaacaagagttgtacagtattgttggaagacccaatgtaatcagttatggtgagctaaggtccgcaactgaaaattttagttccagcaaccttcttggtgaaggaggatacggggcagtctataagggtaagttaactgatggaagggtagtggcagtgaagcagctatctcaaacatctcatcaagggaaagtgcaatttgcagctgaaatacaaactatatcccgagtgcaacaccgtaatcttgtgaagttgtatggttgttgccttgaaagcaataacccacttttggtttatgagtacatggataatggaagccttgataaagcactgtttggaactgggaagttgaacatagattggccagcacgctttgggatatgcttaggcattgcgagaggtctggcctatcttcatgaagagtccagtatccgtgttgtgcacagggacatcaaggccagtaatgtcttacttgacgcttatctcaatcctaagatctcagattttgggctagctaaactttatgatgacaagaagacgcattttagcacaaaagttgctggtacctttggttatcttgcacctgagtatgctatgagaggtcgtttgaccgagaaagttgatgtctttgcatttggcgtggtcttattggagactttagctggccgaccaaactatgatgatgctcttgaagaagacaagatttatattttcgaatgggcctgggagctgtacgagaacaactaccctctgggcgtcgtagacccaaggctcacagaatacgacggtgaggaggcgctccgggccatccgcgtcgccctcctctgcacccagggctcacctcaccagcggccgtccatgtcgagggtcgtaacgatgctcgccggcgacgtcgaggtgcccgaggtggtgacgaagccgagctacatcacggagtggcagatcaagggcggcaacaccagcttcatgggcagcgacgtcagctggcggtcgagctcggcgccgagggagatcatctcgccgcaggattcgtcgccgttcttgagctccgtggagtagggagaggtatggtgatttcgcgctgcgctcaggtgcttcattcatcggatttaacttgtcctgagagtggcacacgatcttattgtgtgtgcatgttcttccaaactgtgtcgcgtaaggtgcatattcgaagtactccctttattctcttttgatcatcatatttgttccatgcagcaagaccaaagagagagaaacacatatttaacttgcatgcgagaaacacatcaccatatttaactattgtatgaataagcgattagattgtctatagatgatttggagctagtagttggcagcttgcatcggcaacgaggaaagggagagagatgaggaagggagaaaagatgagagggggacaatgtgggtcccattgtaatattttttttatttttatcggacactcactgacatgtgggtcctaactttttttttttactataaatgatacgtcaacgttacgtg

SEQ ID NO: 24216 - DNA, 2563 bp, Oryza sativa
  ref <308>: DATABASE ACCESSION NUMBER: AK099658
  ref <309>: DATABASE ENTRY DATE: 2002-08-28
ttgttccgcgcggcgagataattcggttgcttctccccgcggccgcggcggcatctctcccggcggcggcggagctcacgtccttcgcggcgaactgcgctccaggcagcgggaccagaggggatgggggaccgcgccgcggggagcggcggcgggggagggggaggaagcggcgtgcggagggtaggggactacgtgctggtgcggcagatcgggtcgggggcgtacgcgcgggtctggctcgggaagcaccgcacgcggggcacggaggtggccttgaaggagatcgccgtggagcggcttagcagcaagctccgcgagagcctcctctccgaggtcgacatcctccggcgcatccgtcatcccaacgtcatcgccctccacgagtccatcagggatggtgggaaaatatatcttgtattagagtactgtcgaggtggtgacttacactcataccttcagcagcataaaagggtttctgaaacagttgctaagcatttcatccagcagctagcatctggtctgcagatgctgcgtgaaaacaacgtggttcatcgagatctaaaaccacagaacattcttctagttgcaaataatgaaaattccctcttgaagattgcggactttggatttgcaaagtttttagaaccttcttctctggctgaaacactttgcggttcaccgctttacatggctccagaagtcatgcaagctcagaagtatgatgcaaaggcagatttgtggagtgttggtataattctatatcaacttgttaccggatctcctccttttaccggggatagtcaaatccagttgctgagaaatatactcaatacacgagaaatacgatttccatctgattgcgacatgagccatggctgcattgacttatgcagaaagttactgcgaatcaattcagtggaacgccttaccgttgaagagtttgtgaaccatccatttctcgctgaacatgctttggagagaaccttgagccggacaccatcggacataagagatggctttccattcattaatagcagtcctacgagaccttcaagccaaagttctcaggaagattgtatgccttttcctttggatgataagtcaactggacaggatgaaggtcctgtttctgatagtaagagtgcaataaaatcctatgggtttgccacgagtaaaaggcttgataaaacttcaggtcagagtccaacgaaacattcaagtctggtctctaaatatattaggggaaataattacgcatctagtagtcaacgcctggaccatcctaggagaatcaaggaaaacaagggtgatgaagggcacaaccctaaaggtggttatccagaagattcccctatcattgattcattagagtttgtagatcaggaatatgtctttgtgcacccagagggatcctcctcttcgatgaatgactcccgacagcgcaccatgccatcaaaacttgacagttcttctctttcaccaccgaagttattaactgctgtgagtgcaccaaggccaatacatggcatggcaattaacagacagcaatctggtggaactggtagcttggacagtcactgctctccagtatctggtacttcacaaggatctgcagatctcaacgatgctatggatcaaccaccatctgattgtctgaccagggttagattattggagcagtatgcgtctaccatagcagaattggtgaaagaaaagattaaagatgccaagcacttagagggattctcgattcagctagttgttcttgcaacctggaagcaagcaatttacatctgcacttcttatgcatcttctgccacaagagagaatccttcccatgatgtcaccgcgaagggttttggctcaaatgctccccatttgcttgcaaactctcaactgttatatgatacatgcatggagatagagagtcagtttttggttcaaatggaatatgctgaagaacttgccaacactataggacagacagttgatgctacagaaatgccagatgcgatagaaatcatatttcagaccgcgcttaacctgggaagacatggtggtgttgatgagatgatggggaaatcagcatctgccatggtgctgtactcgaaggcagtatccatgctgcgctttctcctgactgaggcaccgtcactcgccctgaaccccgctctgtccctaacaagagatgatcgacgccgcctgcgcacatacattgaagccgttaacgctaggctcgtcccgttgcaataccagcggcactgaccgctcacctgtacaatattctttcatcctgtacatatattcgttggcccaaacgagggcgtgtaagatatgtcatgtctgagaacgtgctccgattagggagaagtagcgaaaaatccagtgtaacttgcccaaactgcctactgtaacgtgagctcggtgtgcttgcatggtacgcctgattatcaggcagctcaggttggcagctgaaggcccgaccatggtcgtttgtggacatgtaaagcagactgctacctcgatggtttgttcattaaaatttgggcttttacactgc

SEQ ID NO: 24217 - DNA, 3804 bp, Oryza sativa
  ref <308>: DATABASE ACCESSION NUMBER: AK099659
  ref <309>: DATABASE ENTRY DATE: 2002-08-28
gcatgagaaccaattggcaaacttgatgtgagctccagtagtagctcagaagctgaaacccccagaggtcagtaactctttcctgctttctacacttgttcccttttgattcagcttctgtgatgcttatattattattgtttaaattttagcaacccaaaactcatgaaaagaaaaacagaaggcctttagtcatttattgatctttgttacctttttgtatttctaagaattgattattcattgccatgttcttgtagtaaagtacatatggctgcctttttatcatgacttgacctgataattcaaaggttccaacaatcttccataccaagtctgatgaacgcccaaatcatacgaatccagagattttgtgagaagcaagcaacatataactaaattactagtcagactagcgagggattgcctattcaatttatgcagctttgcaaatacaacgaatccttcagttccaaccatctcgagagaaaagcctacagacataactaaaccagttccatggactggagggaaccagctaacatctgtgaacagaaactaccaacaaaacggccatatccttcactcagtgacaccagcagtgagggatcatgcaatcggtacccccgaaatcattatgatgatacaccaatgagaattaagtttatttgtaattttggtggtagattcttaccaaggccgagtgatggtcagctccggtatgtcggaggtgagaggcacttgattaaaattagccgggacatttcatggaaagagctcatctgcaagacatcaaagttaataaggcgagctcatatgatcaaataccacctaccaggggagccaatgaacatgctcatttccatcacctgtgatgatgacctccggaatatgattgatgagtgcattgttctagaacgaaccaaagtattgttgaccgtttacctctttgctgataatgatgatgagcgccatgtgcatttcgtattaggaagctcatccagtacagacaaggaagcgcagttcattgctcttgtcgatgggctcgtcagaccaggtgaggaattgaaaaagcagaggcttagaaacacctcagccaatgacctagatcaacttatgtttgacatcaatgaagaagggttgttagccaggacagacaaagcttcaccaaacgtccaaagtaagctctcaccaagtatcgtcaaggtaccgctgaagacatcaagggagcagctggagaacatgcctccaagttcccaactagctgtgaccaaccaagattacaaggcaccaagaaatgaagatgacccactgtgtaccgccagaaagacaaataatgctcaccttggctcctctgtaccttctgaatccacgtgcataggtaaggtggaagctggggctcatgctgtctccaggcatcatccaggacagagaaatactgctacaaacatgaccagaaagagcaaccaagcaacagaagatcaggtaaaaggatcaccaagaaaacagcttccgatacaagtagacagcagaggtgtgaatgtagtgtcatcaaattcaaacaacaatagcctaacgatgcatatacatctacctgtttatgaaaaggttgcatccttatcagggggttcagagaaaacagtcaaccagccaacctcccatgataacaagatgaaactaaaaacatatagcacccaagaagaagctgtgtctcactcagcatcccataataagacggagatgcataaacgtagtcttgactttcctactccatcacgatgccatgatgatacgtacaacagtacgaacagtacaaacctgcatattctggagaagtcaattacaactaacaacaagcagaagcaacagcctgcagtcatgtgcattgacattttgaagaaaaaccatcctcctgaaccgaccaaaggtgaaacagtactttcctgttcttatctatcttcagacaagacaactgagctgcagaaaaatattctagtcagatcttcaagtgagcgacaagaacgacccaacagtccaaaaccagatgaacatttatcaacagcccgttctcgatcagttggtgcagatagaattagccctcagatcagaactccatcgcaagaatctaaagataatgttgcaccatttatcgaagagtctgaggcatgtgagaccaagaacagtgaggaagctttatctgcaaacacagtaatggggagagaacttataagtaatgtccaggtaataaacaatggggaccttgaagatctccgtgagataggctctggttcatttgggactgttttccatggaagatggaaggggacagatgttgccattaagcgcataaagaacagctgttttatgtacccatcgtctcaggcagataaactggtaagcctatatgaactcacccagatgatttgaagttgcaatagctagttagctcctgaggtcttgtactccagtaatccaacttttaaaagatcctcatgattgtgcatgcctatcacatgtagtcatattaattttatcttactctttgaattgaaaaaagaaataaaactatagatcaacaatcccaccaatatgtcctataaaccaactacattggccaatatcggacccagaccagggagctcctcaccaggtgagaacagctggtatggaatacgaccaagagctgcagtggccaactggttccagaaataagacacctctatggctctgaaatcctagtatagaaattcagtattaactaaaatttagcactataaaaaaaatgtgctgcaaatattactgtgttgcccatcatgtattgtcatgcagatcacagaattttggagagaggctgctataatctcaaaacttcaccatccaaatgttctagcactttatggtattgtaaataatggacctgggggaacattagctactgtaacagaattcatgatcaatggatccctcaagaaagtcctccttcacaaaaacaaatatcttgattggcgcaagcgcataatggttgcaaaggatgcagccattggaatggaatacttgcactccaaggacattgtccactttgatctgaaatgtgataacttgttggtgaatattaaggatccctctcgtcccatatgcaaggttgctgattttggtttgtcgaagatgaaacaagcgactcttgtttctggtggaatgagaggaactcttccttggatggctccagaattgctgacaatgagtggcacaaaagtatccgaaaagattgatgtatattcatttggcattgtgatgtgggaaattctgactggtgaggatccatatgacggcatgcactatggaggagtcatagggggcattttgagtaacacactgaggccactagtgccaacttcatgtaacctggaatggaggaaactgatggagcagtgctggtcaactgaacctgagcgacgaccttccttcgctgaagttgcaacccgtcttcgctccatgctagaagcaagccaaagtgtgactctgagagttaattagcatcactctctgtctgtatatctatcatttaggtgcatgctacagaattgcaaatatgaatgtttcttcttatattgagtatcgcttataagtatgcaattgtataactcctgcagaccaaagctgactatcgggtgccccctgtcttgtattgtacatgcatgtatccacagcatgaaactgtaggggaaaaagtaaacagaagctcccttatctatgtgaagatctttacactttagtggggatactttaaagttatccagattctgc

SEQ ID NO: 24218 - DNA, 1947 bp, Oryza sativa
  ref <308>: DATABASE ACCESSION NUMBER: AK099660
  ref <309>: DATABASE ENTRY DATE: 2002-08-28
gtattgcagttgcagttacaaccggcaaacctctcgcgaccctgcaccgtagcagcgtcgacgcgaggcggacagcctcttcttcctcctccctttccaccccccacagagatctcgcctctctcctcctccctttccctctccttccttccagatctctccacgcgccgccccgatctcttccccccacccccacctcgtcaccggcggggaggagggcccggccgccggcagccatgatctcctccagtaagctcaagtccgtcgacttctacaggaaaattcctagggatttgaccgaggcatcactatctggggctggattgtccattgtagcagcactagctatggtgtttttgtttggaatggaactgagtaattacttagcagtcaatactagcacatctgtgattgttgataggagttcagatggggagttcttacggatagattttaacttaagctttcctgcgctttcatgcgaatttgcatcagttgatgtcagtgatgttctgggaacaaacagattgaacataacgaaaactgttcgcaaatattcaattgatcggaatttagtgcctactggatccgagttccacccaggacctattcctacggtcagcaaacatggagatgatgttgaagaaaaccatgatgatggttcagttcccttgtcctctcgcaattttgatagctattcacaccagtatcctgttttggttgttaatttttatgccccctggtgttactggagcaatcgattgaaaccttcgtgggagaagactgcaaaaataatgagggagagatatgatcctgaaatggatggcagaatcattcttgccaaggttgactgcactgaagaaattgacttgtgtaggaggcaccatatacaaggttatccatccattcgcattttccgtaaagggagtgatcttaaggaaaaccagggtcaccatgatcatgaatcatactacggcgatcgtgatactgagagtttagtagcggcaatggaaacttatgttgcaaacatcccaaaagatgcccatgttctagctttggaggacaaatccaataagactgttgatcctgcaaaacgccctgctccattgaccagtggatgcagaatagaaggttttgtgcgggtaaaaaaggtccctgggagtgttgtaatctcagctcgatctggttcccactcctttgatccatcccagataaatgtttcccactatgtaacacagttctcttttggcaaaaggctatcggcaaagatgtttaatgaactgaaaagactaactccctatgttggtggccaccatgatagattagctggtcaatcctacattgttaagcatggtgatgtcaatgccaacgttactattgagcattacctgcaaattgtgaaaactgagcttgttacactgagatcatcaaaggaattgaaactggttgaggagtatgaatacacagcgcacagcagcttggtgcacagcttctatgttcctgttgtgaaattccattttgaaccttctcccatgcaggtcttggtaactgaacttccaaaatccttctcccatttcatcacaaatgtttgtgctatcattggaggagttttcacggttgctggaatactggattccatcttccacaacaccttgcggctggttaagaaggtcgagcttgggaagaacatttgaacaacaagattattcttcagaagcagcctcaagcttagtggttgcactagttttagtcattattttgttataccagggtaggaattcttaatatatcaagatgtgaaagagggtagtgggttggcagaggaggagaagttggggtcatgatatatagtaatagtaggtagggacctcactgttttgctaaacgacttcgtaagaacaataagacagtggatccttgttaactataccctacgttaattcgtcc

SEQ ID NO: 24219 - DNA, 2361 bp, Oryza sativa
  ref <308>: DATABASE ACCESSION NUMBER: AK099661
  ref <309>: DATABASE ENTRY DATE: 2002-08-28
gtggagttagctaagctacctcaagtcttgtcgattaggctagcagctagagatgcgcctcgccggcggcctcctcctcctcctcctcctcttgactattcccgatgatggagctctctccgccagccctgctgccgccggcggcgagcggtgcaggcggcagtgcggcgggttggatgccgtcccctacccattcggcttctccggcagctgccccatcaagctggcctgcaacgagagcggctcgacggcggcgctgatcctcccagacaacgccgctgcggatacggcggcggagtcgtacaccgtcgtggcctcctcgttcaaccggaccgcctccaccttcgtcgtctccctcccgccggcatgcaaccgcaccgtcgccggggcgaggcggcggctctccggcgccaactacggcgtgtcgtcgcgcaccggcatgttcctccgcggcggctgccgcaacgcgacgggcgccaccgcctgcagcgtccccgccgaggtcatgtccaagatgctccgcacggcgcagtgcgccggcggggacgaggccgcgtcggcgtcgtccctgacgtgcatcgcctcgatcccgcccaactccacggccgaggcgctcggcgtcggcgtgttcgcccggtgggacacggtcgaggagccccggtgcgacaacctgctgacgtccgccttctacggggagacgccggagggggtgttcgcgctggagctcgccgtggcggagctgggatggtgggtcaacgggagctgcaaacacagcgccgccgccgccggcgacctctccgggcgatgcgcggcgaacgcgacgtgccacgacgtgcagaccccgggaggcgagtggggccaccagtgcaagtgcctgccggggtttaccggcgacgggttcgccgccggcgacggatgcaacctttccgctaagaagagctctacgaagaaaatccttatcatagttggaggtgtcttggcgggaacggtggcggccggagtgctcttcctctgctgcgcgcgttgccggcgatccggcggcggcggcggccggtccggcttcgacaggctggcggcgaagcggctgctgtcggaggcggcgtcgtcgagcggcgtgccggtgtactcgtaccacgaggtggcgcgcgccaccaactccttctcccacacgcaccgcctcggcacgggcgcctacggcacggtctacgtcggcaagctgccggcgagctcgccgtcgctggtggcgatcaagcggatgcggcggcggcacgacgacggcgacgacgacgccgccgtggcggtgctcctcaacgaggtgaagctcatctcgtcgctgagccacccgggcctcgtccgcctgctcggctgctgcctagaccgcggcgagcagatcctcgtctacgagttcgtccccaacggcacgctcgcccaccacctcgccggtggggggctcccatggcgcgcgcggctcggcgtcgcggcggagacggcggcggcgatcgcctacctgcacgccaagcggccgcccatcctccaccgcgacgtcaagtccagcaacatcctcctcgacggcgacctccgccccaggctcgccgacttcggcctctcccgcgccgtcggccgcctcgaccaggcgtcgctgtcgcacgtctcgacggcgccgcagggcacgccggggtacctcgacccggagtaccaccagaacttccacctctccgacaagagcgacgtctacagcttcggcgtcgtcctcctcgagctcatcaccgccatgaaggtcgtcgacttcgcccgccccgcggcggaggtcaacctcgcgtcgctcgctctcgaccgcatcgggaaggggcgcgtcgacgacattgtcgacccggcgctcgtcgaccgcgccgacgagtgggtgatgcgctccgtccgccatgtcagcgagctcgcgttccggtgcctggcgttccagaaggacgtcaggccggccatgagcgaggtcgccgccgagctcgcccggatcagggacgccgcgccggcgtccgtgccgggagcccggaccggagccggcagccgcccgcccatggtgatcgacgtcggcgtcggcttcgacggcgtcgacgccgcggtgaagaaggtcgggtcgccggtgtcggtgcaggacgtgtgggtcagcgaccagagctcgccgtcgaccaacggctccatgccgcgatttgcttagctctcgatttgacttgtaattcaaagaggaatctgaatttgatgtgaatttaacatttttttgatgtgtcgaaatgtgtgctacttagcctagttctaagacatggcaaagtatttcatatgccgaatcgaaaaaacgtttgctgtatagcc

SEQ ID NO: 24220 - DNA, 2894 bp, Oryza sativa
  ref <308>: DATABASE ACCESSION NUMBER: AK099662
  ref <309>: DATABASE ENTRY DATE: 2002-08-28
gctgggttcgtgcgacgggacctcgattcgtccatccagcttccactacccctccgcgcgctgcctagatctttcctctctctcgcaccctcttattggcggaggaggaggagggatggtgcgggaggttgcggagagctgtgtcgacggggtggtgatggagatggtggcggcctactgcggccgcttctacgccgccaagccggagctcgccgcccgccgcatcgaggccatcggcttccaggtcggccaccagctcacggagagatataccatggagcgccctcgatttagtgatcatcttgaagcaatcaaatttatctgcaaagacttttggtcagagctattcaagaagcagattgacaatcttaaaactaatcataggggaacatttgttcttcaagataaccgtttccggtggcttactcgtgtttctatagatccatctgtagagagcatggatgcaactgacaatgactctgcaacactaggggatagcgcagcccaaacaacaagcatgcttctgtactttccatgcgggataataagaggtgccttgaccaatttgggtatttcgtgttctgtcactgcagacatgtccaaccttccagcatgtgagttgcactactccttttcatgacctttactttgcatgcaactccatgaggttgcaaaatgcactggatggtactccttctgttttcatataattattgccattagctttatttttcaaactcattaaacatggaatacctcaagggaaaaatattaaagtattttgaatgataaatgttatagtattattctttcctactaactaaaaaaattaaaatactacttgtcaaatgttgaatagtatagtcatgctcattgctgttaaaaaaggctgggccagtacttgaattaagaaaatcagatcagataatgctcaacatgagtgtctccatatgagaaattatttggtgaaaaatcttttggtgaatatgatggataagattttcattgtggatatttagtatctcagattgaataaccttatcacttgatcacacaagcatattcaaaagcactctcatgtggccatcattgatgccccaatcatcaaaaccaagcagagaattttgagaccacctgatcaggtagcaagttccagcttagctgcttaggatagatatgtcaggaagaagcagccagtatctttctagatgattttgatttcatccagatccagttcacgcagcaaacaaagtcttccatatgcaccgtatgtggcatcgacaaaaaataagtatcccacctgccattcttatggaccactggacatgcctcccttctttagcgttatttggctgcttggagcctgcttacttagtggactgtttggggagctccttgctaagggtgcaaggggattctcttcctattcctcgactaaatcctttctgctgatctgttaaaaaaaaatagtatctatttccgtttgcctttcctagaaggttgttcaaatgtttgtagagatattcttcttgtcatggtctttttgtttctgtactctttttaatgggatttttttttttcagtccacagcttatatgtattgagctgaaagagaaattcattttgttcattgaaatgtggaagtaatattcgtacaatgaatatttgaaatcccctagggggaaagggccgtaataaatataactcctccattccaaatttaaggcattttagttttgtcctaggtgaacatctctaactctgaccaagttatagaaaaatgcactaacatctaaaacatcaatttaatttcattgaaatccaccatgaaatatgtattgatagtgcattaattgggtactccatcccattaaacaaggcgcaactgctttgtacgcaaagaccaaggaagctcatgtaacttgtgagatggatgctgcagaactagaggctttaaacaaccaaaggaaaccaaagaatagctagtgcatgcatgcgcatgaacagaaattacaggagtcaagaaggtgcagctgccgttgctgccctatattctgggacttttgaaaaaagcagttgcgtctggtataatgggatggagagagtagtgtagatgttaatatagggccaatttggattgctacctaccaaaattttggtagggtagcaaaccaaacacctctattaaaacactacctttgtcataaatttggctttgcccatgaacttgtgtcttatgggtatattttagcttcaatcctaatcaacattttcaactctttaccctacaacattttggtagggtattaatacaaacacaggcccatatttttctataaacttggtcaaggtttgagaagtttgacttataacaaaactaaaatgtcttatagtagtatggaatggagggagtacatgactctaggttaaactattcgttgatgattgcagttttgagaattataacacatttctccatttgtagttttgtaccataaattccctctgccttttgcagctatgactattatgtgaaatattgcaggttcttttgttgtgcgcataaaaacatgagctgcagattttatgcctgcttgttcgatcaagcggtttgaacattaaagagtgcaagcacgcaatagcctgggaaatacgccttgtagctgctcctttttctttctctttgttcttagaggcacctctttacttactgacttcatcataccttcctttgtgcacatcttaagattgggtgtaattttgtgattcgtgtgaacaagagaagacaaaatgtaatatttctcctgagatactggctagagccatgtaattttgttgtctagcagtggagaatgttttatcttgtatgtgatgcccgcgcacagtcacgattt

SEQ ID NO: 24221 - DNA, 2894 bp, Oryza sativa; identical to SEQ ID NO: 24220
  ref <308>: DATABASE ACCESSION NUMBER: AK099663
  ref <309>: DATABASE ENTRY DATE: 2002-08-28

SEQ ID NO: 24222 - DNA, 2308 bp, Oryza sativa
  ref <308>: DATABASE ACCESSION NUMBER: AK099664
  ref <309>: DATABASE ENTRY DATE: 2002-08-28
gacacgcacgctacctctctctctctcgactcccgagcaggcgactcctccctccccggcgattccgccgctccgaccgccgtctctccgcgccgcgcacgtgagccccccgtcgccttcctcgcacggactctgcccccgccggaatctcatctcctacgcctcaaacccccaccccgcgacgccgcctagccgcgattttcctgcggggtactccaccgcccctggaggctggagccgtgctctccggatcggcgttggattggtagcgctcgcgtcctgctctgtcgggcggcgatatgaagccccctgcatcctccgccgccgctgccggcgacaagggcggcggggtcgacccgtctctgccgcggttcaagtgccaggagtgccaacgcgcgctcgtcgtcgtcggcgtcgagtccttcaccgataagctccccgctcatgccgtctccggtatgaacgtgtcctctgttcagggcagcgttatgggtgctagcaggatggacaactcttatgtcgtgctatcgaagcaaaatagatcacatagccatggaattcccccacgcccgccaagcgcagggatcccgcgtgccgagccgaaccaaccaacaagagcaatggagggatcatatatagtgcttccacctgctgccgcttccatatacaagacatctgcctctgaaggaggtggtgcgcagttgtcaccaacaagtatgaaccccggtagccctttaccaggaaataattttcactctagcgtgactgtattaaaacgggcatttgagattgctacatcacaaacacagattgaacagccactctgtctggactgtatgaggttgctgtctgataaaatggagaaggaaattgaagatgttaatactgacaataaagcttatgaggcctgtcttcaacgtctggagcaggaaacctataacatcctcagtgaaactgactttcagaaggagagacaaaagattgaggaagaagaaaagaaacttaaagctgcaattgaggaagctgaaaagcaatattcagaaatttgttccgagatgaagtgccttgaaacaaaatctaaacagttcgaagaactggaagaaaggtattgccatgatctcaatagctttcagtttcagtggatatctcaccaggaagaaagagatgcggttttggccaagatagaagtttcgcaggttcatctagaattgttaaagcgtacaaatgttctcaatgatgcattctatatttcacatgatggggtgatcggaacaataaacaactttcgtcttggccgccttcctaatgtacaggtggagtgggatgagataaatgctgcttggggccaggctgctcttctgttgcataccatggctcagtacttcttcccaaaatttgaataccggatcaaaattcaccctatgggaagctatccaaaagttacagacatcaaccaaaatacatatgaactgttcggtcctgtgaatttattctggagtacccgatttgacaaagccatgacatggtttctgacttgcttgcaagaatttgctgattttgctgttagtttggataaagagaacaatgtaccacctgacaagtcattgaagctcccatataagattgaaggtgacaaagtagggagctatacaatcttcttaagtttcaataaacttgacaattggacaaaagcactaaaatacatgctgtgcaacttgaagtgggttctctactggtttatcggcaatacaagttttgccccaccctctggatctttacacgtagcacagtcttccaagggatgaagtcactggcttgtgatgctgattataagcgcatattggcaaatggcattgactaggctcgtttgtaatttacagtagtacatacagctagttttttttttccttttggccgccttcagttgtacttcctccgtttcacaatgtaagtcatcatagcatttcccatatttataatgatgttaatgaatctatatagatatatatgtctagatttattaacgtcaatatgaatataggaaatgctagaatgacttacattgtgaaacggggggagtatatatggttgaaatctgcacaggaaaaattgcagatgatggtgcaactcagcttatagtcggcttgatcattattcatgtaattatttagccatgtgtgacagaaaatgcgagtgatacgagatcctagagcaattcatgcagctctggttaggtgagtttgtgatggtgcaatcaacagcatatccaatcaacattaagatttataagagatgaaatgtcttcagc

SEQ ID NO: 24223 - DNA, 2814 bp, Oryza sativa
  ref <308>: DATABASE ACCESSION NUMBER: AK099665
  ref <309>: DATABASE ENTRY DATE: 2002-08-28
ccaaggccgtggcgctccagaagctgacctacctctcgtcgctccacttcgcccccgtcgcctcccacccgctcgccttcccggccatcgagctcatcgcctcgccgcagctaccccacaggcgcctcgcctaccttgccgcctcgctctccctccacccggcctcgctctccctcctcccgctcgccacccatcagctccacaaggacctctccccctccacctccagcgccgccaaccaccacgtcacggccctcgcgctccagctgctcgcctcccccgccgccgccgccgcgcccgacctccccgtccacctcgcgcacgacctcgtgccccacctctcccgcgggagcccccgggcgatcgcggccgccgcgcgtgtcatagccgcctcgccgtccgcggccgtgccggtccttttcaagccactggccgcgtgcctcgcgtcgcctgacccgcgggcgtcggctgctgccgcagctgcattctgtgagctgtcggcgccgccagccgatgctgctcctttcctgccgctggcgcccgacctctacaatctgctcaccacgtcccgctccaactgggcgctcatcaaggtgctcaaggtgtttgcacggctggctcctctggaatcacgcctcgccgcacggattgtcgacccggtgtgcaggcttctcgcgcgttctgctgctatgtccctgacgtttgagtgcatccggactgttctaactgccctgccggcacatgatgctgccgtgcgccttgccattgggaaggccaaggagttccttgctgctgaggatgatcccaacctgcggtaccttggcctccttgcgcttggtatgcttggaccggcatatgcatcgacgttgcatgaatgccgtggtgtgattgcccaatcactgggtgatgctgactcaaacatctgccgggaggcgttgcacctcatgatggggttgatcgatgacagcaatgtcacggacattgctggcatgctggtcagtcatgcttcgaagtcagacccagagtttgcaaatgacattcttggcgctgttctttcagcatgtgggcgcaatgtgtatgagctggtatcggactttgattggtatgtctcactcctcacagatatgggtaggaaccttcattgtgcacagggggatgagattggtcggcagcttgttgatgtgggactgagggtgcaggatgcacggccagagcttgttcattcatctcgaactcttctcattgatcctgctttgcttgggaaccacctcctttgtcctgttctttctgctgctgcatgggtctcaggtgagtatgtgaacttcacgaaggatcctgttgagcttgttgaggcacttctgcagccaaggatcagcctcctgccgatgtccgtgagagctgtctacatccaggcagtacttaaagtgatcactttctgttgcaatttgtatgttgagaggttgagtgattcaagcaaggaagtgtctgtagcattgaatgggttatctatggatcaaactgttagtgggggaagtgacgctccaattgggtctagcaatggacaaattacagtccctaggatgatggaaaaggaccctttttcacttaaatcggttgttcacatgattaacttgattggttttgtttattcgctaagagagattcaagaattgaagggaagcaagtttgatgatgataagcatagcagggtgaaggagcttgttaagaatatgcaaacagtattatctcacgaaatagggcctgtttctttaaatgcacaagagaaagtatcccttccagatgatcttgtcctgaatgaaaatcttgccgagcttgttgacatcatcagtgaagatgacactactctgtcatcttcaattgttttctaccctcgtagctgtggttcagtcgaaaccagagatgaacctgcattatcacttggttcatcttctcttctttctgagcaccgtaaaaggcacggactgtactatcttccaacaggaaaagcggaggatgggccagttgattatcctcatgccaatgatcctctgctgcctgctagcagcgaaagtgctctggatgataaattgaagactatccagcctgttaccggtgggaaaaaaccgaaggccgtcaagtccagaccaaaagtagtgaagttggatggtgaggatttcctaagttctatggtggctagtgcaagtgttccaaaagaagattctttatctggtgctgtacgtggtgtactgttgggtagagatctcaagccatcatcttcacaaaaggcttcagataaggcttacgaaggaattataaacaaaatggactctggtgaatctagttctcagtggaaaaataatgtagatgctgatttcgtaggccatcccacttcaagttctagaccaagtattcaacagagccatgataaagagagtacaaaccctcttgaaagtgatgggaaggaagcgagaaaacacagaagatctaggagtgggcatcgtcaaggaaaacataagcatagagaaaggcattgcactcaacctgatgtacctcaagctcctataatccaggattttcttctatagttgctgaggactcccttgtttttgatacatttctattgccaagtacatgttaccttttgttcattcacattcagcggtttttagttttcactttcatttcatggaagttatttagttggtttatctgtggcagctggtctaactgccactgttgtatcctgtatatctttcttgagcatagcacttgatgttcttcatagctccatggcaatatatttgttcatagtgt

SEQ ID NO: 24224 - DNA, 2166 bp, Oryza sativa
  ref <308>: DATABASE ACCESSION NUMBER: AK099666
  ref <309>: DATABASE ENTRY DATE: 2002-08-28
gaaggaaattcgcaggagaaatccctggaagcctctagagaccgcgcgaacaggagaccccgaggagcagagcagagcagagcagaggcggcgccagctttgggagctctcggattgatcaagaactggggatcctgagttgaatatgatatcaaatccggtgaattggtacagtttcggtcccggatagaatttgtagtgatgccagattggagggtgggcgagtttgaaggtaagctcaaggatggatttgctcggagcaataatagcgaacatgaaaatggagccgggactgtgagtatatccagcaagaagtcgaagcatcgggttgacagtgaaaaaaaaccccatgttgacatctctggggtgattgattcagattcgcagaaatgtaattcagagcaaatccattcagctaatgggatagtatcccgggatgtcaaccatgatcacatagaaaactgcaaagttgaatcaaatgattttcccttgaatactatctctgaaacaagatatccaacagacaattggaacagttctcagtttgctctgagcaatgatggttcacctgttctcaataatcagggtactccacaaactggtcatggctatggagataatgatctaacctacattgattggcctgctattgataattttgaggacgtcgacaacttattcaggaggtgtgattccacgtacggtcagcagcaacttccgaacacggatgaactgtcatggattccttcttcagatgccatgtactcttctgatgttgctatgcaaccagggtttgaatcctcgtattctgattatggtatcctggatgacctctccgcattcaattgtacggaagataaatccctgacaacagctgatccttcaagtgctgtatgtgacgagcaattcgatgactcttatctgttcaatgagcaaaaacctgaagatgtttatggcgaacaggcttaccaaagggatgcgatggaattgttgtccagcgaccagatatgcactgggcaggaaaacctagatatgattggaaatcgatattcatcggaaaatgccatggaacagcctgaagatcagaagttttctatagcttcaggttctcaactaagctcttctcagaatttattgaaccaaaagaaccacttggattcaacttcaccaagtaacataacttctgagtcctatccagaaagaaattgccagatcattccatctggggcttcctttgcagagagaaacttgaaggtgcagaagaaagtggccagttcggcatcaggacaacttatcagtgataatgtgactggacatcctggtcatcaaacattgacaagaagggcttcatatccttgtgagaatcatgaaattggaaagaggtccttaggaaaaagaggtttgggtcattctgatgttgcaatgggcacctcaatggtagttgatgggtccttcgtatcgtctatttcttctgataactcagttgaagagaacagctttcggcagcttcaggatgcagttagtcagttggatgtgaaaacaaaaatgtgcattcgagatgggttataccgcctggcaagaagtgcgcagaataggcaagtcttcccaaatacaatgaacaacaatggagatagccacaatgtaaaggacatgcaaaatgcagaaacttcgggaaagtttgttgatcctgggagcatcgagacacagacaaatccaattgatcggtccatagctctgttgcttttccatcagccatcagagcatgtcactggagctgttgatgaagcggcttcactaaagtcacataatgataaccaccaggctgctgctaaaaaccaaagagtgatgcatgcttcatctgtacattcaccaagagggcagggagaccccatggatgcaaaatcttgcagaaacaactgaagttatctcatgaagcttcaacaactgtgactgttaatattgtacttgttgctgcaaacctttctccgttttgatccgatcatgcagttagcagctgtgtagtgtgtactactactctagtcgattagtcaggtacaggcaaacttgtaacaccaatttaacaagttagattggcttttgaccattagctttgtatcttaattattgagaaggtcgtctgtgccgtggccattcgtgtctgttctc

SEQ ID NO: 24225 - DNA, 1607 bp, Oryza sativa; identical to SEQ ID NO: 15824
  ref <308>: DATABASE ACCESSION NUMBER: AK099667
  ref <309>: DATABASE ENTRY DATE: 2002-08-28

SEQ ID NO: 24226 - DNA, 2367 bp, Oryza sativa
  ref <308>: DATABASE ACCESSION NUMBER: AK099668
  ref <309>: DATABASE ENTRY DATE: 2002-08-28
tctctcatctcttgtgaacgattccctcctgcctcctccctccccgcacctgcacctgcacctgcaccatctccggcgtctctcgcggccggatccgccgcctcctcacccaccgcaccggcggcgccaccccaccgcctcgccctaccgcccaaggcctcccctccctgaatacgcagccccgatgaactgctcctccctccacaaaccccctaccccgccagatccactccacggccccaccccaacacaataccctaatccattcgccctctgtcgcgccggggaggaaagccaaaaggaggaggaggaggaggaggctcatcggcgcagggatgctcgagattcaccggcgacctcgttttggttgggggtggtgtgtgtctgtgtgcgagaaggctggaggttgaagaagcaacatggatggttggatttgtgaattgtgatcttactgccaagaatatttggggagaaatcaatcacctcatgttttgaagctggagccaacacatcaaacattgacccatggtccatcattggagatgaatcctctgtgcacgtcacaactgatcgctcatcctgtttcagtcaaaatccggttgctgtaaggatagaggttgtctgtgacgattgtccagctggtggtgttggaatatacaatccaggattctggggcatgaagaaaggaagacatataatctagtcatgcatatcagatcattagaatcggtggagttgacggcttcactcacatgctcaaatggatcgcaaaatctggcatcaaattttgttcgagaaactgatttgttaaattggacaaagatagagctgcagttactagctcatgggacatgcagaacttcaagacttgaactgacaactaggagaaggggagtgatatggcttgatcaggtgtcactcatgccttcagaaacatacaagggccatggttttcgccaggaactcatgtacatgcttttggacttaaaaccacggtttctacggtttcctgggggttgctttgttgaaggcaattggttaaaaaatgcgttcaggtggaaggaaactattggtccatgggaagagagacctgggcactatggagatgtttggcactactggaccgatgatggccttgggtattatgactttctccagacttgggtgctgctccagtcgggtgctcaacattgggatgagtcacagtgatgtagttaatggaactatgcttacaccttttgtaaaggtatgttttcgataccctacaattttttgaagtatggttgagatgaagattggcttctcatgatgtaacagaaaacagttataacttgtgaatattacataaggcattgcatttattgtcatcccatgtttattatttcgaaatactttgattttcttgctacaggatgcaatagacagtcttgagtttgcaagagggagtaaagaatcaacatggggctctgttagagccgcgatgggacaccctgaaccattcccactgaagtatgttgcactcgggaatgaagattgtgaaatattcaagccgacataccaaggtatttgtaagcgagtatgctgttaataatgacaaagggggtgatgctggcaatggaagcctccttgcatcgttggcagaagctgctttcctcactggtttagagaaaaacagcgatgtcattcagatggcaagctatgcaccactcttcgtgaatgaaaatgatcgcacctggaacccagatgcaattgtcttcaactcctggcaacagtatggaactcctagttattggatgcaaacatatttccgtgaatcaagtggttctgtgattcatccagtcactatcagctccagctactttgatttactggcagcatctgcaatcacctggcaggacaatgaggatatctttctgagggtaaagatagtaaactttgggccaagtgctgtgaaccttacaatatcttcaagtggacttcaagctggtgtaaatgcggcaaaatcaactgtgactgttctcacatccagcaacttactggatgagaattcatttagtgaaccaaacaaggttgtgccagttacaagggagttacccaatgctgggcaagagatgcagttcttactccttccattctcattgacctcatttgatctggctatgttttagaacacaagttgcagggtggtatattgggactgggaatgatgtaatgtcttaatatttatgcaacttcttttttttttatagtgagggctttatttgaactttagtatgtacaacaaatttgattttagtatgaaccacctcttttttaattttgctgacagaatcagcaagcctggcagaacagagagggattgtaacc

SEQ ID NO: 24227 - DNA, 1438 bp, Oryza sativa
  ref <308>: DATABASE ACCESSION NUMBER: AK099669
  ref <309>: DATABASE ENTRY DATE: 2002-08-28
gtggtggtggaggcggagcagcagcggcagcagcagcggcggctgaggcggcggttggtgagcgagcgcgaggagagcgagggaggagaggagaggtgggagggagtggccccgccgccgtcttcttggccggagatgggcgactccggcggctccgtcgtgtcggtggacgtcgagcgcatctccttcggcggcaaggaacatcatatacaaacaaaccatggttctgtatctgttgcggtgtatggcgaccatgataagccagcacttgttacttatcccgatattgcattgaatcatatgtcatgcttccaagggctactattctgccctgaagcatcttcattactgctgcataatttttgtatttaccatatcagccccccaggacatgagttaggagcagctccagtttcaccaagcagtcctgtggcatctgttgatgagttagcggatcaggtttcagatgtacttgatttttttggactgggtcctgttatgtgcttaggtgtcactgctggcgcatacatccttactctatttgcaacgaagtatagggagcgagtactaggtcttatcctagtttcccctctatgcaggaccccttcttggactgaatggtttcataataaggtgatgtcaaatttgctatattattatgggatgtgcaacatggtaaaagactgtttgctacaacgatacttcagcaagggagtgcagggatgctctgctgtacccgaatcagacattgtgcaggcgtctagaagttttctagatcaacggcaaagcatgaatgtgtggcggtttatccacacaatcaatgagagacatgatttaacagaaagcttaaaggagctgcagtgcagaactctaatatttgttggccagaactctcagttccatgctgaggctgttcatatgacctcaaagcttgatgagagatatagtgctctcgtagaggtacaaggatgtggatctgttgtgacagaggagcaaccgcatgcaatgcttatgccgctggagtacttcctcatgggatacggattgtacagaccaagccagataagctgcagccctcgtagccccttgaacccgttttgtatatcgccagaactcctctcgcccgagagcatgggggttaagctaaagccaatcaagacgcgggccaatcttgaagtttaggatcgaaagagaaaaaaaaaaaaggtgaaatgtgagaacttaggctaacccggcagtcgctgtactaatatatcttcctaagttttggaggcgagtgagttggttgttgttattgtgatgtagatattgaggaaaaaagcttaggttgaggcggggtttccattccattggttcgtagcattaaacagctgtaaattgttacagattatttgtcaaagctaaagagaaaataagggaagatgagctgttgccaatt

SEQ ID NO: 24228 - DNA, 2609 bp, Oryza sativa
  ref <308>: DATABASE ACCESSION NUMBER: AK099670
  ref <309>: DATABASE ENTRY DATE: 2002-08-28
gatctaacctccgccctccgccctccgccatccccacgcggccacgccactcacccaaccccgccgccacctcggatccgcgtgtggccgccgtctccgccgctccacgccgctcggagccgcgggccgcgttgccgccgctactacgcgcccgccgcttcttgccgcctcctcgtgcgcgcccgccggttccccactccctccacctcttcacaatctcctcccgttcgcaaccgccggggcacctccgcccgcgccgtccaccgcgcgtccgcacctctccgcgcggagtcactgccgccgagcgccggccctcaatccgcttgcatccgccggagatagctgcggggacgacttcaggacggccaccctctacctcacaagttgagttcgccctgtaagtttcctcttcctccttcctatgtgatcgattgaacaagaattagttgaatgcttgcttgttccttcgctagctctgctgtaatggagtggagcaaagttcaatctttgggtacaatattttcatttgttgggaggatagcaaggatctgataatggcaatatacaccgaaacagtgcattgcgctcaacatttgtgctctatttacagagttataaagtaaacaatagtagtgatgcatcaatcatgaaattctcatagctgtatggcattgcatttatatagcaatctggttagatgtgcactgacattaactttactcttaattatttacttgaattagcaaggtgataaggtcatgtaggtcaatcctgtacatgtatatggggattgttgtttgatgttttctcatacagccatatttcaattatatgtggtctatgcaagctcatatggttaattaattctaacaattcttccttctgcctggctgctctgatcttttcttactacatcgagatacaatcagatcatgacatgtctattctcttcgtccattgcaaaaaaaattttgtgtgtgtttgttaatcacttcatctttttccagattgtatataaattatgcttttaatcactccatcttctgccaaatttgtattgatgggtcagatggtgcatggaaacaggacgcggttctatccgccagtgaggaaagttgtgagatcatgaggagtggcatgcctaagttgactctcttgagcttgatatgatgtcctgaacatgcatgttcaggcatgaagattaacatcttgactttagttcaatgatgggtcattgtcattgacgatcacatggtccacagaggccttggtgtcttcgatctgccatgatttccaacaggttaagctttgtcatctcatcttctgaaatctgaacatttttatctctgcatttgtttctgatggtttaaacttgggtttggcactggatgatctggttcttgatcatttggtcatcatgtacttcaaaacttgcacatttggtattgaatgtagactcaaaacaggctctatatctatgtttgaaactacccagtcctaaaaatgcttgtaatacattacaactatctaatcctaaaaatgcttgtagtacataatttagaaattaagatggttctttcagtataaggtgatgtcatcagaattgcttcatgaagtacttgcaaagctatttatcaattcaatcctatgcttattgtaatccaacaatcttttgttcatcaaaatgaccctggaaatattatccttttactaagtgctgggattgaagcaggcgatatatatcgttaactttatattggattatctcaataaggccggccttatccttagttgtttactacggcttggttggaggttggccaaatagagttgttgctttcacgattattattattatgccattgccttgaaggtatgcatcatgtatggcccgatgaacgctgacactataatgtttgctgaattttcttacagtgctcatattctgcacgtgacattgaatccgatatattgcaggggctcagattggcgaggtacatcgaaacaattcaacaaggatgatataacaacttacaatatttcttgtttcctgcttcctatctatgatattcagatgctgattaaatcagttgtttggcaggaattatcaagtcaccatggtgttttacaatgtcaaatggcagatgtccaaaaacgtctcagattcagttccagaatgagacacagtaacaggtgacggaacacactgtcgtggttccatagcggttgcgtgcagagggcaagcagcttatgaagccaccccttgtttcatcagaggaactaacaaaagaaaatccagtctttacgcacggacgttgggtgttcagtgagcagggcgttgcagagctaccattgctacttcagcatgaagaagcagtcagccaacaacatcggcagcaagcataggctgaaaatgagaatgttaatctaattaaatcaaaaaattagttcatgttatgtcattcatttagtgtagttatagtttgtccttgtgtatgcttatactgccatcagcgatcggccaatctatgccattaggatatgcatgtaagaactcagaagtggtgtgcgactgtctattatcaattgaaaatcgcttgatttttttc

SEQ ID NO: 24229 - DNA, 2520 bp, Oryza sativa
  ref <308>: DATABASE ACCESSION NUMBER: AK099671
  ref <309>: DATABASE ENTRY DATE: 2002-08-28
ggcttctcctcctcctccttcctcgccgatcctcgccgccgccgccgcgcatcgccggagcaatctccattgacaagagcggtataggttggtgaggaggggagctagagcttgatggtggcggccatggagaagcggagggaaatccgggagcttcgcgaccggatggaccggacgctggcgctgcccgacctcgccgacgaggagttgctgagatctctcgtgaagaggcagattcttgcgtcgtcgctgtccgccggcaacgatgaaggcaatattgacctgattgctgaagcaaggtctaaagagatctcgaattttcttgaaatgctaaatacttcggggaatgaacgatcttcgaagattcatgaggcatcacataaagaatggaaggtgaagcaagacacggaccaattacgagttatgtatcgcgagggaccagaggggaccccatttcacaccctccttgctgaaggctttgctgatggaccaattgatgtttgtacatgtgtttcatgggaatcgtctctgtacaaaaaatggtttccacaatacaaccttccaacttttaaagttgctcagtcaggctgtttgaagaaggttcgggttggtgaagaaatttctttggtcagggtgaaggttccatggccagtttcggagagagaagctcttcttcactacttcgaattagagtatcttaaagaagatcttgtcattgtaatcatgaaaactatatcggatacggacaatataaatatagagacacatggatttagtagggatggaattcctgaagctggtgacaccgttcggatagatgtagtcggaggctttgttttgcaaaggattacaaaggagaaaagctttttcagggcaatagctaatatggatattaagctagacttcgttccaccatggcttatcaacttcatatcaaggcaactaattggcagcggccataaactctatcagaaggcagtcagtactgtggcaaattgtgatgaggattacaagaaagctttgagagaaccactctatgttagaatccgtgagcaccggggttctactgacatcgcaaatgtcactccagtggaggaaagggcaacagaagccctccctgacaatcccactttgcagaatgttctcgcggttactaatatcacctcgaacagtgagatagtcgaagaggagagtgaacagaaggcattattcaagctggatcatcatgcaataggcccttcaaaccctccggctgagcaagagcaacatgttgaaaataagccttacattagtcctgaggtagagcaggctttgaacatattggacaaagctattgcaattatccgaggcaacaatgctggaagtgccagtgtggtccaaaagtttatcggttacgatgtaactttagatggcagtaccactgactctagaaattcacacaatattccaaatgaacatcctgctacattgccacctcgagattcaagagagacccagcacacttattcattgtccaatgagaatgttaatcatagggagaaagatgctcttgacagtgactcgcaacgatacacaacagcttctaccgtaacaaaaactatgtccatgacaaggaggagcacgacacgggtgcacggagaagagagccttgacaccaatggcttacatcagaacgggttccacaaggacaaagagtctaaacgaacaaggaaaaggaagacaaacagttggctctgctgcttaacccctagcaccacaggatgatgagaggcccattcagtttgctgagttaaccattgaattttgaatgcactacacaaagcagtcttaatttataaaaaaattgatagtttgcggaatacacggggaatcgaacgacaacccaggtggcaccttgtgatagttaccaagagcagatccagtccttgataagttgtatagtagctgttgtattgttgtaacataattcccgatgatgtttctcgataatgcagatgctgggaattgtacttcatcatctaaaatgtgcaatgttgttttcatgagaattctgttatggccttatggggggttctaggtaggtacaatcctcatgaccaaacacatgatcagcttgttggtgctgatatcagtgaatgaaggaattgctatcagattttaatgacatgaacctcaccagattttcgaagtttcagtcatccttcagagattcttctgagcaacagcaacagtttgagtatggtccaagaccaagttgttgaatttcttatgtcggcagatcagtttgtctgctatttgttgaatttgatgtcggcaggtcagcttgtctgctatagagttcagttttgtttggtatggatttagcgtcttgtagatgcaagattgaacatagtgataatttgatgttttaccttttcgattgatgttttgactagagtatttgaggtgactttgaccattaacttttcatctctaaattaagatatagtaataaagatactataaagtatttctgatacc

SEQ ID NO: 24230 - DNA, 2416 bp, Oryza sativa
  ref <308>: DATABASE ACCESSION NUMBER: AK099672
  ref <309>: DATABASE ENTRY DATE: 2002-08-28
tggggtgtgtgtgggttggatcaactaccccagctactgccgtgccgagggaagcgggagcgccgccctagcgaccgcaactgcaggcgcgcatttcacgggattccgtgggctgtgctgtgctgtacagaccggcgacgagccgccgccgccgtggaggatcggctacttatctgacataaacaaacgaagatgctgctcgtctagttccctgatttggagattcatcaaatggatcatctcagtattagaaatcctttgtctcttctgctctcactgcagttgtcacttttgttgttcaatcccttgtctgtagcagacttaacctctgaaaagcaagcccttctagactttgcctctgcagtgtatcgtggcaacaggctcaactggagtcaaagcacatcattgtgttcttggcatggcgtaaaatgctcaggagatcagtcacacatatttgaattaagggtaccaggtgctggtctcattggagcaattcctccaaacactcttggaaagcttgactctctccaagttctgagcttacggtctaatcgtttagctggaagccttccatctgatgtgactacgcttccttccttacgatccatataccttcagcacaataacttttcaggagatttgccttcctttttgaatcctaacctaagtgtagtggacctctcctacaattcctttaccggtgaaattcctataagcttacaaaacctttctcagttatcagtcctgaatttacaagaaaattctctctctggatccatccctgatctcaagcttccaagtctgagactattgaatctgagcaacaatgatttgaaaggccaaattcctcagtcgcttcaaacatttccaaatggctcattcttggggaatcctggattatgtgggccacctctagctaaatgcttgcttcctgattcaccgacgccttcaccagcatccccttcatcagcaccaactccaatgtcagcgcatcatgagaaaaagtttggcgccggattcataattgcagttgctgttgggggcttcgcagtactgatgtttgttgtggttgtgttggttgtgtgtaattcaaagaggaaaggcaagaaagagagtggtgtggactacaagggtaagggcactggtgtcagaagtgagaagccaaaacaggagttcagtagtggcgttcagatcgccgagaaaaacaagttggttttcttggagggttgctcctataccttcgatttggaggatctactgagagcttctgcagaagtccttggcaagggaagttatggaactgcttacaaagctatacttgaggatggtaccgttgttgttgtcaagagactaaaagatgtcgtggcaggaaaaaaagagtttgagcaacagatggaactaattggtaggttaggtaaacatgcaaacttagtcccacttcgtgcttactactattctaaggacgagaagctcatcgtctgcgattatctcaccaatggcagtttctcaaccaagttacatggtatcaggggtgttactgaaaagacaccattagactggagcaccagagtgaagataatccttggaacagcatacggcattgcacacgttcatgcagaaggtggcgccaagctcacccatggcaatattaagtctacaaatatcctcctcgatcaagattacagttcttatgtttcagactatggtctaactgccctgatgagtgttccagccaatgcatctcgcgttgtggtcggttatcgcgctcctgagaccatcgagaaccgcaagatcacccagaaatccgacgtctacagcttcggcgtcctcctcatggagatgcttaccggtaaagctccactccagtcgcagggcaatgacgatgtcgtcgacctaccaagatgggtgcactcggtggtcagagaggagtggacagccgaggtgttcgacgtcgagctgatcaagcagcaaaacatcgaggaggagcttgttcagatgctccagatagcaatggcttgcacatcaaggtctccacagatcgacgcccatcgatggaggatgtgatcaggatgatcgagggactgcgccattctgcttcagagagccgagcttcctctgatgaaaagatgaaggactccaatccaccatcggtttagttatgtgctcctgtgttcatatgcctcaccaagctgcgagttgcagatcatttgattcttagctaatttgtgattgagttcatgctaaacatggtcgacattagatgcagcctcagaaagctgagcatattctgattggaacttatgagtcttgaattcttgattcttgacaagtgtaggatttttttctctgggaattttgattgttggaattgtgcattttgtggtgtgatttcattatttcggccgagtttagttcc

SEQ ID NO: 24231 - DNA, 2862 bp, Oryza sativa
  ref <308>: DATABASE ACCESSION NUMBER: AK099673
  ref <309>: DATABASE ENTRY DATE: 2002-08-28
ggccgctcattccatccccaccactcctaatgctgctcgcgatgccgccgctgctgctgccgccgctcgtcgccgcaccaccgcatcgatgctgctactgctgctgctgtcgtcgccgcgccgcatctgctgctgctgccgccaacgcgccgctgagaaggaagagaggaggaaggagaaaggggaagaaagaagaagggaaaaggggcagtttggtctattttttttctggaaatgcatccaagaggtaagtagtggtatcttttgaatatgtgtgaaattacaatggcatattttcaaatacatgaatactagtggtatattttaaaaccagcaaatttttaatggcatgtatccaattaacccttgtttgaatcgggtcaaggtgtcaaagtgacttggctagcaagggccaagtcgttccaaaggaattggagaaaaaaaaagatcaacaatgtatgcacacttcaacccatagaaaattttcaagaggtttgagtggatgaaaaccttcctatagtttttctgtacaacttgtaggaaaggaatttttcttttggtttttctatgtcaacatttttatgaaccgaacagcatttataggaattaatctttagaaatttaaattttttaaaattcctccaaaacgaatatgtggaaaataaaacaaaatgtattagatacatcatatgcaatttatgcatgttagccaggtttatcaaatggtttttgctagatttattgcgcaggcaagaggattcaagcgcacgaccttgagatttttcagtgcaaagctgctagcaaatcggatacccgccattatttgttagttacatacaagttattgctgacagactatgcccgcctatggtattcaaagagaatggtgatcgttggtgttagggtatacgtgagattgaggtaaaaaagacattagacatggatttttatataggttcggacccactacttgatgggtaatagccctgttcctgttgggcaaagccaatgttgcctttgtatattaatatctcacgagtacagaatatgggatgacctaatctaatccctatcggcctagcggcatggagctctcacatgtggttgatggctagtgtagtcttcttcctctaatatgaactcggcgagattgaaggtagctctaaatccctcatgtcggtttttgtggcttctacattggatttatgtagatatgccttcatttcgtccctctctttctagggggccttgtatttataccttcagatatccccttgtttaagtagaactaaggaatcaactatcgtatagattaggggtgaaaacggcacagaaatatccgagaattccggctaccgtttccggtttgcaccgactgtttcagtcggtatcagtaattgtcggtatcggaaatgaaaacagtaatctcttccgaaaatggtagtagaaatgatatgggcttttttccgaccgttttgtcggtaaccatttttatcggtaatttccgtcaaattttcgacaaacttctaaagaaggaagccggctgggcctgtatagctggagcaggagcagcccattaggcatttaggctgggaagaaaaaccctagggcgtcagccggcgtgtcacttatccttctcatactctccctgtctcgcgactctcgctgtctcacactgtcgcacagctctgtgccgcctctacctccggtgaccgccaccgccgcaaccacgtgtccacgccgccacaccgccgcttgctagtcctagccgtcgcatcctcgcgcctcgccgcgtcccttgccggagaagcaagatggcacctgccggaggaaaacgccgcacccttctggatccatccgacggcaacaacagagacagaggaacattgagttcgccaccgttgtgtttgctaggtccaccaccaccaccaccaggtatagccgtataggcgtatagcttgaatgcttgagcatgatttttttacatgtatagatgaatgcctgagccttgatgttttttagcatgattttctgttgatgtgtgcaagcacgatttctgtagatgtacagcttaatccttgagcatgttttttttagatgtatagcttgagccttgtgttaatcgttaatcacttcctcatttttttaaaatctcaatctgctgcatctggaagtgccagtggaagtcatcatgtgggtgtgactgcatcatcatctacacctgaatcagcggtacctccaaccattgccacaggtacctcacaaacaattgagattgatgctgatgttaatagggttgatgacaatgatgagcgtcctgtgaaaaggaaaaaattgacatcagaagtctggcagtacttcaacaaggaaaaagtgagtatagatgagaatggtaagatctataaacaggagtgggcacattgcaaattcaagaattgcacttacaaaggtagatgtgagagtgccactggaacaagcggattttggagccatctgaaattacatcacagtgttgtcaaagggcagcaacaactcaaagctcagaaggaccaagagaagggcatcaacgttgttgaaccttacaagtatgatgaggaagctagcttgaggaagttatatgtggcaataatcatgcatgagtaccctttcaatatggttgggcatgaatattttcgtgatttcattacatcgttgcgccctaactttccattgaaatcccgtgtaacagttagaaaagaaatattgagcatctatatgcaggaaagggataagttgtatgaatatctcaaaactgtgaaatgccgcattagtgcgaccatggatatgtggacatccaatcaaaacaaaggatatatgtgcatc

SEQ ID NO: 24232 - DNA, 3465 bp, Oryza sativa
  ref <308>: DATABASE ACCESSION NUMBER: AK099674
  ref <309>: DATABASE ENTRY DATE: 2002-08-28
ggctctcgccgtcaccctcacccacatcacaagagcgcttcgcttcttctcctcttccgcatcgcatctcatctccttcctccaacccaacccaacccaccgtactagtattgactttggtttattttgccctcccttccattgattctactcctactcctactacttttttttttgtttttgtgtttttgtttgcttctactagactactactactccactcgtctttgcttgccttttgtcacccactgtttaacctcaattctcgtgctctgggagagagtctactactagggatgggcaccggcggcggcagggtcgccctcgacggcggcggccggcgccggaggaagctggacgaagaggatgatgaggagtatgtggcggacgacgacgaggaggaagacgaagacgaagacgaggaggagtaccaacaggccgccgccccctccgacgacggcgaggaggggggcgacgacgaagcggagccggaggacgaatctgatgcggatttcgtcggggacgaggaggaggaggaggaggacctcgaagacgaagatgatttggaggaggtcaaggcgccgcgccccaagcgcccgcccaaggggaagccgccgccgagatctcgccgtcggaggcaaaaggacgacgacgatgactacgaagaggaggaggaggaggacgccgacttcgatccggacgtggacgaagacgacgaggaagaggtagatgaagatgaagaggaatttgagcaagatgacgacgattccgatgattttgccccgattcgcgtcagaaagaccagcaccaagaaccacgtggccaagcggaagccaccacccggccgtaagaagaagaagaggaaaccttctagggtttctaaggcaaagcctaagaagcccacctcagggcgccgccggaggaagcgatgggccaccgatgacgacgaggaagaagaggacgatgcggatttcatcgtggaggacgatcaggaagaagaggaggacgaccaccgcccaaagaagaaggccaaggctgctaggaagaccagggatgtcacgccggagccggatgtcgaggcaagcgcatggccggccgtcgaatcagacacttcagaattcgaattcgtgacatctgatgaagaagctgctgacaaggaagcaccagccgctgaaccagcaaaaaccaaggggaagaagggcaggaagaggtggggatctgggtcagagtcatcatctgattctgattatgtcatatcagagcaggaactgaaggatctggaagtctccatgcctccagatgcagctctgcaatcacctgcaaccctgccgcgccggacctttctttcaaggagggtgggggagaaggggaaagagcctgaagaggcttggaaacagacatgtgggatatgcctctcggaagaacagagagccacgatacagggtgtgcttaattgctgcgcacattacttctgcttcgcttgcatcatggagtggtcaaaggtggagtccaggtgcccattgtgcaaacgccgattcacaacaattaccaagtcatcaatggcagatctagggcttggatcaaggaaagctgtcattagggtagaaaaacgtgatcaggtaatggcctccttgtcttattgctatctattttcttttgcgaggattattgctattgaatttaatatttgcaacgtatcaaaaccgttatccgttgtatggcacttgcatggaaactcatctatttgtcagtgtcctctaactagttattgcaagagacatgactatctgaccccatgtgaaataccctgtggctgtatgctcttacatttggctgttattttcagcagtaagtgttctagtttctacctgtgacacatcacacatccaaaattttcctttatagataaaggtttcagcagacttagcatgtgattttagggataacagatccataacttttagtttgctattttgaatcagagttcagtaatgtaagttgctgactgtcatagatttatgcccatataaatatcttgccgtagcttttctggtgcacacatatatctgttgggagtaaataaaaggtagccttaattagctttcacattaagctctcatgatcagcaaccttttgattgttatggctccatgtttagccttagaattactgacatccagaaaaatggtaactatataaggttgggggcagttgcacgttgtcatattgttacattctgttgaatcgccaaatgcagctgtatcatttttctttcttgaacaggtgtatcagcccacagaagaggaaatgagacgttggttggatccgtatgaaaatgttgtatgcatagagtgcaatcgtggtggtgatgacaacctcatgctactatgtgatatttgtgattcctcagcacatacctattgtgttggtctaggaagacaagtaccagaaggaaactggtactgcggaggatgtagatccggtggggagggcccctctgcacaggatacggtggttcactgcagagaaagtaataccaaccctgccaacagtagttctggatcatttggctcagccacaccaagtggagtgttccagagaccaccaccaatcaacacccaaccttctctacaaggattcgatctaaatctctcaccaagagaaacccctgatgaagataagcgagaagagtcacatgtttcagctgatgctgtttcgactcctactggaaggcatgccactctcgataggaggcgggcctttaaccgacgaattcgcatccttctatttagaccaagggtcacacctaatgggtggcagaatccgattcagtctgacaggacaataccagagaatgaacaaaatccacagagcacgtccactccaactgaagtgaacccatcatgttccagggatagttctatgcagaaccagcagagtagctcatcttttgttcagccagcaaggggtcttattgaacgcacctatgggggtggaagcaatttccaacaaacagaaggtgctaaggaacagctgattcctattgtcaagaggaacctcaaactaatgtgtactcagtccgcattgggtcaatctgatttcaagaatgttgcacggagagcaacacacactatcttagcactgtctgggattgcacacaacgaggattttgttgtcagtacgcctcatcctctccctagccattgtaaccatgcctgtgatggtcaggaaccagcatttctcatgagaacctgctgctcatcatgcttcaactcctttgttggtggtgtcgtcagttacattgcagaaatgtttacctgaagatgctgccatcatctattgacttgacaatttttctctattgttgtcattctttcaattataaacagatcaaaagattatacaaccacagacatgttactcaatgtatggatagtttaaaatataatgcatttttaatgacgc

SEQ ID NO: 24233 - DNA, 2879 bp, Oryza sativa
  ref <308>: DATABASE ACCESSION NUMBER: AK099675
  ref <309>: DATABASE ENTRY DATE: 2002-08-28
ggcgctgctgtttttttccccctcctcggcggcgattccactgcctcgccgtcggcggagttggagaagaaggcggcggcggcggcggcgcagaaagggtattttgtattagggatataggcaatgcaaaactgcaagctgcaaagccatggccatccaagataaagttgagaacaacgacccaactgtgactgttgggttggccgtgagtagttccaaatccagtaagtacgccgtgcagtgggctgtgaaaaacttctgcaccaatgggagtgttaggttcgtgcttatccatgtactgcagaggatcaccacggttccaacaccgatgggcaactatatcccgattgataaagtacgggctgacattgccagcgcatatgtgaaagaagtcgaatgtaaggcccgaacgatgctccttttctacaagaacatgtgtgatgagaaggctaaagctgaagtactggttgtcaaaggtgaagatgtggcagaaaccatttccaatgttgtttcaatgtacgaaatccacaagcttgttgtcggtgactcttctcagggcaactttattaggaaatccaagggtactaggacatcttctcaaatttgcagaagtgttccaagcttttgtgcagtttatgttgtctcaaaaggtggtttatccgcagtttattctcctggatttgaaggtcacaagagttctgagctattcctgtccagtgatagctccaaaactgaaatccattcagatgataagccctcattatcagatgccacaccttcgagaagctttagatcaaacttgacatgggagaatctggaaagtttatcatccgcagaccatgatagaccgcgctccttacatgagtatcttactgaaagcacttcagcatctgttggtgataataacagtaattctccatgtgctagcggtcaaacccctcgaccaagtagcgtgcttatctcagataaagctccaatgacaagcagtcccctgcaggaattgatgctttcagaggacatggatgatgtaaatagcgagcttgaaaagctgaggcttgaacttaggcatattaaaggagtgtgcaaacttgttcaggatgagtccatcaatgcttctcagcatgtgactgacttagctgcaaaacgtgctgaagaggaagcccggctcagcgaggtctactccaggatcaacagagtcaatgagcaagcacatcaagagaaggaacaactgaacgctttggaggctcagtgcaggcatgtgagggatcttgcaagaaaagaagctttgcagaagcagattttgcagctgaggacttcgaaggaggctgataagatgcaaaggctggaaaaacttcttgaattagatgggatgtcatactcaacatttacatgggaagacattgaatctgctacatcatcgttttcagaggcacttaaaattggatcaggatctaacggaacagtgtacaagggcaatctacgtcagacatctgttgccataaaagtcctcacttctgacgacagccacaggatcaaacatttcaaacaagagcttgaggttttgggtaagatccgtcacccacatctgctgctgctcataggtgcctgtctggacagaccatgcttggtgtacgagtacatggagaatggcagccttgaggatcgcttgcaactcaaaggaggcacggccccactcccatggtaccaacgtcttcgcattgcttgggaaatagccctggcccttgtctacctccacagctcgaagccgaagccaatcatccatcgtgacctcaagcctgcaaacatactccttgatagcaatttcaccagcaagattggcgatgtgggcctttcaacattgcttccgctgggggatgccttgtcgacaacgcgcacaattttcaaggacacagatctagttggcacactgttttacatggacccagagtaccaaaggacaggccaagtgtcaacaaaatctgacacatacgccttgggcatggttttattgcagctgctcactggaaagccacctgtggggctagcggaccttgtggagcaagcagtagaaaatggtcaccttgttgacatcttggacaagagtgctgggaagtggcctgcacaagaagcacatgagctagcgcagcttggcctaagctgtttggaaatgcgaagcaagcatagaccagatctgaagtgtaaggttcttgtggagctggaacggctgaaaaaaattgccagtgctgtctctgaccctgtacggccagtgatatctggaccaccaagccattttatctgcccaatactcaagaggataatgcaggacccatgcattgcatctgacgggtactcgtacgaccgggtcgctattgagatgtggttgtgcgagaatgacaagtcaccgattacaaaatcgcggcttcctaacaaggatttggttcccaaccatgctctgttatgtgcaattacaagttggaaggcagaagcaagggactgattgagtgattgtgctaggtaacttctctaacttcacatggatacggcactcgaaggctgatgatgtacatgtttttgccttggtgatggcctccttaatctctaatactgtagatactgcggtaatgttcttgtaaagcagcagttttgcagcattttcatagaccatctctgagataaattttgaagggtttagagtaggagtatcaagaaggtcattttgtaggttggaccagcagaaagtacagtagtacacttctacagtattgctttgtgatagtttatacatatacatcgaaaggataggaaattcctcttactttcttatcttagtattgtgatgactactctataaatttaagagttgagacaaatttccggcg

SEQ ID NO: 24234 - DNA, 1220 bp, Oryza sativa
  ref <308>: DATABASE ACCESSION NUMBER: AK099676
  ref <309>: DATABASE ENTRY DATE: 2002-08-28
gcctgaggcgccattgtttgcgcttgagataaatcctgagaaagcccgagaagagtttcgtgcagcaagtcagaagaatggagggactggggtaaaggacttcatggatggcatgggactgggagtgcttgctgagcagctgggggagttaaaactgggggagttattggacacaccaccaccaggattggatgaagcaatagcgatttcaaaggttatgcaattccttgaagcacaagagtatagcatgtttagacgcattgtttttgacactgctccaacgggccatacactccgtttattatccttgccagatttcctggatgcatctattgggaagatcttgaagcttaggagcaagatcgcttctgcaacatcagctattaaatcagtttttggacaagaagttcaacagcaggatgcagcaaacaaattggagcagctgagagaaaggatggtccaagtgcgagaactttttcgtgacacagaatcaactgaatttataattgtgactattccaacagtgatggcaataagtgaatcagcaagactacattcttccctaagaaatgaaagtgttcccgttaagagactcattgttaaccaaattctaccaccttcgtcatcagactgtaaattctgtgctataaaaagaaaggatcaaacacgtgctttggatatgataaggaatgatccagagctaatggggctgaacttaatccaagcacctcttgtcgacatggaaataagaggcgttcctgctctgaagtttttgggcgatatagtatggaagtaacttcacaatggaaaatacgataaacttcatcacacctacttattgaagtgctttgcaatgcaaactttggtagctgcaagtatcagcatggatagagctagaatgcaagtgtgcaacttagcagatgcccaatctcatgtgagtaagtagcatctcgctgaaggtttgccggaatagcatatactagggggattgtgttctaaaaaaaaagggggggggattggatcaagctgcactaatatcaagtccattgaggcaacatgccggtgatatttctgcttctttatccctttaataggagcgattctgagggttttgagtccataactttgcactaaaattaattttgttcgtgcatcatgtaaagtcggttagagaatgaagaatggagaaaatcagacaacacttttaagtaaattttctt

SEQ ID NO: 24235 - DNA, 3405 bp, Oryza sativa
  ref <308>: DATABASE ACCESSION NUMBER: AK099677
  ref <309>: DATABASE ENTRY DATE: 2002-08-28
gacacgccgtctctctcaaaacaaaatagaagcccaatacagccagtacaccaatccccccactcccggtcccctcggattccgcccatgccgccttcccgccgagagccctagccaagcccgctcgctgcttgctaacccccctccgcgcgcgctcacccgagtcctagggttccagcgagcggcgaggaggtagctcgttcgcgcgcgcgtcaaatcccatggcgggcgccgccccgctgcgcgactccctccgccgcctctgcaccgacgtcggctggtcctacgccgtcttctggagggccacccgcgccgccgactcccagcggttgaaattggtgtggggggatgggcactatgagcgggcggccggagcgccgtcgatctccggcttcgaggccatggacctgctgctcaaggagaaggccgcggcgttgcggagcggcaccgggcgcggtggtggcggcggcgaggggcacgcggctgatggcgccgcgggacacagccatgacagggtggacgcgctcgtgcacaaggccatggcgcaacaggtccacgtcgtgggagaaggggtgattggtcaggctgcactgacagggttgcatcggtggatcgttcacgatattgttgatgagtgtgaggaagaagatgaggtattgctagagatgaagggccagttttgtgcaggaatacagacaattgcagtgatacctgtccttccacgaggcgttattcagcttggctccacaaaaatggttatggaggaagcagcatttatagatcatgtcagatctttgtttcagcagctgggtagttcaactgcagttgttccgtgtggttcctttgtacaagattcgattatgagaactccatttcacaaatcacttggtgtgcctacctcttcgcactcggaagaccttgctggtggtggaaatacttataatgatgacatgattaaccaccagttcaggcatcagaagtcaccagcctcgacaattcagtcatttaaccctgtacaacagttctatgctgggcctactttctgtcgtccagtaactattgcatcacgttgtgatctcttccaacctgaccatggatcaacctttactttgaacagtcagtcagaggacaatagatcgacagctttactcaaaaatagtgtttcacattctaaaacatcaaatgatgccttttcacacgcttttaaccccctcaatgaacccaacgtctccatttcaggcagaagagagtgtgtaagcatagaacaacatggttcttgccgtaatggagaaatggaaataacaataggccgcactgcttcttcaagttgtacaggcaaaacaaatattatcaataaagtggatgatttgctgagtcaggattgtttggtaggttgtcaggcaagcaatgccacatctgtgaacagaaagtttcagacaatgtccattgttgataatacaaagcttcaagatggttcttatgcaattccacatgctgcacttgttgactctacccaatattcagactgctttcaatcgcttcttggcacaatccaaggtagttcttccagcaattcaaatgcaattcatgtggatacttctcataatgctgtccatggaaagagtaacttttgccctttaggagataggaatgctgctaattcaagtgacttggctgaacttctggcatcgccaataccattagagttgactgggggaaacgatttgtttgatgtactgcaacttcagcagaagccaaatggttcaaataatagtgaagtaaacaatcgtcaatcaatgccttatggttcagagcaagctgttaagtctctgattggatgtgtggatgatgatttcactggattgatcacagaagctgatccagaccagctcctggatgcaatagtttcaaagataatcacagggcacaagcagaacgtggataccagtgcttcttgtagtactacagtggcaggctttgacagaccacttcattctgattgccacctatatacaccacaggaccatcatcagggccaatattttgtaattttgccagtgttgctcctgtagcaattaaaactgaagggcctgctgcaggttccaggcaatcatcttctagtatagataaatctgcaggatgctctcagacacaggaaagttacaaatcacagataaggctttgggttgagaataaccatagtgtaggatcagatagtctttcaactggacaagcatctgacagtctttcaactggacagtgtaaaaggagtgatgaaataggtaaatcaaaccgaaagagatctagaccaggggagagtgcaagaccgaggcctaaagatcggcaaatgattcaagaccgtataaaggagcttcgtgaaatagtacctaacagtgcaaagtgtagcattgatacattactggagaagaccattaagcatatgcttttcttgcaaaatgttgcaaagcatgctgataagttgaagggatctggggagccaaagattgttagtcatgaggaaggtttgctcttgaaagataactttgaaggtggtgcaacctgggcctttgaagttggtacgcgatctatgacatgtccaatcatagtagaggatctcaatccaccccgtcaaatgcttgtggagatgctttgtaaagagagaggaatcttcttggaaatagctgatcaaattagaggtttagggttgactatcttgaaaggtgtgatggaagttcgtaaagataagatttgggctcgctttgctgttgaggcaaacaaggatgtaactcggatggaaatatttctttctcttgtccatcttctggaacctagcactgggagctctattttgtcagcaggtgttgagaacactagcctgccgcgcgatagtttctttccatcgtctattccagcctctggtttctccaactgcttgtgacacgatgtaccatacctcagcaagtggagcgctgtgagtgggtaaagtttcacctgccgtgaccttttctccctgccttgttctagctgccacagatagttacgctgactccagtatcttgttgcctgtctccacggctgacgttgtggcaaattactgttcagtaagggagagatgtgtgttttgtcctaaccttaaactacatcgcagccagcctttgtgagggaagaagctttagcgtaggaaattgttgttttaggcaggctccacaagtgtaagaaatgcagtacataaatgattagagatttagagttaggatagcatcaggtttttctgctatgtaatatctgcattcatgtgcccatttggctctctggatctgctaacctggttgtgtatttgcagttcggtctttttcctctgttcagcaagtaccacttgaatgagtgcctcaccattttttactg

SEQ ID NO: 24236 - DNA, 1048 bp, Oryza sativa
  ref <308>: DATABASE ACCESSION NUMBER: AK099678
  ref <309>: DATABASE ENTRY DATE: 2002-08-28
gatacagcctagaacaactgcttgccaaaaaaggaaaagaaaagaaaacacttagtgcagaaactgggaattgcaatggcgggagcaagatccgttggttctctcccagtgcctaatgtgcaggcgcttgcagaaatttgcaatgatccagatgaacacatacctgaaaggtacatcagaccagaggctagttctgaggaggtcatcaacaactaccaaggtgacatggcgattccgatcatcgatctcaagaaattgctttgtccgcaatcatcagaagaggagtgtgtgaagctgagatctgcctgccagtattgggggttctttctgctcattaaccatggagtgccagatgaagtgattgcaaacctgaagagagacattgttgatttctttagccagccactggacaccaagaaggagtacacacagctaccgaatagcctagaaggctatggacagagctttgttttctctgaggaccagaaacttgactgggcagacatgctgtatcttcatgtccatcctagcgattcaagggacctaaggttctggcccacttctccagcatctttcaggcaatccattgatgcatactcatcagagactaaaagcctggcactctgcttgtttgagttcatggctaaggctgtgggcgctaagccagagtcacttttagatttatttgaagagcagcctcgaggcttaaggatggcctattacccaccatgccggcaagctgacaaggtgatgggcctttcgccacactctgatgcgggtggcctgacactgctgctcgagattaacaatgtgcagggcctgcagatcaagaaagatggcaagtggttctccatagatgctccaaatggtgcacttattgctaacattggcgacacacttgaggtaatgaccaataacaaattatgctttcacatgtcgaaggaccttgatgtatttggatgagttcaataaaagctcctattatctagaaaacttgtcaaagcaccaaacaaaatacctaagttcaaattatttatattcttgagtc

SEQ ID NO: 24237 - DNA, 2856 bp, Oryza sativa
  ref <308>: DATABASE ACCESSION NUMBER: AK099679
  ref <309>: DATABASE ENTRY DATE: 2002-08-28
gtctcactcctcctcgcgtcctcgcaggagcgactcctcgctgccgccgctcctccgcgtcctcgccggagccgacgcggccgtcctccttcttccccaccgccgcggctgtcctccttgctcgctcctcctccgccccgctgccggcgccgccgcggccgtcctcctcgctcgctcctcctccgccccgctgccggcgctacgccgcgtcctcgccggagccgacttcggccccttctccggcgccggaaccgacctcgacctcggcccctagagtacaagtcccaaaaatcctgtgtctttccttaatcttttctgtacgtgtgggaattttaatcttcttccttcttgagcattggcctgtagcatttggtagttgaaaacacgacctgaaaacaagtgaccatgattttccttttttgttgaagttagtgaacaatcggataattacattgaggtgatcttcttttgtgaacttttgaacaaaatttttaacaacggttgctgtaaattatttactatggaagcaattgtatgatgctgctgttgcaaatgaaaacttgaaaatgtgactacattgcagggtcatagaagcaattgtgcagggtctgccaattgtgcaatttttttgtttgtcagctagcaattggttgacatgcatatcacgttttgtgacttactgaaaatgtctgccaaactgctgcatgttacattttgtgaatttttcaatgacttcgaatgtggctcaaatacattctgcctttgattccactttaattcccctatcgatgtcaacagcatatgaccatgtcaacaatctccactggttgaattatctgcaggaaatgtacttgaattatatccaggaactaactaataattcacagctgttataatttgcagcacgtgtgtttgatttgatgcaggtgatcgtcaataggtccagtgggctggagctaccaattcatctaggtcttgccctggtagtgctccacttccaaaattacctgacaactacaacttcttggtgatagctgctgcgttgaaagagtctggtcttggatcttcttggttttgacttgaccaaaagcaatggatagtcaggtcatgtatattactgtttcatgttacacacactggttgtttcttttaagactttctatcaattttacttgagtatccgttttggattaaacgaacaaattttcctgctgaatttcttcaggcacatattcctttagaagaaacatctctgcatgctttgctttgttgagttgataaagtgggtcaaaacgggagtcctaatgtgcaagcagctggtcaagaagctgaggatatcccattccaaaaaaaaagtgccttctttgtatgtaatcaagtcatgcagacttaatctttgatcaagccatggtcggtaagaaattaattcgctattatatatgctattatgaacactagcttgacttctatgccttgactcttctggacagatgacagattttgttactatctgaatttgtcgtatgaaaacgacaaatttcattctcacaggcataattgtagactatcaatactttgaaaaggtagctttgtccagaggttcgtagtaggtataacattttttttctcgaatacggtaggctgatagcatttatctactcattttggtgatttcagttagttgtgacaacatgagcagccgtcaagaagaagaaagagcatgaattccatgactaaatcttgtggtctattttgtaaatccattacctcagtaaaacttttagcacccgatctgcatatcataactgaatatccacctattattgtggcctaccatttcattttccaattctatgctctagaagtttggaactactacatgcacaatttcatttttcttacactgattctgctgcatgcattttcttataaagagaccttttcaatggcataagttttcatctgaattctcaatgcatcttgcttgatggatccattcagcataatctgatggtacgaggcatgcacttcataagtatgatgcaagttatgttagttcggggtttgccgttaagatcatagttaggggggaaatattttcagtgttgctagctagctcgagggaatggtatgtttcgaaacaaacaagccatctgtatttgcagtttgatattctggtttgcctctaaaatcttgggtacattcttagcagaaatgcttttcatgcgttttaagaagagagcttccatatattttagttatatctgtatttgctgttcgatattttattttcgcaagttcagttcatgtatggctttaagaagttttgtgggacaaaatctctatgtatactgtgtttttctgaacaaggtgaaataatgttgctccatatggagatgggatatgccctgtctagctaagttataagctgtgaattgtagatttgtagaagctgttccagaatagtttactcttgttttacaatgtcaagtctggtttatgaggtttgtatctaattcaaattaatgtttttttttgcggggacaaattaatgtttttttagcaaacacatatgcttcagttttattatccttgagcaaccaagtttacaattgtgtcgttttgagaatgcaatactgcaagagtatttgacaagacttacttgattttcatggatatgcagtcagacacaggagtctagcactttgagatgtccttctctaggagtgtaaattgacacttgacagttttacgtattttgtcaactactcaaaccaatatcaatttgtattgcagaatatttgtaaaaaaaactcaaatttgcatgtgattagtggttgataaaattttgccttc

SEQ ID NO: 24238 - DNA, 1915 bp, Oryza sativa
  ref <308>: DATABASE ACCESSION NUMBER: AK099680
  ref <309>: DATABASE ENTRY DATE: 2002-08-28
gtgcctccgcgagccgcggccatggagctcgccaccgccaccgccgccgccgccgcctcctccaccacccgtgctcaccgaccccgcagctccaggctcgcagtcccgacgagggacagctgctccctcctcccctcctcttcctcccgccagttcgccgcgctctccacgtcggcggcctccaccgcctcgcggtcacgggcgcagaggcggcggctccccgtcgcctcggccgccgtcgagctccgggaggcctcgtcgcagggcggagactccgtccgcgtcaccgagacgctgcagcccggctccagtgtcaagttcagtgtggaggtgcctccttccatatgccagcaatgctatgaaactactctacaagagtacgcaaagcgcttcaagattcctggatttcgtcccgggaaagtagttccagagaacgtacttataaactatgtaggaccaaaacacgtacaggatgctacagttgaagctatcttgaggcatacacttcctcaagcattgtcctcggtagaggacagggcattagaagattctgtacgcattctaacaaagtttgaagatatggcaaattcattctctcttgataatgtgtttagatatgatgtttctgtggatgttgcccctgaagtgagatggttatctgaagataaatataagaacctcaaagtggtcgttgaaatagatgaaattgttgatgctgaaaaggcagctgagatagaacttaaacgtcgtcataaagctctaggattactccgaatagttgctgacagaggactgcaggtaggtgatctggtggtactagatatatttgcagaaagtattaccagtgatggctctaaaggtgaaaaaattccatcagctgagagtaaaggtttccacttggacactgaggaaaacaataaccttgttcctggttttcttggttcgttaattggtattcgtcctggtgagactagatcatttcctcttcaattccctgagtcctttgaacaagaaagtctgcaaggtgtccgtgctcaatttactgttgtgtgcaaagagctcttctacagagagttgccagaattggatgactcacttgctggaaagctccttccaggctgcactaccatggatcaggttcgagaacgcattttgcaaagatgtaaagaagtggagaaaacagcaatagaacaagcaacagataatgcaatccttgatcagcttggaaagttagttgaagttgatgttccacgagccttatttcaagaacaaggccagcagttgtatggagccaaacttctacaactccaggcagaaaggaagctagataaagaccagctggcatccctttcaagccaaaagtcagttcaggaatacctagaaagtgagagagaaaatattaatagaatcattaaacaaatgttggctgttggtgaaatattcaaggctgaaaatctgcagttttcgaccgagcaactggtaaaggaagttgagaactctatagaagagttcaaacactataatcaagactatgatgaggggagcatcaagcagcaggttcaggatgttctagaggcagcgaaggtgctcgaatggctcaaggagaactgcattattgagtacattagaccatgaatctagtgtcaaagacagctggtgtgaaaattttgctgagttactttggttctactcgtacagataaaatgaagccttgtgccaactcattgcctaccgatggaatgtaaagtttgctttttatttatagcacaataaagagatatggttcacaaatagattgcaaatttccttcaaattctttgtattatatgtctataattgaacatggtacagataattgtcccaaaaagttgataataaggaatgaatgatgcgttgtgctactttttttttaggg

SEQ ID NO: 24239 - DNA, 2097 bp, Oryza sativa
  ref <308>: DATABASE ACCESSION NUMBER: AK099681
  ref <309>: DATABASE ENTRY DATE: 2002-08-28
ttgacgaccaggtcgtctaacgactccgcccctcacccaccaccccacccatcgcctccgccaccggcgagaggaggcggagctgcgcgtggcgatgaaggggtcccactcgcagtcgcaggcccaggcccagtcccaggcgggccggcggcggcggtgcgggtggctgctgccgctcctcgtcggcgcggccttcctcgccgagatcgcgttcctcggccgcctcgacatggcgaagaacgccgccgcggtcgagagctggaccacctccttctacgcccgctcctccgcccccgcccgcgacgggaaggcagcggtcgtggtccccggcgcggacgcggacgacgcgcccccgggcggaggtgaggtggtggaggaggacgacggcgacatccggttgtgcgaggagcggcttgagagggaggacggcgtgccgcacgaccgcgacttcgacaaggatcccgtcctcgtcgggggcgccgctaatgattggaataaatgttctgtaggatgtgaatttgggttttcagctactaagacgcctgatgctacttttggaattgccccagatcctactgtagagagtatcctcagatcgatggagtcatctcagtattattcagagaacaacattgctgtggctcgagggagaggttacaaaattgtgatgacaacaagcctttcctcagatgtacctgttggctacttttcatgggctgaatatgatataatggcacctgtgcctccaaaaactgaagaagccctagctgcagcatttatttcaaactgtggtgcacgtaattttcgtttgcaagcccttgagatgcttgagagcttagatgtcaaaattgattcatatggtagttgccatcgtaatcatgatggcaaagttgataaagtggaaactttgaagcgctacaaatttagcttggcctttgagaattccaacgaggaagattatgttacagaaaagttttttcaatcgctggtaacaggagctattccagttgtgattggtgctccaaacattcaagagttctctcctggagaaggcgcaatattacacattaaagagcttgatgatgttccttcaattgccaagacaatgaaacatattgcatcaaatcaggaagcctttaatcaatctttgagatggaagtatgatggcccatctgattctttcaaggcccttattgacatggcagcggttcattcatcatgtcgtctttgcatacatgtcgcgacgaagattcatgagaaagaggaaaggacaccaaaatttatgaatcgcccatgtagttgttcaagcaaaagaggaaaggtataccacttgtttgtcagagaaagagggcggttcaagacagagagcatttttctgaggtcggaccaattaactatgggtgctttggagtctgctgtgcttgctaaatttagatcgctcaatcatgttcctgtgtggaaggatgaaagaccaccaagtattagaggtggggacgagttgaaggtatacaaaatttatccaatcggccttacacaacgacaggcattataccagttcagatttagagaagacgcagatcttgacaaatacattaaagatcatccatgtgcaaagcttgaagtgatttttgtataactatgctctagacattttcttttcttgcgcctttctctagttgaaaatatacaatgcgtagtttctgctgtacggtaagctagtctgctagtatgtcttatgtagtacttcctccgtttcataatgtaattcattcttgcatttctcacattcatattgatttaatgaatctagatagatatatatgtctagatttatcaacatcaatatgaatgtgggaaatgctagaatgacttacattgtgaaaaagagggagtagcaaccaattcatgctcacacagatctatctacaatcaaaagcacagccttgttaggcattgagatacatcgattgtaaattttcatcgacaggccagatgttttgtttttctcacttttttgggtaacagtcaacaagggattgacttgggacaatgaacgatattgctgtgatataatgtaatgtactatgttataactgc

SEQ ID NO: 24240 - DNA, 2234 bp, Oryza sativa
  ref <308>: DATABASE ACCESSION NUMBER: AK099682
  ref <309>: DATABASE ENTRY DATE: 2002-08-28
gtgcggcggtgtccggattcttcttcttcttcttcttccctcgtcatccgggaacgcggcgaggaggcggcctggctacaggacgtcttcttcttccctctcgtcttccccctcttctccaaccttctcttcacgggccaaaaaaaatctttggtaattggtacggtccgccatgcgggcggtgccttgtcgagctcggaagacggcatgagtgctgtaatattggttggattcagttatgaaattaagtagtactgaataatgagattcgggttggatcaaatttattcgaacgggatcggttttgttcttttgtttttggaaagaaccgaatagtttctttttaactatttcctcattttaaagaacggtattatgcgattcaaatcaaatctacgcaagtcaaaatttcaacaaccagttgcgtcaacatgctttttgtctggttaaaagaactgaaagtacgtactatgctttttctctgctttgatgtgtgatcttagtccttttgttcctttcttgttattctctgaatttctcctgtccgtattctaaattggaaaattgcattgatcatgagcagtttgcgttgtgtgtcacaaaatcatgaggattcaattaattacttgttcatgagggtggtgtatatgccattgtgatttagctttctgaggattcaattaatctctcatttaggggataagaggatagattctgaaaatatataagatggcacctggatgtcattgtgatttagcttttaattaatctctcatttaggggataagtggatagattctggaaatatataagatgacaccttgatgtcattgtgaagctttaacattttttttaaggtatttagcttttacttcgatctgaatttctaaacccaccatttttttcgtttgtgttcaaccagagatgcggcattggctggacttcgtgtggcagagcgtgcctattggaaggaatttgtggacagagtattgaaagataccagcagcattgatataactgcgtcaaatatagctgttcccacaaggctacctgtcgagctgcaagtcctgatcaaggttatgatccaccagattcttaacactcagcctggagcaatccctccactagcatttcattggtgttgcaatcagcttcttcagcatttggtgaattcagtaagaacccaaggacagccaactgttgaaccaaatgtacatggacatcaacgttgcaggggtgcaggttggtcatcggggattcccgaacgattggccgatcgaaatgtttcagaagatggaggtattggaggagttgattcgaggaggaacattagagagatgaatggtaaaactaaagagacaaatgcaagtcgtgagtcaccccgaatcctcaagcctactggtgagccaaacccatccactggtggcatacggattcagaataatcggcaagagcaacctgcagaaatgaccattttccatccatggaaaaacattactgatagaacatcagcttatgagctaagccatattgacaacttggttaatcatgaagatgatgagacaaagaggcagaaagaacagagtgttcacatcactctgttgtatgagatcaacctcatcaacgaagagcttttcgataccgtgatcagtatcaccggtcacaaacatggtgggacagtgatcaaattcagctacaatgcagtgtctcttgcacaagacatggagctaccatttgcagcatacggaacgtctcctctcaagccggcgaagctatttgtcccagctgattatcctcgaagctccccggtgtacgaagatggtgatgaacagcaccagggaatgtacagcgtgatttcaggcatggttgacaaggtgttccagcgtgccctgcgtaaactcccggtgccaatgtcgatcagggacatggcccggcagtggggcatctccgtgcgaacggtcaccaacggtggaggaacgttcagctccgggtatggccagtgggagagttgcaccgatgagtttgcaagtccatagtccatggatagacccatgaagttttgcaggaacaagtgatatgaagaataatgctgatctgctgttttgctgtagggcagatgcagaatccagtgtgagtgttgtgagagaatatttatatttttgttatgcattaagaggctgtgtggatcatctgtttttgattaaaccggttttgcttaaaaaatatttcttact

SEQ ID NO: 24241 - DNA, 4765 bp, Oryza sativa
  ref <308>: DATABASE ACCESSION NUMBER: AK099683
  ref <309>: DATABASE ENTRY DATE: 2002-08-28
ggggattttcttttctttttttttttttccgtcgcttcttcgcgccgcctcccctcgacgccggcgccgccgctctcgtgagccaccgccaccgccggcgccgccgctctcgtgagccaccgccaccgccggcgccgccgagcctcctcctccggcaagacgtctcatccaggcctctccctccccctcagacgccgcctctgcgcctccattctcgagatccgaggtgagcccttcttcttcctcttcccctctcctcttttctccagggttccgcagtgacaggacggaggaagcgggaggatgcaggaggggagaagagcctcgaggatgcatcgtgctcctcgcttcgtccacttcctctcctcctcctcctcctcctcctcctagggttgcgttgagtcggtgacacatgggacctcactccctggtttgcttgcagcggcggattgctagctccttggatggcagttctagcttgtagttcttatttgacgaaatcgtgatcttgtgaatattaacatggaacagttgtagctcgtagttcttctttgatgaatcttgatctggtgagtatcaacatggaaggagtggaagctaggtcgctcgctgctcactctacacagcagcatgttttctgatgttttacatttgctgaatactgtcaacataattgaacttttactttgtcattacttggtatatccacagtttgtctcgtcttccacctccggccaccggatttagtgccggtcatggttatagcttgattttgagtcctagggtgtgtgtgatcggtgattcgccaccagcggccatggggtggaggggcgagcaacgggcgtagcaagccgaagagccacacttgtaggagggggcagggggacggagccgtgggtggccggcgaactgaattgctagagctaggcacatcgtcctcaagggcgcgtctcggcacaaggcgcaggtacaatcctctaatgtcatcttcccgtagattctcactcttcaagtctcagttccttggttgtcactggaaaatcatactacgaaaatggaatccactgttgtgtttgtttggtggcatgcatatgtagatcaatatagcaagttcaatcgatgtaggctcgtctgggacactcgaaatgaaatgattttgcagaattcattttgaaaattctcttttcgaagcgagtcataaagaggaatatgcatgttttccccccttttctccctcttttttcgtgatcaggttagtggagagacccccctctgcattgttcaagacttcagactcgctactaaagtgtgcacacccattgcagctttcagggcttcaccactgcataaattctcaacatatgcttgtgttttttttactgtcaagtgtcaacgtctgtgccttttccctgactggtctcatgaatttcccaaatactagaacagtacaggatcatgtcttcaaagagaggaggaggtggccgccgtggtcgtggctgtggccgtgggagaagtgctttggctgaaaatgacatggactttcatgaaacctccacaccttcttccccaagtactacttctgataaagaggacaatgttgagtttactccgcagcaaagcccactaccttgtcttgtaagcccatcagtagagcatgtatccaacacattactcaatccaaagatcaaccaccgatcggacgcaatcttcggtgatcaggctgtggaacagttgaagttgcgacatcacaaacctttaaaatttcatgagagataccgtccttatttgagggatgctggcttgcttgggctctcacaaatttgccagaagatgcctcagttggacaaggcattgatcactgcccttgttgagcgttggagaccagaaactcatagtttccacctggcttctggggagatgacagttacactacaagatgtctcaatgttgttagctcttcctatcgatggccgtccagttgttctaccactgatcatgattatgcgcagatggtcattgattgtctaggtcatgatccaagaggaccatcaatgcctggaaaatcttttctgcactacaaatggctaaagaagcatttctatgaattaccagaagggacagatgatcagactgtggagaggcatgttcgagcatatatcctgagccttctatgtggggtgctatttccagatggaacaggacggatgagtctgatatatcttccactgattgctgatctttctcttgttgggacatacagctggggatctgcagtgctggccttcctataccgttctctttgttctgttgcttcctcccacaatatcaagaacattggtggttcattgcttctcttgcagctttggagctgggagcgctcccatgttggcagaccgttggtccggtctcccgtgtgcccagagacagacattccacaggatgtgctcccagttggctttcgttgggtaggtgctcgcacacaaagtgagaatgctacacgctgtcttaagcagtacagggatgaactgaatctgcagcgagcagatcaggtgaagtgggagccgtacttgcacattgagtctgcaagcttgccactgctttgtacaaaaaatgctgacttgtggcttacacaagctccactaataaattttccaatagtcgagatgtatttgcctgagcgagtgatgcggcaatttgggcttcgccaatccattccaccaccttttcggcctacactacaggcgctgcatcgtattagtcgacgtggcagagaacgtgagaactgggaagagacacatcatgagtacattcaggaatgggaagcccgccgacagcgcatatttccagagtcagagcagtatgacccgtcttcttatgaggagtacctgcattggtacacaggggctacacggcggtatcttgtaccatcaatcagtgatgatgtggaagcaggatcttcattacagcctgatgactccattaatcttcattatcaagccaaggctcctatgatccgcaaagcagttgataaactgcatggtatggtaaagaaggccaagatagccatggcgtccacagctgatacaaccacacaagccttggtctttgagtttctgcatggctttcaagatgttcttcacgaccttggcgagatcaaggaaaatggtggttcagctactagtccacatgttgaatcagctgccactcaagacatgcctctacttttgctagaaactgaacagaacattgtggatgccgatcaagaagctcaacaccaggaagaggaagagcttcacatggtggatgatgcaacaatgacccttgagcctatggatgaggagaacaatgatttcaacaatgtcatctgtccatgtccttcactggagttggaggaacattgtcacttagctacaccagccatcgatgagtgtaatacagccactcctgctccagactctgtaattccacagcagaacactgattttgatcaagatggacatctggaaaatcctaatgaaatggaccagattgaactgatggtggaacctatatgtgtggatcacaatgattccgacaatgtgctctcatccagcccgtcagctcaggcactggaggagaattgtgaagtagcaaaggcagtcaatggaaatgtcgatccaaccacccaagttactggctcatctaccccacaacaggacacagatgtcaaactagttgctgaacaggaaaacccaggcacaacagagggcaactaactataatggtgtcccctcatctgcagaggagacaggcgattctgatttcacccctcatcatgtcacctttgtatagtgactagttatgtttgccatgttgatttttttgacattagaagttcttttttttgtatttatattcattgatggtagtattctgcttcatctccaatgtaatatgggaatggatatattaagccctagtgtatactgtatactacctccatcccaaaatgtagttacctagtactcaactggacacctcctagtactataaaactggacaggggtgtccaatttcgtactaggtagcaaaattttgggatggaggtagtaatggttttccttagaagatgcttaactttataattgatgagcatattagtgatagtgacagttagatggatgatgctgcatctactactggccaatatgatcagcaagataaagattggagctgcttcatatctccacttcatcaaatttatagaagattagcaattttgactacctgatggaactgaacactcttgctgggcgcagttacaacgacattgcacatattaccactccaaaacattttggatctggaagatctgtctggcgtccgcatactgagatcttccaaaagtggattctgtacctcattccttgctgccaatttggacctcttctgtgcattttttttcttttccattcatttactctggggatgatatcttgttcaataactgctgatagtgatacttcaaaattttcaatgcagccggttggcgctctgaatcctgcatgactggagaaaccccaagaacattactctagtttcaacgacccaatcatcccaaaatttcacctaccgttcacattgctcctgtcctggcatggtaccttttcttagattatgcatgttttgtgtcagcattttgcttgtgtgttgccccttttgtttggagttagattaatttattgtcatcccatttgattaatcggttctctactgttcatcaatg

SEQ ID NO: 24242 - DNA, 1406 bp, Oryza sativa
  ref <308>: DATABASE ACCESSION NUMBER: AK099684
  ref <309>: DATABASE ENTRY DATE: 2002-08-28
ggaaccctgtttagaccgctaataacggttttagtccctgacgagctcttcctcctcctccgacgccgccgccgccgccgccgccgccacgccgctcgccggcggcccctcgccatcgccgcctctcgttagctccccccccccggcgccgacgccggctttggcctctgtggctcgtgcccttccaggctccactgctctccgcccctcggcttgctctgcgccgcgcgccgcctccctcaactctcgccgtctccgcacgccctgctcggctactcgccgccggccgcggcggtagtcaagatcgagccatcaaatcctgtgtttgccactggcattagatttggtggttttgtgatgggaggctcctcaattggggagggaactctgtctctcggtgacttcgttgcgtctgcaaaggccctgattgagaagtggaaggtgattgatgtagaagattctcttcctgattggcaatggaaaccgtgtggcaagacgggggttccatctgaggaagagggctacctagctctcgaaggagtataccgcaatcctggaggaaggcatgaacaaattggggatagcagtaatttcgatgatgcggacattgtcagcgatgatgcttgggtaacttttcagtacacattgttcattttatgtttctgctacctgcttattgatggtgcctaggcccagagctctagtgagagtgttcatatttatgattaccatgttgtctatagtttttcttacaaggttccagtgctatactttcagggtcatcaggctggtggccagctgctaactctagatgagataaaagaggaccttccttctcactcacttaaattattaggtgaatcgaagtggacatttattactcgggagttgaactgtgcttgcaccccctgcaggagcatccccattttagtaggccatggttcactttgcatccctgtggaaccagtgactgtatgaagttacttcttgaaggagtggaaaacaaggatcaacatgtgcaatacttaccggcatggctatctgtggttggccaggcagtaggactgaaaatcccacttgagctttatgcttctggactgaaaacacaggagtagcaattgcttgccaatttgccatttggctcttgcaagttcgtcagcaacatatctattttgcgcaaatgccaatgcttatgatcaaactgtactgcatctgagatgcatcatgtctcctggaaacctggaaacaactgaggatcaacttcctagaagtaactgaagatcatcaactggcctactaatctttgttcttagtgctagatcatatcaatttagtatagaagctaaaagagaaccctggttccaaattgttattatgagaactagaaaataatcctatcaaaggcc

SEQ ID NO: 24243 - DNA, 1478 bp, Oryza sativa
  ref <308>: DATABASE ACCESSION NUMBER: AK099685
  ref <309>: DATABASE ENTRY DATE: 2002-08-28
ggctttaattctcttcttctcctcctcctccgccgccgccgccgccgaatcttccggtagctagatcccctcgccggcgacgtgcttgcgtttcttggtgtcgtgacgatcggggcgatccattttgtttcaggtcaacgccggtgatcctctccgatggggtcgttcaaggggcacgtgctgccggggacgctgttcctggcggtgggggcgtggcacgtgtgggcggcggcggcgaggttcgccgccgacccgcgcgggttcaggctgcgcgcctggaaccccgtggacgtcggcggcggcggcgcgccggcgtggctccccgcccacctcgagctctacgtcattgccggcggcgccttcctcgacatgtgcgtcgaggtgctctactccacccacctccacatcttcgccgacggcggcatcaaccccgcccacctcaacgacctcgagcacggcggcatgctcctcatgttcttcctcttcggcatcctcgccctcctctcccaaaaaaccaggtacctgccgttgccggagggggcgctgtgcctggtggcgtcgacggcgttcatggcggagctcctcctcttctacttccactccaccacccaccagggcctcgagggctactaccactacctcctcgtcgtcgtcgtcgcgctctgcgtcgccaccaccgtgctcggcgccctcctccccgcgagcttccccgtcgacatcgccagcggcgccgccatcgcgctccagggcctctggttctaccagacggcgttcacgctctacgggccctcgctgccggcgggctgccgccgcgacgccgacggccacatcgactgccacacccacgccgcccaggagcgcgccgagcagctcgccaacttccagctgttcggcctcgtcttcctcgtctgcgcctacgcgctcgggtgcttcgccgtcgccgcggcgaggcacgggcaccccgacctggccacgatgcacgccaagcacgtcgccgccatggaggcgcagctcgccggcgccggcgccggcgagggggacaggttcgtcggctctgcgctgccgctggaggacaccgcgatctaagtgagcgggctcgccggcgacgtcgctgtccgtcgtcgccgccgtcttcttggatttgggtataggaagaggaagtagagtgcatgtgacacgtggcaggggcagttcagagttcagaattcggaattttcagatcatgaaacgatcgaagagtaggaggctgcagattaattgggattaaccacaataggggatacaaaattcatggaaactttgatttgatcagttgcttgattgatcctttttgttgtgattacgtgagggtttatatttggattacgatttttcctctgatcggtgcagaggttttgtcttgtacatcaaattggttactgggttatgcatacgacagcattatggatgaacagcatataattagaaactgtttttag

SEQ ID NO: 24244 - DNA, 3112 bp, Oryza sativa
  ref <308>: DATABASE ACCESSION NUMBER: AK099686
  ref <309>: DATABASE ENTRY DATE: 2002-08-28
gggccgcatcgccaccgccactctctcctctcctcctctctctctctctctcgcaccaccgctctcttccgccgctgcggctcacggctacgcagctctcttcccctcctcctcggctccgctctcttcgatcgatctagggtttggtcttctgttgggggattgttgttgctcttccgcgcgatcgatcgacgccgcgtcctgagggtttgaggggtttccgccctcccgccgcacgcccgcacccccgcgatgtccggccggagctcgccgatgtacgaggggctcgcgtcgcgtcccgacgagtgggacgtcgtcctcaaggtgaagtatggtgaaactcttaagaggttcggtgggtatgtgcaaggaccacaattcagcctgaacttatccgctctccggtccaagattgcatctgcttttaagtttggttcggatgtcgacttcattctgacttacactgatgaggatggggatattgtcatgctggatgatgatgatgatctgcatgatgctgctattcatcagaaactgaaccccctcaggattaatgttcagttaaacaacagccacactgcagcacctcaggccaaacagcaggattcagataatatacctctcaggtccaccaccactgaagacccactagctcatattaaatcagttatcgatgaggttttgaagccgatatctatgaagtccatccaggagccagttcctgagacacttgcgaagctgtcccatgaagtacttgaagccgcatcaccacaattagctgagctaataaaaccttttgttaaactggttacaccaagcaacaacaacccatctaatgggcatgctgatggttcctgcagctcctcaactggtttgccccaaacacaggttgatcccaaaactaatgacgagcccaaaatagacacaagtttggggtcgcaacccttggacacgcagaactccaaatcatctggtgctagaggtcttaagactctgtcagttgaggctcctgctacatcgggtgttaaatcttctcaaggtcaacaggcatcattatacccttccattgaggagttgctgttctccccctttttaccgaactcaggtgatgacaaatctgccagcaagggaattagtgatgctcaaagcaagggaaaatctgttatgacctctgctacaccacctacccctcctgctgctcctgctttccgtccagctcctccaattccatctctgaatgattggtctcagccaccagcacgtggatcgacattttacccatctatttggcagtctgaagctgatccaaaagccaatagtgattccagatggcgtgttccattgtgcagagctggccatccattccaaccccatgctcccctgagccgtccacccccaccaatgcctgcaccaatgagctatggaccttctccacattttccttaccctggccgcctcttgtcctctggccatctgcatggagaccttggtaataacattgagaactcaccagcacgcacattccatagatggattcagtgtgatggttgtggagtgcaaccaattgttgggcctcgatacaagtctaaaacaaaagaagattatgatttgtgtgatgcctgctttcatcgcatgggcaatgaggtcgagtacaccaggattgacaagccactcttaccccagagattactgagagaccctacattgtgtcgcaagatccattcacgggctgcgatgaagtcaaagcgggagaaacttgaaagtcgcttcattttggatgtaactgtcctggatggaacattgatggcaccttcaactccgtttactaagatttggcgtatgcataacaatgggtctatcatgtggcccttgggcacacagcttatatgggttggtggcgaccagtttgcactgcagacctatgttccattagagattccagtggacgggtttcctgttgatcaggagattgatgttgctgttgattttgtggcacctgcaaggcctgggaggtatatatcttactggaggttagcatcaccttctggccagaaatttggtcagcgtgtttgggttcacatccaggtggaggatccttcttttgtcagtaacaacaggactgccgctataaacttgaatttgcccccagaaagcaatatcacaaacacaagtaatttgattgatgtcaatattgagcctgtggatcaagtcttcaaccaacatgtcaatagcacaaacaaggagttacttgaacatttgatacaccaccagattgacgagcccaagaatcctgagcctgctccattacctgtgcccattgtttcttccacaacatctcttcaccccatcattgatgttgatgttccctccagttcaactgctgctgcttttgtgcctgtctttgatgagcctgcgcctgaacctgctgtgactcctgtgcctccaactgttaatgtgcctgctggtaatgcacctgcgtctgttggtgcatcatcatctgatcatcatggcattgacaatctcacagaagagaaactgctgaaggaacttgaggaaatgggttttaggcaggtcgatctgaacaaggagatactcaggcagaacaagtacaacctggagcagtctgtcgatgatctctgtggcgtcagcgaatgggaccctctcctggaggagttgcaggaaatgggctttgaggacactgagataaacaaggagatgctcgagaagaacggaggaagcatcaagcgggctgtgatggacctcatcgctagggagaagaaagaccagtgaagatcgtgtgctcttgagccatccctatctataacctaactatgtgtgtatatgcgtaaataatgtgacgaggtgtaaggctagcgccggccgccggggctgctgctacagtctcagggcctgcttgcttatgaactgtgtgtggtgttgtgcgactggtatatttgtcgcggagatatgtgttaagtgcgcgtgcgcgcctcttaaaaagcggttaccttgccaggtaaactgcgtgtaattactatgggcttagctgctctatgcctcttatctactgctgtgactggaacttgatggattaataagatctatgttgcgt

SEQ ID NO: 24245 - DNA, 3135 bp, Oryza sativa
  ref <308>: DATABASE ACCESSION NUMBER: AK099687
  ref <309>: DATABASE ENTRY DATE: 2002-08-28
gagttccggagcgccggccgccgcctccgccgcgacgacctcactttctgctatcaacctgtagcaaaccaggagcagcgtcggcctcctcctccgcctccgagctgtgtcgttctccggattgagccgggagtagccgtggaagctgaggccgaggtgcatttgtggttttcttggcgcggataaaggctgggggtggggagatgatgagcccgtgcgattgcttcctccatgccaccgcgccgccgctgaatccgccgtcgagtctcgcggctgcggcgccgggagctcgctggagggatagcaacctctcgttccagagcagcgcagtgtctgcgccggcgagaaacgtcgagacttcccccaatttggtggttccatgtacggttcatacgcaggctgctgaaaggaagaagagtgggaggtgggtgaagtatggcgggtcgattccggcgatgctggaggcgcttgagcgtaatgaggatatcggggaggcgctccggccatggagggacacgatgagcaaccgggagaggacaatcattctcaaggagcagaaggattggaggagagcggttgaaattttcaactggtttcgcaggaggaggcgccatgaggtcaatgtgatacactacaatgttgttctctgcgcggttgggagggcgaggagatgggaccttgttgctaggctatggcatgagatgcattccggtggtgttgcgccggataattcgacgtatggcacgcttattgatgtgcactgcaaagggggcagagagaggatggcattgctttggcttggcgacatgatcaagcgtgggttgctgcctgatgagattactatgagtattgtgcttcaggtacacaagaaggctggggagtatgagaaagccgagcttttcttcaagagatggtccttgaagtcagatgtaaagatgaaagggcatccttgctatagtttgtatacttacaacaccttgatcgatacttatggaaaggctgggcaacttgagaaagtatcagatacattcaatcagatgttaagagaaggtgtttcaccaaatgttgttacatttaacacaatgattcatgtttggggtaaacaccgtagaatggagcaagtagcttctctgatgagaacgatggaggagtttcagtgccttccggacactaggacgtataatattctgatctcgctatacagagaaatcaatgatattgatgttgcggagtactatttcaggaagatgaaagctgaaaatctgcttccagatgttgtgagctgccgcactctcttgtatggatactctatcaagggcatggtcactgaagcacaagctcttcttaaagaaatgtatgagaggaacatggtgattgatgaatacacacaatcagctgtgacgaggatgtatgtcgatgctgggatgcttgagcaagcgtggtgttggtttgagaagttcaattatcagttaaactctgagtgcttttctgcaaatattgatgcatttggggagagagggcatatactccttgcagagaaggcttttatgtgctgcataaaaaggaagatgctaagcacttgtgtttgtaatgttatgatcaaagcatatggtttagtagagaagcttgacgaggcttgtgagattgctgatggcatggagaggtatggcattttgcctgattacttgacttacagttctctgattcatctaatgtcaaccgctaaattgccagagaaagctctttactatttgagaaagatgcaggcagcaaaattgctgattgattgtgttccttattctgtggtaatcagttgctttgctaagaatggcaatttacacatggtcgactgcctgtttagagaaatgatcacttcagggatccaagctgatacttatgtttactctatcttaattgatgcatatgctgaagttggagatgtccagaaagctgaagcatattttggtttgttgaaaaaggctggtttatgtgagagtgctacaatatataattctttgataaagctctacacaaaggtagtgtatcttgcagaggcacagaaaacgtacaagcttctcaaatcattaaatgcagacaccaacctttatgcgtcaaactgcatgattgacctctatagtgaccattgtatggtgaaggaagcacgtgagatttttgagaatttgaaggttacaggaaaggcaaatgaattttcacatgcaatgatggtgtgcttgtacaagaaaattgctcgctttgatgaagcccacaggatttctaagaaaatgcaagcttcaggatttctaactcaggcattaagctacaactctgtgatacaaatgtatgtgtctggtggaagaatggaagatgcccttaaaatatttcagaagatgttggcatcgaacacaccaccaaatgatgcaacattcaaggcactaaagattattttagtgaaacgaggagtttcaaataatgatattagaaggttagaattgctcagaaaaaatagaattcatgattgcttgcgccactggtacaggatgctatgcatggcggtaagatcaggtggtagttcttctcgacgtattagtgataattcagctctgaggacgcatatttttgacattggcaattccaagagtggcaaaagaaatacaagaaagcatgtaacttcataaatatttcgagtctaactggtttaacatcttcgatgttgacacaacacggtgatgatccatctactaaacagttgatggaaagcaccgtgttatcttcaaaagaaaaccccatgaccactgtttgactggtgctctaagaatgtggtgaaatttccaatggatcaggctagattaccgcagggatgcaggattatactccgggctaggagatgctgctgacatatggtgtgctcaaagatgagatgggtgtgatacctgtgatcaatggatgatacgcatcattgctggtctggttcacctcagctggctactgaaagctctgcagctagctctgccatctcccacgtcaagctgaggctgcgttcttttcaggctagtcgtcatcgttttccgttagcacgcttttcaaactactaaacggtgcatttttctgtaaaaagtttctatacgaaagttactt

SEQ ID NO: 24246 - DNA, 2647 bp, Oryza sativa
  ref <308>: DATABASE ACCESSION NUMBER: AK099688
  ref <309>: DATABASE ENTRY DATE: 2002-08-28
aaaaaaaaaaaaaaaaaatcagagaaatgaaaagaggctgagcaacaactcacctcacggcggcaatgggcctcctcgtccacctccccaacctcgccggcgcccgccgcccatcgccgtgcggcggccaccggagggcccgcggcggcgcgcggttctcggtgtccgccgcggcgcccggcgggggcgtcaaggaggaagaggaagaggaagaggaggaggaggagaaggggacgagggggaaggagagaatagtgattcgggtgtcggacccggtgcgggagaggcggctcccgccgccgctcttctcgtccccggacgccccctcgccggcggcggggcggcggcggaggaagggggaggacgaggacgacggggaggaccggcggcggcggtaccacgtcaacgtcggggacgccatccgggcgctgcgggaggagctccccgccgcgttctaccgggagcccagcttccatatctacaggttcgtgaatcgtgagtcgtcgacctagattcccatgctttcccttgtcgggggatgatgatgattgttgatttgcgttgacggtgaaactgtggcgtagatttgacccttttctcagcgcacgagtggcactctaatgtgctctcttaagtcaaaaattggggagagaaaaatggtgatttctagtatactttatgaggtgttcttaggccgaattggagagatgatttgcaaaatttttgatgttttagtcgtgtcgtggccatagctaaaggattgttatcaggacttagataacatagtcaagtgcgatagagtctttctcagtggtttagtggtgtggttagaaaggctatgagttataaaaagtcaatcactcattatcttgttggtaaaagtactggcctcattatttttaattattaatttaaactaggaaggtagcccgcgcagatgcgcgggcaccttatttagtgatatttgaaattttgtaacgaatgtttatatataggattgtttttaaaaaatattttttactcttctaaatctatgtttatcaatattttttttggattgttttgaaagtcggtttcaatcactggatgtacggacacgcgttaagaaggtacatgctcctggacatttgtctatatgcttatgtgactatggaggtaaggtggaccaacatggacgtcgggtcctttaagggggtttatgtgacatcctagtgcaattaggatgtggtctatgttttttttatttaaaggatatgatctgtgttgtccataagcattgtgtgcacttgtgttcataagaatgaaagtgtaagtgatgtgatagcgtaagtgagcgtgccagttggatgcatgctgagctgccttgttttgaaggacgggttgttacaaattgtaaacaaattaaatcacttaaatttataagaaaaatgtctcaacaatagagttggttcatatgaaactatcattttatactactgtgtttttttaatttaaacttttaagtaatattttttccttgtatactaaacatgtctttgtagattttaggacaataatttaagaaattttctattaaaaatatgataatatgacttctttatctaattaaagacatactcacgtacttatatttacttctactacctacatccataaatcgaaggattcaaattttatcctaaaatataagagatttttaatactactcatttcatccaaccatttttcatttaattgttatccaacattactctaaccatcttctaactctttaaataccccttatttaatgatggatatcttagttttttttttcattcctccttaattcctataaaattttagaatccattataggatggagatatatagtaataaaaaagagcttcattcatagacatatttatttgtacctttgagattgatttagctttacatatttgtataggtaaatagacttcgtatgcaagttgagaaatataattaagttggtagaaagtcgttagatatctaatggtataaagtaattagtacacaaattttattaaaacattaaggtggattttttggggggtaatttttaggatcttttggttaacaattgttgtaaggaaaacaaagaggcgttggattcgtctcgtccatgaggagggaactgtatacatgtgttgtacatacgcactctgacgaactgatcgtttggtagggtttttttaagatatagatctaacagtttataacggtttaaaataagatccatcggtttgggtaaaataattttttttccttagaatttcttatacttactttaatttattagagcgtcgtgtggtagcttagaaatgtttataggaagccatgtatacagcttaagagcatttgtaagatatctaatggacttttagtatataataatagataattcatgtcgtattaattaatatatcaattaataattaattttttttataatttttttatgggttcgccactgaaaagaaatggtatatatcaaagtgatatccggataattttttcttacttcgtcactgaagggtatattcatccaagtgacataataatttctatatagaaacatatgtaccaagagattatttttatatactgtgtatttggttgttagctt

SEQ ID NO: 24247 - DNA, 3320 bp, Oryza sativa
  ref <308>: DATABASE ACCESSION NUMBER: AK099689
  ref <309>: DATABASE ENTRY DATE: 2002-08-28
gtcttccccctttcgcctccgcgacgcatatgcctccgcctccgcctcgtcgcggcgcccccaaaccctagcccggcgcggcgagtcccccatcggcggcgggagcggcgggagtaggcgggaaggcgggatctcctccgtcccacatggcggcggcggcggcggttgcgggggcgggcggggtggggcacgtggtggagaggttcagggcgaggctgcgggaggagcaggaggaggaggaggggggaggcggggaggtggcggcggcggcggtggtgcgggtgtacgtggaggtgctctcggagctcacgttcaactgcaagcccatcatcaccgagctcaccatcatcgccgggcagcacgcggccctcgccgcgagggggatcgccgacgccatctgcgcccgcatcgcggaggtgtctgccgaccagaaattaccatctttgtatctgctagacagtattgtgaagaacataggacgagaatatgtagggcattttgccgctaggttgcagaaggtattttgtgatgcctataggaaagttcaccgcaatcagcatgctgcaatgcgacacctctttggtacctggtcacaagtgttcccttcctctgtgctacgcggaattgaggatgagcttcagttttcccccttagagaataagcgctctgccacagcgactgatatccgacagtcagagtcgatatctcctagactgtctcatgccattcatgtaaatccaaaatatttagaagcacaacaacaatttaagcagtcaacttcggtgcatcaaccaataactcgtggaaatcggcaaatgaatgatgtggaagaggatcaaataaatggtttaacatctaaaagttcgcgaggatggcctgcaactaattcaaagctccagaagtctactatgctgtatgctgacgatcttgatcaacaagaggcattttgttcacatactgggttgataaggccaagttcgccacatcttttaagcaaacatccttccatactcaatacagaaggaccattagccaattcaagaagaaccatgtcaagatcaccacctcttgatgtgctccctagaaatgcatcccccaagagagctctggagaggccaccactatcgcattctgttctaggacctgaccccagaagattgcctgatcgaaatggttggtttgaacggaagtgggcttttgaggatggtgcacaacggccttcgatgagcatacttgatgaagaatatagaaagcaaagtgcaagggaacttattgatgcttatggaaattctcaaggaaaagatgtcgatgaaaggcttcccaagatgcaacgtctagattcaaatggcatggcaggcagacctagtgcacaaaaatggctaacttcggaggaagaagagtatacttgggaagatatgagtcctactttaactgatcgaaacagaaccagcgtgccctctttacctccccttggaaccctgagagctggatttcttgggccaaacagtggactactggaatctgatattgtgaggcacagttggccaggccaggctcctcgaccagcaattgatgggccaccactaaatctcgaagatagaattcctactaacgggcccgttgacagaactaataacaggagatatccaggcaattttggtgttcagaatggtgcctttttagattaccagagttctgaacatactcttgatcctgggagaactaccatgccagttccaccttggcagcagactattggtcagccgttgcgggtacaagcgccccagcctgcatcaattctgaatagaatgccactgcctactgatagtgaagtgccagtcaagaggttggccactggtggtacatatgatgcgctgaatgtagatattccattgttggagaagcaaaggtcctcacctgctcatgctccaatggaatggcctcttaatacacagtcactaactatacaaccaattccacctgataccaaacatcctagaggcgcatcagatggtctagattctagaccatttattagccaagggtccagttcgtctgtttttgttccacagcatcatgccttggatcggagaacaatgaatgctgatgatttagctcaaccatcatatcagcatccagatttgttgtcattgagtcaacaaaatcagggcacagttttgggaaaccaaggtcaacctcatcacccgccgcaatttcatccccatcctcattctcaccttcaagagacaattagaagctttgcccccagtatgtctgttgcacctccacaaaatatattccatggacaaggaggtagcgcagctgcactcctgccaagttctttccctgtaccacctgcagtaccaccctatggcttgcagtctatgcctggatttcctttgccatcgttaccttcaggaccacctcctccatcgcagataggtccatcatcatcgcaagttgggggccctccacttgtctctggattgttaagtaaccttatgcagcatggtataatctcattgcaaccacccagccaacctcaggattctgtgggtgttgacttcaatgttgacctcaaggtacggaacgagtctgtcattaatgctctgtatcaggatcttccgaggcaatgcaaaacttgtggccttcgttttaaatgccaagaagaacatcgtgctcacatggattggcatgttacgaaaaacagaaattcaaagaatcgtaagcaaacttcacgtaaatattttgtcactgtgggtgaatggttaagagcagcagaaacagtaggaaacgatggtgttccttcttttgagcctgccgaaccagttgcagacgcaaaggaagagaaagaattggctgttcctgctgatgaggaccaaacaacatgtgctttatgtcaagagccatttgaagatttctacagtgatgaaactgaagagtggatgtacaaaggtgcagtttatatgaatgcaccagatggaaatattggtggtctagaaaggtcgcagttgggacctattgtccatgctaaatgtctatctgggccaaacaatacttaggccggcctagctgctggtactcttgcctcatttgtttcgtggctggggctgtagacaagacatgtaaactactggagagagcagattttggtatgcttagtatttaatcctcaattgacaaccatgggtttgcatagaatgttcatgtgatgatagtgtacaactgtaaaatgccttttgtaatatagtgattgagcatgagcatttttgctcgacagtcactatggtgcatgttcaatcgtttggtcccaccatccc

SEQ ID NO: 24248 - DNA, 2977 bp, Oryza sativa
  ref <308>: DATABASE ACCESSION NUMBER: AK099690
  ref <309>: DATABASE ENTRY DATE: 2002-08-28
gacacttcgactcgacgcgtattcccctcgccgccgtcgccgactcgccgtcgattcgccgccaccgttgccgccgcttcgcgcctagggtttcgtcgccggccgccgctgtatgagcagtcgccccatcgtcgccaacctggaccgtcaccaccaccaccaccgccccgatgtcgtcgtcgaggaagaccgcgggcccccgcggcggcggcggccgccgcagggacgaagaaggtgggtagtgggccgagccgggtgacgctggagaggctccgggaggggatcgagcggcgggcggaggaggaggagaggcgggcggaggaggagaggagggcggaggcggagagggccgccgcggaggagcgggcgaggcgggaggaggaggaggggagggcgcgggcggaggaggagaggaggcggagggaggaggagaggcggcggaggaggaaagaggagaaggtgagggaggaggcgcggcggagggaggagcagcggcggcggctcggcatcaccgtcgtcgctgattctcccggcggaggcggtgatggcgatcgtcgtcggcctgtgtacgactccaggaagactaaattgcaggccaagcctcatggggatgcccagtctgaagctgatacggcagaattgctgagctcgaagccgcaattggaggacgagcagatcaatgcattatctatcgaggttgctgctgccgcagacgcagtagaattgggagtgggaaggaaaactggatcatcagaagaggatggcactgttagtgatggtggtgatgattcttgtgaggacaagagcttggatggttttgatgtccaatctgatgggaattctccctgtgttgcagagggggaaacagaggacaaacttgcgacttctgcttcccaggttgttaatccagtcgatatcgatgtggctggtgaggttgaggaagatgggatccttgattctcaagatgcgtgtgcaatcgagggtgacagggtgctccgtgagacgatatgttgcatccttggccatgtggatgctggtaagacaaagctccttgattgcatcaggcacaccaatgtgcagaaaggggatgctggaggcatcacgcagcagattggcgctacctacgtacctgttgaatacgtcaaggagagggccaaaccccataaaggtgtgtcgtaatcaaagttcctgggttgcttgtgattgacacccctggccacgagtcgttcagtaacatgcgctcgaggggaatgagtttgtgcgacattgctgtggtggttgttgacattatgcatgggcttgagaagcagactgttgagacccttgctcttctgaaagaccgcaatgtgaggttcattgttgtcttgaacaaggtagaccggctttgtgggtggaaacattgtccagatgcaccgataaagaaggcactcgagaaccaatctggtgatgtcaaaagggaatttgggtggaggttgactaaggttgtgacacaactgaaggaaaatggctttaacactgcactatactatgacaatcaaaagtttcggaaagtgtttgacatagtcccaaccagtgccataagcggtgaaggcattccagaccttctactaatgctggtgttaaggtcccaagcgacaatgatggagaagctaacctttgtcaatacagtggagtgtactgtcctagaagtcaatgatgacaaagatttaggaactactattgatgtagtgctgattaatggtgtgctgcacaaaggtgatcaagtgaatgtttgcactaaacaggggcctgtcacaacaactattagagatttgttgacccctcatccattgaaagaactgagagttaagggcatatataagcatcacaaggagcttaaagctgcacagggggtaaagattgtggcacggggactgaaatatgcaattccaggcacttctctcgttgtagtgaagccaggggatgatctgggacaatctgaagccaaaagccagaggaatgagaatgaagagggaaatgtaatacaagaaataagtaggctcaaaacttgcaaggaaggtgtctatgtgcaagcttctacttttggaatcttggaagcaatcattgagcatttgaacagccctggtgtgaatgttcctgtcagtggttgcaacttaggcccaattgagaagaaagatgtcatgaaggcaagtgctatgctgaagcggaaagaagagtatgcagccatcttagcatttaatgtcagggtgatgcctgaggcagatgtccttgcatcagaatcaggagtgaagattgttacagctgacacagtgtacaagcttgttgacagctttaatgaacacattaaaagatcaaaggagttgaagaaaatgcagtgtgcagccaatgcagtgttcccatgcaccctgaagattctgccaaaccgtgtataccgtaagaaggatccatttctttgtgatgttgaagtcttggaaggtgtcgtcaaggtgggaacaccaatttgtgtctatgttggaggcacagtccatggtcttggaaggatctcctcaatgcaaacatcaaatggtaatcagattgattcggcaaagcgaggagtagtagtatccgtaaagataaccggggagagccccaaggagaagacctggttgtatggacgccattttgatgagagcaatgagctgatcagccaaatctcaaggagatccattgatgtcctcaaagagtactatcgagatgaaatgaatgatgagaattggcagcttatccgcaggctaaagaaactactcgatatagcctgaaggattggaatacttctgtcgtcttctcgtgtcggcaatttagatcacgttcatcattttctggtctgtgttgtgtccagaaactccagtcatactttgtcatcatttgtcaaaccgttttgttactttgtgaataatggatgaatctatagatgtttgtaatggcgaatattgtcgtt

SEQ ID NO: 24249 - DNA, 1045 bp, Oryza sativa
  ref <308>: DATABASE ACCESSION NUMBER: AK099691
  ref <309>: DATABASE ENTRY DATE: 2002-08-28
gcatcgtcctcagctcatcatctgcatgcagttcactgcacaccacacagcttagcttgctcagcttcactgatcttcttagctgcagctacttcactttgcatagtttgatcgaactaaataactcaccaagttagctgtaatggccaagctgatcctcgccaccttcgccgtcgtgttcatggcgctcgccgccacctccctcgccggcgacccggacatgctccaggacgtctgcgtcgccgacttcttcttcgatgggctgatgaaggccgggaacacggggaacgcggtggggtcggtggtgacggcggcgagcgtggagagcctgccggggctgaacacgatgggggtgtccatggcgcgtatcgactacgcgccatgggggctgaacccaccgcacacgcatccccgtgccaccgagatcatcttcgtcgtcgagggctccctcgacgtcggcttcgtcaccaccgccaacaagctcttcacccgcaccgtctgcaagggggaggtgttcgtcttcccgcgggggctcgtccacttccagaagaacaacggcaacacgccggcgttcgccatcgccgccttgaacagccagctccccgggacgcagtccatcgccgccgcgctcttcggcgccgcgccgccgctgccgtcggacacgctggccagggcgttccaggtcgacggcggcatggtcgagttcatcaagtccaagttcgtcccgcccaaatactagaattgcattgcatgcatgcatactgcaggaagaacaagatggcagctgagctagctagccctatcgcgataataataattaagaggacgtacgtacgtaccgttaaaaagtttgtgatttgattggtaggatttgtgtcagtgtgtgtttgtgtttgtgagtcgtttgatttgtaatttttatttttgtttttgagtcgtcgtcgatcgatcgggtcgtgtctcgtactacgtgtgtgtggtacgtggccggacctgatcattactgtattattacttcatggtttagtactaccactgttacttc

SEQ ID NO: 24250 - DNA, 2071 bp, Oryza sativa
  ref <308>: DATABASE ACCESSION NUMBER: AK099692
  ref <309>: DATABASE ENTRY DATE: 2002-08-28
gtttcccgataccgccgcccctctcaccaaattcggtctcctcgttgctcctcctcacaaattagttgcgggaacggattcccctcgatctcctccaagaaaccccttgaatgccgaatcaaatcgtgtggaatcaacgcggttttgagttattattttacggcgaaccttaaccaatccaccgccaaatcctctctggtccgagccgatttcctcaacctttgcctataaatagcagcccctggacctcctcttccgtttccctcttcttcccgagcttttccctaaccctagccgtctccccgcagtcgccttctctctccaactccggccgccgctccagccggtagtagccgtcgcctccgccatctccggtcagtgccgccacctccctccgctccgcaaggttgatctccaccccggccaccggtttccctccgccaaatcccgccggaaggttgccgtcaccgtgaaccagtgggttgttgccacggtttggtctccagccgcgccgttcgtcgtcgtccatcgtcgccttgggtcgccgccgcctccattggattcacagagacgagctctaccccgtccacccctccgttgccaccgctcgtcgccggaaagctgtcgctgccgttgaccagtacctcgccgtcgtcccgatctcgtcgccggccatctcctttgccgctcatcgctgcgtaagtgttgcgtcgtcgtcatctccgtgtgttgccgccaggtcgttgtcgccgtctctccctctccgatcgctttggtttgcttgtcgtttccgtcgttgcgaaggttcgtgagtgcgttggaagtgattcagaagattaagtgaagaccgattattgcaagacgcgcggcgtcgttgcgttgtaggatcgaggaggagtagcggggatggggcggccaccaatgccaagcacggggggcccgggtttccggttcacgcaggaggaggtggccgagatggagtcgctcctgcggcatctcaacgacggcatcccggacggctccttgatccagtccctcgccgacaggttcaccgcctccgccgcgcgcgccggcaaggtcggcgtccggtccaagcaggtaatagcccgtgtgtctcctttccggtggggaattcgatcgcttatgtccttaattctgacacgttgatccgggccggggttggtgttgcgcgggaggtgtggtactggttccagaaccggaagtactcgcagcgctctaggaactcgaccaagatgctaccggcggcgtctggcgaccacaagtcggccttcgctcgctcctcagttcaaaaatcagtaaagtattctttggagggtggccagctcgagtttgaggcaaagtccgttagagatggtgcatggtatgatgttgctgccttcctttcccatagattgtcccagtctggtgaactggaagtatgggttcgattttctggatttggagctagggacgacgaatggattgatgtccgtacatgtgtgcggcaacgttctcatccatgtgtgtcaaccgaatgtgccgctgttcttcctggggaccaaattctttgcttccaggaaggcaaacatcaggctctgtattttgatgctcatgtccttgatgctcaaaagcgtaggcatgatgcaagaggttgtcgttgcagatttcttgtttgctatgatcatgatgactctgaggaaattgttccactgaggaagatgtgtcgtcggccagaaactgactacagacttgagattctacatgctgctggagcagcaaatgctgctaaagaggctgtggttgattcggtgattgcttagtcacttcgatcgaaagggtaatatagttgtcaggaatttccactccaaacatagtggttgcttaattaggacccaatgtgattgttgtatcattgacttgatttctattgcacaaattaggtatggcacacaaattttagtttacatattatgccaaaaagtgttgaagcggctatggatcgggtgcccgatccggagccaaaaaattggggcccataccagccatctagcgcgcgcaacttgcctcgacc

SEQ ID NO: 24251 - DNA, 2141 bp, Oryza sativa
  ref <308>: DATABASE ACCESSION NUMBER: AK099693
  ref <309>: DATABASE ENTRY DATE: 2002-08-28
gagcaaaacctttcgccgcgcagccacctaaacccctctcctcccccttcctctcccgccgccgccgcgcgcgcgagccggcggccatggcgcccgcggccgccaccatccgcgacctgctcacctccttcagccccgccgcggacttcctcgccctctcctctggcgacggccgcatcaaggtatgggacgccgtgcgcggccaccttcagaccgagttcgctgatatcccgccggtggaggtgggcggcggcgcgcgcgcccccggggcgaagcgcggtcacctcgcactggactacacctgcatgaagtgggtacagctatcgagcaagaagaagcggaaggcagggagttcgctgctggtgcttggcactggcagtggagatgtccttgcacttgatgtcgccgcagggcagtggaagtggagggtcactgattgccaccctgggggtgtcacagctgtagcctactcgaagcatgggcgaagtttgtacaccggaggcactgatggcatggtctgtaggatcaatgcctcagatggctctgttgtagagaaatttaaatcttcatcaaaagcaatttctgcattagctgtgtcaccagatggggagattttagcaacagctgctggccagttgaggacctttgatgcttctgataacaagaagattcaaaaattctctggccatccagtagctgtgaggagcatggtttttagtggtgatagccaatatgttctgtcatctggagttggggaacgctatgttgccatttggaagttgggtagtggtaaaactcagagttcaagctgtatactctctatggagcatccagcgatctttgtggactgtaaatgttcagacattaatgatacagaaggagaaatacatgtgttggctatttctgagattggtgtctgctacttttggtctgggactaatatggatgacctgcgtaataagaagcccactaaaattgcattgtctgattcctctctttcaagatctaagcaaggttttgcaatatttgccgcaaaactgcaaggaatagatggccctaattctgcacatgttctgctggcttatggatctgtggtgaaaccgtcttttgacaaactgttggttcgttatggcatggatattagtttgggtgtatctgatgatggagttctcttacccatgattcaacccacaaagcctcagaaaggccaatctgctaaaaagcaaggaattataacggctctagaccgtgctaatgcagaagatgcaatccttcctctcccacagctccatacgcaggaaaagaaaaggaaacataatgcaacagaatccagtggtgacatccagtctgcacctcatagtgaccttagttctacaaaattgattgagaaaagagctcctatgcaaagaattgaagatgacagtgtatgcatcgaagacatgatgcggaagtgtggagttattgattctagagttgatcagggcatggaaggtcatcctagcatacccactagtattttatctgatctatttggcagcagcagtaaaatcgatgctaatttacccaacaagaagattcgagcacatctaagatccttgaagcctggagatgcttgcgaacttttagaaaaattagtatcttcatggaaaacaagatctggtagtgcagaggttgttttgcggtggatatactgcttattaattatccatggtcgttttatcccctttgagaaatctaaaaaaataattagcgaccttgagaagatgtgtggggaaagatacaaagcagctgaagatttactgaagctttctggtcgtcttcgattgctcatggctcagatcgtcaaggatccaaacgatgtttctgagcttccatcagaggagatgcaggattcagcggctgctcagtctgatgaagaggaggaagatgatgaaattgatgaaacggtgtatggtgaagacgctgattcgtctcaaacaagtgatgacgacgctgaatagaaacactgagactaagcgtagcattcttatgatgtgttgttttatattcaaacttgattaccccgtagtcaggtttgtatgactaagcaaccccgaagggttgcgcagaattttgacgaggcgaagcatcctctgaattcc

SEQ ID NO: 24252 - DNA, 1577 bp, Oryza sativa
  ref <308>: DATABASE ACCESSION NUMBER: AK099694
  ref <309>: DATABASE ENTRY DATE: 2002-08-28
gacactccacaccccatccaacccccaccaccatgtctcccaagaaggacgccggcctctcgccgccggtggcggcgccgccgccgctgtcgctcgccggcgtgcccgtgctgacggggagcctacgccccgcggagtgcgccgacctgctcggcctggtcgccggcgtgaagcgcccgctcgaggacgtcgtggcggacttcctcgcccgcatccagcccgagcgccgcctccgcttcggcgccgccataaacttcgtcctcaaggacaagatgatgcttcgaccagctgagcgtttagttgcattcacaattcttcatcaaggttattcctcacagttggaaaatccctttgttcctctaataatacatgctgcttgtgatgaaacctctgataaaccagaacagttgtttctccaacttctgttaaattcaactaatggggacaacgatagggagattctgaagcattctgctgcagattacttggaggaatctgcttatgcatctcaggtcttgctcaccagagagcagcttgaaagacaatatacctgcaatgaggtgcaaccccagcctagcactggtagtttcagagaagctactgttagaagtgttattcctgatccagatatttctcaaagctgcactgattcatcagagatatcaataaccaaatcaaatagagataatttggtcacttgtttacttcaacaaacatcacttgatggaattggtcctcagtggatacggcctcctcctccaagacttgaaatacttgatggagagttgcagtggctgaacctagacaacaaccacgagctattgtgggacagtagtatgtgtgctgatactagtcgaggtgctgcgatccgagatttagttggaaaagcttgtaaagggcactttcacctgcccaacaggagcaagttctggtggaattggcaaaggactggaagctagtttatcattgtgggatgacaccacagaagctccctgaccttgtggaacataatccactcgttgctgttgaagtcctttcaaagttaatcaactcgcctgacatggatgcttactttgatattcttgtgcacatggaaatgagcctacattcaatggaagttgtaaacaggctcactacagcagtagatctaccaccaggattcattcatgactacatctcaaactgtattcgatcatgtcaaaacattaaggataaatacatgcaaaacaggctagtaaggctagtatgtgttttcctacagagtctcattcgaaacaagataataaatgtgcaagatctcttcatcgaggtacaggcgttctgcattgcgttttcccgaataagagaagcggctggtttgttcaggcttttaaaatcgttagagtgaagaaggatgtatggtttaaacaaaaattttccatggtgtacatccatagtttttcatgttgtactttaccgctagatcttgatagctgtcgacttcatagaatatagctctgtcatgtactagttgtcatcattgaactttacccctcatctcaaaaagaaaaaaataacccaaaaaagatttcaggacc

SEQ ID NO: 24253 - DNA, 1905 bp, Oryza sativa
  ref <308>: DATABASE ACCESSION NUMBER: AK099695
  ref <309>: DATABASE ENTRY DATE: 2002-08-28
ggcagcttgatccccccccccaaaaccaaacggaggcgagctcgccgccgttcaccgccgccgccgctgccatggacgtcgcgtcgctgctcccgttcgcgctggctggtggcgatcccgatctcgctggcgctgctggaccggctgcggctggggcggatcccgccggggccgcggccgtggccgatggtggggaacctgtggcagatcaagccggtgcggtgccgcggcttcctggagtgggcggagaggtacggcccgatcgtgtcggtgtggttcggctcgtcgctgaacgtggtggtgtcgacgtcggagctcgccaaggaggtgctcaaggagaacgaccagctgctcgccgaccggccgcgcaaccgctccacgcagcgcttcagccgcaacgggatggacctgatctgggcggactacggcccgcactacatcaaggtgcgcaagctctgcaacctcgagctcttcacccccaagcgcctcgaggccctccgccccatccgcgaggacgaggtcaccgccatggtcgagtccgtccaccgcgccgtcacccagccaggtagtgaacataaaccaatcgtagtgaggaatcaccttgctatggtggccttcaacaatataacaaggctagctttcggcaagaggttcatgaatgcaaatggtgacattgatgaacaagggcgtgagtttaagactattgtcaacaatggaatcaagatcggtgcatctctttctgttgctgagtacatttggtatttgaggtggttgtgtccacttaacgaggagctttacaagacccacaacgagagaagggatcggctgaccaagaagatcatagatgagcatgcgaaggccctcaaggagagtggtgccaagcagcactttgtggatgctctgttcactctcagagaacagtatgaccttagtgacgacacagttattgggcttctatgggacatgatcactgctggaatggacaccacagtgatatcagtcgagtgggcaatggcagagctggtcaggaaccccagggtgcagaagaagctgcaggaggagctggaccgcgtcgtcggccgcgaccgcgtcatgtcggagaccgacttccagagcctcccttacctgaacgccgtcgtcaaggagtcgctccggctgcacccgccgacgccgctgatgctcccgcacaaggccagcacgaacgtcaagatcggcgggtacaacatccccaagggcgccaacgtgatggtgaacgtgtgggcgatcgccagggcccccaaggtgtggagcaacccgctggagtacaggccggagcggttcatcgaggagaacatcgacatcaagggcagcgacttcagggtgctccccttcggcgccggccgccgcgtgtgccccggcgcccagctcggcatcaacctcgtcgcctccatgatcgggcacctcctccaccagttcgagtggtctctccccgagggcaccaggccggaggacgtcaacatgatggagtccaacggcgtcgtcacgttcatgagcacgtcgctgcaggtcatcgccaagcccaggctcgacaacccggacctgtacaagaggttccctgtcgagatgtgatcgaacagtttgctttgctgcctgctgctgctggttatacagacagactggagttctgctttcaaagtttcagctattgctcatgatgttgttgttgtaaaatttgaggtgttaattgccttgtgaatgaacgaatcaatcaatctcgtaaagttatcgagagcagatcgacttttgtaatttgtacaatatgactatgtacttaaggtgttttgttcagatagaattttgtaatatgattaacacgacaagcgatgtattttgaggtgtcattaatgaataataataatgtaatgc

SEQ ID NO: 24254 - DNA, 1837 bp, Oryza sativa
  ref <308>: DATABASE ACCESSION NUMBER: AK099696
  ref <309>: DATABASE ENTRY DATE: 2002-08-28
tggaggctgttgctggttcggttcgttggtgtgctttgctcccgttttgccccttttcgctgttgcgcacatggcgagcaccaggggacattgtggatactgcgtcgacacttaggatttgccccgctcatctagtgtacgactttagctcctcgacgccctgttcatttcgctcgaaggtcttggtggggttcgcgctgtaggccaggacgctcggccgaggtgactctgcccattggcttcttcgctagcccatgtctgcacgcgttcctcgatcctacgagatgggacacaccctgctctctgatctctcccttggtgacgacaacgagcgcatttgtgttcgggtttcgcgattttgggctttctgtgaccaaaaggatgatgacaagattcttcactttggctttgtcctgattgatgagaaggggactagcattgctgctcagatttatcccccatgtgatgagatattcaggccaatcatcactgaaggcaaggtgtactacattaagtacttccgtgtgaggaagtgtaacaggcagtacaaaccagtcgacaactgcatgtccatctatttcacaaggtggactgaactagaggagcgtgtcgatccaccagctgagattcctttgtatacttattcactctcaccatttggcggtcttcgctcacgtgttggcaagaaagactcattcacagatatcattggaattattactcagctgtcgcccgtgactccgcttcaaggcaccgtaaagaggagtgtcttcatccgcaacactgacaatgcaatcttgaatgtggcgctttggggggaacgtgcaacaagctttcctgccgatgaggtgtttgttgctggtcagaaagaaccacagatagtaatcttcgttggcacccttgtgaagggctatggcgatgtctctttatcaggtaactcagcctgcaagtggtacattaacgcagacacacctgaggtcatctctctgagaaacagcatctaagcaacctatggtcctatagagtggactgatctacctcctgcagcacctgcttatagcaatgctgagcccaagacgattatccaaattaaggatctgaatcctttcgaattcaagatacattgtgtgatttatacacttttgctatccaaattccctagaatgagctataaccattgtttcatacctcttttgtgcagaaacatgaattcttggttgctgttgtcatcaagaaaatagacatggagtactcttggtggtacactgcatgtgatatatgcaggagaacagcaaggccatatggaaacgcatacaagtgccagaatgagtcatgccctcctcttgtgggagcatcacctaggttcaagcttagcgttgtggcaggtgatgacacagctgacgctaagttcgtgctctttggccgcctagcacagtgtcttattggtcgatcagtggagattctgttagagggcaacgctgccggcaaggaggccatacccaaggagatcacaaatttgcttgaggaaaatttcacctggaaagttgctattaccgagaataccatgtcttcaagcaatgtctcattccaagtgaatatgattgtcggaaacggcaacagccagaatcctgccacccacaatctccatctgcatctcaggcatcctccatggtaccttctctagctctatcaccaagtgtaacacatgaactctctgttggccagtccacagcagcatttgctccatccattggattcagtgatccgcctgccactccatcggctggattaaacagtccgttggttgttggagccaaggacaaaaatgatgatgttg

SEQ ID NO: 24255 - DNA, 2321 bp, Oryza sativa
  ref <308>: DATABASE ACCESSION NUMBER: AK099697
  ref <309>: DATABASE ENTRY DATE: 2002-08-28
gtgcagcgctcctctgctccacgcgccacccgccaccgcgccgcccaccgcccgccgtcgctccgtcaacagcccaccacccgtcaccccctctgtgctgccgccgctcgccttcttgtagtatagaggggagagagaggaggaaggctgacaggtgggaccaaataggccacaccttttttaattattttttttagctgacatatgggtcccatgatttttactattttttcggataaaattgtcacgaaagcgccacgtcaatgccacgtaatcgccacgtcagtgccacgtgggtcgaagacctagtcaaaggagccacgtaggcgccacgtccgccaaaaccgccctccatactgccgagggacattgtttgcccggttttcgtaagttgggggacgagtcatacccggttttgcggtcaagggacgaaaatcaaactgaccgacaaatagagggacctaaagtgaacttattcctttttataactagcatgtgggcccatagtttttattattttccacttcaaattacaacgtaagcatcaagtcaacaccacgtgggacaaaaactagtcaaatgagctacgtaggtgccacatcagctaaaactggagacaatactgccgagggaccttgtttgcaccggttttataaactgggggacatgttatctggtttttcagttaagggcgaatattactgggcgacaaattaagggacccaacatgaacttattctcttttgttgcaagtttgtgaattcttgggtcatactgggccgtcctgtctgcatgggctgcaagtagatagcccaggtcgacttcttttctgcttttgactgttccgaatataaaaataaattatagtaaaaaaaaagaaagaaaaaactccaagcaggaatcaattccacgagatcaagaagaagaggaagaagtcgcttcgcgggcgatggcgagcagctcgtcgccgccgccgccgccgcagattcgttgcgcctccttcaatcaggacaacagcttgttttatgtcgggacgaaggatggattcaggattttcgatgcccatacagggaagctccactaccagaagaatattggtggaatcggcaatatggaaatgtactttcggacaaacattcttgctatagtcggaactggtgaacagcctgtactatctcctcgctgccttcgccttatcgacaccgtagcagctgtcacaaagaaagatctgaactttaagacttcagttttggctgttcgattaagtagaacgaggcttgttgttgtattgcaggacaggacctttatttatgatgtaaacagcactactatattggaagaaattgaaacagttcccaatacaaaaggtctttgtgcattcgctcctaattcagaagcatgttatttggccatcccagcaagcacatccaaaggatctgctttagtttataaggcatcagaacctgaattaatatgccagatagatgctcacgagtctcccttagctgcaatggcattttcttctaatggcacgtacctggcaacagcttctgggaagggtactattattagagtatttctcgttgcacaagcaaccaagtcacacagttttcggcggggaacatacccatcaacaatatattcactctcattcggaccatcggatgatctgcccgatgttcttgttgccacaagttcatcaggctcgttgcacatgtttttcctcgatgctgccagaaatcgaaggaaccaaacgagcaaattgcttggttcaatgattcctggagcaataactcgtgctttggatccagcaaaccatcacattattcacaacgtcatccctgcaggaatcaagagctgtgtagccgtacataaggtcgaaaattcacaaaattcttctaaacttcctgctttaaggactgttgtctatatcataactcatgatggatacttccgcgagtactcgatcaacaccacaaagtcaaatgaatcttcctgggttttgcaacgcgagctcaatctactggataccggttgtagcactccccagcgggaggaacaacacaaggactgactagcagactagttggctcaccaatgacagaagcttcagctgtgtgtacatacaatttgtaagatagtgtgctggtagggctggtctgtggtttgggctgagattctaactccaattggacaagtgtatcatagatgtgcccaccaatggtgagggatgattcatccttcttgtggatgtaaattatagatagtaactgccaatatggcaatataattacactacaagtatatgtaactgctttgct

SEQ ID NO: 24256 - DNA, 1980 bp, Oryza sativa
  ref <308>: DATABASE ACCESSION NUMBER: AK099698
  ref <309>: DATABASE ENTRY DATE: 2002-08-28
gagcgtcgatcacgcagcgcgggagatcgcgcaaagaaccgagaagagctcatctcatccaccatcactcgcgcagagagatcgatagccacagcgcacaagcaacgcgccgccaatcacatgcgcgcggcggtgcaggggcgggcacatgcgtggacgacgacgacgacgacaccgccgggcgcgatgagaggccgggcgctggtcctcgtggccgcgctgctgctgcagctgcttctcctcgccgctgccggtggcgcgggcgcggcggcgacggagaggaaggcgcacaactacgaggacgcgctgcggaagagcctgctctacttcgaggcgcagcggtcggggcggctcccgcacaaccagcgcgtcgcgtggcgcgaccactccggcctcaccgacggcctcgagcaaggggtggatttggtgggaggctactacgacgccggcgaccatgtcaaattcgggctgcccatggcgttcacggtgacgatgctgtcgtggagcatgatcgagtacggcgacgacgtcgaggccgccggcgagctcggccacgcgctcgaggtcatcaagtggggcactgactacttcatcaaggcgcacaccaagcccaacgagctctgggctgaggtcggggacggcgacacggatcactactgctggcagcggccggaggacatgacgacgtcgaggcaggcgtacaaggtggaccgggagcggccgggctccgacgtcgccggcgagacggcggcggcgatggccgccgcgtccatcgtcttccgcaagtccaacccgcactacgcgagcctcctcctgcaccacgcccagcagctgttcgagtttgccgacaagtacagagggaagtatgacagcagtatcgccgaggtgaagagctactacgcgtcggtgagcgggtacaaggacgagctcctttgggccgcattgtggctgcaccgggccaccggcaaggcccattacctcgactacgtcgtggacaacgccgactgcttcggtggcaccggctgggccatcaccgagttcagctgggacgtcaagtacgccggcgtccagatcctcgccgcaagactgctgctgagaggagagcacgaggagcggcacaggagcacgctggagcagtacagggcgaaggcggagcactacgtgtgcgggtgcctggggcggaacgcggacggcggcgcggacgcgaacgtggagcggagcccgggcgggatgctgtacgtgaggcagtggaacaacatgcagtacgtgaccaacgcggcgttcctcctcgcggcgtacgcggactacctgggcgacgacgcgggcggcgccgtgtcgtgcgcgggcggcgagacggcgggcgcgggcgaggtggcggcgctcgcgagggcgcaggtggactacgtgctgggcaccaacccgagggggatcagctacctggtcgggtacggcgccaagtacccgaacagggtgcaccaccgcgccgcgtccatcgtgccgtacaagcacagcaaggagttcatcgggtgcacgcaggggttcgaccactggttcggtcgccggagctccaacccgaacgtcctcgtcggcgccatcgtcggtgggccggaccggcgggacaggttcagggacaaccgggagaactacatgcagacggaggcgtgcacgtacaacacggcgcccatggtcggcatgttcgccaagctgaacaggatggcccggcaggagagggagcaggaggaggtggcggctccggcgaggagtacggcggccgatgtgtaaatagattaggttatagagggggggctgtacaattttccccattcttttgttcatttttcttctccttctttggagatcttcttttcacacagattggaaaaattcattttgtatacaaaaagagaaagggacgggtggaggcattcgcatgcaaatgtaaattcgccaccggtacatacgaagaaaaagaattttatc

SEQ ID NO: 24257 - DNA, 3215 bp, Oryza sativa
  ref <308>: DATABASE ACCESSION NUMBER: AK099699
  ref <309>: DATABASE ENTRY DATE: 2002-08-28
gtcaaccacatcacatcacaccagacgccaccacgccccccgagatctctcccacccccgaccagcctcgagatcccagcgcccatgtcgtcgtcggccatggaggccatggacgagctcgtccagctcgccgagtccatgcgccaggccgcctccctcctggccgacgacgacccctccgacgaggccagcccgcgccgcccctccaccttcctcaacgccgtcgcgctcggcaacgtcggcgccggcaagtcggccgtgctcaacagcctcatcggccaccccgtgctgccgacgggtgagaacggggcgacgcgggcgccgatagtggtcgacctgcagagggatccggggctgagcagcaaatccatcgtcctgcagatcgacagcaagtcgcagcaggtgtcggcaagtgctctccgccattcgctgcaggacaggctgagcaagggggcgtccggtggatcagggaaaggccgaaacgatgagatttacctcaagctgcggacaagtacagctcctccaataaaattggtcgatttgcctggcatagaccaacgagttatggatgattcaactatcagtgaatatgctggacataatgatgcaatattgattgttgtgataccagcaatgcaagctgctgatgttgcatcatctcgagctctcagactagcgaaggatattgatccagatggaaccagaacaataggtgttttaagtaaaattgatcaagcatctgcagatgcaaaaactgtatcttgtgttcaggctatcttgtctaacaagggtgcaccacgagcagcagctgaaattgagtgggttgctctaatagggcaatctgtctcaattgcatcggcccaagctggatcagttggttctgagaactcactggaaactgcctggcaggctgaagcggagacactcaaatccatcctaactggagctcctcgaagtaagctagggagaattgctctcgtggataccattgctaagcagatacgtaaaagggtgaaaattcggctacctaaccttttgtccgggcttcaggggaagtctcagatagtgcaaaatgaacttgcaaggttgggagaacagatggtatcaagcgctgaaggaaccagggctgttgctttggagctttgccgtgaattcgaagacaagtttcttgcccatgttacttctggtgaggggtctggttggaaaattgttgcaagctttgaggggaagtttccagataggatcaaacagcttcctttggacaggcattttgatattaacaatgtcaaaaggattgtcctggaagccgatggttatcaaccatatttgatatctccagagaaaggtttaaaatccttaataaaaggagtacttgaaatggcaaaggagccatcacggctgtgtgttgaagaggtacaccgtgtattattggacatagtaaatgcttctgcaaatgctacaccaggacttggaagatatcctccattcaaacgcgaggtcgttgaaattgcaaccaatgcattggatgtcttcaaaagtgatgcaaaaaagatggtagttgcacttgttgatatggagcgtgcctttgtcccaccacaacacttcatccgtttagtacaaagaagaatggaaaggcaacgtcgtgaggatgaggtgaaaaacaggtcatctaagaaagcccaagatgcagaacagtccaacaagggctcaggcacaggatctgagcaatctggtggtgccttgaaatcgttgaaagagaaattcagtcagcaagacaaagataaagatgcaaaagagggaccaaatttgcaggttgctgggcctggtggtgaaataactgcaggctaccttttgaagaaaagtgcaaaaaataatgaatggagcaaaagatggtttgtcctaaatgagaagagtggaaagcttgggtacaccaagaaacaagaggagagacattttcgaggtgttattgtcctggaggaatgtaatctggaagagatagaagaggaagagctttccaagagtttgaaggattcaaagaaggccaatggggcagagaaaggcccaagtcttgtatttaagattactaacagagttgcctacaaaactgtgctgaaatctcatagtgctgttatactgaaggccgagactattgctgacaaggttgaatggatgaagaagataagaggtgtcattcaaagcaaagggggttctgtgaagggtttaaatactcctgagggtggttccatgaggcaaagccattctgatgggtcccttgatacgatggcccggaagcctgctgatcctgaagaagaacttcggtggatgtctcaagaagttcgtggttatgtagaggctgttttgaacagtttggcagcaaatgttccaaaggcaatcgtactttgccaagtggagaaagcaaaggaagatatgctaaatcagctctacagcaaaataagtgctcaaaccaatgcaaagattgaagaacttctccaagaggaccacaatgctaaacgtagacgggagaagtaccaaaaacaatcatctctattgtcaaagcttactcgtcagcttagtatccatgacaatagagcttctgttgcatcgtataccaatgatagttctggagctgagagtagcccacggacctctggccagtcaggtgaggactggaggtctgcgttcgattctgcatcaaatggctctgttgatcgatccagttcacacaatgaaacaaggtcaagaagtgctgacagccgtggcaaacgctatgaaaatggggacgtgaatggtggtaactctggcagccgacgcacaccaaaccgtttgccaccagcacctccagggcaaaaatattaagcatgttgatcatcatccgccaacatcatattttcatgctaggtatgaagtacaacggaattgatgcatcgagaaccatttgattcagggggatggcatgcatgggctcgaagaatagagctgacgagagatttgcatgaatggtgtgtatccagaggatctcagttgttcatagaaatatactcctatagtttatctacagttgtttcacgatcattttggcatattgatctgtctgaggctcgctcagcctgtgggtgtgggattttgttaccacagatcggttgatcttggtcttgtactctgctgttgtaattcttccatcaacttggcaatgtattatttcttccattcttttt

SEQ ID NO: 24258 - DNA, 2167 bp, Oryza sativa
  ref <308>: DATABASE ACCESSION NUMBER: AK099700
  ref <309>: DATABASE ENTRY DATE: 2002-08-28
gaatttcctggacatgaagctgcaatggcagcatgtctggtcgtagtcaactagccagccaccaaagagagagctatcatccatggccgccgtggcggcggccgagaaggcggtgaggtgcctcggccgcggcttcgacatggccggcgacctgaggctcaagtactgcaagggcggcggcgccggctgcctggtcgcgaggcgcggcgagacgacgccgctcaccgtgccgggagtcggggtgatcgccgacgtgccggccgacgtgaggtgcgacaagggcgaccgcgtccggttcaagtccgacgtgctcgagttcaacaagatgtcggagctgttcaaccagaggagttcggtggaagggaagatcccgtcggggcagttcaacgcgtcattcgacctggacagcgggtcgtgggcccacgacgcgccgcacaccaggtgcctcgctatggacgggtacttcatctccctctttgacctccgtctcgaccaccgccacctcgccctcgatgcaggtgtcctcgccgacgtgccacccgcctgggacccctctgccatcgcaagattcatcgagaagtatgggacgcatgtgatcgtggggctgagcatgggcggccaggacgtcgtctacgtgaagcaggataagtcgtcttctctgtcgccgtcggagatcaaggagcatcttgacaggctcggcgatcagctcttcaccgggacatgcgccatgccacctctgcactgcaggtccaaggacaagttcaagataccggaggccttcaacgtgttcgatgcacaagtagctcagcagaggcttcacgggatcaccactcttgtatcaagcaaggagggtgtgacggtgatatactccaagaggggagggaacacgacggtgagcagccactcggagtggctcctgaccgtgccggcgatgcccgacgtgatcaacgtcaagctcgtccccatcacctccctcatcaggggcgtgcctggcactggcttcctctctcacgccatcaacctctacctcagatataagcctcctgtcgctgacctgaggtacttcctggatttccagcatcactgcgtgtgggccccggtgctcggcgagctgcctctgggcccttgctcacaccggcaaggctccagcccggcgctgcatttcagcctgctgggctccaagctctatgtcagctcaactgaggtggttgttccgaagctgccggttactggcatgaggctgcatctagagggcaagaaaaacaaccggctgggcatccacctgcagcacctgtcgacgacgccgacgttcgtcgccgccgccagggccgacaagccgccggtgtggcgtggcacggaggcggtcaccgacgaccggtactacgagccggtgcagtggcggatgctggcgcgcgtctgcaccgcgccggtgaagtacgacccgcggtggtgcgccggcgaccgccgccgccgccccgccgcctgcgtcgtcgccggcgcgcagctccacgtcgtggcgcacgacgccgccaacaacgtgctccacctcaggctgctctactcccagctccccggctacgccgtcgtgcagtccaagtgggcgcgcggcgcggcgcggccgccgtcggggaggtcgtcgagtttcctgtccatacccttctcggggtcgccgtcgacatccagtggcgccgccgagaagggaggccggccggagcagggcgcctcgctggtgggcgtcgccaacgtcaactccggcgtgttcgccggcgggccgccggtgcccgtcggcgcgcagaagctgctcaagttcgtggacacgtcgcaggtgaccatgggaccgcaggatagccccggttactggctcgtcaccggcgcaaggctggacgtcgacaaggggaagatcatgctgcatgtcaagttctcactgctagcccaagtttcttgacgacgagtcgacgagggtgtcaagatgttcatgaccatcccgtgatccagagtttgtacagttttcagctgccaaatgcagatatgctaacaactgaaaaaacagaatattccaaaaaatttgatttttgattttttttttttggtttggaccctgaagatgttgcaacgatctgtaaatgaaaaaagatagtaggaaccagaggtatcattctaacactgc

SEQ ID NO: 24259 - DNA, 3368 bp, Oryza sativa
  ref <308>: DATABASE ACCESSION NUMBER: AK099701
  ref <309>: DATABASE ENTRY DATE: 2002-08-28
gaaggggcaatcagccaaacaagtaggcagttggcagagtggacgggagacgggagggaggccaccatggagagctcgccgccgccgccgccgccgaccatcaccgtccaggtcaagttcggcggccgcacgatcccggtggaggtcccggccgccgccaccgccgccgacctgaagcgcctcctccagccgctcaccaacgtcctcccccgcggccagaggctcatctgcaaagggaaagttctggcggatgccgccagcctgagctcgatgcaggtggtgaacggatccaaggtcatgctcatggcctcgcaggggctccatcagggggacggtcccatcactaagaatagtagtgttccagcaccaagcacgagaagagcctcaaatgtgaaggaagctcaaatacaaaagtcggatacaaatgtcagtaaaatccgacctgaacgttggaaagcaactggtattattgcattgtctgattccagcttgaaggtaactgattccaactttcttacattacttttaaactaagcaacttagcgtagttatgctttgaagttcatgaaactttccatgtctgcctttctatcaaaagcaaattgaagtgcctgtgccaaaactgccaatcgttggtaaggaaaaacatgcacatcgctagagtattatttgtatacttttgtagtcaccacagcctgtagaaaatactataatagtcttgaacatactttctttaatgcatctgtttgcaaaatgctattcatgaatcatgattggaagactgatttatatggcacaggcgcacagccatttgactgccgctatcaactgaatcaggattttcagtgcatacaaggcatctattattcatcaccacgtgataaagcaggccttttagttgttcagcattcaagaacttcattgatattccttactatccattatctttacccttttgaattaagagtcttattagctgtttctcacacttttgtttgttcaacacttagggtgtgtttggttgcctgtatgaagggtggctcgcatctcctcagcaaaattcgctgtgtttggttgcctgcatgggcatgggagccaggctcagctgatgcaaaaaggaccgttgggccaggctgaggggaaacgcaggaatcgaccgtagctcctcagccaggctaggctcatgcacacgcggggatgagcgggtgcagccgcgggatgagggggtgcaggcaacgggcaggggtcgagccatctcgcaatcccctcccctcatttgtttcctcagcaatcggtcgccgtcgtctccatcagtttccctcctcttcaacggcttgagcccgggcagatccaggaggaagaaggctcgacgagggtatccagccgtctggtgagctcgagctcggccatatccaaggaagaagagggccagatccaggaggaagaagagggcaagaggaaggagggctcaacgaggatacccggatctggtcgcttggagggcaacgtcgccaccgccggcatcatcttcctcctcttctcctcgttctcgccggcgctgtcttcttcgttggctcccaactccctccttcaggacctgcgatgttccggatccagtgggcagggcgtccggaagcaacagatccggagccacaaactccgacgacagcgacagacggggcgcaagggggaggagcgacgagcggcggtcatgggctctcagcgtcagcggtctctgtcgaccagcgatggggacgaaggcttcgagggctttctcttttcttttttttttccttcttttcttctttttctcgccgattaagcccgtgattaggaacgtttgcttgttttctttttcttgccgattaagcacgtgattaaggaacgtgtactgctactgcgtaatttaccgtttcgatcttttattttgtgaaaattaataatacagtcctgtcatgttacaatttattgagtttctatttgttctacctaattaaatttgatactacattttgttcaaatttgaaagattatagattagataatatttatgtatggttggctaatatcaccatccaaataaagagacaattgagttcaaagtacatgcatccaaccaaacacaatcttttgcatacaagtttttatatccaaccaaccaaacaatatctcatacgagccgggctcatctaatacatacaaccaaacaactcctattgcatcattctaaccaggctaaacccagcctggatgaggcatacgagccaggctgagtgcattcgagcaaccaaacacacccttaatttcacttttggttgaatttttgggcttatactgtggttgtcttttcgagtaggcagtgcctgaagaagtatggggctgtggttcttctattagagtactggatgtcagtaacaactgtattgaagcaattccacaagaaattgctgctctgagatctttacagaaattgatcctgactgctaatgatatagctgatgggaacatttcctgggaaggcctaacatgtgttcaaacattaacagttttatctctaagccaaaatcggctggtcactttaccttcaagtttgggctcaataactcatttacgtgaacttcgtattgcaaataacaggcttgagaacttacctgttgaaatagggttactgaagcatcttgagattctgatagcaaataataataggataacttcattgccttcatctataggtggttgtgaatctctcaatgaggttgatttgtcatcaaatcttttggctgaactgccagaggcttttggaaaccttcaacatctcaaggctttgagtgtacggaacaatggtcttacatccctaccttcagctttcttcataaaatgctcgcagctcattacacttgatctccatggcactgaaatcacaaacgacgttcttcggcaggtggacggttgggaggagtttgacggacgtcgaaggaagaagcatcaaaagcagctcgatttccgggtgggatcatcagttgtgttcgatgaaggtgcggatgacgattacaggcgtttataaataaaatctctctttggataagattgtgtattttatgtctccagcttaatccgttgtcgcaagaataacttgtatacttaagaacaaattaggagctgatgttgctactcacatcaatcctagatatgtacttgtacttcatcctttttcaaaatcccttctttttagggattctttaaactgtttagggcatcaagagtggaaaaacattactccgtccatttctatttactcgtgactgttgaccaatcctgttgtaactttgaccactaataaattttgaatggtttgaattatgatgaac

SEQ ID NO: 24260 - DNA, 1900 bp, Oryza sativa
  ref <308>: DATABASE ACCESSION NUMBER: AK099702
  ref <309>: DATABASE ENTRY DATE: 2002-08-28
gagaagaagagagaagtccatctccctcaaggagcatcggctgctggcgctgcagtccataggagtctcagattcccatctcgtcgtcttatccctccactccgctccacacaatcttcttcttcctcctctcctctgtttatatacaactccttccctcccccattcgcccgcttctgcatcccgaccagacgtcgagtcgagcattaactcagtcagggtggccatggcgctcaaggtcgtctctttccccggggacttggccgcggtctcattcctcgactccaacagaggaggagctttcaaccagctcaaagtggacctcccgtttcaaacgagggacagaagagcagtttccctgagaaggacttgctgttcaatgcaacaggctccaccaccagcatggcctggtcgagccgttgttgaacctgggaggaggtcatgggatggccccaagcctatctcaattgttggctcaaccggttctattggcacacagacattggacatagttgcggagaatccagataaattccgggttgttgctcttgctgctggctccaatgtgactcttctagctgatcaggtgaaaacattcaaaccaaagcttgttgctgtaagaaatgagtcattagttgatgagctaaaggaagccttagctgattgtgattggaagccagaaattattcctggtgagcaaggtgtcatagaggttgctcgccacccagatgcagttacagttgttactgggatagtagggtgtgcaggactgaagcctacagttgctgcaattgaagctgggaaagatatagcattggcgaacaaagagacacttattgcaggtggtccttttgtgcttccccttgcacaaaagcacaaagtgaaaatacttcctgctgattctgagcactctgctatatttcagtgtatacaaggcttgcccgaaggagcacttcgccgcattattttgactgcatcaggtggtgctttcagggactggccagttgacaagttgaaagaagtaaaagttgctgatgctttaaagcacccgaactggaatatggggaagaagattactgtagattctgctacattattcaacaagggtttagaagttattgaagcacattatttatttggtgctgaatacgatgacattgaaattgtgatccacccacaatctatcatacactctatgattgaaacccaggattcatctgtgttggctcaactgggatggccagatatgcggataccaatcttatacaccatgtcttggccagacagaatctattgctcagaggtcacctggccccgactagatctttgcaagctgggttcactgacattcaaagctcctgacaatgtgaaatacccgtcgatggatctcgcctatgcagctggaagagctgggggcaccatgacaggagttctgagtgctgctaatgagaaggctgtggagttgttcatcgatgaaaagatcgggtacctggacatcttcaaggtggtggagctgacatgcgacgctcatcggaatgagctagtaacaaggccatcactggaggagatcatacattatgatctgtgggcgagggagtatgctgccagcctacagccatccactggcctcagccctgtacctgtctagtacttgtagcaatacaaaattacagtagcattgtacactactgccgtgccagctccatgcatagtcagcagctggccactctctagctatatctagatgcgagagaattttaaggatgtaaatcatgccttcacatgaataaatcgttcgtccgtgcgttgtgtattcatgtaaattttgacggatggtcaagtaaaaataacaatggcaaattaatttagggaagaatcaaatatgtttgcgttccttttc

SEQ ID NO: 24261 - DNA, 978 bp, Oryza sativa
  ref <308>: DATABASE ACCESSION NUMBER: AK099703
  ref <309>: DATABASE ENTRY DATE: 2002-08-28
ggattgtggcttgataggatcgtccggacctgacgggagaaggcgtgggttcgtgcgacgggacctcgattcgtccatccagcttccactacccctccgcgcgctgcctagatctttcctctctctcgcaccctcttattggcggaggaggaggagggatggtgcgggaggttgcggagagctgtgccgacggggtggtgatggagatggtggcggcctactgcggccgcttctacgccgccaagccggagctcgccgcccgccgcatcgaggccatcggcttccaggtcggccaccagctcacggagagatataccatggagcgccctcgatttagtgatcatcttgaagcaatcaaatttatctgcaaagacttttggtcagagctattcaagaagcagattgacaatcttaaaactaatcataggggaacatttattcttcaagataaccgtttccggtggcttactcgtgtttctatagatccatctgtagagagcatggatgcaactgacaatgactctgcaacactaggggatagcgcagcccaaacaacaagcatgcttctgtactttccatgcgggataataagaggtgccttgaccaatttgggtatttcgtgttctgtcactgcagacatgtccaaccttccagcatgttcttttgttgtgcgcataaaaacatgagctgcagattttatgcctgcttgttcgatcaagcggtttgaacattaaagagtgcaagcacgcaatagcctgggaaatacgccttgtagctgctcctttttctttctctttgttcttagaggcacctctttacttactgacttcatcataccttcctttgtgcacatcttaagattgggtgtaattttgtgattcgtgtgaacaagagaagacaaaatgtaatatttctcctgagatactggctagagccatgtaattttgttgtctagcagtggagaatgttttatcttgt

SEQ ID NO: 24262 - DNA, 3225 bp, Oryza sativa
  ref <308>: DATABASE ACCESSION NUMBER: AK099704
  ref <309>: DATABASE ENTRY DATE: 2002-08-28
gaaggggaggggaaaaaattggaagccctagattttggcgggttggctacggcgaggtgcgggggaggggtcggggtcgggatcggcgggcggatccggtgggtggaggaggttgggcggcgagatctatgcggtggggaggggaggggaggaggaggaggaggggagcggggtgagaggggaggaggaggtggtggatggcggaggcggcgggttcgtcgtcgtcgtcgtcggcgtcggcggtggtggtggctgtggtgattgcggtggtggtggtggtgtgggttgtggtgcggcggaaggtgaggcgcgccgcggcgcggagggaggaggtgctgcggctcacgcggctggcgcaggaggagtcggagatggcggaggtggagtgcgcgcgcgcctactactcggagctgttcccgagcgtcgtgcacgcgacggagatggtggatgaggcggcgtggggggcgccgccggccgtggttccggctcaggcggaggcagaggcggagatggaggcccgggcccagccgcagccgcagccgccggtgggtgccaagggggtctgcgcggtgtgcttccggccgacgacgttcaggtgcaagcagtgcaaggctgtcaagtactgttccttcaaatgccagatagcccactggagacagggtcataaaaatgaatgccgcccaccaagcactgatgctaatcatgatgatgtggctgaactttctgttgcaaaggaaaggaaaattgagcagacaagtgcttctgaagaaaacatagctgaaaccaacacggcagccaccgtgaagaatttaaatgataaaacaaaagatatgccctcagaagtacttgcttcggtggaggttcctgatgatgaccattctgtcagtgcggtcaaactccctcaaagttcttcacaagtagcttctcttggcagtagaaagacagaatcaaatatgaaacctacaactcctgttgaaaatggttcttacacaaaggacttagatgaggcgttggtgtgtagatttcaaccttctccaccaaagattagtggctctggaagtcttatcaacaaagagtccttaattgattccaagaagcaccaggattgctctcaaactagtaacagcaaaaaatatgcagataacaacaatgctcaagctgctctacctgttgcagtagaacctaaaacttccaggactgctcttcatgtggaagttggacactccaagacaaaagctgctggctcagacaacattggtgtgtcaaaaatggtgccatctgttttgactgttgataaagtttctctgttcccggtggacgttctgttacacctaattcatcaaaaagggctgataatattgctgaaaggaattctaaaccatcagagaaatcaatttcaacagcaaatagcctggcaacatctctgaaaaaaattgtcaggcagcaaacagcaccaaaagttgtgaggcattatccatcagagccaacacattttccatatgagcttttcattaagctctatgaaaaggttgaattgcaaccgtttggtcttcataaccttggcaatagttgctatgcaaatgctgttcttcagtgcttaatgtttacccgaccacttacatcatatcttttgggagggcttcattcaaaaaattgttccaaaaaggaatggtgcttcatgtgtgaatttgaaaaactcgttggggagggcagacaaggcaagattgctttgtcaccaactgggatactctctcatttgcctgacattggaagtagctttggtcctggtaaacaagaagatgctcatgaattccttaggtacgccattgatgctatgcaatctgtatgcatgaaggaagccaggaaaagcggcactcatcggttacacgaagaaacaacacttatgcaattaatatttgggggctatctgcgatctaagataagatgcacaagatgtgatgctacttccgagcaacatgagcgtattttggatcttactgttgaaatagatggcgacatcagttcactggaaggagcacttgagcgatttacatctacagaagtcttggatggagataataaatataaatgcagcagatgcaaatcgcatgagcgcgctaaaaagaagctgacaatatcggaagcaccaaatgtcctgactattgcgctgaaaagatatcagtctggaaagtttggaaagatcaacaaagccatcagatttccagagaccttgaacttgcagcgctatatgagcccaaaagctgatgacacttcccctgtttacagcctgtatgcagtggttgtccatcatgatattatgaatgccgccttttctggtcattatgtatgctatgtgaaggacacgcatgggaagtggtacaaaacagatgacagtcaggtcaaacctgtatctctggaaaatgtcatgtcgaagtgcgcatacatgctgctctatgcaaggtgttcaccaagagctccaagctctgtaaggccagcgctgatggctcaagatccagcacgtgtaaagaaggacaaggcaagggtaaattcaggacggtggcatggaggaggtcccatacaccaaggtggtcagatgtacgcagatcacatgacagatgatttgccccatacatatgacgagtttggacatggaccatattcgccagcagaatctcctagtccaagtgagagttcatcaattttcaccagttccgacacagggtcacatagcaccgacagcagtgaaagcactagaaactctaccagtgaggatatggaacgcctcatatttggtgatcaagtttcatactttgatggctctatgttcggacatggggaaaacggccgtatgacttattcccgatcaaagtctagcttgggtaccagttcatcgggtcaagaggtggatcagtataggcctgacgagcacaggcttcagggtgccagggagggttggaatcagggcgatgaaagttcttccttgtatactaaccaaagtaaacatcaatttagtagtaagttaacagaacaatataggaggaggttagatgggactgagcatgatcctggagaagccaatagtgttttattgaggagatcggctagggaaaggacggcccaaacattttattgacatgtggagggtttgggttgtagaggtataataatgtaggatgtattattaccccactgcaatgaaaaaggaaaaaatggctcagtttgtag

SEQ ID NO: 24263 - DNA, 1595 bp, Oryza sativa
  ref <308>: DATABASE ACCESSION NUMBER: AK099705
  ref <309>: DATABASE ENTRY DATE: 2002-08-28
gaaagggcaagccccgcgaggcaagcggattcacgcacgcgcgccgccatccgccatgggtctccacgacgcgccgagccgcggcggcgccgggggcgggaagctgtcgctgctcgccagcgtcggcctcgccggcgccgggggcggggggagcggcggcgtgggaggaggaggcggaggaggaggaggaggagggggttacaaggagctgctcgtgatggcgctccccaaggacgacgacctcgacgccggcaaggtcgccgacgtcctcggcttccggctgcccgtcgtggaaggggccgtgagggcctttttttaggagtcgagaggttagagaatttgccagtggagcattagctggtgctatgtctaaagctgttcttgctcctctcgagactatcaggacaagaatggttgtaggagtaggatctaggcatatcggtggtagctttgtagaaatcatcgaacaaaatggatggcaagggctttgggcaggtaacacaatcaacatgatccgtattattccaactcaagcaattgagctcggaacattcgagtgtgtcaaaaggacaatggcggaagcgcaagagaaatggaaagaagatggatgcccaaagatacaaattggtaaagtgaaaattgaatttccacttcaatttttatctcctgttgctgtagctggtgcagctgctggaatagctggcacattggtgtgtcatcctcttgaagtcattaaggatcgcttaactattaaccgagaagtctatcctagtattagcgtcaccttcagcaagatataccgaactgatggaattcgtggtctctatgctggcctctgtccaacactaattgggatgcttccttatagcacatgctattactttatgtacgacacaatcaagacttcttactgccgcttacataagaagacgtctttgactcggcctgagcttctagttattggagctctgtcaggcctgaccgcaagcacaatcagcttcccgctggaggtggcgcggaagcggctcatggtgggtgccctgcaagggaagtgcccaccccacatgatcgcggccctggcagaagtgatccaggaggagggcctcccggggctctaccgcgggtggggggccagctgcctgaaggtgatgcccaattccggcatcacctggatgttctacgaggcctgtaaggacatccttttggcgggcaaggacaagcgcaaagcttaaggggaatgtggcatcgagcaactgcaacctgacgcattgcatatttgcaacgtagaaaacaataatgagttacaagattcttgtatcggtgggattcctgatcttttcccagttttcgagtcccaccctggatgacgccgaaaaagtggctagataggagacgctgttcttttttttggctggtggctgggagagcatgtgttgtttctcgctaatttggaatgcctgattaattacatgttgtctaagtgttaaccgtggggtttacacacgagaatggctgaaaatgttggcatgtacctctacctgatcttcaggtgaatactatcaaatcctgtgaaatttctctcaaatctccgttcc

SEQ ID NO: 24264 - DNA, 2266 bp, Oryza sativa
  ref <308>: DATABASE ACCESSION NUMBER: AK099706
  ref <309>: DATABASE ENTRY DATE: 2002-08-28
gtctatttgcgaaataaattttttaaaaggatcaaaatgtgaaaaatccagagcactagggaccaagcttcggcacagccgccacctcacctccacggctttgcccaatggccgtcgtgacgcctcatctacgctggcacgagagaaatacgaggaggaatagtacgtcgggcggcccgactcaggccctccattggcaagttgctttggctggccaaatttagctagtaaagggagagattaggccagttgttaatgaggttgtttgagcacgaatttttttctagaattaccaaaatttagtttggagagttacttgaagaggctattagagacactcttacttgtacgagaagtcttctgcggcacagaacaaatatatactttcttcgttttatattataagttgctttcgctttttttagttaagtgtttttaaatttaaccaagttttaaaaatatatagtatcattttcaataaaaacaaacattttataaaatatattaaatattaatttagtgaaactaatgtgatgttacaatgttactaaacttttcttgcctaggaaaaaaaatcaaaagagctgtccccaaggcttcaggtactgtagtagaattgtcaccgtcaatccggccgtcagctatatctgccacccatttgtacccctgcatcctatgatcccatttgctacaagcctgcttggaaggtttataactggtaaaaaaaggtgtaaattacaggcggttaagaaatttcggacaaggactcgaaagagtgcttggatgaatcaacggaaaagcgtaacggaaaagcgtgaccctttgagaccacaattttattagggcatttgtaaaattgcccctggtcttttcaaacttccactacaaaatgaaagtaaaataacaaaaagaaaccactctttagtctggttgagataatttagattcgacttttgaaattaatttatcgcaatatatagttttatcgattatactgaattttatattaggctacaagcaaacattgatcctttccctatactcatataataattgatatcatataataattgatattaatggaccttaaatagtactccctccatcccataatataagggattttaactttttgcttgatctgtttgatcatttgtcttattcaaaaaattttagaattattatttattttaaagaaaaaccggcacctatactatatatccggttatttgaaaaaaacaaaacctttaatttattaaaggtgtaaaaaacgacacctattgtaaacgagccgagctcggtgggtgtctttttctccaccggctctctctcccattctctctcccttatctcttcttctcatcctcccactagctctctgccactttctctcccttatcgcttcttctcctcctcccttatctcttcttcttctaccagctctgtggcggtaggcggtgggctcgcggcggtaggctcgctggggtgaggcggcggtctaggtggcagtctcgttgggggtaggcggcagcaggcggcgggcttgcctaggggaggcggcggcgaaaggtggagaagcccctcccctttgctagatccggcgggaggggaggcggcagcagaggggcagcggggctcgcagatggaggcggcggcggtctcgccaggggtatgcggcgggttcaccgggggaggcggagcgacagctcgaagacgacgactatggcggtggctacacaaccgtgcgacgacaacgatgtcgggacaacggcagagtggtctggattcttttttttttattattgctaagatctgggatgaatttgagggttaaaatttgtgttgtggatgaatggattgatatgtggatgaatccatctgtggattttttattgccaagatctgggaggaatttgattgtcaaaatttgtgttgtggatgaatcgatctgtggattggatatgtgatggatagatgatgatatgctagttcttgttgtggtgtggatgaatgtttgaggagggactgctctgctcaatgtgacgagctaatgcgttgagccgatttttcattatttgtggaacctcaaaggtgtcggttcttagaccccggcatctatttcttttcttattagtgtcgccttcgtggtgctggttgggaaaaccggaacctatgggggtttcccaaccggcacctatttgtgtttctgtagtagtgttagtccaaattatttgcttcagtaacattcttgagttggttgttgtgg

SEQ ID NO: 24265 - DNA, 1624 bp, Oryza sativa
  ref <308>: DATABASE ACCESSION NUMBER: AK099707
  ref <309>: DATABASE ENTRY DATE: 2002-08-28
catatcgatgctgcagattacatgatgtctatatgtggtggtgatagtctaaaggagctttcttcacctgggaaaagtggcagcattttctatctttctcaagatgaacgttttgttataaaaacattgaggaaaactgagctgaagattggtttgatgtaatacgtgctgcagatactattgaagatgcttccaaagtattacaatcatgtcaaagcttatgataatacgctcattacaaaattctttggcgtgcacaggattactctgaaacctggaagaaaggtccgttttgttgtcatgggaaatatgttttgtactgaactgcgaattcatcgtaagtatgacttaaagggctctacacaaggccgatcaacaaagaagcaaaatataaatgagaacacaacactaaaggaccttgacctatcatatgtttttcacgtggataaaccatggagggaggcacttttcaggcaaattgctactttcttgctcctctttttttctgaacatcttactgtcgtctttcatggttttgtctatattggcttgaagtccaggttccataacttaccgtttatgatgttacttctggagattgtgttcactgggtagtcccttctggaaaattaaaaagaacagtagatttaaatgacttgtgcagattcctgcttcagtcccatgattggtggacatcaaaattattttctactattttgatattgattcttatcctattcttgagatctgaagaatacttaagatggacaatttttatttatactatagcaataaatagatttttttaaatataaacaactagattaaagaggcaaaccagattttaagcagtgtccgaccatgcatacaagagattgaattccagctgtctagttcagttttgcatattactgctccatttctgctgtgctatttttcttaacatggttgacgatgatatcttgagagccaacagttgtactattttcaggcagatagctcttgattgtatgttcctggaatcccaatctataattgactatagcatgctattgggaatccatttccgagctcccaatcacctgaagcgtatcacatcatgtcagaacgctcttgaaagtactggaatttcagctgaaacggaatgtagtgttgcactgcatcatgaggagacaatttcttcaaagggatttctactagttgctgctgatgagccaggtccagcagtacgtggttcgcacataagaggaagcatggttagggcagcagaaggtggttatgaagaagttgatcttgttttgccaggcactggaaggttccgtgttcagctaggggtgaatatgccagctcgagctcggaaagtgcaagaggacgtgaacgtagaagtagaaaacagggacaccattgaagagtatgatgttgtcctataccttggtatcatcgacatactacaagagtataatgtgtccaaaagagttgagcatgctgtcaaatcactaaaattcgaccctctttcgatatcagctgttgatccaaatttgtattcgagacgatttataagtttcttggagaaggttttccccgagcaagattgaacagtaaatagatattgcaagtttcttgg

SEQ ID NO: 24266 - DNA, 3521 bp, Oryza sativa
  ref <308>: DATABASE ACCESSION NUMBER: AK099708
  ref <309>: DATABASE ENTRY DATE: 2002-08-28
gacttcccactcccactccgcccactccctccttctcccctcccctctcccactgcaatggcgttctccggtaagccggcggcgacgtagacggccggcggcgtgcacgcggggaagaaggtgccgtttgaatcttggaggccaatcttctgaagattcaggcgaagctcgtcgtctcctgggcgcgttcttgcggcgtttcttggagcattttggctcgccgccggcggccttgcgcgttccggcttccgaggcaagaaggccatcctttttttttcttgctgctcgtgcgcgtttcggctctccggagtcgcggcaatgcgggctctggtggtgctggttggcttggcctgcctcgccttcgtggcggaggccaagggcggcggcgcggcctcggcggcggcgctggacgacgacgtgctggggctgatcgtgttcaaggccgacgtggtggacccggaggggcggctcgcgacgtggagcgaggacgacgagcggccgtgcgcttgggccggtgtcacctgcgacccgctcaccggccgcgtcgcggggctctccctcgccggcttcggcctctccggcaagctcggccgcggcctcctccgcctcgagtcgctccagtccctctcgctctccggcaacaacttctccggcgacctccccgccgacctcgcccgcctccaggacctccagtcgctggacctcagcgccaacgctttctcgggcgccatcccggacggcttcttcggccactgccgcaacctccgcgacgtctccctggccaacaacgccttctccggcgacgtcccgcgcgacgtcggcgcgtgcgccacgctcgcgtcgctgaacctgtcctccaaccgcctcgccggcgcgctgccgagcgatatctggtcactgaacgccctgcgcacgctggacctctccggcaacgccatcaccggcgacttgccggtcggcgttagcaggatgttcaacctgcggtcgctgaacctgcggagcaaccgcctcgcaggcagcctccccgacgacattggggattgcccgctgctgaggtcagtggacctcggctccaacaacatctctggcaacctgccggagtcgctgcggaggctctccacttgcacataccttgacctgagctcaaacgcgctcaccggcaatgttccaacttgggttggagaaatggcaagcttggagacgcttgatttgtccgggaacaagttttccggggagatcccggggtcgattggcgggttgatgtcattgaaggagctgaggctgtcggggaatgggttcaccggtggcttgccggagtcaattggtggatgcaagagcctagtgcatgttgatgtgagctggaattctctgaccggcaccctgccttcctgggtctttgcttccggcgtgcaatgggtatcggtgtcggacaacaccttgagtggagaggtgtttgtacctgtgaatgcatcttcgatggttcgaggcgtggatttgtcgagcaatgcgttttcaggaatgatcccatctgaaatctcccaggtgatcaccttgcagtcactgaacatgtcctggaactcgctgtctgggagtattccgccgagcattgtgcagatgaagtcacttgaggtgcttgatttgactgcgaacaggctcaatggaagcattccagctactgttggaggagagtcattgagagagttgtggctggcgaagaactcccttactggagaaatcccagcacagattggcaatctctctgcccttgcatcactggatctctcacacaacaacctgacaggcgcaattccggcaacaatagccaacatcaccaacctgcagactgttgatctttctcggaacaagctcactggtggtctaccaaagcagctctctgacctgcctcaccttgtacgcttcaatatttcacataatcagctctctggggatctccctcctgggagcttttttgacactatccccctctcatcagtgtctgacaatcctggcctttgtggtgcaaagctaaattcttcttgtcctggtgtgttaccaaagccaattgtgctgaacccagactcttcttcggatccactatcacaacccgagcctacaccaaatggcctacgtcacaagaaaactatactaagcatctcagcccttgtcgcaattggtgctgctgttctcattactgttggtgtcataaccattacagttctcaaccttcgagtgcgcactccaggctctcattctgctgctgagctagaactctctgatggatatctcagccagtcccccacaactgatgtgaattcaggcaagcttgtcatgtttggaggcggtaatccagaattcagtgctagtacccacgctctcctgaacaaggactgtgagcttggtcgtggtgggtttggcactgtctataagactactctgcgagatggccaacctgttgccatcaagaaactgactgtgtctagcttggttaaatctcaagatgagtttgagagagaagtgaagatgctaggcaagctacgccaccgcaaccttgttgcgctcaagggatattattggacaccatcacttcagcttcttatatatgagtttgtttctgggggtaacttacataaacaactgcatgaatcatccactgcaaattgtctctcatggaaagagaggtttgatatagttcttggcattgcaagaagcctggcccatctccaccgccatgacattatccactacaatctgaagtcaagcaacattctgcttgatggatcaggcgatgccaaggtgggggactacggattggcaaagcttctgccgatgttggatcggtatgttctaagcagtaaggtccagagtgcacttggttacatggcaccagagtttgcgtgcaggactgtgaagatcactgaaaagtgtgacgtgtatggatttggagttcttgcccttgagatattgacagggaggacaccggtgcagtacatggaagatgatgttattgtgctttgcgatgtggtaagggctgctttggatgaagggaaggtggaagagtgtgttgatgagaggctctgcggaaaatttccgctagaggaggctgttccaatcatgaaacttggtctagtgtgcacttctcaggttccttccaataggccagacatgagtgaggtggtgaacatactggagttgatcagatgcccccaggatagccctgaaactgaattaggttaagctctatctgatgtggttcccttttttgttagttttcttattccattttaagatccttctttgcttggcaactgataaaatgatgagacatgaaggggattctatctgttatgcttagtactaggagcaagtgtgaagtttctgggtagtattttggtagctaaggagttattatgtaatgcatgaaatagtttcatggcctgtggctgttgatgtgtttgactctgatcctcatcaggatgttaactgttgtggatcctctcacatcaattatatatgctgtttcc

SEQ ID NO: 24267 - DNA, 1286 bp, Oryza sativa
  ref <308>: DATABASE ACCESSION NUMBER: AK099709
  ref <309>: DATABASE ENTRY DATE: 2002-08-28
gatctctatcatcatttctcatccatcactttctttgtccatctcgacctgagaattgaatactcctatcagagatgggttctctgatggctggctggaactcaccagttcttggtgatgagaagaaaggtacatgcaacaaattaacaatatgatcgatcgacgataacgaactgaatgggaagattatttccttagttatatatacccacacaaataattcaatatgtattgatcggtcaatcgatctgtaattaattaatttgatctgtttttgttgagtatagttcggctgatgaggaaccgctcgctgaccagggaggaggtggacgcgttctggaggcgccagcaacgccaccacctcgccgctcgcctctccccgcgccgccgccaacgtcgtctcgccgctcgcatcaccccgcgccgccggcgacatctcgccgctcgccgcctctcccggccgcgcgcagcaggagatgagtagtagtcgttgcacgttggcgttgaggaggctggagaggatgaactccatgccgtcaccgctggcgcgcaccgtcatgacgagggccgacgatcacccgtaccagtcgtactcccacagcgagccgccgtcgccggcggctcctcacgccggcgaccatcgtcatcagcggtcgtcgttcgctgccgatcatgacgacgacgacgacgacgtcgccagcaccagcagcgagtgctggtggacacggagcagctgggcattcctgaacgagacgccgtcgccggagcagcagatgttcggcaagtcgcagacgtacgcctgcgttcagttccacgtctcccgggtcgtcaccggcaacgcctaggcctcagctagttatagctagccacatgtcagggaatgcatatgcatgtacgtatgtacgtacgtatatacgttagtacttaggctggttagctagctagcttagctttgcagctctgcatcgtcctgatcctctaagagagtagtgtgttctgtagtagtggttaagtacgcatgcaatttgtatgtgtagaatattactatacaaagagcagtagagaagtgtataggatcgggccggcgttcgagagcttttaatccttcagctctccgtgtaaatacagatactgctcatgtatatactctctctagtctctcctatatagatagttaattgtgttaagactgtactttgtgtgtgtgtgtgtgagtagttctgtgacttcttaatgtatgatatatatatatatatatgtaaaaaactaaaaatcatttgcactgt

SEQ ID NO: 24268 - DNA, 1463 bp, Oryza sativa
  ref <308>: DATABASE ACCESSION NUMBER: AK099710
  ref <309>: DATABASE ENTRY DATE: 2002-08-28
gggcgaaaacagaaaggaaaccgagaaagagagagagagagagagaggtagggagggaagaagagtcactccacactccacactctcatcccctggtccctttcttggatcatgagaaaccgcgcaacaaaattgcaattctaggcagcatttggaccggggacttggctacgtggtgtttggccatggatcgcagcgtggaattaagaccggcgaggactcagcgacggaggcacccgcgtcattcctacgcttctgtgcccgtcgtcttctcgcagtgagagagagagagagatcgaccaggcgttcactgaattttactagaactcggcatgaagcgacccggcggtgccggcggcggcggaggcagcccatcgctcgtcacgatggctaattctagtgatgatggatatggaggggttgggatggaggcggagggggacgtggaggaggagatgatggcgtgcggcggcggcggggagaagaagcggcggctgagcgtggagcaggttcgcgcgctggagcggagcttcgaggtggagaacaagcttgagcctgagcggaaggcgcggctggcgcgcgacctcggcctgcagccgcgccaggtcgccgtctggttccagaaccgccgcgcgcggtggaagaccaagcagctcgagcgcgactacgccgcgctccgccattcctacgactccctgcgcctcgatcacgacgcgctccgccgcgacaaggacgccctcctcgccgagatcaaggagctgaaggcgaagctcggggacgaggaggcggcggcgagcttcacgtcggtgaaggaggagccggcggactccgacgggccaccggcggcgggatttgggtcgtccgacagcgactcaagcgcggtgctgaacgacgtggacgcggccggcgccgcgcccgcggcgacggacgcgctggctccggaggcgtgcacgtttctcggcgcgccgcccgccgcgggcgcgggcgcgggcgcagcggcggcggcgagccacgaggaggtgttcttccacggcaatttcctcaaggtggaggaggacgagacggggttcctcgacgacgacgagccgtgcggcgggttcttcgccgacgatcagcccccgccgctgtcgtcgtggtgggccgagcccacggagcactggaactgaagcaaatccggcgtaacagcagccgagagagagagttggaaaacactatgcctgggggaataaagaattctgcaggaaagcagggtcttatctgcaattttgtaaaaaaaatggacctctacgtacttctctagtctcttttgccaattctcgcgcacattagctgtagcactgcagtgtagtaaaatcctactactccattacctctccaatttctagctctcacttccctacttaaactcatctgagctctaatgtaagcatatgccatccaaaatggaccataaatatgtcact

SEQ ID NO: 24269 - DNA, 1388 bp, Oryza sativa
  ref <308>: DATABASE ACCESSION NUMBER: AK099711
  ref <309>: DATABASE ENTRY DATE: 2002-08-28
ggttagccccagaaggaaggcgaaagctaagacccctcccttccattcttcccaaaccctagccgccacttctctctccccgcctccgccctctcccaattcctcctccggcggcggcggcggcgttgggacgcgcgagcccatcaccatggcgggcgggaagatccagaagaagcggcacggcggaggagcaggcggcggcggcggcggcgggggcgggggcgcgcggctgcagggagggatcccgttcgagaagtccaaggggcagcacatcctgcggaacccggcgctggtggactccatcgtcgagaaggccggcctcaagcccaccgacaccgtcctcgagatcggccccggcacgggtaacctcaccaagcgcctcctccaggccggcgtcaaggccgtcgtcgccgtcgagctcgacccccgcatggttcttgagctcaaccgccgcttccagggcgaccctctcgcctcacgcctcaaggttatccaaggagatgtccttaaatgtgatcttccatactttgatatctgtgtggcaaacatcccatatcaaatttcatctcccctcacattcaagcttctgtcacaccgcccaatctttaggtgtgcggtgattatgtttcaacgtgaatttgccatgagacttgtagcacagcctggagatagtctctactgccgtctctctgtgaatgtgcagctcttgtcacgtgtgtcacatctcctgaaggttggacggaacaacttcaggcctccacccaaggttgattcatcggttgttcgtatcgagcccagaaagcccctacctcctgtcagcttcaaagagtgggatggacttgtgaggctttgtttcaaccggaagaacaagacattgggtgccatctttaagcagaagcgtgtccttgaattgttagagaagaactacaagacaatgcagtctctacagctcacctcagatgcagaaaaaggtgaggagaagatgtcaccagatgatgttgcattgctatcaagtatggtcgatgacatgaacatggaaagcagctacgagaatgatgatgatgatgagatggaaatggatgatgccgatatggtagtagagagccgtgcatgtttcaaagaaaagattatggggatattacagcaaggagattttgcagagaagagagcatcgaagctcagccaggttgacttcttgtacctcctgtcgctcttcaacaaagctggtatacatttttcctgaagaaacccgttatggtctagctagaaaagagtattttctttctttcttagtacgtcttgaaaggtgtgaaggcactgcgagaattttgttctaactatatatatttttatttctagtatggaaagtaatttaattcaatgttgcc

SEQ ID NO: 24270 - DNA, 2680 bp, Oryza sativa
  ref <308>: DATABASE ACCESSION NUMBER: AK099712
  ref <309>: DATABASE ENTRY DATE: 2002-08-28
gacaatcacttctccccccggaatatctccgccaagagaagagaagagacacccaacaacccaaaacctagcgcctctgcgctcgaggcccccccgaatccgcgaatccgccgactcccatggcgagccagggagagccctcctcctcctccgatccgaaggggaagaaggatttctcgacggcgatcctcgagaggaagaagtcgccgaaccggctggtggtcgacgaggccaccaacgatgataactccgtcatcgggatgcaccccgacaccatggagaagctccagcttttccgcggcgacactgtgctgctcaagggtaagaagagaaaagacaccatctgcattgttcttgctgatgacacctgcgaggagccgaagatcagaatgaacaaggttgtcaggaagaacctgagagtacgacttggtgatgtcgtgtctgttcatcaatgcccagatgtcaaatacggcaagcgtgtgcacatacttccaattgatgatactgttgagggcatcaccggaaacttgtttgatgccttcctgaaaccgtacttccttgaagcataccgtcctttgaggaaaggagaccttttccttgttaggggtgggatgagaagtgttgaattcaaagttatagagactgaccctgcagagtactgcattgttgcacctgatacggagatattctgtgatggtgagcctattaagagggaggatgaggaaagacttgatgaagttggttacgatgatgttggtggagttaggaagcagatggcccaaatcagagaacttgttgagctcccattgcgccatccccaacttttcaagtctattggtgtgaagcctccaaagggcatactgctttatggaccccctggctctggaaagaccctcattgctagagctgttgctaatgaaacaggtgctttcttctttctgattaatggcccggagattatgtcaaagctagcaggagaaagtgagagtaatctcaggaaggcatttgaagaagctgagaagaatgcaccatcaatcattttcatcgatgagatagactccatagcaccaaagagagagaagacccatggagaagttgagaggcgcatcgtttcacagctgttgactcttatggatgggctcaaagctcgttcccatgtcattgtcatgggtgctacaaaccggccaaacagtattgatcctgctctcagaaggtttggtaggttcgatcgggagattgacattggtgttcctgatgaagttgggcggcttgaagttcttcggattcacaccaaaaacatgaagctggctgaagatgttgacctggaacacattgccaaagacactcatgggtatgtgggtgctgatcttgctgctctttgcactgaggctgctctccaatgcatccgtgagaagatggatattatagatcttgaggatgagaccatagatgctgagatacttaactcgatggctgttacaaatgatcacttcaagactgcactagggacaagcaacccgtctgctctccgtgaaactgttgttgaagttccaaatgtctcttgggaggatattggtggactggagaatgtcaaacgggagctgcaggagactgtccaatatccagtggagcatcctgagaaatttgagaagtttggcatgtctccgtccaaaggtgttctgttctatggccctcctggctgtggtaagactttgttggccaaggcaattgctaacgagtgccaggctaacttcattagtgtcaagggacctgagctgcttaccatgtggtttggtgagagtgaggccaatgtgcgtgagatttttgacaaggctaggcagtcagctccttgtgtcctcttctttgatgagcttgactcaattgctacccagagaggaagcagtgttggtgatgccggaggtgctgctgatagagtgctgaaccagttgttgactgagatggacggcatgaacgcgaagaaaaccgtgttcattattggtgctactaacaggccagatatcattgaccctgccttgctaaggccagggcgtcttgatcagcttatctacattcctctgcctgatgatcaatctaggctgcagatcttcaaagcttgcctccggaagtcacctgtggccaaggatgtagacctgaatgctcttgccaaatacacccaaggtttcagtggtgctgatattacagaaatctgccagcgtgcatgcaaatacgccatcagagagaacattgaaaaggacatcgagatggagaagcggaggaaggacaaccctgaagccatggaggaggacgaggttgatgatattgctgagatcaaggcggctcacttcgaggagtcgatgaagtacgcacgccggagtgtgagtgacgccgacatccgcaagtaccaggccttcgcccagactctgcagcagtctcgtgggttcggcaccgagtttaggttcgctgaccagccagcgtctggcgccggcgccgccgctgaccccttcgcatccgctgccgccgcagctgacgatgatgatttatatagttagatcgctgtgctatttatatttaacctccgtgcttttgttcagtatgtctatttcgctttggtaaactttatcatatgtaacatacggggaaacagtgtactatttttaagttaatattttgagaggtactg

SEQ ID NO: 24271 - DNA, 4389 bp, Oryza sativa
  ref <308>: DATABASE ACCESSION NUMBER: AK099713
  ref <309>: DATABASE ENTRY DATE: 2002-08-28
aagatggtgactacaatatagcgtagacacgcaaggagatgatggcggcgtgctatggactcgtatcggctaggcgctatgttggttggggaggagcgcccataatcaaagccccggggatgtgaagcgatcgggagggttagtcgttgttccgctatatcgactaacttttataacatattgtgtgatatatttatgtctcatttgaattttgatggaccaagttttacttaaactagcattttgatatagtggtttcggaagttggtaaagaactaaccctactttgtacgactaatgtgaacccgacgattcatggatgtttgacgcattgacattagaaaccttagtgacataataattcaaataaagaaaccaagaagtgattcttccaattttgttgaaataataggtacttttctgtcaaaatccactaccatatgtcctccataatctcatcatgtagtcacctgatctctacatcgaccagacaagccgcagctcccattttatcatgtcctataggttaaacctctatttctttggcaaatgatagcttcgagtatcttatgaggtaatttcaatctccttgtttcatcatttccgtctttgaggtagtttcttttttgtcgtttgaaatgcgatttggtttgttgttctggaggttttcttactggtatgcagctatctttctatactcaaatctataaacccttacatgatggccaagattcgattgaagatctgccatgtgctataggtgcttacataaaacataactgcttaactggtgagataattcaatgaattaaacgacaccaatcatcagatcatgaagatatttttcgtattcatattatcgtaaaatacaaagaatctcctttggagcaacaaaaaggttaatatttgatttgatatgagaaatcacccttatcttgaatgaaattgtagtcactgtatgtcaatttggaaatagatccacatatctgaaaatttttactagcctttattgttgaaaaatcatacaaagggaaaatagaagaacaattaaatcaatcaaggagaatcttatactccctttgtcccaaaatataagcatttttggactatgacacagtctccaagatgctactttgaccaataaaatctataaaagtaagatattttaaataaaaagagctatatattatgatagtttgtttaatgataaatctagtaacatcaattttatatgagtgatcttttctatttttttgctattaatagtcaaagttgaaaatgtttgacttctcactatgctaaaaatgcttatattttggaacggagggagtagttaattaatattttttcttgattcagattttaatcacaaagtgtagtttttttcccttccattgataatttcaggtcaaatatctagctctctgtggttgtatctacttcatgaacaagaatactgtacacaagttaattgttattctaaatctttttgcatatccatagaaggtttccaatattctagcatgacagaacaactgctcttagatgtaacacaccttataggcttatatttccctatattattctgttgtacagaaatcctcacatgactcaacttcatacacccagcagctggaatggctaacagaacagaactggctaccctcctgtgcattccactgttctctctcttgttacttgatgtggtggctggtaacttcacaggtcctcaccaaatccgccttagatgtggtggcaccagcactgccattgattctgatggtcgaacttgggaaggggatgctaactccaagttagcattggatggtttggcagccaacgcgtcatacctagaccccttgcttccctccccagtgccttacatgacggcacgcatatttagttccaatttcacatattggtttggtcttaaccctggtcgtgtgttccttcgcctctacttttatcctactgagtatgctgatcgtgctgctgcagatgccttgtttagtgtcactgctgggaaccttgtccttctgaatgattttaatccttcccaggtagctcatgcgatgggtcgaacctatctcatccttgaatactcagtgaatgttccttcgggtgatctcgatgtcacattttccctgtctcctcaccacaccggttcttatgcgtttgtgaatggcattgaggttgtgtccactcctgatattttcacgaaacctgcgccaacatttttaaatgttggaatctcagatccattcccaatctctgttaatataggccttcagacgatgtatcgtcttaatgttgggggtgagacaatctccccaaaagatgattctgaattttgtcgcacatggggcaaggattccccttacatttctggagactcaggcctgaactttttcaaggatgacactgtaaccatcagttaccctcgtaccatgccaagttacatagccccagttggtctatatgagacagcaaggtccatggggctaaagggatatatcaacttgaggtacaatcttacatggattctaccgattgatgcaggattccactatcttttacggctccatttctgtgagatccagcacccaataaccaaggcgaaccagaggacgttctttgtatacatcaacaaccagacagcacagaagatggatgtcattgttttgagtggaggaattggtgtgccaatctacaccaactacatagttggcccaattggttatggtcagacagacctgagagttgcacttcaccctgatgttgaaaccaacccagaatttgttgatgcaattctgaatggtcttgaggtcttcaagctacaggatgtcaacaaaagtaaccttgctggaatgaaccctattccctggagccaccgtgatggggatcctcgtctggcaaccattggtggagctatttttgttttggtggtgctgttgattgccagtttgagcatgtatattatcaacatacgaaagaaaagagttgatcatggaaatacgaacaaagagttgttattagccaccttgctctcaaagaaatccaacctttgccaccaattcacgttcttgcaaatccaggaagctaccagtaactttgatgaagcctttctccttggcaaaggcgggtttgggaatgtatacaagggtgagttagatcatggaatgaaggtggcaatcaagcgtggagaccctctgtcccagcagggtatcaacgaatttcagacagagattgagatgttgtccaagctccgtcatcgccacctagtttctctgattggctattgcgaagacgagaacgagatgatccttgtgtgagattacatggaaaatggtacccttcaagagcacttgtatggctcccaaaagccacctcttccatggaagcaacggcttgagatctgcatcggtgcagcgttggggctgcattacctacacactggtgcgaagcagaccatcatccaccgcgatgtgaagagtaccaacattctgttggatggcaaatgggtggcaaaggtttcagattttgggctgtccaaggttagcacagacaaggacaaaacctatgtgagcactgttgtgaaaggcagctttggatatcttgacccggagtactttcgaaggcagaaactcaccaagaaatcagatgtcttctcctttggggttcttttgttcgaggttctatgcgcacgtccggtaataaaccctgaacttccagaggagcaagtgagcttgcgtgactgggcactgtcttgccgtaagaaaggcatactcagtgagattattgacccccatctccaaggggaaatcaccccacagtgcttcaggaaattcacagagactgcagagcagtgtgttgctgattacagcatgaacaggccatccatgggtgatgtcctgtggaacctcgaggttgcactacagctgcaggagagtgcagaggaaaactgcgaagagacagcattgaacgtgttatcatcgcctttaacgaccaggttgcaaccatcatcccgctcaactatgagcatctctggacaaaaggctgtcttctcagagatgatgcatccagatggccgataagaccaaactaccgtttagtattcttctcaagcttctgttctcatgttttatagggaaaattgttggagtttataacagttaatttgattgttaacggactgtcctgtgagatactgaaccagttgattaatctgtgtgtcccacgtacactcttgtttaccttccttacaatccagagactggaataatcttctgtagtacacggactaattagtaactactgtactacaacgaggacgccatttgtatgcatgattctgaagatgtcctaatcatatgaagtttgttttaccct

SEQ ID NO: 24272 - DNA, 3731 bp, Oryza sativa
  ref <308>: DATABASE ACCESSION NUMBER: AK099714
  ref <309>: DATABASE ENTRY DATE: 2002-08-28
gacacacagcaggtagctagcttagcccctcactttgtggcagatcatactcgctggctacaccaccacccacatccatctgagcagtggaatcatcatctcctcctatatcagttgtcatcacccggcctgtagtgtgcgctctgatcctagttagctgctgctcttcgttccgatcctagctcgttgcgaattgagccaacggatcaatcgcgcgctccggccgccacagcctttattacccaagctgtttcttttccagaatttaaagaagtagcagctgtagacagtagttatcctcgtcgcgaccccttgtgtgcagagcaggcggcggcggcggcgttagctagctcgtcgagcaacatatatggcagctagtagtagcacgtagttactgcagtgaggaattcgtccggaatcgcgttgggagcgcgcggagtagcggacggctgagcggagcgctctcggtttgataagggttcgcgtgtgtgtgttcggtgtgggggagagtaattgcacgcatcacaagaacactcctcgcctctacttgggctctcctgctcacgtgattcatactctccctactcccctctccccacatccgttgcgccttgcatctactctgtgccaatcaccgggcatatatacatggttgtgcctgtgccgacgacgtttgagggagcgagagagatggaggtggtggaggtgcgtgagtacagggaggaccgggaccgcgccgccgtcgaggaggtggagcgggagtgcgaggtgggctcctccggcggcggcgaagccaagatgtgcctgttcacggatctcctcggcgacccgctctgccgcattcgcaactcgccggcctacctcatgctggtagcggagacagcgaacggcggcggcggcggcaatggcagggagatcatcggcctcatccgcggttgcgtcaagaccgtcgtctccggcggcagcgtccaggccggcaaggaccccatctactccaaggtcgcctacatcctcggccttcgcgtctcgcctcgttaccggaggaagggggtggggaagaagctggtgggcaggatggaggagtggttccggcagagcggggcggagtactcgtacatggcgacggagcaggacaacgaggcgtcggtgcgcctcttcaccggccgctgcggctactccaagttccggacgccgtcggtgctcgtgcacccggctcaagatgaagagctccagcaggaaggcgccatccccgcaggcgcagcagtctgcgaagagggtgaggaagaggctggacaggaccaagagcagcgccgccgtggcgctcaaaggattgcagtttgtgactgcaaaggttggcaatgacggctgggccgcggtggagaagcggttcaatcagctgcaggtggatggtgtgctgctccgttcaagatttgggaaatgcattggaatggatgggtccgacgagtttgcggtgcaaatgttcgattctctggcgaggaagagagggatagtgaagcaggtgctcactaaggacgagctcaaagatttctatgagcaattgactgatcaggggtttgacaatcgtcttcggacattctttgacatggttgacaagaacgctgatggaaggctcacagcagaagaggttaaggagattattgcccttagtgcatcagcaaacaaactttccaagatcaaggagcgagctgatgagtacacagcactcattatggaagagcttgaccctacaaacttgggatacatcgagatggaggacttggaagcactattgcttcagtcaccatctgaagctgctgcaagatcaacaacgacgcacagctccaaacttagcaaagctcttagcatgaagcttgcgtctaacaaagaaatgagcccagttcgtcattactggcagcagttcatgtacttccttgaagagaattggaagcgcagttgggttatgactctgtggatctcaatctgcattgcccttttcatttggaagttcattcagtaccgtaatcgagccgtattcggcatcatgggttattgtgtgaccactgcaaagggtgctgcagagaccctcaaattcaacatggctttggtcctacttcctgtctgcagaaatacaatcacatggattcggtcaaagacacaggttggagctgttgtacccttcaacgacaatataaactttcataaggtcatagccgcaggtgttgcagttggtgttgctttgcatgcaggtgctcatctgacatgtgattttccccggctgctccatgcgagtgatgcacaatatgaactaatgaagcccttctttggggagaagaggccaccaaattactggtggtttgtaaagggaactgaaggctggacaggtgtggtcatggtggtgctcatggcaatagcatttacattagcccaaccatggttccgacgtaacaagctcaaggactccaatcccctcaaaaaaaatgactggcttcaatgccttctggtttacccaccacctgtttgtcattgtgtacactttgctctttgtccatggaacgtgcttgtatctaagcaggaaatggtacaagaagacgacatggatgtacctcgctgttcctgttgtcctgtatgtaagtgagcgtattcttcggttgtttaggagccatgatgcagttgggattcagaaggttgcagtgtatcccgggaatgtattggctctttatatgtcgaagccacctggtttcagataccgtagtgggcagtacatcttcataaaatgcactgctgtgtctccatatgaatggcatccattttccataacatcagcacctggagatgattatcttagtgttcatattcgcacaaggggtgattggacttcacggcttagaactgttttctctgaggcatgccgaccccccactgagggagaaagtggactacttagagctgacctttccaagggaataacggacgaaaaagcaagattcccaaaacttttggtcgatggaccgtatggtgcaccggcacaagattaccgtgaatacgatgtgctacttctcatcgggctgggcatcggagccacccctttgattagcattgtgaaggacgtgcttaaccacattcaaggtgagggatcagttggaaccacggagccggagagcagcagcaaggcgaagaagaaacctttcatgacgaagagagcctacttctactgggtgacgagagaggagggctcgtttgagtggttcagaggcgtcatgaacgaggtgtctgagaaggacaaggatggagtcattgagctccataaccactgctcaagcgtgtaccaggaaggcgatgctcgttctgctctcattgtcatgctccaagaacttcagcatgcgaagaagggcgtcgatatcttgtcgggaactagtgtgaagacccatttcgcacgacctaattggcgaagcgtcttcaagaaggttgcggtcagccatgagaaccagcgcgtcggtgtgttctactgtggtgagcctgtgctggttccccaactaaggcagttgtcagcagatttcacccacaagacaaacacaagatttgatttccacaaggagaacttctaatggtacaaattgagaaatacccgtgtatggttttgtatgtagttctttatcatgtgaattatatggtttctaatatatataaagttggacaaaataaatgaaatgatggaagctattttgtttttt

SEQ ID NO: 24273 - DNA, 2606 bp, Oryza sativa
  ref <308>: DATABASE ACCESSION NUMBER: AK099715
  ref <309>: DATABASE ENTRY DATE: 2002-08-28
gggtcttgattcttgaactgccctcaagaaagcaggggaaaggaaaggactcccctttccactgggagagagaaaaggagagagagacctggagaaggggggaaagggaggaggaagaagaggggagagaggccatggtgcggaagaatgggtggcagctcccagcacacaccttccagattattgcaattaccgttttcttccttctggtggttgccttttatgccttctttgcaccattcctgggaaagcaagtccttgaatatatcgcattcggcatctatactcctgtggcatttgttgtcttcatcctttatatccggtgcactagcataaatcctgcagatcccgggatcatgtcaaagtttcaaaatggcttccgtaatgcaccaacaagcggcaccggcttacaggacacaaatttgccaggaaggggtgatgttgctactggaacgaattccccaacatctacttttaagagctctctagatggacgttctaaccatgctggtttagctgctggagatggaaataatttgagctcacaaccaccaaggagttcaagttgctccttagtcggaggacttatttgtgctctgtttgttgaggaggattgcaggacgcttgttgattcagagcatcaagctgatggagaagatgccttgttttgcacattatgtaatgctgaggttcgcaaattcagtaaacattgcagaagttgtgataaatgtgtggatggttttgatcatcactgtcggtggctaaataattgcgttgggcgcaagaactatttcacatttcttgctctgatgattaccagcctcctctggcttgccattgaaatcggggtcggcattgctgttcttgttgtatgcttcgtcaacaagaattcagaaagtattattcaagacaagcttgcaaatggtttaactcgtccaccctttgcaactatagtagccatatttactcttctttctataatcgcttgtatacccctaggtgaactcttcttcttccacatgatactgatcagaaaggggatcacaacttacgaatatgttgtcgcaatgagagctatgagtgaagcacctcaagaggaggaagaagaggatggggtgaacattgtttattccccaacaaattcagcaactactggattcagcggtggaagctcacttggtcttccctacaagggttcatggtgcacacctccaaggattttcgttgatcaggatgaagtgatcccacacctggaggctgggatggtgccatcaaccatcgaccctgacacggctggaaatgctgagagagcaaacagagccaagaagcaagtgaagatcagcgcgtggaagctcgccaagcttgacaccaacgaggccatgaaagcggcggcgagagctcgggcgtcctcctccgtcctccggccggtggacgctcgccaccgcggcggccacgacgccggcgacctgagctccagcggcaacggcagcgtcaggagcagcgtgagcgccgccgccaaggagcagaggaggagggcgtcctctctcccgagctcgtgcgcgcagagcgtggcgagccaggacgagtacgagcagagcggcagcagcgtgatgagcagcccggtgcgcctccacaagctcgcgccgccgccattgccggcggcgcacaacgtgccgcctcggccgccgccgccggtgaacgctgctccggaggcggcaatacctcggccgccgccgcctgttcctccggcgacgaggatatccaacccgatgttccagtcggccacgtcgtacgtccgggagaaccggagggcgtcggtcgtgtgggaccaggaggccggccggtacgtgtcggtggcgccggcgccggcaacggcgaggccaggaggaggcggcggtggcgccgagcagccggcggcgagggcgccgcctttcttggcgaacccaggtggcgagcgcgagccattgagtgccgcccgtagccgcaataatcccgccgcgcccgcgcccacgaacgccgccccttcgtcgtcgtcgacgctgccgtcggagaggctgacgtactccggccagtcgatattcttcggcgggccactgctgggcggcgccgccgccgccggcgaacctcgaagggacgaggcggcggggacgagggcccgcggcggcgagtccttcccggtgtttgttcccggaacattccagaagaagccgccaccgttccgtaggtgaaatctgcaactgatgaccggcaatggcgatatcatcgccggacaatgctaatctccggcgaggtgacactggaagcagaatctgcaagaacaagtgatcagcatatgctgtcgaagcattaaaaggaaggaagattaattaatgtggagttttacatctgatgaagtgaagataattacataaccttgtctgattcaggaagagagagaaatcgggagcaaagagatgtggtgggagcaaagagttttgtcatgtacagcattcttttctcggtaattaattccgaacgaaatcatataaaactccgggagttagtatttgactgtgatttgtacaatagtaatgaataattaattgaattttggacgcaatacgctc

SEQ ID NO: 24274 - DNA, 2378 bp, Oryza sativa
  ref <308>: DATABASE ACCESSION NUMBER: AK099716
  ref <309>: DATABASE ENTRY DATE: 2002-08-28
gactggatcggccggcgccctatgctcattctctcttcaattctctacttcctcagcagcctcatcatgctatggtccccgaatgtctatgtgttactgctcgcacgccttatagatggattcggcatcggcttggctgtcacacttgtacctttgtacatctcagagacagctccttcagagatcaggggtttgctgaatacactgccacagttcagtgggtcaggagggatgttcttgtcctactgcatggtgtttgggatgtcactgttgccgtcacctgactggagaattatgcttggtgttctcgcaatcccttcgttgtttttcttcggattgacaatattctatctgccagaatcaccaagatggcttgtcagcaaagggcggatggctgaggcaaagaaggtattacaaaaattacgtgggagagaggatgtctcaggagaaatggctcttcttgttgaaggtttggaggttggagctgacacttccattgaagagtacatcatcggaccggctatagagccagctgatgagcatgttgttgatggcgataaggaccaaataacactgtacgggcctgaagagggccaatcatggattgctcgaccttccaagggacccagcattcttggaagtgtgctttctcttacatctcgtcatggcagcatggtgaaccagagcgtgccacttatggatcctatagtcacgcttttcggcagtgtccatgagaacatgcctcatgctggaggaagcatgcggagtacattgtttcccaactttggtagtatgtttagtgtgacagatcagcaccccaaggttgatcaatgggatgaggagaaccttcatagggatgatgaggaatacgcgtctgatggtgctggaggtgactatgaagacaatgtccacagcccgttgctgtcccgacagaccacgagcgcagaagggaaggacattgcacaccatgctcatcgtggaagtgctctgagtatgagaagaagaagcctcttggaagagggtggcgaggcggtgagcagcactggcattggtgggggatggcagcttgcatggaaatggtcagagcgagaaggcgaggatggtaagaaggaaggaggatttaaaaggatctacttgcaccaagaggaagtgccaggatcaagaaggggctcagttatttcacttcctggtggaggggacgctcctgaaggcagcgaattcatacatgctgccgctttggtaagccaaccagcactttactccaaggatatcattgaacagcgtatgtccggtccagccatgattcatacatcagaggcagctgccaaaggttcaagctggaaagatttgtttgaacctggagtgaggcgtgcgttgttagtcggtgttggaattcaaatccttcaacagtttgctggaataaatggggttctctattacactccacaaatacttgagcaagcgggggtggcagttctcctttccaatcttggcctcagttcagcatcagcttccatcttgatcagttctctgaccaccctactgatgcttcctagcattggtttagccatgagacttatggacatctctggaagaaggtttctgcttctgggcacaattccagtcttgatagcatctctagttgtcttggttgtgtccaatgttatcgacctgggtacagtggcccacgccgcactctccacaatcagcgtcatcatctacttctgctgcttcgtcatgggattcggtccgatccccaacattctgtgtgcggagatcttccccactagggtccgcggcatctgcattgccatctgcgccctgacattctggattggtgatatcatagtcacctacagcctccctgtgatgctgaatgccatcggcctagcaggtgtctttggtatatacgcagttgtttgctcgattgccttcgtgttcgtcttcctcaaggtccccgagacgaagggcatgccgctcgaagtcatcaccgagttcttcgctgttggtgcaaagcaaatgcaggctacaaaggcctaattcttcagcaactctgctttcaatctttatataacactgtaaattggaatctgcaagatcacaccatgaggctggaggagctttttgagttgtaaatgagagaagaggattgctattcatgctccttatgcaagggaaaagagttcattactggcacagggcagctgtaaagtaggaaattttcatgttattcatgtccacttcttgtttatttagtactgtgttaggtaatgttgttattcatcagtagttgctgctagggatgttcaaaaataagcttgctaatctgattttgagctactatgttggggttcataataaagtaaattttctgtgtc

SEQ ID NO: 24275 - DNA, 3050 bp, Oryza sativa
  ref <308>: DATABASE ACCESSION NUMBER: AK099717
  ref <309>: DATABASE ENTRY DATE: 2002-08-28
gactctgcttcttcgccgtcgcccttcatcttcatgcctccgtcgtcctcctagtcctcatctccggcgcatcacacaacaatggcaccggccaagaagtcccctcgcccttgctgccacgtctccttcctcctcctccagctcgtgctcctctccgttatcgtcttccccgccaccgccgccgcggcgtccaccttccgttgctccaacccctcccctgtacccaatgaggtaccggaaggaaacgacgcgcgcgaactcctccgctcctttcagatcacgacgggctacttctccggcggcgaccgtctcttcgctcccgacgacgactcggcctatatcccacgctcgttcgccttgtcaccgtataaggttgctcacaccaccgatccggccatcctcgaggtcgctgccacgcttgccctttacgggccatccagcgaccatggcagcggcggcggcgcccgccgacggcgccatcgctacttggtgagtcagctggtcgcatctttcgtcctccatggatactacagctccgcttccggcgaactttgcgttgtcggcggctctggcagctactccgtcgatggcggctccgtcgaacacctccgggacgtcaacctccacctccgcgtcccgaacgctcccagcctcgccgacccgttcgtcaccggcctcctcgacggcgccgacttcgagaccatatccctcgtcgcgtacgtcgagaacgaccgctacgtgtacagtgagaagagaccgtcttgcccgccgcccatgccggcgcacgccgcgcggggcgcgctccaggcgctcgaggccaacttctcgtgcagccacctcagggagcttttcgtgagctcctacaggttggagaacacgagcagcgacgcctcctcgcctgcagcaagcaccttccagttcccgctgagccatggcgggcttcgcatgctcgtcaaccagatgcactgcaccgcgaacggctcggtgcgcgcctacgtcgtcttctccaactacacggactcagagagacggtggcggcgcgacatggtcatcaataaccgcttcttggtcaaggaggaggccgtcgtcgccgacgggtactgggactcgacgacgagccggctctgcctcagggcgtgccgggtggcgcactcgtcggcggcagagacggagctgaaggtgggcgagcagtgcggcctcgggatgagcttctggttcccggccgtgtggacgatccgggaccggagcatcgtggccgggctgctctggaacgcgaaccaggaggagagcggcggtaacaagcacgccggtgcttcgctctccggcgtgatgtcggtgtcaagcatcgacggcgacgggtacaaccgtaggcgtagcaacctcaccgacgtcaaatacaactacacgatggttgagaaggcgaagaaacagtatctcagctgcaagttcagcaagaggaagacaggacggttcccaggcaacagcagcatgtactcgtacagcgacttcagattcgacttcatcgaaaccctgggcgctggaggacaagcgtctccggtgaccatcgggtcggtgatggtcgacggcgatcagctggcagcagaatacatgttcttccgacatgccatgggagagatgaacaagagccggacaacagtggtcaggatggatcattcccagctgctgaatgtcagctacgatataagctatcgtgtccgatctgcaaattcgaaagcacgtaagaacagttcatcattattttcacatcccctgtcaattgagcgtcgagaaatttcagccgaaggagtgtacgatccaaagacaggaatcctgttcatggtcggctgccaagagatcaatggctcctccactgactgtcaaatactggtaacagttcattttgcctctttggatgccaaggggaatggtcacggcagggggaagatcagtagcacgagagacaaggcagatcgtctccacttcgaagcgatggacatcaccttgtacgggatgtacagggagcagatcggcgagtcgatctggaggatggacctggagatcatcatggcggtggtctccgcgacgctgtcgtgcgtcttcgccgcgctgcagatccgccacgccagggcgaaccccgcgtcggctccgtccgccacgtcggtcgccatgctcgccgtcctggccctgggccacgtgacccacctcgcgctcaacgtcgacgccctgttcgtcagcaggaggacgcactacatcccgatttccgccgatgggtggctcgagctgaacgaggtgatgctgcgtgtgcccacgctgatcgccttcgcgctgcacctctgcctcctccagctggtgtggtccagccggcgatcggccccccgcgccatagccgagaaatggtcggccgccgagaggagatcgctgtggatctgcctgccgttgtacctgctcggcggcctcctcgccggggcagttcacgtcatcaacaatggccgtgctgcagcggagaactcgctggtcgtccgtgtcgcgggcgattcgggcacgctgtgggacgacctcgcgtcgtacgcggggctggtcctggacgggttcctcctgccgcaggtgatcctgaacgcgttgtcccggtccagggcgagggccatctcggcgtggttctacgtcggggtgaccgtgctccgcgcggcgcctcacgtgtacgacgcgctgagggctcgcggctacgtgccgagcgtgaggccgtcgtcgacttacgtgtacgcgagcccacgcgacgatctcttcggcgtcgcgtgggacgtcgccgtgccgttgggggcggcgtcgctggcgctgctgctgttcttgcagcagcggcttggaggtgccttcttcgtgaggggcaggaggtttggtgaatacgagatggtgcccaccacggttagctcccatcaggagggcgacaagaagatggatcatgaacgcggggatgttatagcaaattgaatgggagattattttaaacttgagaggatactgtcccgttatttacatgacatttaaatggttat

SEQ ID NO: 24276 - DNA, 2015 bp, Oryza sativa
  ref <308>: DATABASE ACCESSION NUMBER: AK099718
  ref <309>: DATABASE ENTRY DATE: 2002-08-28
gatgcccgcgtcgccgttgccgccgccgcagccgccgccatgctctcgctcgccgcctcctccctcccctccacgcggacccaccgcccggacgccgcctcgcactcctcctcctcctccgtccgcctcctccgctcgctcgcacggtcccgccgcgcggacctcgcgcaccgggcgctcctgctcttccgctcgctccagtccaccccgtccccgccgccgccgcacgtctcgctgccggccgtgctctccgcggcggccttcctctcggcgctccccgagggacgccagctgcacgcgctcgccgccaagctcggactcgccccgtcccacaccgtcgtcgccaactcgctcctccacctctactcctcctgcggcctcccgggcgccgcgctcgacctcttccgccgcatccccgacaggtcgctcgtgtcgtggaacaccgccgtcgacgccctcgtcgggaacggcgaccacctcgccgcgctcgacctcttccgggagatgcagcgggacacggagctcgcgcccgacgcgtacaccgtgcagagcgtcctcggcgcgtgcgccggcgccggcgcgctctcgctcggcgtctacgcgcacgcgttgctgctcagggagctcgggggtgacggcgacggcgaggcggtgtcccgcgacatgctgatcaacaactcgctggtggatctgtacgggaagtgcggggcgctggagctcgcgcagcaggtgttcgacagaatgcccgcgcgggacctcgcgtcttggaacgtgatgatcctcacgctggccaaccacggtcgtgtctgtgagtcggtggagctgttcgatcggatgactcaggtggagaagatggctccgaatgccatcacgttcgtcgcggtgctcagcgcgtgcaaccatggtgggctagtggaggagggcaggagatattttgcaatgatggttgatcagtacagaatcaagcctaggatcgaacactatgggtgcatggtcgatctcttggcacgagtagggttcatcgaggaagctctcgatatcgtggctggaatgaactgtcggcccgacgccatcatctggagaagcctacttgatgcatgctgcaagaagaatgccggattggagcttactgaggccatggccaagctagcactggaggttcctgatgatgctgtgagcggtgtgtatgtattgctttcgagggtttatgcatccgcgcagcggtggaacgatgtgggcatggtgcggcggttgatggtggaagagggcgtcaagaaggagccagggttcagttccattgaaatggatggcttggttcatcagttcgtcgcgggcgatacttcgcatccacaatctgaggcgatatatgaaaaactggatgaaattcagctgaagctcacatctgctggatacaagccagatttatcagaggctcctttggttgctagtattgacaatgccaagggcgccgccctccggttgcacagcgagcgtctggccatatcgtttggtctgctcaacgcgacgcctggggcacctatccggattctgaagaacctgagagtttgcaaggactgtcacacaatcagcaagctcatatcgaagctctatggcgtggagatcatcgtgagggatcgaattcgattccatcatttcaaggatgggtcatgttcttgcaaagattactggtgatcacatcatgagccataacgtctgatgctaccagtagagatccctttggtgtgttagaagcgcctcttgcctccaagccaaggtgaaatgggatgttcaatgctgactacagcctttcatattttttttctaggacagatgaacattagcagattgattagagaaacaggacattgtataatatattcaatctcattttcttcttgagccatcaaggtaaatattctaattactctgaatcacgactgtgtctatatgaacaactatgtctatatgaacaactatgttcacttcatcttgcagaaaaatctgagataaatggc

SEQ ID NO: 24277 - DNA, 2714 bp, Oryza sativa
  ref <308>: DATABASE ACCESSION NUMBER: AK099719
  ref <309>: DATABASE ENTRY DATE: 2002-08-28
gacaccaagagaaaaattttttttccaagaaacgaaagcgaaatcaacctgcaattaccagcataaatcaatcaatcggaaaagcagaggccacaacgatctctctctccagtctcgactccccagctaccacctcctctcctctcctctctcctccatgagctttgcctagatcacagctggatttcttggccgcatcctcctcttcttccaggtctcttccagctagctagcttgttcttcccttccctttctttttgccttgtgcgcgtgaggatcagtgagctgtgcggctctcttttcttgttcttgctggactgctgctgccttaaaagatcctgcctttcttgctcactttccccggaggagagagagaggagatccacatctctgatggttcttgggatctcctaggagttgtttctacctgtgctgctgctgctgatttcttcttcgatttgctagcggctgtgtggtcggagctcgtcttcttggttcgagatctcgacaccttctgagatggattttttcaccgagtacggtgagggaaacaggtacaagatagaagaggttataggaaaagggagttatggtgtggtttgctctgctttggacactcacaccggtgataaagttgctatcaagaaaatcaatgacatctttgagcatgtgtccgatgcaacacggatacttcgcgagatcaagttgcttagactcctgcgacatccggatatcgtggaaattaagcatattctacttcctccatcaaggagagaattcaaggatatctacgttgtttttgaactcatggagtctgatttgcaccaagttataaaggccaacgatgacttgactcctgaacactaccagtttttcttgtatcagttgctccgaggactgaaatatatacacacagctttttgcagcaaatgtatttcatcgagatctcaaaccaaaaaatatcttggcgaatgctgattgtaagctcaaaatatgtgatttcggccttgcaagggtagcttttagtgatactccaaccgccatcttctggacggattatattgcaacaaggtggtaccgagcaccagagctgtgtggatcttttttctccaagtatacaccagcaatagatatatagagtattggctgcatatttgccgagcttttaaccggaaaacctcttttccctgggaagaatgtggttcatcaacttgatataattacagatctactaggaacaccttctccagaaacaatatctaggattagaaatgagaaggcaagacgttacttgaacagtatgaggcggaaaaaacctataccatttacacagaagttcccaaatgcagatccacttgcaatgcggttgttagagagaatgttagcttttgatccaaaagatcggccaagtgctgaggaggcgcttgctgatccttatttcaagaacatagccaatgttgatagagagccttctgctcaacctatcacaaagctagagtttgagttcgagaggcggagaattactaaggaagatataagggaactcatatatagagaaattctggagtatcatccaaagatgctgagggagttccttgagggaactgagtccactggtttcatgtacccaagtgcagtagaccattttaaaaaacagtttgcataccttgaagaacattatgccaagggatcaacagcagctccacctgagagacaacataactcattaccaaggccttgtgttgtctattcagataaccggccacaaagcacagccagtgtcactgaggatctttccaggtgtttaatcagagacaacaatctaaaatcacaggattctgcttcagtcggtgcaagcagaatccctcaaggtgctgctgcaagacctggtaaagcagttggttcggtgctgcgttacggtaactgttcgacatccgctgctgagcaacaatatgagcagcgaagggttgttcggaacccagcaattgctccaaacagcagtgttcctctggggagctcataccccagaagaaaccagacctgcaagagtgaaacaggtgatgttgaaaggatcgattccagccaaaccggtccaccgaagccatatgtggcgaacaaactgcctgctaccgtcgatggtcggagtggccactggtaaatttctgcagcgcaccagcgaaaacgctagttattaccacagcatcagcatgggtttattgttctatgtagtaaattcttagacatttaaaacatgtcattctgtacagacttgtattgtttcttgggggcttttccatgataaaaacagtagaattgtactgcaagccctagtggattaggctgcctgtttcttcatttcttcatagctcaacctctgaatgatctggtacacaaacaagatctcatggaattggacatcacatgattcagttcgaagggggtatagtggaaactggaagcaacaagtggactgtaacattttcttgctgagaaaacaagggactctttactgacctgactgatgctgctattcaatttattttccaagtaaatccgaagaaggatcatgtaaacagcacaatgttggacattgctttagtatttcgttctcaggaacattgttccctttgcagagctaggagctgcaactatgtactactatctgacattgctgtaacttgtaaaacttaattgcatttcaagtattttccctc

SEQ ID NO: 24278 - DNA, 1660 bp, Oryza sativa
  ref <308>: DATABASE ACCESSION NUMBER: AK099720
  ref <309>: DATABASE ENTRY DATE: 2002-08-28
gatcaaaatcgccttcgcttaataatctcctcctccgtattaaactcggtttttttagatattcccaagaatctctcctctcctttccattgttgctccgctcggattccgctcttcttcttcttctccgtctccgattcggtctcctcctcctctgctccgaccaggattctgcagcggcagcggcagctgctgcggttggtttttcaggctcggtggcggcaggcagcggcatgtgcgtggaggaactcgaaggcgcagagaggctcgattttggtggggttgcggagctcgagacaacaccggcagacttcgagatggagaaagtttgtgagaacacagtatctcttgatttcaagcaggctaggtcgagcagttttgtcccagttatccgatcaggggactggtcggatattggaggtcgcgattacatggaagatgctcatgtctgcatctcagatctagctaataattttggtcataattcagtggatgatgagattatttcgttttatggggtctttgatgggcatggtggaaaagatgcagctcattatgtgcgtgataacttgccacgggttatcgtggaagatgctgattttcctcttgagctagagaaagttgtcaggaggtcatttgtgcaaactgatagtcaatttgcagagaggtgctctcatcagaatgcactttcttctggaacgacagcgcttacagcaatgatttttggaaggtctcttctggttgctaatgctggtgattgccgagcagttctttcaaggcgtggtaccgcaattgaaatgtccaaggaccacaggacttactgcctcaacgaaagaaagcgtatagaatcacttggcggctatgttgatgatggctatttgaatggtcaattagcagtcactagagcattgggtgactggcatctcgagggtctgaaagaagtgggtgagccaggtggccccttgagcgcggaaccagagctcaagatgatcacactgacgaaggaagacgagttcttgataataggaagcgacggcatctgggacttcttctcgaaccagaatgccgtggatttcaccaggaagaggctccaagagcacaatgacttgaggttgtgctgcaagcagatcgtcgaggaggcaataaggcgaggggcctcagacaacctaacggcggtgatggtctcattccaccaggaggcccctcctcagctcagagtgaacaggacggggagggtcgagcggagcatatcggctgaagggcttcacagcctcagggtgctcctggaaggccaatgatagctccactgctatcatcagccttgaagttgtgcagaattgaagagaaaccttatcttgatgttgtgcagaattgaagagcaactgtatttagtgattttcggcatcttgctgtttacccccaatccattgtcgacattccagtgtgtgttattgtgtgagaataaaaccaacgaacctgagatctcaccttgcattgtgaggcccaggcattgtaaataagttgggagatagtaggtaaggagtgtgagtagtgtgcatccagggggctttgaggctcattatgcgatgtattcccctgtcatctgtaaaaaaataaataccgggattgttagtgtgattaaaagttctatcgtgtgatg

SEQ ID NO: 24279 - DNA, 2451 bp, Oryza sativa
  ref <308>: DATABASE ACCESSION NUMBER: AK099721
  ref <309>: DATABASE ENTRY DATE: 2002-08-28
gtggtggacgagacgagtgagaggaggagagcggccatggcggggcggagtggcggcggcggcggcgggagctccgggaagagcgggacggggaggatggtgtcgctgcaggagttcgtctcgtccatggcgcctctcatagacctggagaaggcggcggagatatcggcggagtcggcgacgagctcgaagaccctcgagaggaggggttgcgtcatggccaacctcaagtgcaccgacgcccagacggggctgatggggaagacgctcctggagttccaacccaacaagggcgacgtgcttccacctcacaagtttggaacacacgatgtggttgctctgaagccaaataaggcagatgctggatctgctgctcttgggcaaggtgtagtttatcgcttgaaggattcttccattactgttgcctttgatgacattcctgaagatggattaaatagccctctccgccttgaaaagcttgcaaatgaggtgacataccgcaggatgaaggatgcactagttcaacttagtaagggcattcaaacaggcccttcagcaaaccttattcctgttttgtttggagaaaacccacctatgagttccaaggatgttgcgaagttcagtccatttaacaagaatttggatgagtcacagaaagatgctatctcgaaggccctcaggtcaagggatgttttcttgcttcatggacctcctggcactgggaagacaacaactatcattgagataatattgcaggaggtgaaacgtggatcaaagattcttgcttgtgctgcttctaacatcgccgtggataacattgttgagcgactctcccgatatagaaccaaattggtgaggttaggccatcctgctcgattactaccccaagtgttggacagtgctcttgacgcacaggtattgcgagcagataacagcagcttagcaggagatattcgcaaagaaatgaaggtgcttaatagcaaattgctgaaagctaaggataagaatacaaaaagggacatcaggaaagagctcagaacccttgccaaagaagagagaaaacgacaacagcttgctgttgctgatgtgataaaaaatgcagatgttgtactgtcgactttgactggtgcatcttccaaaaagctagatggtattacatttgatttggtcattattgatgaagctgctcaggcacttgagatggcatgttggatagccttattgaagggtccaagatgtgtgcttgctggagaccatcttcaacttcctccgactatccaaagtgctgaggctgagaagaaggggatgggaaagacactctttgaacgccttactgaagcttatggagatcaaattacatccatgctcactatccagtacagaatgcatgagctcataatgaattggtcatctaaagaactttataataacaagatcaaagctcattctagtgttgctgatcatatgctctatgacattgaagaagtgaaaagatcttcttccacagagccgactatcatactaattgacactactgggtgtgacatggaagaagtaaaagatgaggaggagagcactatgaatgagggtgaggctgcagtatccattgctcatgccaagctgcttgttgagagtggtgtccgtgcatctgatattggaataattacaccttatgctgcacaggtaacctgtctgaagatgatgagaaacaaagatactaaactgaaggacttggagatatcgacagttgatgggttccagggtagggagaaagaagccatcatcatttcaatggtcagatccaactcaaagaaagaggtcggattcttaagtgatcatagacgaatgaatgttgctgtaacacgagccagaaggcagtgctgcctagtgtgcgatgtagagaccgtaagcaacgacaaattcttgaaacgcttggttgagtactttgaggagaacggggagtacttgagtgcatcagaataccagagctgatgacttggggtgttaacccttaaccgtgatagcccgtgcttatcgcaaagatagtgaagagatatatccaaacgatgcttgtgataggaacatcgtgcacttcaaactggtgcaatatggccaatggagatactgtcattcgacttttatagattggaaacagatcgctgtgagactgaacagataattagctcaggagtggatcaatttcgtcttgactggccctgttctggtctcttcttctgtggcttatggaaatgaaacctcagttatgtgtttttatatgtccgttctttcaactgatgtacaatgatagaagactaattttattcatccatgtgcaaatctaccatagttttttgcatggagttttgaaacttgggtccacaaaaatagtaataataggataggaggttgactgtactgaacttcgcatgataattaatctgtatctcatcc

SEQ ID NO: 24280 - DNA, 1892 bp, Oryza sativa
  ref <308>: DATABASE ACCESSION NUMBER: AK099722
  ref <309>: DATABASE ENTRY DATE: 2002-08-28
gcctcctcattcctgcattgcattgcttccgagctcaaaagtcgtcgtagacccccgcctccttcctcctcctcctcgcgcttcgatttggtttggtttgattcggtttgcgagatgaaggatggtggtggaggaggagggagggggcagcagcagcagtggccttgcgactactgcggggaggcggcggcggcgctgcactgcagggcggacgccgcgaggctgtgcgtcgcctgcgaccgccacgtgcacgccgccaacgcgctctcgcggaagcacgtccgcgccccgctctgcgccgcctgcgccgccaggccggccgccgcgcgcgtcgcctccgcctcggcgccggcgttcctgtgcgcggactgcgacaccgggtgcggcggcgacgacggcgcggccttgcgggtgcccgtcgaggggttctccgggtgccccgccgccgccgagctcgccgcgtcgtgggggctcgacctccccggcggctgcggcggcgaggaggaggaggccgacgacgcgttcttctcggcgctcgactactccatgctcgccgtcgaccccgtgctgcgcgacctctacgtgccatgcgacccgcccgaggtggtggtggccggcggcgggcggcgactcaagggggaggcgctcggccaccagctcgccgagatggcgcgccggaaggccgagacggcgcacccgcacacgcagccgcactcggatctgagcccccgcacgcctcgccgtacctccgccgcggcgagcggccgcctgcaggaaaagcaagctcccccgccgttgcctcatgctgctgcgacggcggcgccgctgccgtacacttcactgctcatgatggcgccggccaactgcaccgagctcatggaaaacaaccgtgttggagacgaagatgaaaatgttctgtgggagagcaccgcgccatcagtgccaccaacccagatatgggattttaatttgggaaaatcaagggatcacaatgagaactctgcacttgaagttggatttggctcaaacaatggaggctttatgattaagagttataatgacatgctcaaggagatttcttctgggacaacgaaggatctggaagatatttatgactcaagatattttgcagctgccgaagatatcatgtcgactaatgtctgtcagctgtcatcgaaaaatccaagcaccaggagcaacaaacggaaggcgagctcatgcgcttcgacgatcgatggaccgacaacttccacaagccatgtacctgctgcttcaggggcattggggggctcttcgaacgacagaggatcggctctccccaaggagatttccttctgtgatcagaccgtcgtccctaccggagccgatcagaggccatgtaccatcaagatcgacagcgagacgctcgcgcagaacagggacagcgcgatgcagcggtacagggagaagaagaagaaccgcaggtatgagaagcacatcaggtacgagtcgaggaagctgagagcggacacgaggaagagggtgaaaggccggtttatgaagtcgaacggagcacctgatgatgtcagcaatggcgggtgatctcatccctgcaatccctgatagctagctgcaatgtacgtagcctggctttttgacgttgcagagatcgatgtggccatatatatgctgagagctaagtctgaaatatgttgcgtatgttgttacaacctatgcacgctctgcttaagtctgtctgctgctgcatgtattgttcagctaaaatttttgcgtccaagagtcgatcttgataattaagtacccctactacaaatctacactacatactgtaatagaccttagattttttttctcatctcctcgtagaaatatatggcattttatatatacgt

SEQ ID NO: 24281 - DNA, 667 bp, Oryza sativa
  ref <308>: DATABASE ACCESSION NUMBER: AK099723
  ref <309>: DATABASE ENTRY DATE: 2002-08-28
ggtccggctcattcttgcccacgccgcgccgccgcctcctcctcctcctcctcctcctcctcctagggcttcttcttcttcccctcctccgagcgccgccgccgccgacgagatggtgctatccaacgacatcgacctcctcaaccctcccgcggagctcgagaagctcaagcacaagaagaagcgcctcgtgcagtcccccaactcattcttcatggatgtcaagtgccagggatgcttcaacataacaaccgtgttcagccactcccagactgttgttgtgtgcccaggctgccaaacggtgctctgccagcccacaggagggaaggccaggctcaccgagggctgctccttccgccggaagggcgactagagtgtgagtcgttcattcagaagacgatgtttttgtgccaagcaagtgttccacctccaaggatgtagtcttcgagttttgctctagttagcacagaaatatctattttgcaagtgttatgttatgtatcccgagctacttctgaacattgtcatcatggaggtctaattagttgggtttatttgagattgttcgatgaactaaattggtggttgatagtctcaggggcaaactgtttgaactataagctggtgtggaagatatttattgacatctcgttttgtgtttgacagt

SEQ ID NO: 24282 - DNA, 2710 bp, Oryza sativa
  ref <308>: DATABASE ACCESSION NUMBER: AK099724
  ref <309>: DATABASE ENTRY DATE: 2002-08-28
gacgggcacggcattgtaacgaacacctcacgcgcacaccctcccctccccacggcggcggcggcggcggcgcgtgcagccggcgattccgcctctcctccaaactccggcggcccaccggccccgacctcgccgccgcgatgaagttcgacctggagggcctgacggtgcacttcccgtacgcggcgatctacccggagcagcacgcgtacatgggcgagctgaagcgcgccctcgacgcgcgcggccacgcgctgctcgagatgccgacgggcaccggcaagacgtcggcgctcatctccctcatcacctcctactccctcgccagcccgtcccgcccgctccgcctcatctactgcacccgcaccgtccacgagatggagaagaccctcgccgagctccgcctcctcttcgcccacctccccgccgccgcctcccgctccctcctcgccctcggcctctcctcccgcaagaacctctgcgtccacccccaggcctccgccgccgccgcccgcgactccgtcgacaccgcctgccgccgcctcaccgcgtcctgggtgcgcgacagggccgcctccgacccggactccaccccgctctgcgacttcttcgagtccttcgaccgcgccgccgccgccggtgacctcgcctcctacatgccccccggcgtctacaccctcgccgacctccgcgccctcggccgcgaccgcgggatctgcccctacttcctcgcgaggcagatggtcaagtacgccaatgtcgtggtctacagctaccagtacctgattgatcccaaggtggccagcattgtgtccagggagatgcagaaggagtgcgtcgtcgtcttcgacgaggcgcacaacatcgataatgtctgcattgaggctctcagtgtcagcatccgcaagcagacgctcgaaggtgccgagcgaaacttgcggcgcatctcgcaagagatcgataggttcaaggccactgatgccaataggcttcgtgctgaatacaacaggctggttgatggattggcacagaggggaaacctgccaatatcggatgcttggctcgcgaacccggccttgcctgaggacattctgaaggaggctgtaccaggaaacatcaggagggctgagcattttcttgctgttttgcggaggcttgtcaggttcctagatggacgcctggaaacagagaatgttgagaatgaaatgcctgttgcctttgttgcttcaatccattcccaggctggaattgaccagaaaatgttaaggttttgttatgatcggctacactctctaatgcttaccttggagataaccgatacagatgagttcatgcacatccagacaatttgtgactttgccacattgattggaacttatacacggggcttttctataataatagaaccctatgatgagagaatgcctgatatccgtgatcctgtgattcagctcagttgccatgatgcatcgcttgcaatacagcctgtttttgagcgttttcaaacagtagtcataacttctggtactctcagcccaatagacctctaccctcgccttttgaactttaatcctgttataagcaggagcttcacaatgtctttaacaagggattgcacatgtcccatggtcttgacaagaggaagtgaccagctacctgtcagtacaaagtttgatatgcgtagcgatcctggcgttgtaaggaattatggtcggctcttgctggagatggcttctgctgtgccagatggcatagtttgtttttttgtcagttactcttatatggatggcattgtcaacagctggaatgagatgggtattttgcaggacatcatgcagcataagttggtattcattgaaacaccagatgttgttgagacaacattggctcttgataattacagaaaggcatgtgattgtggaagaggtgctatattcttttccgttgccaggggcaaagtagccgaaggtattgattttgatcgacactatggcagacttgtgatcatgtttggtgttcctttccagtacacactcagcaggatattacttgctaggttggagtacctaagagaaacttttcaaataaaggagggtgacttcctgaccttcgatgctttgaggcaagctgcgcaatgtgttggccgtgtgatccgttctaaagcagattatggaatgatgatatttgctgacaagagatacagtcgccatgataaacggtctaaactgcctgggtggatactgtcacacttacatgatgcgcacctaaatctgagcactgatatggctttgcatatagctcgtgagttcctacggaggatggcgcagccttacgataagacggggagcggcggcaacaagactctcttaaccgaagaggatttgcagaatatggcgcaggacgccatggagatgtgaaaccatgaaagaaattgaaagagagggagggggagagagagttttctgctgtacaatacattcaaaattgaggtagaagtcactaatgtacaaaaaaattttggctactcatgtgaaccagcatgaattcgagctgcacggttcatgctaaattgctaacaaattggtccttccaagcacatgtgatattactctgcatctgatataggtatgtacaccttaaagtccttccggatacttatatctgaatatgatggcggcctctgaatttcagacgtgtcgttacattgcct

SEQ ID NO: 24283 - DNA, 3560 bp, Oryza sativa
  ref <308>: DATABASE ACCESSION NUMBER: AK099725
  ref <309>: DATABASE ENTRY DATE: 2002-08-28
ggcgatgctggtggagtgtggcgtcgcggcctagccctagccctagcgccaccgccaccgccaccgccaccgcctgctcgctcgctcgattccccggctccccgtcgctacctcgctacctcgccgcgccgccacagccgccggcgccgtctctcaccgggatcgggacaacaagcgccgcgccgttcagtcaggcgacgggggcgtgcgtctccgctctctggggggcctcgacgtcgcctcgccggtgtttcggaagaccgtcggcctggaactgagctatcccatggcatcaccacaagaatccaattccttgtgcttgaagcgcaagcttgttgatgactgcctgtcaaaagagtgcaagtctcgtcgcatcaaaactgagaagggaccatcatctgattcatctgccaagcgctgcaaatgctgttgcactcgacctaaccttgccagtgattgtgtcaattacctaaaaagtggagtgcccagccgtgttatgttttacaaacagggttcttggcacaattttcctgagcagataatgaagtctctcattgaagaatttagaagcaataaatctagtgttgttgctgtgatggacgatgagcctgttcttgttgatttcttgtcgatgaccctggtcaacctaaaatctagaaagcagcggtctgtggcatggtttgatgacactgggaagtgcttttatccttctctattctttgatgaggaagctgatgaagtggctaaagtaggcggtgattttgagggcgccacacagggaataatgttggataaggttgcaaattctccaccagaagtggtgaagcaagttgtccttgaatctagtcctccagttccacagaagcctgccactgcagacatattacgcaaaaagatcgcatctgtggaacgaggcagtgaaggctttctttttgcgcaggaccttttcctctctggcatgggtccatttgcaacgccaaataatatactgcacatccaccgctactctccgaatgatatcactgcacagtgtagacttcaagcttttgaaaaacaaatgatgtccaccaaggaagaacgtggtgatgcaaatgtaaggtatggatggctgggatctaggaagaatgacatagttaggatcctaattaatggttttggtaacaatggaaaacctgctgagaaggcaggcttgagtgctggtgtttatctttcaccagaagaccgagcattttccagtgttggtctttgtgatgttgacgaaaaaggagtgcaatatatgttgctctgccggttgattttggggaacatggaggctgtcatgcctggatcacaagattcttttccaagcagtgacatatatgattctggtgttgatgattgctcaaatccaaagtgctacgtcatgtggccatctcatcttagcacccatattcgtttagaatatcttgttagtttcaggctttcctcgaaagttcgaaattatttacttggtttgaagggtttatggtttcacccatcaccaaaggaagttgcggtggatatttctactcttgtacctataatgagtggaaatgctgagggaccaacttccccttggatatccttcagagttctttttgccatgattcaagaaaatatatcatcggtagcaagggaattgctcttccatcattatgaagagctgaaggaaaacaaaataactcgtgaggagatggtaaagcaaatgataatattagttggagagaagttgcttttggaaaccttgaagaggcttcattactgtccatcattatggtataaatctgctggcaaaatagcatcttctgatcctgcgaggacagctgcagaagacaggtctttggatcaaactgggaattgttcattaattgttagtgttgcgcatggtgattctcatgccccaaatgcagtagctgaaaacagcaccagtctttgcaccaaaggatgtgatactcctgcaacaggcatgatttccaagggctatgattctctggcaccaaaaggtgtgccggaaacttctacttctgtcggccccgtacatggggcttctccaagtgtggaacccaaagtgagggattctcctatacaaaccgttttatcaggaaacattgctactgattgtgccaaaaggcaagatccattggtatcaagagtggcacctgtagctcataatggccttttaaggatgccatctggaaaatcagcatctctcgcagcgcaagtttgcaattctgttagaccaagcacaggaccttcaggtcgtgcttctacagaaccaaataatgcctctaaaagttgtgggatttttgctccgggtatcaggccaaagggtggtgaatctcttgttcctagtttggcattaggaaattccaaatatgcaggtgtagaaggtctcaattctgcaccaagagcgacacctccgggtattaggccaaagggcggtgaatctcttgttcatggtttggcattgggaaattccaaatgtgcaggagcagaaggtatcaattctgcaccaagagtgactccactgggtatcaggccaaagggcggtgaatctattgctcctagtttggcattgggaaattccaaatgtgcaggtgcagaaggtatcaattctgcaccaagagtgactcctccgggtatcaggccaaagggcggtgaatctattgctcctagtttggcactggggaattccaaatgtgcaggtgcagaaggtctcaattctgcaccaagagtgacacctcccggtatcaggccaaagggcggtgaatcttttgttcctagtttggcattgggaaattccaaatgtgcaggtgcagaaggtctcaattctgcaccaagagtgacacctaaagacaaggagtttctttcattgagtatttcatcacaacaaagcccagttcttaattcaggtaaaggccatgatgggacatcaggtgccgcacgtccagtacatgcaccagggcatggaaatcctaaagctttggccactgaggcccgtggttctctatctctgagtattgcaccgaatgtccatgaccctccagcatcaagtaaggagcctaaggacgatgcatctccaatagcaggcatggtctcagaaagccagcactctcaagcacctaatgcagtcaccaagggtacctaaggagtcaaaaggccagcatttacagagtggagtgcacagtcaatcgtctgggccagacgatgctagcagcagcaatgtcgctcgggcagctgataccatcgtcgccctatcaactcttcgagagaagggcaggtagatgttgcagccccttgtgctgatcgctctttgctttttgctgggccgttctctagtgctgtacatgtgatgtgaatgttatacaccgtcctgcccaaaaagcgtttaccgtcgtaccatggtccatgggtcggtccgtttaacttataggtggtgtaaaccggttggatggattcgtttgttgtaggttacctgtcaccttgtcgacttgaacgtgaatcgttgcacatccctggcagtaaactttgtcatggctggt

SEQ ID NO: 24284 - DNA, 2168 bp, Oryza sativa
  ref <308>: DATABASE ACCESSION NUMBER: AK099726
  ref <309>: DATABASE ENTRY DATE: 2002-08-28
gttagtctcacttgcactttcgtggttagctattggttggatgatctatgtgggaaaggctggtatatatatatatatatgcgcgcgctggagggccacaaggtggtgcacttaaactcagatttgagggcaaacttatatacagatgtagttgtccaaagcccaaacatgtacacccttcatttcgtaagagctttaactttttttctaagtcaaatttatataattttgattaagtttacagaaaaacatgataatattttcaacagcaaacaaacatgctatcaaaatatatttaatattagatttaatggatctaatttgatgttttaagagttgttagatttcactataaacttgattaattttatagattcgtttaatatattgacgtgcaattattttacgcgttcgtgaaaaaagattaaatttatagaaattttatttagggaaaaatgaaagtgtattatgatatgaaaccgaggtactccctcccttccaaaatataataacttttagccttcaaaatttttccaaaatataacaatttcttctctagtattctcttcccaaccaatcacaaccctccactatttaatttttccatctaccttcacatcccattcaatcacaacattctctcgtttaattctaccaactttcttaataaccgtatccaacgctaaaaacccttatattatgggacgaatatggtagtaactagtatagacactaaccttttcttccgacgtcagaaagttacaaccgatgacatttatgacgagactaagacagaagtgatactctaagtaccatattctctcctttcttttaattttgtacatatgaaattccagtttggtgtgtactcagcaggtgcgtgtggttatgcgttgactataatatgtacgttgttttgtatgtatacccctttagaagactatagtcactacttgacaaacgagtttttatccaaagccccaaaacataaatatttcaactagattaagtaccggtagtaccgtttctaaaagtccaaatcgctataaacatctctaatctcggttggtgttatcaaccaataaaaaatatatctttagtaccggttggtagtaccaaccgagactaatgttggatgatctttagtttggttgatgttaattactatccagcattaaagatgcattttttgtatcggttgaaaacaacaacccgtactaaagatatttctaaaaccggttgatgttaccaaatggtagtaaagatatcttcagagttagtttaaaagaaaaacatctatattcaagttagatgtgtgtagtaggtgagatggtaatgtgcgtgagggctaaggtgaaagattttgagttcgaatgcaacatctcacatattattttggcttagtatgtatctttagtatcagtcctttcaacccttcttagtctcgatttacctagaatcactatccttcatccacttcgcactagcctatcaattcccaacaattatatgggtaaaatacattgttggtgcttaagctcggatgaatactgtccttttcacccatctcttgcttcaatgtataactcaagatctaaagtttaaatgacgcagctcaagtgacagtccacggtaataagaattttacacttggtctatttgcgaagttatgccctcaaaattaactgctacttcctaaaaaaatcaactcctatcatccctaatcaacacatatgcatttctcaacgtctgaaaaatttatagctcaagtcatgcatcaaaagatgaaagtaaatctacaaatattctattcatttacttcgggtgtgtttagttcacgctaaaattggaagtttggttgaaattggaacgatgtgatggaaaagttggaagtttatttgtgtaggaaagttttgatgtgatggaaaagttggaagtttgaaaaaaaaagtttggaattaaacaaggccttcttttctcataaatatcggagatgtaaattttttggagctattgcgttcttgttcttgctttgcgatctaattgtgattttacccctattttttagggtttgtgcttttgcccctgctttttcgaaatgagcagccttttgcccctggttttgacgggagttaggtgggcccggaatttttgagttaaacaaaggg

SEQ ID NO: 24285 - DNA, 2136 bp, Oryza sativa
  ref <308>: DATABASE ACCESSION NUMBER: AK099727
  ref <309>: DATABASE ENTRY DATE: 2002-08-28
gtctgctctgcctgactgcctccatcccccaccgcgattgagatggcagcaatggcggcgccgaagctcctcctcggcctggtgatgttggtcgggtgcgccgcggcggacagccaccgctacaggccgggcgacgccgtgccgctctacgccaacaaggtcggccctttccacaaccccagtgagacgtaccggtactttgacttgcccttttgtgccccagagaaagtaaaggacaagattgaagcccttggtgaagtccttaatggggatcgtctggttgatgcgccctacaagcttgatttccgtgtagattttgatgccaagtctgtttgcagtagacggctctccaaggatgatgtggtcaagttccgacacgctgtttccaaggactactacttccagatgtactatgatgaccttcccttttggggatttattgggactaagccagaaaaggcagatgcaggggataagtattatctttacaggcacatcatctttgacatcctctacaataaggaccgtgtaattgagatcaatgtgcacactgaccagaacgcggtagtggacttgacagaagacaaggaacttgatgtcgaattcctttatacagccaagtggaaggagacacagataccgtttgagaagaggatggagaagtactcgagctcatctgtcatgccacatcacttggaagttcactggttctcaattgtaaactcttgtgtcacagttctcctcttgacaggattcctggcaacgatcctcatgcgtgtactgaagaatgattttgtcaagtattcacatgatgaggaggaacctgatgaccaggaagaaacaggatggaaatatatccatggggatgtctttcggttccccactaacaaatcgttattttctgctgctcttggtacaggcactcagctatttgctctcacaacatttatattcctacttgcactggtcggagtattctatccttacaaccggggtgcgctttttactgcactcgttgtcatttatgcactcacttcaggaattgctgggtacagtgcaacctctttctactgtcagttcgaaggaaaaaactgggtgaggaacttgctattgactggatgcctgttttgtggacctctctttctgacattctgtttcttgaacactgttgctattgcttacaattcaacggcagcattgccctttggtactatctgtgtcattgtgctcatatggacgctggtcacatttcctttgcttgttttgggaggcattgctgggaaaaacagcaaaaatgagttccaggctccttgccgcaccaccaaattcctgagagaggttccaccacttgcctggtaccggagaaccattccgcagatggcgatggccggttttcttcctttcagtgccatttacattgagctgtactacatctttgcaagcatctggggacacaggatctacacaatttacagcattctgtttatagtctttatcatcctccttattgtcacagccttcattactgttgctctgacctactttcagcttactgctgaagaccacgagtggtggtggaggtcattcctttgtggtggatcaactggatttttcgtcttcgcttactgcttatactactaccgtgaacggtctgacatgtctgggttcatgcagacatcattcttctttggttacatggcctgcatctgctacgccttcttcctcatgctgggcatggttggtttccgtgccgccttgctgttcgttcgccatatatacaaatccatcaaatgtgagtagactatgcatagttggtgaaggccagagatgaaagaaaccagaggtagctgatgcaattgattagccattattcatagcaaaaggtagtgagcagtaaatctgttccattttgtacgactgatgtggtgaattttgcggctctttttttatgtgttatgtccttgtaatttgcatcattgttgaaggaatcgtgcttagcaattttacaccattccattcccttgatgttgagagacagtgctgatgaattttgtaagaattcagaggagcaacctcttgaatattatagcctgaaagcttgatccgaaacaaaccaatagaaactatgacatctgt

SEQ ID NO: 24286 - DNA, 2429 bp, Oryza sativa
  ref <308>: DATABASE ACCESSION NUMBER: AK099728
  ref <309>: DATABASE ENTRY DATE: 2002-08-28
gtatgtgcttaatatttagtattatttcagtatgactgatgccacttctcttaaacatgattgacctttacatttacaaaattctaaatcaccttgttgagagtacactattttgtcccactgaaatttgccatatattatattgcccacttttagcctgcctatttatcccctgcatttttagctttaggtgggttctatgtcaaacactaccacaatcacaaagagttgactgaatgaaaagtgatattatctactactacctctgtctcagaatataagctctagagttggacacagtgattaagaaagtaagtaggattaaatagggagaggttgggattggttgagaagtggaagtaggtgggaaaagtgaatggtggagggttgtgattggttagaaagggaatgttggtagagaagtagttatatttttggacatatcctgagtgctaaaagttgttacattttgggacggagggagcatctttctaacataattaatgtttatttagtgtaaccctatgtctcatatgctatgtttcctgataatattattgtttctgtgactaacaatggatttcttatcaaatacaagagcatatcacctagtaagtatatagttactgagaacaagcagatctgagactttaaaaacgtaaaatggtaactgtactaaggtttagatgtggatcaggcgtgcatgttgaatgaacatccatgttgcaccagttaggtacagtaggactgtgttgcaagttacattgttgagcatgattttgaaagcaaagaaagatgaataagaaaagcaaagtccaaccttgatctcccttccccttgatatggtggattcctaatataggttttctttgttcatatgattttccatatgatactataataagcctctcctgaaaatgggtggctactcgaaccgattgaagttgctctttggcataggttgacttcagtacctggataggtcaaccttgctaccatttatttgtcttgtccttcattcctgctattcctcatcatagaagtactccccttccattatattgtagtatggggaaatccaattgcaattgggcatgccaatggttgagtcattgtggtgtgtttctatttgtcaaataattgtaaatcattgtatttttaaactttggttatttgttctctttttgactgattgctagggtgttaagaaaaacaatcatggacttcattcaaaacaagacactatttgacttgaactataaaacaattcacttttcaaccttggtcctgatcttctgctcccaaggtgccactgtagtgtgatgggtctttcaaggatcgaattgggcatgatctggcctcatcctcggggagaccttcaaataaacacattcaatcaagtaatacctactgttttttggtaacctgttttggttctaacacttgatgcaaaccagaattgcttcccttgatcaatattgctgagaataacagccactggtgaaccaatagacacttgttctctcatcaaaaagtttgtttgggccattacataagaggattggtcaactggaaaatcaggacccactaatttaagactttccaaagactcttggccatttcagcttttacaccatacgttccctgcacatctgctccacagcaaactgaatttgttttaacttgcagtgttccctccatttcttgttatatgcagctatagagctttaggggtacagattcaaactttactgcataataatgtctgattattgattcagttcttctacttcttgctgcatcttcagcaagtattggagaaattcttggttccactataaagtattataataacctatggtctggtttcaaagttcaagttgtaaaatggacaattgtgccattattttgtcacctgctgctattttttaaggcaattgaaacagcaaatgacaattatgagagtttcagcagtatcgcaaatacaaagctgagatcagtccatctaattcctcttgtgtaccaatctgaattgccttttcaggccacccttgtgaaaatggtcaatgaagccactgcaaacattccagggtgggacgaagaaaggtgattaaatggttttgcctcgctgatactcaattcagctgatagtgtttacattagaagccatcgaaggatctccgtggtcaataaaacaagtgaatcaacgcatgttcttcttaggcggcagacacgattggctaattcctacaaattaacctagaattagtttttggcaagtaaaacacggtagttatttggtcaagtgaggtggtccatttttggtgttgtaaagctgaaacgtgagcttttggtaatactcctagatcattcgattgtattgtaaagcagaaatattagtcaagtttgttgcacgggaatgttactcg

SEQ ID NO: 24287 - DNA, 2519 bp, Oryza sativa
  ref <308>: DATABASE ACCESSION NUMBER: AK099729
  ref <309>: DATABASE ENTRY DATE: 2002-08-28
gtattagaccatcttttgagagtagcgctgtctcagatgtaagtaaggcagatcttagggcttctgggaaaactatcctagataggtccgagtcatcaaagtcaaataactcggatgatgaggcacaccagttttggcgtaagcagcttcctgatgacattattccagacttcagttttgagaaaattgaacaagaacctgaagaattgtctcttgctggattatccttgaatgcaccccctttctatggaacaacagcctagccgcttttcaagagagcatgatttatcttctcaagctaacaagagcctggaactggggcttaccagtttactttatgaagataattcacaagcatcgtttccaactatgggttcaagcaattgggagcaaaattttgtaggggatctccattttacgaatggaaatcagggccttcattatgattctgaaagtgctgcaggcttttctgacagttttgctagcgattatgctgcagcaacagacgatgttcttgaccccctagcgtatttagcttcacagtttcctgatttttcatcagagagccttgcagagctgtactatgctaatggatgtgacttcaaccatactattgaaatcctcacccagctagagatgcaagttgatgctacctccaatccaactctgacccccaggacaccaaactttagcacaggggacttccccgcactgccaacagttgaagaccaaaatggtttttccaaaggcaatgcagatattctaagcatcttcaatggacgcagctcaccctctgtatctactggtactggtgattttgtttcagctgttcgcaatttgcatcgcaaaattctggccattggaagtataagaaaggtcctgaatacggtaatggtgtttcaactgtttctgtacccaagcagtacagttctacgaccaaaacatcttctggaaacaagtttcaaagtgttagcagtgcaagagctgctccatggctcgaaactggagatgcagtaggtaatgcccatcttgatataccaagtcatttgtgtggatagcgtgtttccctcctgtatgtttgatgatttattctgttccacaactatagactgatctctttatgtttatatgcaaatcaatagcaaacatgtactcagaatcaaggggagaagcccgtgattttgcccgcatccgaaatgcatgttttgagcaggtaagcatcatccattgtggtctcagttgcatctcgtatgcatttgcatccatgggtgtacgagtgaaatgtgccacatgcttatacaacttacctgcaccagtagccttgtattgtttcttgataaaatatctacttccattttgaccctataaattttgccatttatcatcctgtatcaatttgtttgtgtgtactatcgccatgtaatatgcattccatccatccactattaaaaatttagcctctggcatttcgtttattaataattttttacacggttgttgtatcatcaaatattgatgtttacatgctactcttagtataacctcttcaattccttttattacttatattttgagtatgaaaattggtttgtgcctattatcatgtccaccacatcactgacgttcatttagctgacctcatttgctgtatcttttgcttatgagtgaattgaaattataatacaatatgtaacttgtttacatcttttagctgaagtatttacataaagatctacttgacaggctagacaggcttacctgattggcaacaaagctctagccaaggaattgagtatgaagggacagacatataacacacaaatgaaagcatctcatgagaaagcaagagaagctatttatcgacagaggtcgcctaactggttccctgttctttctgcgctggatggaaaatccttttcatgccaatttatactttgtccacccgattgacaagctgcgccttgtactgttcctaatatttacaagtacacttaacatatcatatgtttttgttgcaatgttcctcaggaacccatcttcgcaacgagggagcgaccgtctgatcgatctacatggtctccatgtgaacgaagcaatccatatacttaaggtcgagctcggtactcttaagagcaccgcgagggctacaggtgagaggatgcaagtcatgatatgtgtcgggacaggtcatcacaccaagggttctcgcaccgccaggctgcccatcgccgtcgagcagtttcttctggaggaaggcctccactacacgcaggcacaacctggtttgctccgtgttgtggtgttctaacatctcttaggtcagcagcacgaagaaaaaagaagcaaaacaaaaaaaggagaaagagatgtagggaaaagaaaaacctaaaaaaaatggccgctgttgcagcactgtaattttcttgtagttgtatattaaaagaggcagcaggagaatagcctgacaacagaatacagtgtaaaattatacatagcttcattcaattcacattccattc

SEQ ID NO: 24288 - DNA, 2216 bp, Oryza sativa
  ref <308>: DATABASE ACCESSION NUMBER: AK099730
  ref <309>: DATABASE ENTRY DATE: 2002-08-28
gtatgtggtgctcctcctcctcaacagcgtcgcctcgcgtcggcgtcgcctctcaccacccaaccaccagtccaccacccacctctctccctcccctcccctccccaaacccaacccgagccgaggccggaatttcctttttggtgcgacgacgacgaggtgagggtgagccaaccgccggatcgcgccgccatgtcgctcgacgagcttccgcacaaggtttctgatgagagagtaaaccatgatactgtgacctcacatgaaagtgaaattgggtctgggtccatctccacagttagctcaacagttagttcagtagaatcagagaaagcagcttatgaattccttgctcaaactcctatcaagtcaaccgatgcacaccttgttgagttttcagaagctatgagaactgttgcaaaagcattgcgacgagttgcagaagggaaagctgctgctcaagctgaggcggaagagtggaggcgtaaatatgaattagagatggcacacaaacagcagagaaaaatcaaaggctatggcagttgtgccaataatgaattagaaaagttggccagccaactaacactggagacgcctgcatctgatcaagcgggatgttgtggaaatcatggtatatgttcacatgaggttcttcaggatgaaagtcctggtcctaacccccgatctagtcacaagctggtgagtagaaaggcatcatttagactttcatggggatgcaatggggataaaaacggccagcacaagcatgattttgtatcatttgaaaagggagatataacaacagcagagcgcagcaacaagcagattttgctgaaatgggaatcctcgccacaaactgttcttttcataaccaaacctaattctaactccgtgcatgttctttgtgctgaaatggtcagatggcttaaggaacataaaaagataaatgttgttgtagagccacgtgttagcaaggaactcttaacagaagattcctactacaatttcatccaaacatgggatgatgatgaggagaaaaagatgttgcacacaaaggttgatctcattgtaactcttggtggtgatgggactgttttatgggctgcgtctttgttcaaagggccagttcctccggttgttgctttctccctaggatcactgggattcatgacacctttcccaagtgagcaatatcgtgattgtctggacaatgtgctgaatggaccatttagcatcacattgagaaaccgtctacagtgccatgtaatccgtgatgcagcaaaggatgaacttgagactgaggagccaattttagtgttaaacgaagtcacaattgaccgtggaatatcatcttaccttacctacttggaatgctactgtgatagttctttcgttacatgtgtacaaggggatggactgatcatatcaacaacatctggaagcacggcatattcattggcagctggaggatccatggttcatccacaggtcccaggaatcctattcacgccgatctgcccgcattccctgtcattcaggcctttgatactgcctgaatatgtgaccctgcgcgtacaagtgccacataacagcaggggccaagcttgggcatcattcgatggcaaagatcggaagctgctgtcacccggggatgctctcatctgcagcatttctccatggcctgtgcccacggcttgcctggtggattcaacaaccgatttcctacgcagcatccacgagggtctccactggaacctgaggaagtcccagtcattcgacggcccgcgtgattgatcccagctcctggatacagtccagtgtcagagttgagagtttcagctggccatcagaagagtttcccacgagtccagctaacaccgagcggataaatgtacctagcagagtttgttgcttgttaccattccatatacatatacatatacatatacatatactagaaggctgctgcgtgtagatttggggtaagtactggggactgaagaatgaatcgaaatagaaagtatcgagaatacactgtgccatgatgaatgtataacagtagatgtggcaggcaacatatactgatgtgcactagcatctgaagtagcatgggagagtagataccggtgacaagtcatcgaagtgtaaaaacacaacatgtatactggtatatatatgtacccccatgatctgaatgaaataatttgaccatggaaagg

SEQ ID NO: 24289 - DNA, 1333 bp, Oryza sativa
  ref <308>: DATABASE ACCESSION NUMBER: AK099731
  ref <309>: DATABASE ENTRY DATE: 2002-08-28
ttggagctgattgccaacgaattccccgtgcgccgtgcgcctcgccctcccctccctccctcctcgtgccgttgccccccggttggactcggcgcgcttgcttctcgctcgcggctgctcgtaacctcgcctcgcctcgccctcctgcagcacgcgcggctggctgcccgacccagatccggagcgccatgtcgaggaatccgggctgcaccgtcttcataggtaacttggatgaaaaggtacctgagagggtcttgtatgagattcttattcaggtaggtcgtgttgtagacctacacataccacgtgacaaggaaactaatcgctccaaaggttatgcttttgctgagtatgaaacagaggagattgcccagtatgctgttaagctattttctggccttgttcgtcttcataatagaacacttagatttgcgatttctggacaagacaagcaatcttctaatggaaatattcctgtaacacctaaagtgaaccctataccgccaccaaagccggctcagctaatgagatctagtgatactcccgcatcgcaacatacagtggtaaatggcaggattgctggtatttctccaaaccattcttatagtgcgcactctgagggtgagagagtttccttattcctttcaaaatataagacactgtatggtttttaattaaatcttacaattcccttttcttgtccagcaccgagtgggatatcgagtagaggattaagcaatggtacatacgaatatagtagacgcgtatttggttctgttctgaatgacgttagccgtcgtactgacaggcaaccaattccatacccgtcctactagcatattgagctccagggaagaacatggtatgctaacagattagcccagcgatgtcaatgttcgttgtctcagcccttctgtaatatcatctatgtattcaccattacatgcatgtaaatatgtcttatggcttagtcgtgtaggccgatgcttatcttttccattgttctgttctcaacattgtagtcagacttgtgcccgctggttatctcccatgtcatgtcctagtgatagcatcatgcctccactaatgcagctgtaccaagacttagtctaattgcagggatggctggcaatttgtgttttaatatttaatctagtgatgtttgttgttgcttctgtgttccagtgggaccaagtttgtgcttgagttcttggtgtattttgttcttctcgtcaaagttggtttgtattatgttgggcatcacaaaagataatgtcattgtctactatttaaaaaacagtgcaaatctactgaaatttaatgtttatttacg

SEQ ID NO: 24290 - DNA, 1928 bp, Oryza sativa
  ref <308>: DATABASE ACCESSION NUMBER: AK099732
  ref <309>: DATABASE ENTRY DATE: 2002-08-28
gatttgatttttttgccaagtccaacgtcgcgcgaggcgaggcgaggcgaggcgagaggaggagtggagaccaccgccgccgcggcgcgcgcgcgctcggagatctcgccgcggtagcgcagcgcgggtgccgtgccctgatccgtccgtgcgatgaaagagcccgcgcaggtgaggacggcgcggggcggcgcggcggatggggtggaggtgggggtggaggaggaggaggagccgccgcgatcggcgacggtgaagcaggaggaggcgaacgcggtgctcggggcggaggggtcccgcccgttcgccatgcgggagctcaaggaggaccacgaggtcgcggccgggagcggcgtgaaggcggcgtctggggagaggaacgggatcggatcggcggatgcccagggttcgtcgtacagccaagagagtatgcagcagttttcatcccatcatgatgttgcaatggacttaataaatagtgtcactggagttgacgaggaaggccgttctcgccagaggattctttcttttgctgccaaaagatacataagcgcaatagaaagaaatcatgatgaccctgatgcatattataattgggcccttgttctccaggagagtgcagacaatgtagatccaaattctagttcgtccaaagatgcattgcttgaggaggcttgcaaaaagtatgctgaagctacccgtctttgcccaactctttatgatgcatattataactgggctatcgctattgctgatcgggctaaaatgcgaggtcgtactaaagaagctgaagagctctggaagcaggcaatactgaattatgagaaggctgtccagctaaattggaatagtccgcaggctcttaataattggggtcttggactacaggaactgagtgcaattgttccggctcgtgagaagcaaaccatcataaaaacagctataagtaagtttcgagctgcaattcaactgcaatttgatttccatcgggcaatatacaatcttgggacagtcttgtatggtttagctgaggatacaatgaggtctgggaagccaggtgtgtccgctagcgagttttacagtcagtctgctatctatgttgcagctgcccatgcactgaagccaaattactcggtctaccgcagtgctttgcgattagtccgttcaatgctgcctttgccatatctcaaagtgggatatttgattgctcctccagaaaatagtgccattgcaccacacaaagaatgggagaggtcacagtttgttttgaaccatgaagaactccagcaggtcaatgcctctgaccagcctccatcacaatcacctgggcatgtggacagcggcagaaagcttttcaggatagttgttgcagacattgtttctgtgtcagcatgcgctgatctaaccctgccacccggtgctggccttcgcatcgatactattcatggccctagattcttggttgctgataactgggagaccattgacagttggctagacgctatacgcctagtctacaccatatttgcaagagggaggagtgatgtccttgctgggattattactggctgatggctcgctgctagtgaaaaactgccaacaagtataggccaagagactgtaggagtatgtcccggaatcagatagaagtatcatagaactcatggttttagtaggcgtaagagcagatgttatttgtaacccatttatggactggtaggtcataggccaattttcctttgtactgtggcgttgtgtcgtcatggtacatatgatgtgatataagaaataaaaaccgtaatatcctctctagcctgtgaataaagatgcaacggcttgtggcaggcgagtaggttgtgtgaactgctgtcctatctccctctcaaagaaggaataaaatgtttcccctatctgtttttcagccttct

SEQ ID NO: 24291 - DNA, 1393 bp, Oryza sativa
  ref <308>: DATABASE ACCESSION NUMBER: AK099733
  ref <309>: DATABASE ENTRY DATE: 2002-08-28
ggcaatcacatcctcttcccttctcttctccatcgcatctaccaccgagcgtgcaaggagggggggggggggggggtgaaaatggcttcctcgacccagggccaggtcatcacctgcaaagcggcggtggcatgggaggccaacaggccgatgacgatcgaggacgtgcaggtggcgccgccgcaggccggcgaggtccgtgtcaagatcctcttcaccgcgctctgccacaccgaccactacacctggagcggcaaggatcctgagggtctatttccttgcattcttggtcatgaagctgctggaattgttgaaagtgttggggaaggagtaactgaggtgcagcctggggaccatgtcattccttgttaccaagcagaatgcagagaatgcaagttttgcaagagtggaaagaccaacctctgtggcaaagttcgtgctgccacaggggtcggtgtcatgatgaatgatcgcaagagccgtttctcaataaatggaaaacccatttatcatttcatgggaacatctacattcagccagtatactgttgtgcacgatgtcagtgtcgcaaagataaacccacaggcacctctagacaaagtttgcctgcttggctgcggtgtttctactggcctcggagcagtatggaataccgcaaaggttgaagcaggttccatcgttgctatttttggacttggcacagttggacttgcagttgctgagggggcaaaatcagctggtgcttctcggattattggcatcgacattgatagcaaaaagtttgatgtcgcaaagaactttggggttacagaatttgtgaacccaaaggaccatgacaaaccaatccaacaggtcatagttgaccttacagacggtggtgtggactacagctttgaatgcattggaaatgtttctgttatgaggtctgcattggagtgctgccacaagggctggggaacctctgtcatcgttggtgtagctgcttctgggcaagaaatctctacacgaccattccagctcgtcactggccgtatctggaagggaacagctttcggcggtttcaagagccgaagccaagttccatggctcgttgagaagtacttgaacaaggaaatcaaggtggacgagtacgttactcacagcatgaacctgactgacatcaacaaggcgtttgacctgctgcatgaaggtggctgcctgcggtgtgttctggcaactgataaatgaaccgatgatggttcatctgcttttggctgtgcttctgagctatgtcacgccaaattgtaatccagatctaccagccttggaaattgaattattctgctcgtttcgcttagaagcactttgaactgtgacaccactctgctataataatatatgtgctgtttggacc

SEQ ID NO: 24292 - DNA, 2958 bp, Oryza sativa
  ref <308>: DATABASE ACCESSION NUMBER: AK099734
  ref <309>: DATABASE ENTRY DATE: 2002-08-28
gactcgaatcgcatcgcatcgcaccacaaaccctcccccccgaccagaaagccaagaaagaaacctttcttcgtcggtctctctctctctctgcccatggacttctcggagcaggacgtcgaaatcttcggcgaggactacgacgacgccgaggccgacggcggcggcggcggcggtgcctcgtccggctcctcctccccgtcctcatcctcctcgtcgtccgccgccgggtcctcctcctcctccagcggcgcctccagcagcagcggcgggggcgggggtgggggcgaggacgaggacggggtcgaccagggggacgccagggggtacgacgacgacccgttcgacggcgcgcccgcgagggccgccggtgggtacggtgacgaggagaggggcgagggtgatgcggaggaggaggaggaggaggaggagagggatttgttcggctctgacaacgaggattacgtcaagacccccgcgcgtagcaactacctagtcccagtgctaccctcaatacggaacaccaacaatcattctcggggaggatatggggggcggaatggcagaggtccacctcttcttccaaggccaggaggccatccaggacggcataactttggatatggtgggaggttttcgcatggaaatgggcgtaatgttgaaggttttgtttcagaaatgaagcttaataagagtgaagaaactttatctaggaagtttgttgcttttcaggagccttctgagattgcatgctacagccgtattgagggtggggatgtatattttgatgaccgcagcttgaggctcttcaaacgtaacatttgcgactatgttggtgaaaatctcaataaaggatttgaatcttttatagagaaaagagatttgggttcagaaggatttggtgatcttcttgcatgcataagaaattcaactgtacctcttcagaacatacattttgtgacataccgcaacaatcttaacaagatattggccacggcttatctaagagaaccatggaagatgggtgtgcacaaaagaaatggtgttgtatacctggacgtccataagctccccgaaagaccacaaagtgaggttgaacgccggagatgttattggggatattcttttgaaaatcttgcaactgagaattccattgatgaggatggaagaggtattgatgcaaatgtagagttctgtgctgtaataaaaacgaaattgggtgcacatcgtattatcatgggtgctgagatggactgctgtgacgcaactgatgatggtaggcggttctacgtggagttgaaaacaagcagagagctggagtaccatacagtggaaaaatttgagaaagagaagttgcttcgattctggattcaatcatttattgctggtgttccatatgttgttgttggattcaggtagtattcattctttattgttttcccttacgccatccattttttgtagtcaatgtgatgagctttctatcacctgacagctggcatttttgcaatggaaaatgattttcgtgataaaatgtttgctgatacaatttacatgttaaagaagctgtgcaatgttagtattgggccttctgcttggctaggagattgacatgctggttatcacaaatcagtatgccactatggttgtcctctacaaggaacaagagtaatttcatttacacctggtgtcatcaactgtgtacgaagcaagctcatatttgtgatagtcagtcgtttctcatggatgtcctgttgcaataaataattgtgctgcctacccaacttttgtggggctaaaggctgctggtgctattacaataaatattttattatttggtactaaggtatatttttcccggtacgtgtatgctcattttcgagttaattttgtctaaataattacaacacgatttcatcttcgggataccaaatctttgtgtagtaaactagaggttcatggagacatggactatttctggtaatatactgatatgtctccatttattgattgtaataggcataataacttaaacacatacttgattttctagattcttcagttcaatttgtttgactgcatcacatgtacttgataaaatcgtatgcttatttttaatacaatgttctgatttggtgtggtattttgctcaatatttaacctaccccatatgatgcaaaagaaggcttttacttttttaacttcgactttgtcccaattttacattgattccagtggcttgtatttgtaacttgaactagtacccctcagcattttcctactaataaaggagtttcaaccatatattttttttacctgcaggaatgatgctggtgtacttatacggactgagagactaagaaccaaagaaataacacaaaaggtgaaagcgaagaactactggcagggaggtgtttgcttggccttcgctgatgaggtcttatgctggttgtatggcactgttagagaaaacgaggactacatcctgcaatttgtacatccattcaatcgcttggaacttctacgtgcccagtctccctgtcctgatgccatcactcatcatgtggagcagctctctggtacagcaggctaggttaattcgtacacacaacttcggcaagtaaaagggctgtttgaggtagatccgtgttgaaggattctattctaggggtgctgactcttaaacaaaacttcggcaattatataatggttgagctgacgacttacccagccaagcaacataggccgacgactaaatggtttgctctttgaactgccaaagagattttgaaattgtcaaaaccttgtgtttctccagtaacattaagttataaattagggaaatggagagctatgcggcaatgctactactgggtcatgccaccgaggcaccaatgatgtaactctctaccagataccagtaccaagggaaatgatatgaattctagagagtttctg

SEQ ID NO: 24293 - DNA, 2064 bp, Oryza sativa
  ref <308>: DATABASE ACCESSION NUMBER: AK099735
  ref <309>: DATABASE ENTRY DATE: 2002-08-28
gcattcctcctcctcccccacgcggcgcaccagctatcgccgccgccgccgacgaggagggtgcgatggaggcgagcgcggggctggtggcggggtcgcacaaccggaacgagctggtggtgatccggagggatggaggaggagggggaggggttggggggaggagggcggcggaggcgaaggcggcgtgccagatatgcggcgacgacgtcggggaagggcccgacggggagccgttcgtggcgtgcaacgagtgcgccttccccgtctgccgcaactgctacgactacgagcgccgcgagggctcgcaggcttgcccccagtgcaagacccgcttcaagcgcctcaaggggtgcccgcgggtggccggagacgaggaggaggacggcgtggacgacctggagggggagttcggcctcgacggccgggaggacgacccgcagtacatcgccgagtcgatgctgcgcgcgaacatgagctacggccgcggcggcgacctgcagccgttccagcccatccccaatgtgccgctcctcaccaatggccagatggttgacgacatcccgccggagcagcacgcgctggtgccatcctacatggggggcggcggcggcggcgggaagaggatccacccgctccccttcgcagatccgagcgttcctgtgcaaccgagatccatggacccgtccaaggatctcgccgcctacgggtacgggagtgtggcatggaaggagaggatggagggctggaagcagaagcaggagcggatgcagcagctcaggagtgagggcggcggcgactgggatggcgacggcgatgcagatctgccactaatggatgaagctcgacaaccactatctcgcaaagttccaatttcttcaagccgaattaatccctataggatgattataattatccggttggtggttttggggttcttcttccactaccgagtgatgcatcctgtgaatgatgcatttgctttgtggctcatctctgtaatatgtgaaatctggtttgctatgtcttggattcttgatcaatttccaaagtggcttcccatagagagggagacgtacctggaccgcttgtcactgaggtttgacaaggaaggtcaaagtagtatacgatctccagtccaaacatccattcgtgtgagcagtcaaacagttaatccttaagtatggtttctgtatacgaagaagcacgggaaaggtggacttggaaaaatcaagtaacagaagaagggccttatggctttaaaattctctcccaaataagacgccaggaccatgactgctgtaccttctctgctatggcttcaactctcgaggccaatgtaagagttcagcatggaaggaacgatcaattttccatacctcacctgcaatttatagatgctcaatcaaaaatcagtgcaccaaataccaatgagacaaaggtactgaggcttttgaaaagtctaaaagagagagacggtggggtttacttggatgaagactatgatagtgaggggaatctccgagccttagatgctaaagtttgcagggtatggaagttcaatctctaccatgtgaaggacattattcatcttcgaagtgctcttcatcggctgcgcaggcaagggcctttactggctgttatccgcatcagccgtaattatgatgagtgccgcaagtcaggccatgtctacgaatatgatcctgcccgaatctgcacatatgatgatgggaaacccaagacgcacgcgttgtgtgttgtttcgtttgtaactgagaagggtacaccatgccttgagtgtcaggactctcacggcacagcttggggtattggcggttacttaactgtggaaatcaggtcactaaaagagctatacagtgttagagttacgtagctggtggctgtcaagtcaatgcaactcaagactctacgtatgcactcattttctatcattttaatacttcctgcttacagtacgtggccaatgcaaagatttcatggctcagaagaaagggatctttggaattaatactttgtatttaagtgataatggcctgttgcttc

SEQ ID NO: 24294 - DNA, 1443 bp, Oryza sativa
  ref <308>: DATABASE ACCESSION NUMBER: AK099736
  ref <309>: DATABASE ENTRY DATE: 2002-08-28
gacgagcgaagcccgcggcgacaccaccacccaccagcgttagcttctgcgtgtggccgtgggcgcgcgctccgcccgcgccatgacgaccgccaccgccatcgtcgccggccacggcctcgcgctgcgccggagcctgcacctctccaagcccagctgcgccaccttctccgcgcgcgcgcttccgcccgccgcccattgctgccgcaccgtcgtcgccgcggccgcgccgtcgtcgcggacatgccggtgccggtccgtctcctccgagagctccaccgccgccgcggccgacaccgccgacgacgaggaggaggtgaccaagagcgactcggaggaggaggagatggacccgctggcggaggtgtgctacctggacccggaggcggacgcggaggggatccgggagtgggagctggacttctgctcgcgcccaatcctggacgcgcgcgggaagaaggtgtgggagctggtggtgtgcgacgcgacgctgtccctccagttcacccgcttcttccccaacacctccatcaacagcgtcaccctccgcgacgcgctcgcctccgtcgccacctccctcggcgtgcccctccccgaccgcgcccgcttcttccgctcccagatgcagaccatcatctcccgcgcctgcaacgagctcggcgtcaaggccgtccccagccgccgctgcgtctccctcctcctctggctggaggagcgctacgagacggtgtacagccgccacccgggcttccagtccggcaccaagccgctgctcaccctcgacaaccccttccccaccagcttgccggagaatctcttcggcgacaagtgggcgttcgtgcagctccccttctccgctgtgagggaggaggtggagtcgctggagaggaggtatgcgtttggggcggggctcgacttggacctcctggggttcgagctcgatgagaacaccttgatacctggggttgccgtggaatcttcgcgagccaagcctctagctgcttggatgaacggtctagagatctgctcaatggaggttgacacgggcagggcgaacctgatcctatcggcgggggtctcgaccaggtacgtctacgccgggtaccagaagagcgccgcgacgacgcaggaagccgaggcctgggaggcggcgaagaaggcctgtggcggcctgcacttcctggccatccaggagaacctcaactccgacgggtgcgttggtttctggctcctgctggaccttcccccgccgcctgtatgattgatcctgcagtccggagagtagcatctagcagcgtgtgtttccatcaaagatcactgtgtagtatgtgtagctccagtaacaaaattttcaatacaagatcccttccatctgtactacacactggtgtactaaggaggaaaaaaagaaaagaagaggagataagggctctgtgtgtttcc

SEQ ID NO: 24295 - DNA, 1831 bp, Oryza sativa
  ref <308>: DATABASE ACCESSION NUMBER: AK099737
  ref <309>: DATABASE ENTRY DATE: 2002-08-28
gactcccgaggcacccgcgactcctcaaagcctcgcctcgcgtcgcgccgcggcgcaccacccctccctccccctctccgccccgccccaccccacccccgcgcgacctcgcaatggccgccctcctccacctccagtcctccgccaccgccgccgcggcgccctccttcctcctcctccgccgccgcggcggcggcgtcacggcgccggcagggagcagccggcggcggcgggcgtgcttccgcgtggaggcgaagatccgggagatcttcatgccggcgctgagctcgaccatgacggaggggaagatcgtgtcgtggacggcctccgagggggaccgcctcgccaagggcgaccccgtcgtcgtcgtcgagtccgacaaggccgacatggacgtcgagaccttccacgacggcttcctcgccgccgtcctcgtccccgccggcgagtccgcccccgtcggctccgccatcgcgctcttcgccgagtccgaggacgagatccccgccgcccagtccaaggccgcctccctctcctcctcctcctcctcctctccaccacctccgcctccccaagaatcaacccctccccctcccccgccacctcctccagcgccagtagcagcagcagtctccgctcccgcgcctccatccccagcctcgcaaggcggcttgcgcgtggtcgcgtcgccgtacgccaggaagctagccaaggacctcaacgtcgatctcaactccattaccggctctggccctggcgggcggatagtggccaaggacgtcgaggcggcggcggctgcgccaaagaaggcggcgcccgtggcggctgctcggcccgatgtgccgctgggttcgacggtgccattcacgacaatgcagggtgccgtcagcaagaacatggtggagagcctcgccgtgccgacgttcagagtcggttacaccttcacaaccgatgctctggatgcactctacaagaagattaagccgaagggtgtgacaatgtcggccctgttggcgaaggcgactgcaatggcgctcgtgcaacacccggttataaactccagctgcagagatgggaagagcttcacttacaacagcagcataaacatcgctgtggcagtggccatcgatggtgggttgattacgccagtgcttcctgatgctgataagctcgacatttattctttgtcgaggaaatggaaggagttagtcgataaggctcgagcgaagcagctacagccccatgaatacaattctggcacctttactatttcaaaccttggtatgtttggagttgacagatttgatgcaatcttgccacctggaactggtgcaatcatggccgttggatcatcacaaccaacacttgttggtacaaaagatggtagtattgggatcaagaaccaaatgcaggtcaatgttactgctgatcatcgggttatttacggagctgatcttgccgcttttctgcaaactctttccaagataattgaggatcccaaggaccttacattttagacacatccagcaattgtttttccctgaggcaattgcgataggatatgcttccccgtagatgtgtagcatgtgtttctggtcatgtaagttagttgtttaagctgtcacctatgttggtatggggtaacttcactggctggttaccttcttatcattggtttgttcaataagcttttacaattttattgggataggggccgagtatgatacatattgcctttcaccggaagactgattttttattttgtcgagctcgatgtacaatggatccatgccctgaatacaacgaaatgaaacagtgttacagcttgtgc

SEQ ID NO: 24296 - DNA, 1420 bp, Oryza sativa
  ref <308>: DATABASE ACCESSION NUMBER: AK099738
  ref <309>: DATABASE ENTRY DATE: 2002-08-28
ggagggagttgtactgcgccgccgctgcaccgcacctcgtcagtcgactccgggaaactgctcccgagccccagcgccaaggcctaccggagcgcctccggtgaggtcgtgacgagctcagggttcgtttggtggtaagctctgtgctcccggggcgcgcggggctggatctggagcggggtttcgcagcgcagcggggaggagccagtacgggtgggggatggggaggctgaccgtcgccgcggcagtggccgcatgggcgatcccgctcgctgctctggtcgcctccatcgtgcccgacccttacatggatgagatcttccatgttccccaggtgcagcgctattgccgtggagatttcttaatatgggatcccatgatcaccacccctcctggcctgtactacatttcactagcatatgttgcttccttgtttcctggtgcatgggtgactagaatagcagaggcatttgatgccctttgcactacagcacttctgagatccactaatgttatcatggcgatgatctgtggtgttctagtccatgacctgcttttgtgcatcaggccaaaaattggcaagaggaaggcaactgcatttgctattttagtagctttgtaccctattcattggttctttactttcctttattatactgatgttgcatcattagcggcagttcttgcgatgtaccttttctgcttgaagaaacaattttgggtcagtgcagcgtttggtgctttttctatacttctccggcagactaatgtaatatggatgatattttttgctgccaatggagccatcgctcatgcacaatatctttatgtcaaggacaatgtttgttacgagaacagtgaactaacagataagtcaaacaaagaggcatctcacatggataataaaaccactgctccaggtttgagaaggcggcgaaacaataatcccataaacaagagagaagttgtttctgaatcaaacattatgtattccagttttacagaggaaatatgggatgccatcttcaagttatggaattcaaagtgtgaagttttaattgcttttataccatttgcaatggttcttttggtgtttgtggcattcatagtctggaatggtggcatagtgctaggtgctaaggaagctcatgttgtttcaccacactttgcacagtttttgtactttggtctagtgtcagctgctgccctcctgccatggcattttactcctacccgagcatcagacctattccactggtgcagaaagaacaaaacatatagttcttttgcaattttggtggctcttggtttaagccttgttgctgtacatttattcagcattgctcatccatatcttcttgctgacaatagacactacaccttttatatttggaggaaggttatccaagttcactggatg

SEQ ID NO: 24297 - DNA, 2730 bp, Oryza sativa
  ref <308>: DATABASE ACCESSION NUMBER: AK099739
  ref <309>: DATABASE ENTRY DATE: 2002-08-28
aaccagaaggtttgctcactttgtcgcagcatttcaagctctcctaacctcagataaatgatagccattagaaccctagaaggatcattatcattatcctgaaataattccggtgaaattcctgtgttcccaaatagcagagcaagatttaatttcttgttaattattttttagaaggaaaggagcattgcgagtttttggcgccaagaagcaagaaaggtcatggacagcagcaagcagcagctcgccgtttggccggtgtccgccgccaagaagtacgccggcttcgacggcaaggcggcggcgagggagcggtcgggcctcgcgaacgcgtcgttccgggtgtactacagcctccgcgccggcgccgtgccgttcctgtgggagtcgtcgccgggaacgcccaaggcggccgccgtctcgtcgccggcgagggagtcatcatcggcggcgcgtggcgctctgccgcccatctcgccgccgccgtcgtaccagtcggtcgagatgaagaagggggggaggtgccggccgaggtcgtcgtggccggcggcggcggcggcgggcgacatcgtgagggcgctgctcggcatgctcgggctcgggaagtggcgccgccgccgccaccaccaccaccggtcgtcgtcgacgcgacggcgctccgcctcggtctccgagctgccgccgttcgcatcgctcccgtattgacacgtgtacaatcagattaattaattaattacaactttattatggacggatgattaatcacggatgttgcatgtaaattacggaggcggatgccactttgctctgtgattatctcctaatctctcgggttttcgcgtcgttaattagcagagtctgagtcggtttagcgcacggttataaaacgagtgggcacatcgatttgaaacgagtcgcgtcgccgctgcgtttccgaagagaaggcgccgctcaagggagaaagcgtaaagccgtttcccgctttagttctcgcatccgcgctaaccctcgcggcttcgtcgatggtcggcggcggcggcggcggcggccacggggtcaggacgccggcgaacttccccccgcggcagaaggctcgcctccctcgcggaccggttcatgagaagtcgttggaacagcaaaagaaggggccaagttcatcctctccttcagttagcagtaacaagtccccactccaattggctgcagcaattgttcaaccacagaaaccgctagagtcaccacagcacatggttacaccggttcgactgcaagaatctccaggcccaagaaccattccatgcagttctggatctgtaggatctggttcaggagctgccccatttgacatatgcataaaaagagatgataagtgctccatcaagttaagtcgttctttactggaaatcaacagagaaaaaagacgagaaagggagcaactttccaaggaggcagctccattgcaatatttgagacctgggatggttctgttgaaaaagttcttaaagcatgatgatcaggttgacattatcagacgctgccagaaacttggtattggctcaggaggattttatactcctggctacagagatggtggtaaattaagtttgcagatgatgtgcttagggaagaactgggatccaaattcacgttcatatggagatacacgtccatttgatggtgctcaaccaccaagtataccagaagtattcagtaagatagttaaagatgccatccaagcttccaatgaatttttgagacaaaaagccagacctgccaatgatgttgaagaacttcctccactgtcaccagatatctgccttgttaacttctataccagcagtggtaagttaggtcttcaccaggtacgaagatccacaatcttcaacgttatacaattatatttcaaagattagtattacaagtcttcctcaataaattactccaacaaaatcctcacctaggtcaaagcagcttttcctatggttattttcttcagagtttcttgtacttgcatttgtatagtataatgccttcaattcctctgcttttcaattgaaatgtttatattgctgtgatcctctttggtgattactaactggactgtgtgaatgtatcatttttacaggacaaagatgaaacgaaacccagccttcataagggattgcctgttgtttcattttcgctaggtgacactgcagaattcttgtatggtgacgtgaacgatgtggataaagcttcaaaggttgatctggaatctggtgatgttctcatatttggtggtaaatcaaggctcatattccatggggtttccagaatcaaaccaaaaacagcaccaaattggctgaccgatgaagcaaaacttcgacctgggcgtctgaacctcacattcaggcagcattagcttgccccgtattagatgtagagggaaccttgttctgttctgttgtagtagctcagtacccaccctattagcatgagttagctggtagtacattcgatctaactactggaaaactcgagaaggagtcagatcaaactatggaacatatatatatttagtgcaattgattttcctgtgattattatttttagatataatggaaatcaatccagatttgtgttgtagtttgaagaggtggcattgccagatttgtgttctaatgtaaattcctatcgtgaccactctttcaaaattaaaagacaatatataccaagccaatttaccaaatc

SEQ ID NO: 24298 - DNA, 2311 bp, Oryza sativa
  ref <308>: DATABASE ACCESSION NUMBER: AK099740
  ref <309>: DATABASE ENTRY DATE: 2002-08-28
gccccttccttcctcctcctcggctcggcgcgacgagtcctcgccatggcgagtcgccggtcgcgtcggctcggctcgctcgtgcccttcgccgccgcggtggtcctcctcctcctcatcgcttccgccgccgccgccgccgcgggatcccccgatcgggccggccccgcgcggccgccgctggtgctcccgctcacgctcgcctactccaacgccacccgcctccccgcctcctcggccaggcgcggcctcggcgatggacacaaccccaacgcccgcatgcgcctccacgatgatctcctcaccaacgggtattacacgacgaggctgtacatcgggacgccttcgcaggagttcgcgctgatcgtggactccgggagcaccgtcacctacgttccctgcgccacctgcgagcagtgcggcaaccaccaggatccacgattccaacctgatctctccagtacatattcaccagtaaaatgcaatgttgattgtacttgtgataatgagaggagtcaatgcacttatgagaggcagtatgctgaaatgagctccagcagtggtgtgcttggcgaggacattatgtcatttggcaaagaaagtgaacttaagccacggcgtgctgtttttggctgtgaaaacaccgaaacaggagatttgttcagtcaacatgctgatggtattatggggctgggccgtggtcaacttagcataatggatcagcttgttgagaagggtgtcattagtgattcattctctctgtgctatggtggaatggatgttggtggtggtactatggtacttggtgggatgcctgctcctcctgacatggttttctctcattcaaaccctgtccgcagcccgtattacaacattgagttaaaggaaatacatgttgccggaaaggcattgcggttagacccaaagatattcaacagcaaacatggcactgtcttagatagtggaaccacatatgcttacctgcctgaacaagcatttgttgcatttaaagatgctgtgacaaataaagtaaattctctgaagaaaatccgtggcccagatccaaattataaagacatctgctttgcaggtgctggaaggaacgtctcccaattatcagaggtatttccagatgttgacatggtatttggaaatgggcagaagctttcgctttcacctgaaaactatttgttccggcattcgaaggttgaaggggcttattgcttgggtgtgtttcagaatggaaaagatccgacaacactattagggggaattgttgtccgtaatactcttgtaacctatgaccgtcacaatgagaagattggcttttggaaaactaactgttcagagttgtgggagaggctccatattagtgaagttccttcatcagcaccttcagattcagagggagatatggcaccagctcctgctcctagtggtttgcctgaatttgatgttggcctaatcactgttgatatgtccataaatgttacttatccaaacctgaaacctcacctccatgagctggctgagcttatagctaaagagctggacattgactcccgtcaggttcgagttatgaatgttacaagccaaggaaactctactctaatcagatgggggatttttccagctggaccttctaattctatgactaatacaacagcaatgggtatcatttatcggttgacccaacatcacgtccagttgcctgaaaatcttggcagttatcagttacttgaatggaatgtgcagcctttatccaagaggtcatggttccgagatcatgtagtctctatactgcttggaattttgctagttgttttgctgactttatcggcccttttagtactgattgtctggagaaagaaatttagaggtcaagcggcatatagacctgtggattcagcagttcctgagcaagagctccaaccgctataatttggagtggttcaacggagtaaacatataggcgattctttggtagaaataccgttgtgcgggctgccatgttgcagcgggttcacatccgctgctgggagttgccctttttctttgtatgtaacacaagctacaagcttacagaagaagcacaagattacataacttctcgattcagcacttagagcctctgttcataaactgtctagcgattcagatcaagagcttcctcttgtagcttacagtagaagaaggttttgttcgtgtaatgtagattaagtagaatagagcaaggcacaaaagcacagcagccatggacggaatgttgtattatctagtatctgataagtgctgaggatattcggcttct

SEQ ID NO: 24299 - DNA, 2145 bp, Oryza sativa
  ref <308>: DATABASE ACCESSION NUMBER: AK099741
  ref <309>: DATABASE ENTRY DATE: 2002-08-28
gaagaaacgacaccaccaatccctagcagcagcagcagcggcggcggcgggggatccagcatggagccagcccgacgatccaccgccgcgtcggacggcggcggcggctcgtcggcggccggatcggacggcgaggacgacaggtacctcagcgccagctccgcgctcggcacgcccagctccctcgccaccctcctcccctcctccgacctctgggatcaccagatggacctcctcctcctcgacgaccccgtcgccggcttccccaaggcccaccagctggcccgcctccatccgccgccggagccgccgcggcccgatcctcccgcccccgccgcggccggcgacgccgttctcccgcggccgccggagccggatcccacccaggtggacaaccttgatgacaatcatttatttgatgatatggttcaagagatggaacatattcttctcaattcaggggagccccatgaaagtgcatcttttacagattatcgcgcaaataattcttcccaagctcatcatttcagagatggaagcaccactgcctctacttctggtacagatgatgcttatgtatatccccttcctcaccatccttcaaaaatttattgggtggaggttgtgggagcaaagcaaagaacaggagatgtttcttttggtgagcgaatggttggggtcagaaaatatactgtttatttgttaaaagtcaagagcggagaagatgactgggaaattgagaggcggtaccgtgaattttatgctctataccaacaactcaagctcttgtttgctgagaaaggtttcagtctgcctcctgcatggagaaacgttgaaaaagaatcaagtaaattatttgggaatgcatccccagacatcgtcaatgagagaagtagtctaattcaagactgtttgtgttctttgcttgtctctagttatccatttggaacacccactcctctggttagttttttgtcaccagggagtcctgcttatgagtatagcttgttaaaaactcttatcccaagatctttgcaaaggctaagcagtgattcacattccaaaggctcaagctgcaatggaacttcacacaaagattctgcctcaatgggcaagactatatcacttgttgtggaggataggcctcggaagtccactagacagttgttggagttacaacactacaattgtgctggatgccataggcatttggatgctgggcgaacaatgctgcaagaaattgtccaaacaatcggatggaacaagcctcggttttgtgcttacactggccaattgttttgtgcttcttgtcacacaaatgatactgcagttctgccagcaaaagtgctacaccactgggatttctctttatatcctatttcccagttagcaaaagcatatttggattccatctatgaccagcctatgctctgtgtaagtgctgtcaatcctttcctctttgcaaaggtgccagctctgcttaatattatgagtattcggaagaaaatagcagctatgcttccatgtgtccaatgtcctttccggaattccatatttagaggactaggagctcgaagataccttcttgatgggaatgacttctttgcgctccgtgaccttgttgatctttcgaaaggggcttttgcagcgcttcccgttaaggtgcaaacaatatcaaatcggatacttttacacatcacagaacaatgccttgtgtgctacgactctggcgttccttgtgctgctcggcaagcttgtgatgatccgctagcactcatctttccgtttcaggaggatgaagctacaaagtgtggttcgtgtggatcaatcttccataaacaatgcttcaggaaaataagcatatgtccttgcggtaagggtgctgccagcaaaggcaggaaaatcgttgcgcttgaacaagctgtgcgtgacgatgcaagcagaccatcaactcagttgatccaaccctcatcgttctcctcatcatctggttttttctccgatatcatctcaaaggctaggccagataaactttggaaaccaagaaatagcagccctgtaattcttatgggttctttgccagatacgtctacatgagctcagttgtatgttcatgttccatttatattgttgtgtttttcgcct

SEQ ID NO: 24300 - DNA, 2624 bp, Oryza sativa
  ref <308>: DATABASE ACCESSION NUMBER: AK099742
  ref <309>: DATABASE ENTRY DATE: 2002-08-28
ggcttcttcttcttcttcttcttcttcttcttcttcttcttcttcttcttcttcttcttcttgtttgtggtttgaggcgattacaacgcgagttcgccgttctgcgagggcggtggctgatccgtctgctgggatctacgttttcttcgcggtttcggtggattttgcgggggtttcggggattcttgagacgtcggtgtgttgcggttgtgttcaaacctcccaagcgcgtggattctttttggggggtctctaatttgtgtcggcgattagtcaacgtggagcaattatacggatttccgagggattttctggtatttattgctgcaaatcgggcaagttcttggcttcggatggggcttggagtaaagatagatcatttacgccatagattcgtacccaaatgctcagttttttttattggtttgcactttccccttcgttagaggctcgtatgctcgcgcctgcctcatagcagatgcggatgagttcaaactcaagaatagatgcagaagagagcctgaatcaggaggagttcgtcaagaaacgtgaacagggtgcagggatccctattttggcttgattgaaggcggttttggagggggaaagttgcttagctgaacaacatttttgcgcatagcagcaaactgttgcttgtgttggagccgacggcaatgaaagaatgccttttttgtagctggttttggacataaagagtattttttatggttgctttcttgctaaaaatatggtgttttagtgcaagtcattcagtgtaaatctccaagcattcttatatacttgttccttttcctcctcctggatgagtcttggatgagtgcatttctctctgttcatctctttgctcttcacctgatgattgtttcatggtggatgcgtgttagatgcactgagttgcttagcatggtgaatcagtgctttgtgaactgcgtggttccactttttaactgatgtttgttattgacgatctcgcaggttgaccgatagatccattgcggagttgagtgttgatgcaaagctgattcgccatcgtttagctttttataagagatgggttcagtaggggttgcgccgtctgggttaaagaacagcagtagcaccagcatgggtgctgagaagttgcctgatcagatgcatgatctgaagataagggacgataaggaagttgaagcgactattattaacggcaagggaacagaaaccggccacataattgtcacaactactggtggcagaaatggtcagccgaaacagacagttagctacatggctgagcgtattgtagggcaaggttcatttgggattgtcttccaggcaaaatgtctggagacaggtgagacagttgctatcaagaaggttcttcaggataagcgctacaagaaccgtgagcttcagaccatgcgccttcttgaccacccaaatgttgtagctctgaagcactgtttcttctctacaactgagaaggatgaactgtatctaaacttggttcttgagtatgtgcctgaaactgttcatcgtgttgtgaagcattacaacaagatgaaccagcgtatgccacttatctatgtgaagctgtatatgtaccagatttgtagggcattagcttacatccataatagcatcggagtttgccacagagatatcaagccacagaatcttctggtaaacccacatacccatcaactcaagctatgtgactttgggagtgcaaaagttctggtcaagggagaaccgaacatatcgtacatttgctcccgatactatagggctccggagctcatatttggtgccaccgaatacactacagctattgacatctggtctgctggatgtgttcttgctgaacttatgttagggcagcctctgtttcctggtgaaagtggtgtagaccaacttgtggaaatcatcaaggtccttggaacacctacaagggaggaaattaaatgcatgaatccaaactataccgagttcaagtttccacagattaaagcacacccatggcacaaggtattccataaaaggttgcctccagaagctgttgatcttgtctctaggctgctccagtactcacccaacctaagatgcaccgctgtggaagcacttgttcacccattctttgatgagcttcgagaccctaatgctcgccttccgaatggccgctttttgcctcctctcttcaacttcaagcctcatgaactgaaaggaatcccatcagatattatggcgaaattgatcccagaacatgtgaagaagcaatgctcctatgcaggagtatgagacagcttccgcacgacccccctggaaatttccatgacaagtgcccatttcctcccccctggacgacgatggatcgtcagcatatgcgtgcatgatggttggtgaagatgtgaagttacgttgttgttgtatgaccaccttgttgaccagtgtagttgagtagcagtatgttgcgatggcgaaactttgacatgtaaccggtgcacccacaccatccctcccctactaaccctcacccacctgagaattgagaattcccatagctgatgatctgtaatatgttctagagcagtttaagaatgtatttattatggtgtagttgatcc

SEQ ID NO: 24301 - DNA, 5255 bp, Oryza sativa
  ref <308>: DATABASE ACCESSION NUMBER: AK099743
  ref <309>: DATABASE ENTRY DATE: 2002-08-28
ggtcggtcgccgctatcctctcgacgcgtgccccttctccatcccctatctgaccatcagcgacggagcgacgatagtgctctgccatgggcgtacggcggcgacggggttggctacggctgctgctccactacgcggagagccctatgaggaccaggggaggctgcgctctcggattggtgtctctcccacatcgcgtcttgctttggggggagggaggggggcatctttgcctccctcagctacttctcgctaaggttgcgggctccaattggcgtctctcccacacatcgcatcttcttttggggggagggaggggggcatctttgccttcgtcagctacttctcgctaagaaatgacatggagccatccagattcgttcgcatctgcccgcggaagcgtccagatgatgggtcctccatatcatctgctgccaataagcacttagagcttacgagtggtgtgtcatgtgccatagatgagccgtcatcatcccgcggtgccactgggttctcaatgctcacgggtagttcatcatgcactatagggagtcgtggagctggccacattcagtcttctcgacccaacagttacctctggactactatttgttgtgttgcttagcttgctaaggccttttcccttcttccgattgatttttttcctgtttaaatttttcataggagatcatttttgcccaatagtgccagcacgtgttgctcgagtgaaccgggaaaaaagacaggccgctaggaaaatgcgtcttattttgcgacaagaacatgtgccacgttcactgtcgatgagattcacatattccataccaaaggagcacatgcaaattcttaaagctacgtacccagatcgttcctattatggtggccttgactatgaatgcaatcattgtggtgcattattttggtaccaagaaagggttgttagccagagctcgcacagagccaagaggattgcatacaatctgtgttgtcgtggtggaaagatctccttacccccacccaagccttttcctcctatcttacaagacttgattcgttttgatggcggtgcccgttccaactctttcatgcgactcatcaggcaatataattcattatttgcattcacatcgcttggggctaacattgataggagcataaacactggtcaggggcattatgtttttcgtatcaatggtgttgtccatcacagaattggttctctggttactgctcctggacaacgtccggaattcgcccagctgtacatatatgacaccgccaatgagctccagaataggcttaatattttttatcacactgatgatcctggggatgtccctgatcctgttattgtgcaagagcttatctcgatgcttgaccagttcaatcctcttgtgcaacagttccgtcttgctcgagacaagctgctttctccaagtgctcctgagattgctatcaagctcattgggtcagaccattctcagagtgaccattacagccttcccaccatctctgagttggcaacactaattatacctggtgcatcttgtgaggtatcaaagtttgatgtcattgtgcagaagcattcaggtgagttatgtcagttgtcacctattcatccagcccttatgtcattgcagtacccgcttctattcccatatggtgatgtgggttttcatactggtatcaagcttagagaggtagatgatcagccacccggtagttgcgacgaagcatcgatgcttgaattttatcggtacgagtcccactatcgaaaggatgagcccaatccattcacctgttgtggtaggctttctgatcagctcgctgcgaatgctttctcatgtatagagacatctcgactcacataccatgccctcaaccagaaaaaacttcgctctgagacacatcaaggtatatctgatgctgttgttaggggagacagtgatggaaaggatgttggcaccaaggtaattctgccatcaagtttcataggaggaaggcgatacatggttcaaaactaccatgattcaatggcaatctgccgttcttacggtcctcctcaaatattctcaactttcacctgcaattctaaatggccagagattattgaagctattcgttttgaggcagggcaaaaaccaagtgatagaagtgatatggtcacacatgtttaccatatgaagctagatgagtacatcacatctattaagaatggagaagccttcggtcccataaaagctgaggattgccgcattcccacacattaacatggctcacagctcaatctgaagaaccttcacctgcattcattgacaacctgatctgtgctgagataccagatataacagctgataggtttgggtttggtcttgttgatgaattcatgatacatggcccatgtggtgagcacaatccaagcagcccttgcatgaaggatggtcggtgttcaaagggctatccaaaatagttctgtgatgttactaccatagatgatgatggatatcctatttatcgacgacgcaatgatggtcgctatgtggtgaagaatggtgtttcactagataaccggtgggttgttccttataatccagctcttctgaagaaattccaagctcatatcaatgtggaatggtgcaataaaacataccttatcaagtacctttttaagtatataaataagggaagtgattcgactatgttcgttttcagccacaggacttcagaaaagacagaggctcatactgctagcgatggaggcataggtgaggttatgcaatacatcaaatccagatacctatcaacttgtgaattattctggagattatatggttttgagatccatggaaggagtccttctgttgaacgcctcattgtgcacttgccgaacatgcagtttgtgacataccatgatggagctgaccttgaagaggtcatagaagaccctgattcctctagaacaatgcttactgaatggtttgctaccaaccaacgtcacatctttgccagggatctcacctattgtgaatttcctaccaagtttagctgggatcctgagaagaaagtttggacaaagcgtaaaagaggaaccaagatagggagattaaagcacatccatccaagtactggggagccgttctaccttagaatgttgctcatgatagttcgaggatgtatgagttttgaagatattaggacatatgaaggtgtgttgtatggtacctatcgtgaagcctgtcaggcacgtggtctcattggtgatgacgctgaatgggatcacctctttgaggaggcagttatctgggctacttcataccagctcaggaaccttttcatgactgtactagcacactgtgatgtaggtgatgttagggttttgtttgataagtactggagatacatggtagatgattttgcttacaagttaaccaaagctcttggagtacaacgcacagctattccagaagttatgttgcaggataccttgctcaaagagttggatgccatgttctcaaataatggcttatcaatctcatcatacaatttgccaacaccagttgattgttcaggatccagtgcagcaaacaggcttatcttagaagagctttagctttaaccaacatagcctccatcaagaatctttgtccatgtatgccagcttgaacaatgaccagaagatgatatatgacaagatttttgacaggatagaccatcacgaaaagtgtattttttttatatctggacatggtggaacggggaagacattcttgtggaatgctattatggcaaacatgagatcaagaggtgaaattgttcttgcagttgcctcttctggggttgcagctctgctcatgcctggtggaaggactgctcattcacggtttcggatacctatagatatacatgaccggtcgatgtgtgctattcgtagagggacaatcctaggagatcttattaggaaagcatcactgattatatgggatgaggcgcctatgacacacaagctgtgctttgaggcattggatagaactctacgagatattcaatccgctgatgaaccagctaatgaatataagccttttggaggtaaacccattttacttggtggtgattttaggcaagtcttaccggtgattgagaaaggtacaagagctgatgtggtagatgcttcgctggttaggtctgcactatggaagcatgttgaagtcttacaccttaccactaacatgaggctacataatccatccctgtcgcagcaagccaagggtgaattggcagagtttgctaaataggttcttgacattggtgagggtcgtgctcccatgaacaaaagacaaggtgaggttgagaggacatggatagagatacctaaggagttgctgcttactccctgcggtgacaagattacagctataattgatgccgtgtacccggattttgaattgaactatgactacattccttacctttctcagcatgcaattgtctgtcctgtcaatacagttgttgatgagattaatgataagatgcttgctaaagtgcttggggatgcaaaggactatcttagcagcgacactatttcaaatacacttgaaaagcctgcagattttgatctattgtaccccatagaatttctaaactcaatatccataaacaatttcccgaaacatcgcatatccctcaaaattggttcagctgtagtcctgcttcgcaacattaaccaatcactcggcctttgcaatgggataagattgatggtcacccgactcggtgattatgttttcgagtccaaaatcatgactggcacaaatattggccagctggtctgtattccacggattgtcctaagtgggaacagtccaaagtggcctttcacgctccagcgaaggcagttcccaattaggctatgttatgcaatgacaataaacaaatgccaagggcaaactttggggaatgttggtgtatacctcagaaaccctgtcttcacacatggtcagctatatgtcactgttttgcgctacatcgaagcaaggcctcaagttgttgatagaggatgatgatggcaagccttgttccactacaggaacatcgtctacactgaaatattatcgttgctgtagattaatcttattgtcagtttgtcactgtgactgcagctaggatactttgctccttttgttcacctgtttcttctatgatcccatttctccgtgttactgtttgcttgtgtaacttaagcaagaactcatggtcat

SEQ ID NO: 24302 - DNA, 4211 bp, Oryza sativa
  ref <308>: DATABASE ACCESSION NUMBER: AK099744
  ref <309>: DATABASE ENTRY DATE: 2002-08-28
gagttgcttttcccccattttctccgctgtatccgccgctcgccggcggggagggaggtccggaggaagtgaaatggcggcagtcgcagcggtagcgatgggggtcaagtcggggatagtactgcggcggcggcggcggcggcggcggtggtgagcgtggccggcactcgaggagggcgctccacgggggcatgcttgctgggtcggccatggccttggcgtctcgctcaatgggactccatggtgcgatgtggagctctctgtttctctgattcatcgcggtaaaattttcgcagctcagtccgatctcctctttttttttttcaaaaaaatatatattccggtgcatttctcctcaaatcatgaaataatgggatagggacagtaatcctagattatcgaatggagtaatggacaaacaaatcatggaagggaacagcagttttgacttttgattcaatggttttcttttttatgtaactcgaatagttttctggtatatccagatggatgagcaagtacagatccgacacctatacctgccatattcagtctgctcatgtgaaagctggacatatgattttttttttctgtgattgcttccaacaccattgcagtattacattaaaactgctttggtcatagatgcagagtgtagcaagacagctctgccagaattttttattccgtggcaaacgccatattttaggaagtgtgttaaaaataaagactcatcattcatcaaggcctctaccgcgggatgcgtggttcaattttataatcgctatatcgaattggaggtaatggaggaacttggcctatgacaacttgccagtttccagatcccagtgctgccttctcggctcaaggtcttgcctagagttctctccatctgcccgagctgtggataatacgccatgagaagctgctgaattctgaatgggtcaaaagcagagcacacattgtcaacaccattttaactgacacaagattgtcaggaaatcataacaaggtccaaatagatagataaacattgctgtggaccgcagcaaggttgccaagcacaagctgaagcaggtacacccatcgtttgctctactcattggctaattggctagaaagtgctacatagatttgtgtagattgtgtcatcataagctaatttgtccattctatccaaagaattgtagcttactgttactgactactgatcaagagaaggatcaaaccgtatagtgaatgaaatgcacaagcaagaagcctcactgtatataaatatttttaaatatggccactaatatattttcagatttctagggcaggtcatggaaaacctcactgtatttatcttctacctagaaaagcagttatattttgggacggagagagtatttcactaatcaataataagttgaactataaaggtaactatattttgggacgaagagaatatttcattaagcaataataagttctccactttcaaatattgattattcgttagcaccaccacccatctcatcccatacaggcctgtgaagcatgtaaatcttgttacaatggtccagtatagcattgtcagcataagttcatgacccttcattgcacttgttatatattctgtaacctatatttctgatgaagtttctctataagtttaatttgccagggtctgcggttaattttgactacacacttttctgtgggaaaactaaaaatgagtcctggtgctcttattgcaaactttcttatcaaatggaatctggagagctatgtcttgcttcgcatccgagtcataatgggaatcctcaccatcctctatctgatgttcttcttctcaagccttttcttcacccgtatatacagatccatggtgaacttcctggatcctgtggctgacgccacccttgtatacattatgggggctatgcaagctgcacctttaaataaccagctgttcccagtctgggcccttatactggttggtctccgctctagcatccatggccgctctagttctggaatgttttttgagctgagaaatgtgttaagcttttagttgtggcatacatgaatttaacacgtggctccaaattgtggcgttttccattttggttcttttggggtcttctggtacttcagtgcttctacaagattctggtgcgccatatagcatccaagtccttgtggaatggtcgtagttcagaacttcttcaggagtacatgggtgccaatggtaacaagagcaactttaatcctgaaatatgcaacccagagactatggaaggatacaagtacttggtttatggagagttacagaaaagccgaaagagtgcacacattctaaaagttgaagacttgaagtccctagttaccttggacaagatttggcgatgtgatagtgccttgctgctaacctccatcaacatgcaggggaacaacatgaaggacatggccctggcatttgcattatctcggttgctccggtgtaggctggaaggagcaacgttgcatgaagctactgtttccatgacccgaaagctaatcagcaagatgatcctctcagatagtgctgacaaggtactgttcggtatcctggagctggatgtcaggttcctccgggattccctccactccagttatcctatggtcttctgcagagggcttctttcgctcttcttcactcttctgctgtctttggtgaagtttttcatggctacatggctttttgtagatgtcaatatggtgcatgtcccaaaatcagtacgagacaggccctcgggcccgttttagttattcgctgcactcatttggttacgattcaggtatcactgcagcagccatgtacatagtaatgattgatgagatttttaggatgctcgggtacttcctatcaaggtgggcaaaactaatagccatgtgcaactttgtgaatttcagaaacagatggctgaaatatgtcattgtgaatacacctgccagatatggggaaagaactatagttatacaccagcatgccttcctgcaaacgttcagctcaagcatctcggggtggaaaatattctcttgtattttagaaagaaatcaaaatgcaagaatggtttggtcagaaggaaaaatgaatgacagtatggccaagaatgtgaaggcagcagtaattcaagcactccgctccatggatctcgagggtcatcttttgtcaagagacctccctttgtctcgtgtcagtgacagagcagagcgttattggttggcatgccttgcagaggtaccaacatgctcccgtgttattctggtctggcacatcgcaacaagcctatgtgagatcaagcttgccaatgaccataaaatcaacttaacaacaatgtcaagattatcatcgtttctggtggatgaaaaagctcttacaggtgagcttcaaaaggcatacacagtgtcaaattgcttatcatggtactgtatgtacctgctggcttcaaagcccaaactgctcccagaaaccattttgatgtccaagaaggcctttcaagatgctgttcagtgtgctcatgaaatgctcagtgattgtcactcctggcagagcatatacaacaagcttatgaaagaggcgcagaaagctcttgttcaaggtacgcatggtctaaatctgagtggaaacatattgcaacaaggtgctatactggctaatgaactcatcaagaaggaggaccaaaaatgtcgttgggagatcctatctgatgtgtgggttcacttgcttgtgcacattgctcccagttctgacgcagcagctcttgccgaggacctcaaatccggtgtcgagttcgtaaccgtcatctgggctttgttttgccactgtggcatcgagaagagcaaattatggcaacagcagaagagtgcaaatttcaggaacagcactcctggaccatctaatcagagcagtgatgtgtctacccatgttcaggacacagtcagctctagtccacctgctgctcgatcttcagaaattcatgtagaggctagtcctacttctggtatgtcctgaaacctgaattgctgatggctgatgctctgctcccctcatggtttcagttttgtcggtaaaatttgcatctcatcatgacatttgaacactagtatttgtttcttgtgtgaatgttttctgtgttgtgattgtaacaggggaatgctcttgatgcaatattatgtgttat

SEQ ID NO: 24303 - DNA, 3189 bp, Oryza sativa
  ref <308>: DATABASE ACCESSION NUMBER: AK099745
  ref <309>: DATABASE ENTRY DATE: 2002-08-28
gagcagtaggtgtacttgtcaattcgcccccaagcattctgctccatcagtgagcgcgagagctcggcctcctcttcctcctcctcgcatgcccacctcagaatcatctctggttgtggtgaaaccgatggtgatgatgatggtacgagcactgtagcttcgatccaggtctagaatcgcatgttcttcccccacgctttcttggattgcggccaagaatcgatgcgagcggcgccaagatttcgttcttggagcgggtcactctagtgcggcgacgaccaggggcaatgggtcggcgacgtcaacgccgaccggaccgtgctggccgggaccacgctcagcctcatctcccaggacaccaactgcagcgggtttcttggaacaatcgaagcattgcagttaatggagaaaaacgtggttgctgtcattggtccacaatcctctggaataggccatgttatttcacatgttgttaatgagctacatgttcctcttttatcgttcgcagcaactgatccaacactttctgcatcagagtatccgtactttttaaggagtaccatgagtgactacttccaaatgcatgccgttgctagcatcgttgactactatcaatggaaagaggtcactgctatttttgttgatgatgattatgggagaggtgcggtggcagcccttagtgatgcgcttgcattaagtcgggcaagaatttcatacaaagcagcggttcctccaaattcaaatgcagctacaatcaatgatgtactgtttagagcaaacatgatggaatcaagagtgtttgttgtgcacgtcaatcctgacgcagggatgagaatattttctatagctaacaagctccggatgatggacagtggctatgtctggatagtaaccgattggctagctgctgtcatggactcctccatgtctggagatcttaaaaccatgagctatatgcaaggattaattgttcttcgtcagcacttccctgattctgaaaccaagagggagttcatatctaaatggaacaatgtagctcgtaataggagcattgcttctggcttgaactcatatggtttttatgcttatgactcggtttggattgttgcccgtgctatcgatcaacttctcgataatggggaggagataaatttctctgcagatccaaggttgcatgattcaatgaacagcacactgcgtctctcagccctcaagttatttgatagtggtgagcagttgctacagcaacttctcctcacaaactttacaggcctaacaggccagctccagtttgattcagaccgcaatttggtacgcccagcatatgatatccttaatatcggtggttctgtgccccatttgattggctattggtctaattattctggactttctgttgctgctcctgaaattctatatgagaagcaaccaaatacatctacgagtgcgcagcggcttaaaaatgtggtatggccgggtcactctgcttctaagcctaagggctgggtttttccaaacaatgggcagcctctgagagttggtgttccaaataaaccaagctttaaggagttaatgtcacgtgatactggccctgataatgtgactgggtactgcattgagatattcaacgcagcaattaaacttctcccgtatccagttccttgccaattcatagtaattggggatggtttaaagaatcctaactatgatgacattattaacatggttgctgccaattcccttgatgctgctgtaggcgactttgctattgtgagaaacaggacaaagattgcagaattctcacagccttatattgagtcagggcttgtgatagtagtgccggtgaaagaagcaagttcaagtgcctgggctttccttaaacccttcacattagaaatgtggtgtgtaacaggtgttctttttatttttgtcggaatagttgtttggattcttgaacatcggaccaatgaggagtttcgaggctctccaagacggcagatgataacaatattttggtttagtttctcaacaatgttttttgcacacagacagaacactgtaagtgcgcttgggcggtttgtgctgatcatatggctgtttgtcgtgctgatcatcaattcaagttatactgctagtctgacgtcgattctcacagtccaacagcttgcaactggaataactgggcttgacagtttgctttcaagtgctttacctattggataccaggctggaaagtttactagaaattacctgattgaagagctcaatgttcctgaatctcacttggtaccgctaaacacaatcgacgagtacgctgatgcccttaatcgtggacccaaagatggtggtgttgctgcaattgttgatgagatgccatatatcgagatcttcctgtcataccattgtaacttcagaattgtaggacaggaattcacaaaggaaggatggggattcgcattccagagagattctcctcttgctgcagacatgtcaactgcaatccttcaactttcagagagtggccagctacaaagaatacatgacgagtggttctcgcggtcgagctgcagctctgatgacagtgaaatgggagcaaccaggctcggcctcagaagtttttggggcctctttcttatgtgcgctctgatatgcgtattcgctctcgtgatgttctttgcaagagtctgctggcaatattccaagtactcaggttctgaagaacctgatgagcccaaagacgatagtgctggcaccgccgagattgcagctgaagccgttgctgaaatgcagcggaggaggccaaagcgtcttggtagcttcaaagaactcatgcagtttgttgataaaaaggaagaagaagtcaggaaatcgatgaagcggagaccaagtgagaaggataatcagggtgttggttcttcagatgcgcagtcagtggcttaaccgtagaagattctttcaggttcagtccttccttcgttctgcacatcacaaaaatgaaaaacatactaaagtagataacagcagtatacttgtagaatctagaaatccattttttctcaggattactcgaattatgtctgatatatactcttaatatgttcagcaattttcccatttttttcccatttgggaatgccatgaactgtgaaaagtgtatctgtttaggtgcttctctgaagcacatgtacg

SEQ ID NO: 24304 - DNA, 2100 bp, Oryza sativa
  ref <308>: DATABASE ACCESSION NUMBER: AK099746
  ref <309>: DATABASE ENTRY DATE: 2002-08-28
ggcccccgcaccaccactccctcctcctccatctcctccgctcccgatctcacaaccaccgactcctcctcctcgcgcggcggcggcggcggcgtgagccagcagcagccatggtgctgttctcggtgacgaagaaggccaccacgcccttcgacggccagaagcccggcacctccggcctccgcaagaaggttactgtattccagcagcctcattacctccagaactttgtgcaatccacatttaatgcccttcctgccgacaaagtaaaaggtgcaaccattgttgtgtctggtgatggccgctatttctcgaaggatgctgttcagatcattacaaaaatggctgccgctaatggagtaagacgtgtttgggttggacaaaacagcctcatgtctactccagctgtatctgctgttatccgtgaaagagttggtgcagatggatcaaaggctactggtgccttcattttaacagctagtcacaaccctggtggtcctactgaggacttcggaatcaaatataacatggaaaatggtggacctgcccctgaatcggttactgataagatcttctctaatacaacgacaattactgaatatctcatcgcggaagaccttccagatgtcgatatttctgttgtaggtgtcactaccttcagtggacctgaaggcccttttgatgttgatgtttttgactctactatagattacataaagttaatgaagacaatctttgactttgagtcaattaaaaagcttctggcatctccgaagtttacattctgttatgatgctctccatggtgttgctgggacttacgcaacacgcatctttgtggaagagcttggtgctgctgaaagctcattgttgaactgtgttccgaaggaagactttggagggggccatccagatcctaacctcacctatgcaaaagaacttgttgaccggatgggccttggaaaatcctcaaatgctgaacccccagaatttggtgctgcagctgatggtgatgctgatcgcaacatgattctgggtaaaagattcttcgtaacaccttcagattcggttgccattattgcagccaatgctgttcagtcgattccttacttttcttctggccttaagggagttgccaggagcatgcccacatcagctgcccttgttgttgtcgctaagaatttgaatctcaagttctttgaggtgcctactgggtggaaattttttgggaacttgatggatgctggaatgtgctcaatttgtggtgaagaaagctttggcactggttctgatcacattcgtgagaaagatggtatttgggctgttctagcatggttatctattcttgctttcaagaacaaggacaaccttggaggcgataagcttgttactgttgaagatattgttcgccagcactggggtacttatggtcgccattattatacacgatatgactatgagaatgttgatgctggagctgctaaagaacttatggcaaaccttgtcagcatgcagtcgtccctttctgatgttaacaaattgatcaaggagattcggtcagatgtttctgatgtggttgccgcagatgagtttgagtataaggatcctgttgatggttctgtctccaagcatcagggtgtccggtacctcttcggagatggttcccggctggtgttccgcctctctggaactggctctgttggtgctactatccgtgtctacatcgagcagtatgagaaggattcttccaagaccggcagggattcgcaggatgcccttgctcctctggttgatgttgcactgaagctgtcaaagatgcaagagtacactggccgatctgctcccaccgtcatcacataaacttttcaagagccattctagaatgcttttgaggctacccatgaactttctttatggcctcctgtttgatagcctttttacatctctccccgaataaacgtgtatgtatcaactgttctcgttttcttgccaatactgcgtttctgctgcaggtccggtaaagtgtgcggcgataatgttgtcagttctgaaactgaagagggtactttatataagcgatatatcgatgttttttttgctc

SEQ ID NO: 24305 - DNA, 1227 bp, Oryza sativa
  ref <308>: DATABASE ACCESSION NUMBER: AK099747
  ref <309>: DATABASE ENTRY DATE: 2002-08-28
ggggcggagaaaggaagggcagcgtcgcggttgcttgcttcctcccgaatcctcgcctcgatctcgctcgcgggcgggcggagggatcgtgatcgggatcgggatcgggggcgcgcgaagatgagcgtgatcgacatcctcacgcgggtggactccatctgcaagaagtacgacaagtacgacgtcgagaggctcaacggcgccaacgtcgccggcgaggaccccttcgcccgcctctacggctccatcgacgccgacatcaacgaatgcgtcgagaaagcggaggcggcgaagcaggagaagaaccgcgccacggtggtcgcgctcaacgcggagatccggcgaaccaaggccaagctcgtcgaggaggacctgcccaagctgcagcgcctcgcgctgaagaaggtcaaagggctcacaaaagaggaactcgcgacccgtagtgatctggttgctgccttacccgatagaatacaatcaataccagatggtagttcaagtgcaaagaaaaatgggacttggggcgcctcaggatcccgtactggtggagccattaagtttgacacttctgatggcaactttgatgatgagtactttaagggaacagaagaatcaaatcagtttcgtcgggaatatgagatgcgcaaaatgaaacaggatgaaggtttggatattatcggtgaagggctggaaactctgaaaaacatggcatctgatatgaatgaggaactggataggcaagttcccttgatggatgaaatggacgagaaggtggatagagccaacacagatttgaagaataccaacgtcagactaaaagagaccgttcttcagctgagatctagtcgcaacttctgcattgatatcgtcctgctctgtgttattcttggtattgcggcttatctttacaatgttctaaaaaagtgagaccggactgtgccatggatctattttccacgtcttccggtgatggatggatgagtttcgacgtgtccacgagctgttccctttatttttatctcatctgtgtaatagtagtatggtgttcttccgggacttgcgaacatccttgttgaaagttgaaacagtgagcattgtgcgtgcgaaaacctgacgtcttctgtacatctgcgagtttaattcttagcaagagcgtatcaaacattctgttatgaactatgtaaaccttctcatgtatattcattgcatcagttctttggttgtgcc

SEQ ID NO: 24306 - DNA, 2513 bp, Oryza sativa
  ref <308>: DATABASE ACCESSION NUMBER: AK099748
  ref <309>: DATABASE ENTRY DATE: 2002-08-28
ggtgcggaagtcaacgaagcggagcgcctctgccgcctctccttcccacccacctctgctctgctcctcatcgtcgtcgcgcggccagctcagccggccggagaatccaccgaatccggcgcgaatcccgcagccatgttcggcgactccgacggatccaaggacgccaaccccggggcgccgccctccaccaccgacccgcccttccccaaccgcgagctcaccctcagcagctacctctgcgagaagccgacgctcgcctccgccgccgccggtggcggtggcggtgccggcccgtcctcgccgccgaaccctgctgcagccgcggctggcgacgacggcaagcactgcgtcgagcgcgacttcctccacctctccgcgcccaagcgcggggatccacccggcgacgactcatccgtcgtcggcggtaagaagccccgcctcgactccctccagctctcgctgtcccttaactccgacggccccgctgctccgccgtcgtcccagccgccgctcgcctcgctcctccagcccgtccccgcgaccgatggagatctacgggggcggcggcggcggcggccgtgcccgcggcccccgccaggaggacctacagcgcgacgacggcgcgcacccgcagcatcaactccgacgacatgtcctactcctactccatcttctcgcacaaccctagctgttccctcacgcacaactccaccgacatctacgccgccggtgaaggtaccaacggctccgttcacagccgattcaatttccgccccatgggggacggcagcgtcgccttcgccacgccgccgctgaaggagggcacgtcgtcgttcttccccacggagctccctgcgaggatggcggcggcggccgcggcggctgctgccagcgcgggtggcagcttcgacggcggtcgcggtgggcttcacgcgtcgcgccctgacaagatcctgcgggatattgtgtccgactctgtgacggctatggcgcaggtgctgcaggatttcccaagcgaacgactggagttgctgcgagaggcagtgcggggcatgattgactctcatgagaagagggatgagctggccagcctgcagcggaagcttgagcgccggtcagacctgaccaccgagacattggggagggcgaacaggacgcagcttgagatcctggtggccatcaagactggaatcgcgacgtttgtcaccggtaaaggccgggtaccaagcagtgagcttgtagaaatgttcctcatgacacggtgccgcaacctgaactgtaagagcacgctgccagtggatgactgcgattgcaagatttgctccaccaagaaagggttctgcagcgcatgcacgtgttcagtatgccacaagtttgactgtgctgcaaatacctgcacctgggttgggtgtgatgtctgcggacactggtgtcatgttgcatgcgcgctggagaggaatttaatcaggccagggccgacgctgaaggggccaattgggacgactgagatgcagttccaatgccttgcttgcaatcattcttctgaaatgtttggatttgtcaaggaggtgttcaattgctgcgcagagaactggaatgctgagactctgatgaaagagctggattttgttaggaagatatttgctggttgtgaggattttgagggcaaggggcttcatgccaaggctgaagaggtcctcagcttgcttggaaagaaaattatttctcctttggatgcaacaaacagtatcttacaattcttcaaatatggagttacagattattctgttactggtagcacgtccaaaggtatattggcagctcaggcaagtcaatctacagatatgcggtctcttcaaactccaacgatcacaccaccgaaatcctcattcaacttcaagaccactacttccattcttgacaccgatgcacttaagcccagcccaaagccactctctattgaaccccatttcagcaccgcttctaaggaggatgactctagcctcgaaaccatcgtgaaatgcaaggaagctgaagcaaaactcttccaaaagttggccgatgatgccaggaaggaagtagatagctaccgccagattgtccgctccaggactcagaagctagaggaggagtatgctgcgaagctggcaaaagtatgcttccaagaaacagaggagaagaggaggaagaagctggaggagctcaagatgctggagaattcgcactacgactacctcaagatgaaaatgcggatgcagaccgatatccagggcttgctcgagcggatggaagccacaaagaagatgtgggtataggctggtaaaaattcatctgacgccgctgaatgtgtgaaaaatctgttgtacaccattaggatgttttccgagttgttgtattcatcctgtgatttgtgttaccagttaaaactgttataagcagagggccgcctaacctcgtgctggcagataacataactagacaccatctcatttaattgctttccgtttgct

SEQ ID NO: 24307 - DNA, 2890 bp, Oryza sativa
  ref <308>: DATABASE ACCESSION NUMBER: AK099749
  ref <309>: DATABASE ENTRY DATE: 2002-08-28
atttgatgacgaatcaagtcacaataaaataaataataattacataaatgtttggaataagacgaatggttaaacgttggataaaaaatcaacggtgtcatacattaaaatatgaaatatgaaggtagtatgtgaaagcctgatatgtcaattggttagatttcttgtggtgaaacatgcatcttcaaattcattatattttaattgtaaaaaaaaatctttagagatggttactcttaaaattatcagattttttttgtcacggctaaatgtaatgaatcttaatatgaattttcgcatatatgtgtagtactattagaaataactgtttatttttttctaattttttatgacatttgctagttggtgtgtgtgagaaacctatatgcatatttttcacttagacacaggagcggagctaggtaggatagggggtgcccaggaacccggttaagaaatttttttaagctatagttcatctattttcaccatatatgcacctccctcaatccaaatttaggcacttatatcagtctaaagtagagtaaaataagtgagtggcagctctcttcatttcgttctagctccgctcctgcttagacatactatctcgatataacaattcaaccaagtcttacgtgaactatgaaccgcccaacacaaaggttcatgagatatccgccgttggtggtcaggtgaggtgaggtgaggtgaagctttgggaagcatcaaccttgaaaaccaagaaaaggtcgtgggcgacagggcgagcgccataaatatctgaaaacatcttgtggagagctgacaggtgggacccgaggggaggtcccgatcggactgtagcgtgggggcggggatcgagtgggcgggtagcgacaggccaccgcccacccagcccatccgcgcgcgtggacgcaaaatggagtggcgcgcgccgaacgaaacggaagccgcagccagcaaattgcaaaggaaggcaaatcacaagcaaatccacccccgcgccgcgccgctcgcgctcggctccgccttttttccctttcgacgtcgttgggccaaggaaacggaaccaaatcttatcgcctccttgtgtgggcgccatccgtccctccgtccgctgcccatctctctctcacgctcgccgtcctcttgtgccttcttggcttgggtttgcctgcgcctgcgcgcgcttggcctagttgcatcgtctgcgttgcggctgctgcgatagcatgtaggccaaccgcgtcatcttatctctctctctctctctctccccccatcatttcatctgatctagtatctcatctcctcctcccctccttttccttctcccccaaccaactcactcttcatcttcaacaccttgctgttcgtcctcgtctcgtcgtgctgattgttcaagaacaggagaaagaaaggaagaagcagtttgattgatctgtttctgttggggggagctcggtgatccatgcatggatggcaaagaactcctctcaccgtccgaactgtcatactatgcgcaccagcagcatcagcatcagcatcagcagcatcagcagcaacaccggatgctcgggggcggaggaggcggcggcgggcatagcgcgtcgccgctcgccgggatgcacggcggcccgtcggtcatccgacccatgcccaacatggggatgagccccaccgcgatcctccagtccatcggcccgggcccgctcgccggcatgcagttccagatggacgccgcgccgccgccgccgccattgatgcacaacagcatggcctccgtctccgcctccgccggcgccggctcacccaccgtgccgccgtccgcgacgcccatggagccggtcaagaggaagcgaggccgcccgcgcaagtacggcccggacgggaccatgaaggtgtccaccgccgccgccgcgcagcaccagcagcagatgctgagcgcgccgccgaggatggggtccgtgtccggcgccgacatggttggcggcggctcagggatggacgactcggcgcagaagaagcggcgcgggcggccgccggggacagggaagaagcagcagctctcatcaccggttaagctttcagggggcaatgcgttcagtggctcagctggaacgagcttcacccctcacatcatcacggcatctccttcagaggacgttgcagggaagatcgtggcgttcgccaaccattcgtccagggcggtgtgcgtgctctcggccaccggctccgtctcccgggtggtcctccgccacccggccgacggcgccatgtcaagggttcacgcctcctcccactacaagaaccctgccatctacgaggggctgtacgagatcttgagcatgtcggggtgttacaacctgatgaacgaggggcagagcgacgggctgagcgtgacgctgtgcagccccgagaggcatatcattggaggcgttctcggcggagcattggtagctgccagcaccgttcaggtggtacttgggagtttcgtgcagggagggtcgaagcccaagtcgaagaaggccgggaaacagcagcagcaacaggcggcggcggcggccttcagctcggactcgctgaccggaggagggcaggacgcgtcgccgagctccggccataaccaaaatctaacgccgccgccccctgtaacaacgacgggagggtggcctagctccgggatatttgacacgagaagttccaacattgatatcaactcatctagaggctagcttcatctctcaatttgtcgactcttccatatgtgctccagaaatttgtttttctgattcccaaagaattacccccaaaattgtactcctctctgtaatagcctgttcagtttttgagccgttaattcttatagattattattattcactag

SEQ ID NO: 24308 - DNA, 2418 bp, Oryza sativa
  ref <308>: DATABASE ACCESSION NUMBER: AK099750
  ref <309>: DATABASE ENTRY DATE: 2002-08-28
ggcgcctcctccttcgccgccgcctacgacgaggctttcctcctctctcccatcgccttcctcctctcctccctttcctcccaggcggcggcggcgccctcagcagcaggatccaccctcgcgccaccccaggccggccgatccgatccccaacgcgatcttgtggggggcgaggcgcggaaaggtggccgccgaatcgtcgcgtggttggttggttcctagatcttaaaagtgtcctccatgtcaacacttgtcacgtgctcactgccaggggctgtaaccactcatgcatcaaccaggagatttggaggttcacaatttcagacatctcaagctagctgcatctcatttaaaagggaagtgtctgctaaagcagtattaagagtaagttggaatatatcatagattcatatctacctcaatcttcctataaacaaaattaagtgttcaattcctgcaaacaaatttactattttctgtttggttagcttattgtgagttcatgacaataaggcatttgatcaataaccaaattggcatgtatcaccctctttttattatatatgattatatatagattctatagaaaaattgaattaggagttactgttactccctccgactcaaaatatgacaacttaggaccagattggacacccctgtccaaattcgtagtactaggatatgtccaattctgtcctagttgctatattttgggactgaggagtatgaactatgaaatattcatgttaaaatggtttagttcaaaatacagtagataaggattttaccatacttgattggtttattggttatacccttcctagctagtactaatcgtagtgctcaataggtgcatatctcatgggccatggcatgtgcatgctgcatacatttaaagataaggtgctttgaattgttaattagtagataaaactgcatcagctaccactacaattttgatggtatcaacaaaacatttcagtatttcacctctaatatataccagcaagttggtctaaaaattcgaaatacctcttctgttacatttgaaggcaacggtgttagataagggtgatttattgattttgtccttacgtgaatattaaattgttgcactaccaaatctcacatctctccagcagccagtagtagtggccggcggcatcattagtgtcgctggaggtgggcaacaagttaatggagcaaagagacgtgggcggtcaaggcatcagagcgtctgcagcctggccgagacccccacctctgagcggcctcaccatgggggtcagtgtgagcagtgtggctgggctgagagcattggctgtggatgcatacaaccaggctgaggactgcactgccaggtggcctcagatgttgacacaggtcctaggtggagcctaatgagatcaagatcataagaacatgcttttcctggtttcttgcttccctcttagcacggtagattgagcagccaagccaagtagtgtcacctccatgatgaagacagcaagcagtgggtattgcagtcattctgcgtggtaaaaaaaaggggtcaaaaccgaaataggaacaaagcatgacaggggatgtaatgttctgatgttatttattgggatcactgaaactctggtggtatagatgcagttttttcttaatagtagtactaaaagaagcaatattatccctggtacatggtcaatctcaatgattaatatatgttctgaattattcatgatgctttacctccagttactgaacttcaaaactgatgaaagggaaaatgctagcttgcttatctgcatacttcactgtcagatcttctcattgactgcttttttgtgcgaacgctattgacaacagagcgtaagatgcaatgccactcagacccaaagtgctcagcggaaatcttcaactgcaaccgtcaaacgatctgaccccaaaggaaaaactcaggggccaaaattggatgatgggagcggtggttttcctccattccgtttcggcaaaggtggtggtggcggcggaggtggtggaggtggcagcaactacttcggtggattccttctcttcacttgtgtgttgctcctagattacctgaaggagtttgagaaaaacctgattgctcgaaggcaacgcgccggatatgatgcaaacaatgatatgttccaacaataattgtttaacttgttagcactaccctatctgttgatctgtaaaactctacaagaattcctgccgtgcatgtttatttcgttcacattacccgtagtaaatcatggcttgacctcaccgagaggaagctcagatgcactggacacagctactggaaatgtgagttcagtgctgtggtacatccaaatggaccgtattattgcaggtgttgaaattggaatgctttttggaatgttgaatcgc

SEQ ID NO: 24309 - DNA, 1423 bp, Oryza sativa
  ref <308>: DATABASE ACCESSION NUMBER: AK099751
  ref <309>: DATABASE ENTRY DATE: 2002-08-28
gatcatcagcctgatcatcgagcacttctctctcttcctgttattagctatagcagcttaattagcttaagcacaaaaggtacagtaagcctaagctagctacacactaagcaagcttattagccatggcttcatcaccaagtctgccattggtgacgtgtgccctgctgctgctgctggccgtggcatgccaggctcacccttactggccactggagttggcgtactaccgcgacaagtgcccccaggccgaggccgtcgtcaaggccgtcgtcggggaggccgtccgccagaaccccggcaatggcgccgccgtcatccgcatgctcttccacgactgctttgtcgagggttgtgatgcttcgatcctcctggacccgacgccgttcaacccgacgccagagaagctgagcgcgccgaacaacccgtccatgcggggcttcgacctcatcgacgcgatcaagcacgccgtggaggcggcgtgcccgggcgtcgtctcgtgcgccgacatcatcgccttcgcggcgcgcgacgcccacctacttcctcagcggcgggaaggtctacttcgacatgccgtcgggccgccgcgacgggaccttctccaacgactccggcccgatcgacttcctcccgccgccgacgtccaacctcagcgacctcgtctccagcttcgccgtcaagggcctctccgtggaggacatggtggtgctctcgggcgcccacaccgtcggccgctcccactgctcctccttcgtccccgaccgcctcaacgcctccgtcttctccgacatcgacggcggcttcgcctggttcctcaggtcgcagtgcccgctcgacgcgacgcccggcggcaacgatcccacggtgatgctggacttcgtgacgcccaacacgctggacaaccagtactacaagaacgtgctcgaccacaaggtgctcttcacctctgacgcggcgctcctgacgtcgccggagacggcgaagatggtggtggacaacgccgtcatccccgggtggtgggaggacaggttcaaggcggccatggtgaagttggcgagcatccaggtgaagaccgggtaccaggggcagatcaggaagaactgcagggtcatcaactactgattaatctacaagtttagctgcgtgattcaattacctggtgaagtacgtgctcaacgatgacgacgtacacggtttgatagtttcacaccctccttgatcaagtcgcaagcgtacgtgttgatgatgttatgattggatgtgacttttgcttcacatttatgttctccctcttttgttaccattccttaattcctcatttgtgaaccccaaggtttacatgctatggatttctttgttttgacctaattgtgtaataaggtcatatgtacttggaataattgtaagttaagttttttgc

SEQ ID NO: 24310 - DNA, 4006 bp, Oryza sativa
  ref <308>: DATABASE ACCESSION NUMBER: AK099752
  ref <309>: DATABASE ENTRY DATE: 2002-08-28
gattgttcgattcgacacgacgacactatcccctcccacttccccgactcatcgtcttccacggcctcaccgcgaagccgccggaaaaccaccaccgccaccaccgccaccgctacactcgcgtcgaggtgatcggcgatgttcacctgccggccgctggtgtcccctccgctgccgcggcgcctcgccgtcgcgtcccctctggcgcccgcgcggccgcctccctcgtcggcgtcgtcgctgcgcgtggtgcggtgcatggcgaaggagcggcgggtgcggatggtggcgaagcagatccagcgggagctcgcggacatgctcacccgcgaccccgtcctccagcgcgccgtcctccccgaggccgcgctcggcgccgaccagtacctctcctccctcaccaccatcgccgacgtcgagctctccaacgacctccaggtgtgcaaggtgtatgtctccgtgtttggggacgagagggggaagaaggtggccattgctgggctcaaggctaagactaagtacgtcaggagccaaataggcaagcggatgaagctgcgcctcacgcctgagatacggttcatcgaggatgagtccatggagcggggaagcaggattcttgctatactggacaaattaaaggaggaaagggagcaacaagaaggaaatgaagaagaggaagatggagaaggtgcaaatctatcagaagaagaagaaggtgactgggatgcagatgagccagatgaggaggacatcatatatgtaaaataacctgatgtgccttcttacttgcccatgattcatccaacccccgaatgcagcagctatcttagattttagtcctacaaagatgagaactctctgctttgcaaagtgttccaaagttcctcaacactaggagagcttgtctgttgccaattagaagcagatcatatccttttttacatcgccggtcaaagctgaagctattttggcgcagagttctgaaggaagatttcccctttttctgttcactagaccatggtcttcgaccgttggtgaaagatgctttaacttaagttcatccttgtcgtatgctgactagcacctgttatatgtctgcttaccttgctgaatttcagttctcattttctgttttgtttgggaatggttgtatacctttcagtaaattatgccatacagcagtacctttagttctgtactgtgtattgataaaggcacattttctgatttacgaacttcgaactacgtacttgccattgtgaaattgtaagagctggtagtggctcatctggcaaaacaatcagctgaagaaacagctgctagagaagatgaggtgcctactctatacacatataactcaactgggtttgtaattcggtatcggattagtgtttatatgaccttctgtattttccttctacattgcaagagggatttttctttattcgggctactgatttcagaagtttcccagcttcttctgtcattcacatttttgatggtattagctgttctggccttctcccattctgctagatgttcatttcagcatacacatttttatcaaaattacttcatcagtcttaattttcagcttttccaggcttctttatcagcagcatatattccccggtgtatgaacaatctgaaataattatttcatattaacctgggcttattgagtcaaacaattaaggtggaagaaagcgttctcaggaaactgaaaagaaggcaaatccaactacaaaatggttgcatgcaatgtttgaacagtgggccttctattctgtatttgttatttgttctcaacatttcagagagagcactgaggagtaaacaacctcagaaagaatgtgatagtctaaacaaaatcatcttggtgatggttagagatgtactgctgccatctcattattttatcaagaggaactgcaaaggtgcaaatcaaaccatgaaagagccaactgatactttcgcgctatttctatgtggccattcatctagagaagttggaggtcagaacttaattaaacatccctgatatcctttccatctgttatgcaaaattctactcagatatagatacacctgccgtcttgcaaatcaaccataagaaagatggaagaggctctggtggataccctattttccttgttagcagagcatcgtccattgttattactttgtcagttgacagacatagtgccatgattctgaatgcttgtccaccaagagctgtgtaccatacactaaacccaaaagactgtggacatgaatatcagaattccctttcagttgaggtcaccctactacgttctcactggaagacccgtggaatatcctacttttgtttattctcggaaacaaatctagcagcgtaatcatacaagggcttttaggaaccaacagattctccagagtacagaagaaacagccggttgaagtcctgatataccgttgctggagtaatgctcaaatagtcagtgaggatcagcaagctctgggtcacaattgatttgactttgaacatttccaaaattgacagtaactaagcaaagcgtgctactgatggagcatcttctgcataacaaaaggctggttacttatctaatgcttggagaagttaggaaataactggttctagaaactggattggcaagacaactttagcaccaggtaagtggttccaatggttttttgctttcaccaagattaacaaactgggaaaactaatacaggcagctgccctaccacggtgcaaatgtcttatctaaggaagaagagaagttgaatctacacaagaagattcctagaattacataaagcttatgctcagatctgaaggatacaaagataataatttcggtagaggcagctgaactggttcttgtaccaaaatgaaggtacataggaatgacagaatctttaagagaaaaaggagttcaagtcttccacattgaatgattatggagattcatcacgagcagtcaactgagagatactccttgtcccttcagaattggaagcacacaacagtcgttgtccttgcacattgagatgctcaattgttcattgtctcgtttacagacgagagatggtaatcactaatcagatctagcctgctcattattctactggtaatgcagtgatgaaatgtgttcttaaaatgacacaggaagcatcttttgatgcagcgtggaacttgcattagcgagggcgcatacatgccgagtatgtttgtgctactgtttctgatgaagaagagatagctaaggtacgcaagctggctttacgtagatcacatgaacaatgttcttgtgacgcacttcaattcccatgttgcaaaataagactcaaaattattttgacgtgatttagatgctgcccaagatttcaagtcaaatatgagatatatgttgcattcataccatacatagcggaaataccagaagtgtttgaaagatatatcattgttgctttcttttcatcatttttttttccgagaaccgaagttatacagggtcgtcatgattagaataacgtgctattcttgaactaggtgtcattgtaacttgttaaagctttatgagctgaaggagagttaccaccattcgatgggcaccgacacttgttttgcaggatcgtgctgtaaaatggcatcgtactcaaaggtgaatcagttttgctttggtttctgtaactggcgttgagtcctttcccccaaactgaagaaagtcggcagggtcactggttgtcctggttttcaggaatcactctcaatctatgagttcctcctctatttttttgaggtaatccctgtactctcccttcatttaactgtattactactatcatatgaggtttaaaccaacccagtaataatttactagttaggtgtacatatttttttaactatgttactccctgcatccacaaatacaagatgtattttgtttcactggtacaagactttgaccaatactgaacagaaggagtaattgctact

SEQ ID NO: 24311 - DNA, 3219 bp, Oryza sativa
  ref <308>: DATABASE ACCESSION NUMBER: AK099753
  ref <309>: DATABASE ENTRY DATE: 2002-08-28
gctgggctccaaacagttgccatgatatagctaggcgaactgcaagcgaggtcttgagaaacagaacccgctgcagtggcacatttggtgaggcttcgggaggtcaccagaattgttcctgttcacacgggctgctagttcttcacagctatctcgtgtcatccgagcagaagcaactacctaccaataagaggttgcttcagacccaaatggcatcgtcaggaatttttcctcggttattccagcatgtgcgttgttacgttgaaggatgaattccaaaagagcactacattaatcctctaggtcactttgtcaccatgaagttcattttctatctgttcagtattttctgttgtctgtgttcctgcgcacaaagccaaaacatctctgggaggcccgatgcagtgagaattggagctcagttcgcaaggaattcaacaattgggagagttgccgcagttgccgtccttgctgctgtcaatgacatcaacaatgattcgaatatccttccgggaacaaagctggatcttcatatgcatgattccagttgcaatcgctttcttggcattgtgcaagccttgcaattcatggagaaagatacagtggcaatcatcggcccattgtcttctaccaccgcccatgtcctttctcatcttgcaaatgaactccacgtacctctgatgtccttttctgcaactgatccaactctttcgtcacttgagtatccgttctttgtgcggactaccgtcagtgatcaatttcaaatgactgctgttgctgacttagttgagtattatgggtggaagcaagtgacaaccatatttgtggataatgattatggaagaaatgcaatatcctctttaggcgatgaactttccaagaggcgatctaagatcctgtataaagctccatttaggccaggagcaagcaacaatgaaatagctgatgtgctgatcaaggttgcaatgatggagtctcgggtcatcatcctgcatgcgaatcccgactctggacttgtggttttccaacaagcactcaaacttggcatggtatccaatgggtatgcgtggattgcaacagattggctcacttcataccttgatccatcggtacatctcgacattggattactgagcacaatgcagggtgttcttacattgcgtcaccacactgaaaataccagaaggaagagtatgttgtcttcaaaatggagtgaattgcttaaggaggatagtggtcacagcagattcttgcttagtacttatggcctgtatgcttatgatactgtctggatgcttgctcatgcgctggatgcatttttcaatagtggcggaaacatttctttctctcctgaccccaaactaaatgaaatttcaggaagagggttgaatttggaagcattgagtgtctttgacggcggacagctgctactagaaaaaatccaccaggtagacttcttgggtgcaactggcccagtaaaatttgattcaggtggtaatcttatccagcctgcatatgacattgtcagcataataggatctggtttgcggacagttggttactggtccaactattctgggctatcagttatatctcctgagactctctacaagaaaccagcaaatcgtactagagaaactcaaaaacttcatgatgtgatctggccaggtgagactataaataagcctcggggatgggtttttcctaacaatggaaatgagataaagattggagttcccgataggttccgtataggtttgtaccttttgggaacaacagggagaatccaagctattcggagcttatcaataaaattataacagatgactttgatgctgtggtaggcgatgtaactatcatcacaaatcgaacaaaggttgttgatttcactcagccatatgtgtcgtctgggcttgtggtccttacctctgttaagaggcagaactcgggtggatgggcctttctgcagccattcacgatcaagatgtggaccgtcactggactgttctttcttatcatagggacagtagtttggatgcttgaacatagaatcaatgatgaattccgtggccctcctgcgaaacagcttattactgtgttctggttcagtttctcaactctgtttttcgcacacagagaggacaccaggagcactctcggccgcttcgtgatcatcatatggctgttcgtcgttctgatcatccagtcgagctacactgccagcctgacctccatactcaccgtgcagcagctcacgtcgccgatcaccgggatcgacagcttgatcaccagcgacgttcccatcgggtttcaggtcgggtccttcgcggagaactacctcgcccaggagctcggcgttgcccactcgaggcttaaggcgctcggctcaccagaggagtacaagaaggcacttgaccttggccccagcaaaggaggcgttgcggccatcgtcgacgagcgcccgtacattgagctcttcttgtatcagaaccctaagttcgccgtcgtgggctccgagttcaccaagagcggctggggcttcgcgttcccgagggactcgccgctgtcagtggacctgtcgacggcgatcctggagctgtcggagaacggcgacctgcagaggatccacgacaagtggctggcgagcgacatgtcgtccatgtcgcaggccagcgagctggatcaggatccggaccggctggacgtgtacagcttctcggcgctgttcctcatctgcggcctcgcctgcatcttcgccctcgccatacacgcctgcaacctcttctaccagtactcccgccacgccgcggaggaggaccccgctgcgctgcagccgtccgccagcgacggcagccgctccctctcccggcgcagcaagctccagtccttcctgtccttcgccgaccgccgggaagccgacatccggagggcggccaaggagaaggcgtctggtctgggcggcagcggagggtccatgagcggcgtcagcttcacgtcaagcggcagcggcagcaccaccgcttcatgctaaagccttgataattagttaattttcaggttaattactttacctctccttgtgctgcagaattgtagagatacgtaagcacattggaacttttgctgcgctccggcgcttactgaaacactagtatagcaatactgaaacacattggagtaacattttgatcgactaaaacggcacgacctactatgatc

SEQ ID NO: 24312 - DNA, 2340 bp, Oryza sativa
  ref <308>: DATABASE ACCESSION NUMBER: AK099754
  ref <309>: DATABASE ENTRY DATE: 2002-08-28
gggcggcgccggctctctccctctcccctctcccccgcctcgccgcagccgaactcctcgcgctaaaccctcgccgcggcggcggcggcggcggtgccatctcccctccatccccgtctcaccgcagccgggaacgtacgcttcgcgctttcctctcccatcgtcgaatcgaatcgacccaaggtttgcgcgcgccatcctttttttttttttttttttttgctgctgctgctgctcggtttgagcgtggaggtttgaggttggggttttgatttggtggggggggggggggttatctagtagttgcgggacacgggcggtgagagagatgctggtgctgttcgagacgcccgcggggttcgccctcttcaaggtgctcgacgaggggaagctcgacaaggtcgaggatttatggaaggagttcacgacgtctgactcggcgagaaaggtggttgagctgaaggctttcaacaagtttgagaacacatctgatgccctttctgctgcaaccctcattattgacagcaagcctaccaagggtttgcgcaagttcttgcagaagcactgtgagggtgaaacattagctgtggctgactctaaacttggaaatgctataaaggagaagctgaaaattgactgccttcataatagtgctgtgatggagctcatgagagggttaagaaaccagctcactgaacttatctctggtttgggtgcacaagaccttggtccaatgagccttggcttgtcccacagtttgtctagatataagctgaagttcagtcctgaaaaggttgatactatgatcattcaggccattggcttattggatgatcttgacaaggagcttaacacttatgccatgagggttcgtgaatggtatgggtggcactttccagagctcactaaaattgtagctgataacatacagtacgcaaaagttgtgaagatgatgggtgatcggactaacgcagaaagccttgatttctctgagatactttcagatgatgaggttgaagcacagctaaaagaggcggcagtaatatccatgggaacagaagttagtgaacttgacttgctaaatatcagggagctgtgtgatcaggtgttggctctttctgagtacagagcccagctgtttgattatctgagaagcaggatgaacactatcgcaccaaatttgactgcacttgttggcgaattggttggtgctcgacttattgcacatggcggcagtttggtaaatctggccaagcagcctggcagcacaattcagatacttggtgcagagaaggctttgttcagagctctaaagacaaagcatgctacgccaaagtatggtctcatctaccatgcatccttaattggtcaagcagctccaaagcacaaggggaagatttctcgttctcttgctgcaaaaactgctcttgccattcggtatgatgcccttggtgatggtgaagataactccattggtcttgagagtcgagtcaagcttgagacacggcttcgggttcttgagggtaaagaacttggcaggtctgcaggttctactaagggaaagcccaagatagaagtgtatgaaaaggaccggaagaagggtgctggggctttaatcactcctgccaagacatacaatcctgcggctgatctggtacttggacaatccactgaagaaacaccaaagaagcctgaaggtgcttcaaagaagaggaaacatcaagaggcggagcctgcaggtgcagaggaaaccattcaagaggatggtgaccaagagggtcagaagaaaaagaagaaaaaaaagtccaaagatagcgaggattctcctgtggccgatgctgatggcggcaagaaaaagaaaaagaagtccaaggagagcgaggagccacctgtagccaccgctgaaggtgagaagaaggagaagaagaaaaagaagaaatctgattcacaagatgctaaggatgttgccatggaaaccgaagcgtctggtaagaaagacaaaaagaaaaagaagaaaaagcatggtgatgaatgagggatacactggagaaagacaatcttgggtagcattgggttgaaaactcgctgttctgtaaaatggaacatgccgggtctgttccatgcctgttagccatagtataggcaccactgttgagacttgagacttgtttactagtggaactgtattgaagcacctagtagtactaaattttggaatagggaaacatgtcgtgcttgctcgttctatgtgaactgaaatttttggtccttttggccgggagggtcttgttcgtgcaatattgcaatggctgttaaggtctttcaggttcttacttccct

SEQ ID NO: 24313 - DNA, 2277 bp, Oryza sativa
  ref <308>: DATABASE ACCESSION NUMBER: AK099755
  ref <309>: DATABASE ENTRY DATE: 2002-08-28
gagtctgaactctcaagttagaacttcatctctcgctctctccctgccttccctgtttgctctctcgtgttctactcctggaccaggacacagtttgaagaaactcaaattagtcctttcttgtacatttggctggtttctttggccgtgtttagttccaaagtttttcttcaaacttccaaattttccgtcacatcaaaacttatctacacacacaaacttctaacttttccgtcacatcattccaatttcaaccaaacttccaattttggtgtaaactaaacacagcctttcttgtgaacctttagagagatcatgtctgtgtcgtacgcttcgtctggatttgattagcgttaacaagtcaagtcagttagcatagcaatcagatgggttcaatctgatggtttttccccattctccagctgatggatgtacacaagaaacttctcctggcctccctcagctgtgtacttctgatccaagtagcatcgagtgatggcactgcagagggagttggaacaacaagctggacatgtgtatgcacagctcatccactaggtgaaccaaactcaaatagcagcttgtcgtcgaattgttcttcttcctgccattgtctacaagatgatgatggtggcacaggatcatggaactgcacatgtgcttctgacaaagcccttaaaaaagaacacactgcagtacatgataggggctgcttcacttcctgtaactgcacatccggaatttctcaggaaggaaagaagcacgtctctaacaaaacagtgatagttacactgctagtatgtgtgatcctcaccactattgcattccttggcaccacggcgtactacctgcgtcgcaaggatgcgctctctccacattcgcatgcatactcctttgataagtacaccagctggagcagcagatcaaacctcgtcagtcatcgatcttctcctcttccccaaccaaagccaaaaccaaggatcagtgtacttaaagagtttctgtgcagctgcaatccaatatgtggcaatgaaggtggtccgcttcccggtgtcatcgtcaggttctcctactcggaattggagcaagcaaccgggaaattttcagatgaacatctgatcggagttggaggaacaagcaaggtgtaccgtggacagcttagcgacgccaaggtcattgccgtgaagaagctcaggcccctcggaggcgcagacgaatacttcgagttcctatccgaggttgagctgctgtctcggctgaaccactgccatgtcgtgccattgctgggttactgcatggagagccagggccggcagctggagcggctgctggtgttcgagtgcatgggcaatggcaacctgcgcgactgcctcgacctcaagcaggggaggaaggccatggactgggcgacgcgcgtcggcgtggcgctcggcgcggcgaggggggtggagtacctgcacgaggcggcggcgccgcggatcctccaccgcgacatcaagtccaccaacatcctgctcgacgacaagttcagggcgaagatcaccgaccttggcatggccaagtgcctgatgaacgacggcgtgacgagctgctcgagctcgccggcgcggatgctgggcacgttcgggtacttcgcgccagagtacgccatcgtggggaaggcgtcgctcaagtcggacgtgttcagcttcggcgtggtcatcctggagctcatcacggggcggcagccgatccaccaccaccgcccgccggcggcggcgggggagagcctggtcctgtgggcggcgccgcggctgcgcgacagccggctggtggtggcggagctgccggacccggcgctgcaggggcggttcccgcaggaggagatgcagatcatggcgcacctggcgcgggagtgcctgcagtgggagcccgagtcgcgtcccaccatgagcgaggtcgtccagatcctcgccaccatcgctccttcctcccgcaagcacgccgccgcggccaccttggtcacccgcatcgggagaagcagcagcgccggcgacacgatgcacagcactaggttagccgtgaagtgcagcgtcggagagagttggcgatcgccggagatggaggaggagacggtggtggacttgacggagccacggctggagccggccatcttcttcaattagctagataggctaccaaattagttgcatgcatgtaatgtaatgctgctgctgctgtacagacagacaaattaacgaaaaaaatcaaatccatactaaacgctattgagaatcc

SEQ ID NO: 24314 - DNA, 1856 bp, Oryza sativa
  ref <308>: DATABASE ACCESSION NUMBER: AK099756
  ref <309>: DATABASE ENTRY DATE: 2002-08-28
gggaattccgcgtatactaatcgtcctccggtagtagtagcagtagtacgctcggttcgtggaaccccactctccaatccccaaaagcatccaccccacggcgcgagatcccaactgcggccgcgggattcttcggaggagtggtgatcgccatcggggtatggaggcggcggcgaagctgaagaggagcatatcgcggcagctgtcgtcgggggcggcgagggtgtggcggcagctgtcgctggagccggtgtacactccgcggcgggcgggggcggtgggcggtggtggtggaggaggtggaggagggggagggggagggggaggggcgaggccgacgaggttcgggctcgcgaggcagtcgtcgctcgacccgacgccgcgggaggggggcggggcggcggaggatgggtcgggggcggcggcgatgctggccgtgccggagaacctggacgcgacgatgcggctgctgttcgcggcgtgccagggggacgtggccggggtggaggagctgctcagggacggggtggacgtcgacagcattgacctcgacgggcgcacggcgatgcacatcgccgcctgcgaggggcagggggaggtggtgcgcctgctgctcagctggaaggccaacatgaacgcccgcgaccgctggggcagcacgccagcggcagacgcgaagcattacgggcactttgaagtttacaaccttctgagagcaagaggagcaaaaactccgaaacaaaagaagaccccgatgacagtttcaaatcccaaagaagttccggagtatgagctgaacccacttgaactcgagttcagaagaggagaggaagttacaaagggtcactatgttgccaggtggtatggatccaaagtgtttgttaagatacttgacaaagacagcttctcagacgccaatagcataaatgaatttaaacacgagcttactttactggagaaggcccgccatccaaatttggtccaatttgtgggagctgttacacaaaatgtaccaatgatgattgtttcagagtatcatcaaaagggtgatttagccagttatcttgaaacaaaaggtcgcttgcagccttacaaagctatcagattttcccttgacattgcgaggggattaaattatctccacgagtgcaagccagagccaatcatccatggcaatctgtcaacaaaaagcattgtgcgggatgatgaagggaaacttaaagtggcaggctttggctcacgtagtctgattaaagtctcagaagataatccacaaatggatcagacgacatcaaaatttaacagtgtatacaccgctcctgagatgtacagaaatggaacgtttgacagaagtgtagatgtatttgcatttggtctcattctttatgagatgattgaaggaactcatgctttccacccaaaaccaccggaggaggcggcgaaaatgatttgtttggagggtatgagaccaccgttcaagaacaaacccaaatactatcctgatgatttgagagagcttatacaggagtgctgggatccaacaccttcggtcaggccgacgttcgaagagataatcgtacgcctgaacaagatatccacgagttttactaagcagactcggtggagagacacttttaagttaccatggaaacaagcttcagagagatagcctggttgccgtcaagatttccgccctttttgcatatgtgagtaaacacggtgaaaattgtatcgagttgtcgaggagatagtggtcatttttcacgtttttgtatttccaaaaaatatttgtaactataatcagcccgcttttactttcttatgaattatatcatttttaactggaataatgtgtt

SEQ ID NO: 24315 - DNA, 3792 bp, Oryza sativa
  ref <308>: DATABASE ACCESSION NUMBER: AK099757
  ref <309>: DATABASE ENTRY DATE: 2002-08-28
cttttaccttcagtactccagtgttgaggcttacaatgagatgcttcggcgtcacatgaatgagagtgaggtgattaatatggtggcccattcctctgagtttgagaatattgtagtaagagaagaagaacaggatgaattagaatccctttttaagaatgcatgcccacatgatattaagggggggccaactgacaaacatgggaaaatttcaattctcatacaggtttacatatcgcgtgctccaattgatagctcctctttgcactctgatgctcaatacattagtcaaagcttggctcgcattatgagggcattatttgagatttgtctgcgccgagggtggtctcagatgacatccttattattagagttctgcaagggtgttgaccgcaaaatatggcccgaacaacatccacttaggcagtttgacagagacctttctcatgagatatgtaaaagacttgaggaaaaacatgttgatctggatcgtctttatgagatggaagaaaatgatatcggagctcttattcggttttctcatctaggaaaggtggttaaacaatatgttggatactttccatatgtcaacttatctgctactgtgagcccaatcaccaggactgttcttaaagtggaccttcttataactcctgaatttttgtggagagatcgtcatcatggcatgtcgctacgatggtggattattgttgaggattctgaaaatgatactatttatcattcagagttgttcacactaatgaagaaggcaagaggagcacctacaaagatttcttttaatgtaccgatctttgaacctcatccaccacagtactacatacgggccatatcagattcctggttaggagcagagtcactgtttactgtttcttttcataaccttaccttgccacagacacaaataacacacactgaacttttggacctgaagcctcttccattgagtgctcttggcaacaagacgtatcaagatctatacagattttcccatttcaacccgatacaaacacaggcttttcacgtcctctatcacagcgacaataacgtactcttgggagctccaactgggagtggcaagacgatttctgcagaactagcaatgcttcatcttttcaacacacaaccagacatgaaggtagtttacattgctccattaaaggctatagtacgggaaagaatgaatgattggagacaacgtcttgttactcagcttgggaagaagatggttgagatgactggcgacttcactccagatatgatggccctattatcagcggacatcataatttctacccctgaaaagtgggatgggattagtcgtagttggcatagtagaagttatgttatgaaggttgggctcatgatattagatgagatacaccttcttggagctgaccgtggccctattctcgaggtcattgtatcaagaatgcgatacatatcatcacaaacagaacgttcaattcggtttgttggtttatcaacagcattagccaatgctcgtgatttagctgattggttgggcgtgagagatgatggtctattcaatttcaagcccagcgtgaggcctgtacctcttgaagtgcatatccagggatatcctgggaagttctactgtccaagaatgaatagcatgaataaaccagcatatgcagcaatatgtactcattcaccagacaaaccagttctgatttttgtatcatctcgtcggcagactagacttactgctcttgatctcatccagcttgctgcatcagatgaaaaaccaaggcagttcctaagcatggcagataactctctcgacatgattctttcacaagtctctgacaccaatttgagacatactctgcaatttggaataggtctgcatcatgcaggtctaaatgatagagatagatccttggtcgaggaactcttttcaaacaacaagattcaggtactggtatgtactagcacactggcttggggtgttaatcttccagctcacctggtcataattaagggaaccgaatactacgatggcaaaacaaaaagatacatcgattatgatatcacggatattctgcaaatgatgggtcgggcaggtcgaccacaatatgaccaacatggcaaagctgttattcttgttcatgaaccaaaaaaaagcttttataagaagttcctgtatgaaccattccctgttgaaagtaatctaagggagcacttgcatgatcacataaatgcggagattgtttccggcactatcagtaataaagaggaggcgatcatttatcttacttggacatacctgtaccgaagactggttgttaacccagcttactatggattggaagatactgaaacgtacaccttgaattgctacctctcaaggctagtggaaacaacatttgaagatcttgaggacagtggatgcataaaagtggatgatcactctgtaaagtacttgattttgggaaagatagcgtcacagtattaccttagttaccttacagtctcaatgttcgggacaaatataggccccaacacatcattagaggcatttgtgcacatactgtcagcttctgcagaatttgatgagcttcctgtacgccacaatgaggataacttgaaccgaaccctgtgtggaaaagtcccgtactcagttgatcagcaacaccttgatgacccacatgttaaagcaaacttactctttcaggcacacttttccagagcagaattaccaattagtgactatgtcactgatttgaaatcggttcttgatcagagcatacgtattatacaggctatgattgacatatgtgccaatagtggatggctttcaagcgcattgacttgtatgcatcttctacaaatgatcatacagggtctctggtttgagagagattcatctctctggatgctaccatccatgaatgataatcttctagatcatctgaagggcagaggagtttcaacaattccagccttactaggtctctctcgtgaagaattacataggttgcttcaaccattttctgcttctgagttgtaccaggatctgcagcatttcccttgtgtggatgtaaaacttaagcttcagaatgaagataaggaccagtccaggcctccaattttaagcattagattgcaaatgaaagatgcgcgccgttcaacatcaagagcgttttcccctagatttcccaaggcaaaacaagaagcttggtggctggtccttgggaacattagaagttcagagctctatggtctgaaaagaattaattttatggatcgggtggttaacactcggatggaattgccagcaatgtttgatatacaggagacgaagctaattttggtgtcggattcctaccttgggtttgatcaggagtactcacttgggcatcttgcaaagggtgtgtgatgctcttgttggcttaccaatgcaatgctcatctactgtagggcccaacactcagcagtgccgatcttgccgtggtttagttgttcagcatatcttatcttaagagcccttgggagcttacatacagtatgacgggccgcgaatattatgaaatgaacggtggcggtggctcattcatctcatttctccttcatctcattgtctattaccagccataacagtcaatgtttattagcctctggccttaaattttgttagtattaaccatgggtattaacctcagcctagaatttcacgaatgcttcatttgcttcaacaatgcatgaattttggctttggcctggaaatattcgtgtattagtaatttggtc

SEQ ID NO: 24316 - DNA, 3055 bp, Oryza sativa
  ref <308>: DATABASE ACCESSION NUMBER: AK099758
  ref <309>: DATABASE ENTRY DATE: 2002-08-28
gattcccttccaccctctcccaccctttaaaaaaataatacaaaaataagaaaaagaaggagaagaagggagattctctctctctctcctcctcccgctcccgaattccttctagattatcccaaattcttcgctgccaagccgccatcccgcggaatcgagggatgagcagcaagttcatgataacctacaagaggaagcgtgttacatcacatgtctatacagctgatggcaccaatctcaagtcttctggtgcttccagtagtgttcctgtcagcagtttatccccaaaatatggggttggtgccgataataacatgttagaggaagataatttttcgacctctacaaagcaacaggatgtatttgattcaagggagcaagtcatcaaggaagaatcacctaaacaaagtgcaaatgcaccaggcaaagaacgagcggaacttaagtcacgtgaatcattatctcaaaaggaacagcctgagatatgttctactcatactgcaataggagacgcatgtgagaataaattagaatgcatagatggcacacataatcaaagtcttgtttccagttgtgtgcatgctgacaggacaactaatcaggcagaagattctagtgcctctgtttctgtgggagtaaattctcatcagcagccgaataattctaccaggcctagccaatctaagagtagatttagtcctatgcttacatttcataggcgagttaaaaacaaaataggtttggaagagcctgcagcaggaagttgttcaagagataatgacaaacattgctcaaaactaagttgcaacccaccaagttcgccactggatgctatacccttgtgtagacaaactgctggcagttctttggatgttgaagataaggttactatagcgggaacaagcactggacaatctgtaattgttgaccacttgcttgaacaaaaaagttcacacattccgaaatcgtcggtacatcatatggttccctcgcagcctgctaaagatgcaaaccaaagttcaatcccagaagaaggtacaccagtatctgagttcactagggtgctagaaaccagtgagtcagatgcaagagtggaggactcaaacagaacaccagtagacgctattgaagtaccaaaagttattgaagtgaagagggatgaacatggtaatggacagactaattgtctacagtcaccaaggaaaaatataaatgttaatcttctgaaaccaacaaatagatctgaggcagctgatcttctggagtctcaagattcaacaaaaaatattccaattattgtcttggacgatgatagtgatgagaggggcaaagagcaggaaaaatcagaggtccttgatcaattaatccaggagaaaaataaaggtagattttctttggggcagatcaacctaaatctaaattgtgctgaattaccacaagagaggcttctcagtttggatgagacatcggtgtacaaactaaaagatcaggatcaatgtgttcatgaacgaaagcaaatgtcccatccagttgaaaggttgttttttacaaaggagaaggatgccatgcacggtaaaaaacatcatgaagaaacctcaaccatgcatagctcgtactcaaatttatttgatccagccccatcatcgtcgtggattactgggaatttcaaggaaccaagtgtcatgccatcagaactgaagttcagaatattggataaggctcctgaattcaatttagatctcaaattggatagtttcccagacagtagtgtattagcccttaggcacgataagttatttcgtggaggcacctccagtggatcccattttctgacagaaaggcttgggacatactcctacaaaaggcactcttccccgtggtcagaagaagaattggattttctttggattggagttaggaggtatgggacaaataactggaatgcaatgttgagggatagacggttacggttttctaactcaagaaatgccgaggatcttgctaagcaatgggacaaggaacaaagaaatcttctaggtgtggatttccttcaatcactcagatcctctgctcgaggtcctccaccgccttcacatataccagaagattacgttggaagcagttcttggactggatgctcaaaatctccatttctttctgctccaacagacctttcattgggtgacatgtaccttcgaagcgcccgtacttcagagagagggcagcatcatttatcaaacctgggcatgttaaacctacatgcaaccgacaatgtaccaagaaatttgtctctgggaggtttccctgttgcttcctccccatatgggagaagttctagcaagcgtaggagggcgtccaagcttcccaagtcatactatgacaacaaggcagtttggtgccaagatccatcagagagggtggctcagttccttcccataaaccaggaaccaatcaacaatcttcctgagtggctgacaaaggacgccgagatggcgggcgtacgccggcttgatgcagatctgtggccgagcatgcaggctccgggtcattctgcagcagaccgactgaatgaaatgaagcctcatgttcttcctgatggatcactgaagcgtgcgcccaagaggaaggcggagtggcgcgccttcagcaagaaactgttcaagtccggcgatggcgccctggatctaaaccagagggctgctgccatcgccggacccctcggtgccattgggactagtgacaccggtgcatcgtctgaagagacggcttcagacagttgagtgtatctctagtagtagtgatttagtccagaaaaccttgtgtcagtctgaagctgcctgtatgattccgctgctgaagctggtaaacagtagcagtatgatcaaaggtaaaatcgagttaaatttcagccaagtgattggattcagtttttgtaaacatgcatcgatctgaattctgattacatcctgtgtaatatattattggcttgtgtaatccaaaaagattgaaccatatatgctcgcatgctgaaaaggaattgcgagtttttgtg

SEQ ID NO: 24317 - DNA, 2436 bp, Oryza sativa
  ref <308>: DATABASE ACCESSION NUMBER: AK099759
  ref <309>: DATABASE ENTRY DATE: 2002-08-28
ggcgcgacgcaaacgaatcgcacttcgcagaggcgaagcgaagtagcgctgccttgccttgtcgcccttccccttcgactccattccctcccgcttctcgcgcaacgctatcccgccgccgccgcgtgtctccccaatcccaatcactagcctcctccgtcgaccgtccgccttcccctgagggcggcctgcgtctgcgtggctgcgccgtgccgccgtcgcgcccccgcagcttcttgcgtcttgctgcgcgccgtgccacccgccggcgcctgcgcctgcgccttcctttaccgggctaccaccctgcgccgtctctgactccccggccggcggtcgccctgcccgctgctcctgcacggcgtggctgcaccctagcccctgcccataactccattgtaacaccgcccccagctcgattgccgcctgacacaaggcagacagagtaggaacacccaacaagaaattcctggagctgccattgcggcgctgccttccatggagaccgagggctggcctgccctccagcctctgctgtgcctcgcctggatcgccactacactccccatcattgtcgccgcgctgccaatccccgcagctgctggtggtcacctccttcgccggctgctctcggccttctcctcccgcggcaggaccgtgaggccctcccccgcctcatcctctggttcctcctcttctaaggcggtaagatcggttcaaggtgccgcagcacctatttgctgcttcgccttttctgttatcattcgacaatcccatggagttagtatgattccttggtaaacgaagcttggttagaccttgataagttaagcgaaacttgttcaaagcaaatataggtttgggttggtttgaaaaagatataaccgtggattgtttaaggccaaagtagctagctactgttttgtagtgtttagttgatgcaaatctgaaatattatcgattgattgtgagaagatgatacatttggaagaaattagttcttaaatgtttgggaaccacagttctggacttaaacaatttttttaattggtgtttgtctacaggatatacagccagcttttcttgtcaacttggagatttagttatgctaacttagctatacgaaaaatacataccaagccagttttgtgagtaaaaactaacattatatagtaggatcgaattgattcctcatcggcttttcttgagctatttttcatccaattgatgatcaattgcacatgagaacacgcaccaaatttgtagttcttctcatattcaacttctgtataatgctgataatctcagatcgatcttttctaatctgcagaagttcactgttccacaaaaatacttcatgcatttttatgtggtcggagtgctggcaacaacaattttgcttctggcaatatggttctatgcatatatgaaaatgacaccattattgcctgagtcatcaagttattccacaattgccagccatcttgtaggctcaaattcattctcttttggtcgtgttcactcgcgcaccatgggacacaagtatcatgtctggcgaacagtatttgtacttctattgatggaaattcaagtgctgagacgactatgtgagactgaacatgtgttccactacagcccttctgctcggatgcatattgtaggatatttgacgggtctattctattatgtagctgcaccattatctcttgctagctcttgtatccctgaagcagcagagtatcttcaaggtcaagtagctgagttcatagtaaagggtcgtgcgagaatgccagatcttgtaattgattcatcatctctactacagcctcttctgaagttggggtggacccagtggataggtgctgttatattcatttggggttccctccatcagatccgttgccatgcaattcttggaacgttgcgtgagcacaaagattctgatgaatatgtaattccttgtggtgactggtttaatcgagtctcttgccctcattaccttgctgaactagtaatatattttggcatgttggttgctagtggtggagaagacattccagtgtggttcctgttcgtatttgtgatcacaaacctgtcatttgcagcagtagaaactcacaagtggtatcttcaaaagtttgaagactatcctcgctctcgctatgccatcattccatttgtatgctagtgtctacgaaatggctacattatgcaaagcttatgtatttgcacacaattacgacatgtaacttagcttgatgtaaatgtgataacaatcatactacgtaccaccgtagaggctggaagtgttgtattgtataacgtagccacgcagaatgtacctgtgacacttcatgctgtgtgttatgctacacacttggatatttatcaacattcttaagcatcgggaataaagttcttgcagaattggattgg

SEQ ID NO: 24318 - DNA, 1618 bp, Oryza sativa
  ref <308>: DATABASE ACCESSION NUMBER: AK099760
  ref <309>: DATABASE ENTRY DATE: 2002-08-28
gaggatccgatccgcttgcgccgccgaccacctccaactccggcgatggcgcggcgcggcggcgggcagacgtacgggttcccgatctactgcgcctcgtggctgcccctcgcccacatcctcaatccgcctcctccggtggaggagggggatgcggacgcggacgcgggcgcggcctcgtcggagtcccccgctacgccgcctccgcctccgccgctcatggcggcgctcgggggagggggcggggaggggcggagcggcgtgcccaacgcgctggtggtggccgcgctcgacacctccgctggggcggccgcggcggcggcgctgtcccccgacccggtgttgaggatggggacggaggagcaggtgccgtacaggatgggcgtcccacccgcgcggcgacggcgtcctctgcgcattccccaatggctgcaggttatttcgatgggaatcacaggaaggagagggacctgataatatagctttgagggctgatcaggaggcactgacagagttgagtgatgctggtttgcagttagctgtgtcattcagtggagaaggttcaatacttgcgactggtggtgaggatggtcatttaagggtcttcaaatggccttccatggattccattcttgaagaacccgatacgaaaacatcagtgaaggatttaaccttcagctccgatgaacatttccttgctgtgaacagaagcagtggcccatgtagagtatgggacttgaagtcagcagaagttgtagctaatctcccaagagaagcaggagaaatatttggtttctgcagattctctaatcagactgacaacagtcagatcctctttgttacagcgatgcaaggtgattatgggaaaataatatcttggaatacgacctcgtggacgagaattgggtcaaataaaataacacgtgaggcaatttcagcatttgctgtctcgcctgattgtacacttcttgcaattggaactattgaaggaagcattattgtactaagttcaaaaaatatgcggtcgcttgtaacagttaaaaaggcacatcttggcattattactacattggcattctctcaagattcaaggaccttgctgtcgacttccttcgattctactgctagggtgacttcaattggatcacctaagagtcgtggtataagtatatggaccatgatactggttattattcttgcaattttggcatactactatatgcagcataaagaggatctcttagcaaggtttctacattgagaaatttgtccaggctctgattttcatcgcttaatttatcatctgatcgtctactggagatatatgtgataccgtctgggagatcatttttgtcttagggtcaaaaaggagaactgtccaaatttctcctgtccgctgaacatagcaagatccaggccttccctttgtcacgcttgtacaaaaatggccatgttgtcaagagttttgtaaaattgaagggctcatgtgagttataatgccctctagctgctctcgtgaggaaaatttctcgagtataatgtagaaatttgagaccaaatttcatgttcaaaacggtgtgggggaataatggattttccagtgtttgcgccttgcggt

SEQ ID NO: 24319 - DNA, 2078 bp, Oryza sativa
  ref <308>: DATABASE ACCESSION NUMBER: AK099761
  ref <309>: DATABASE ENTRY DATE: 2002-08-28
gctctcttccccgcaccttcccttcccctggccacacctgccgctccagatctgcgcctccgcctcccccacgtcacgacgccgccgccgccgccgccgcacgcgcggccgtcgcgtcgctagctaacctccccttctagagccttctagacgcttctcccgatgcggaagaagccggcgagggcagtgccggagtggctcaacagcccgctctggtcggccccgccgccttcgtcttcgtcgccgtcgccgcccgtgccccccgacccctacggcgccgacctctccccgcccccgcctcctccgcccaagccgccgccgaccgtcccgcccccgtcgtacgagcaggcggtggggtcgtcgaggagggcgaggagcgaggcggggtgggaggaggaggaggaggaggatggggaggtcgggggtggggccgcgctccgggcgcacctgctcgccgacttcaagctcgcgctgtcgaagaaggtggtgaacatgggggagctgcggaggctcgcctgcctcggcgtgccggacggcggcgccgccgtccgcccgctcgtctggaagtgtgcagcttctgttgggatatctgccaactgagcgtgctttttggcctcatgagctagaaaagaagcggagccagtatagtgcatataaagatgaatttctcctaaatccttcagaaaaaatacggagatttgaggagtcaaagttgctaagaaagaaagaattaaatagtgacaaaattggccttctaccaagagccaaagttactaatgaagagcaccctttgagctttggtaaatctagcttgtggaatcaatacttccaggaatcagaaattctggaacagatagatcgagatgtgaaaagaacacatcctgaaatgccgtttttctctgccaaggctaaccaggaatctctaaggcgtgttctcattatcttctcaaaattaaatcctaccataagatatgtgcaagggatgaatgaagttttggcacctcttttttatgtgttcaagaatgaccctgatacaagcaattcagcctcagctgaagcagacactttcttttgctttgttgaattgctcagtggctttaaagacaactactgtaagcatcttgacaacagccaagtgggtattcggtctacactttcaaagttgtctcagctcttgaagagacatgatgaagagctatggcgacatatggagatcactacaaaggtatatccacaatactatgcatttagatggatcacactactgttgacaatggagttcagcttcaatgtgtgtattcacatttgggatgctatcttgggtgatccagaaggtcctccggacacgttgctaagaatatgctgtgccatgctcatccttgtccggaggcgcctcctagctggagacttcactgccaacatccagctgctgcagcactatccaccgactaacatcgaccaccttcttcacattgctaaccgactaagaggaagcgtagccagctagcgatacattctcattttctgcatatctgtacctcgatcttgtctttgtggtggcgttcatctgatcatattgtgaacttggcaatgtaggtagctgtgtttatcccattttggtgtgggtgtggctggcaatgtggttgtagaagagagcgttgaggccctagatgcatttcttgttgtgtttacattagaaacatctcccctatgtggaaaaagcatcagttttacatgttccgtatgaaaaatgttgtgttggatgtgttacttggtagactatacagatgagggaggacttaggactagtaggaaagagctatggttaggccacctcataaacaaatcaatagttttcagagttttagccattagttatagctgtcaatgtttggataaaattcctacttcctcagttttcttggcctctgtcgcatttgtaactgaaattcgtactgtaaacattgaaaaaaaaatcgaggtaaaatttgtaggtttggctcgagtttctttgaaattcgtgtttgtattaactctttacttgaaaggaaatgctaatatgactatgaaatactagc

SEQ ID NO: 24320 - DNA, 2282 bp, Oryza sativa
  ref <308>: DATABASE ACCESSION NUMBER: AK099762
  ref <309>: DATABASE ENTRY DATE: 2002-08-28
gacctcttctctccagcccacgcgcccccgcctcgccacgacccgaatcgccgtgagatcgagccgatcgagcgtcgagcaccttgcgcgcgcgcgcggggatgaaatcccatggcagccgagacaagctacaggcggccgcgtcgtcgagccaccgccgcgtcctcctcctcctcttcgccacctgcttcgcgctagccacgttcgtcaccttcgtctacaacacctcccacttcgcctccgcctcgggctcgggcgcggcggcggactcctccggtggcggcgcaagcgccggctccggcaccggcgccgtctccgcgctgccgctcccggtgttcgacgcgctggtccacttcgcctccatctccaacgccgcacctcccgccgccctcttcatcatcggcgtggagatctcggagcggttcgccttcggcggcatctccgggaacctgatcacctacctgaccggcccgctggggcagtccacggcgtccgccgccgccgccatcaacgcgtggaacggagctgcgctgctgctcccgctgctcggcgccgccgtcgccgactcctggctcggccgctaccgcatcatcatctgcgcctccctcctctacatcctggggcttggcatgctcacgctatcaccggttcttgtacctcatcaacaagcagaatctggagataatgcagataataatgcatcctccagtatggacattcatgtagctttcttctacttgtccctgtatatcgtggcctttgctcaaggtggccacaaaccttgtgtccaagcatttggggccgaccaatttgatgagaatgaccctgaagaatgtgcctcaaggagctcatttttcaattggtggtactttgggatatatggcggcaatgtcattacagtttcaatcttgaattacattcaagataacataggctggcagcttgggtttggaatcccttgcattgccatgtctctttctcttgcagtattcttgcttgggaccaagagttaccgcttctatcctctaagaagtaacacaagcctattcgaccaggttgggaaatcgcttctagcaaagatacgatggtggtgcgcatcatggtgttcaaaatcatcaggggatcttcactgcacccaagcatcatcatcccagggagatcacaatgatgcagaaaaggcatgctttcctgatgaagccaccgctgtgcttaaattgttcccaataggggcaacctgcctgatttacgcaattgtttttgcccagtggataacactgttcactaagcaagcaagcacactagacaggtggataggtaaagtacacataccagctgctgccctacaaagcttgatcagtgtgtcgatcgtcatctctgttcctatatatgaccgaatccttgttccacttactaggaggtactcaaagaaccctcgcggtatcacaacgttgcaaaggattggaattggattgattatctcagtaattctgatggttgtctctgcccttgtggagacgagaaggctcatggtagcaagagattttggcctggtggacaatcctgaagccacaatccccatgagcttctggtgggtggtccctcagttcatcctgactggtttggctgatatgttcacaatggttggcctgcaagaattcttctatgaccaagtaccagatggtttgcgcagtttgggccttgctttgtacctgagcatatttgggattgggagcttcatcagcagctttcttgtgtatgcaattgacaaggtgaccagcatgactggggatagctggttctcggacaatctgaaccgaggtcatcttgattacttctactggctattggctgtgctcagtgttcttggtttagctgcttatctacacttttcgcgagtgtatgtccacaagaagaagggcatctcagtacagtgaggatgtgtcaaaagatgctgaaaatgcattggctatcacatgttggttgttggcatatcactttcgaagaccttcaggcggtaaaaggcttgcagcttgcttatgctgctgtagtagtgctgtacagtgccttcaagagtgaatgcccgtacgatgcttttctgttgctgcttgaagccttgaacgattcgcatggagaaggagatctagcctaggtgccacagcaagtaaaaattgctgtggagaaatgttgattttcttttttcaggggtggttgtacaatttgtggactgtgaaagttatggcagttataaataatattaaaaagcatcaatgtgacagttttgc

SEQ ID NO: 24321 - DNA, 912 bp, Oryza sativa
  ref <308>: DATABASE ACCESSION NUMBER: AK099763
  ref <309>: DATABASE ENTRY DATE: 2002-08-28
gaggaagaaaaaaaaatcgaacaaaacagaagagggagaaagcttggggaggaggagctcgtcgcgatcgatggaggtgggagcgaaggtgcccaagaaggccggcgccggcggccgccgcggcggcggcgggccgaagaagaagccggtgtccccctccgtcaaggccgggctccagttccccgtcggccgtatcggccgctacctcaagcaaggccgctactcccagcgcatcggcaccggcgcccccgtctacctcgccgccgtcctcgagtacctcgccgccgaggtgctcgagcttgcggggaacgcggcgcgggacaacaagaagaaccggatcatcccgcggcacgtgctgctggcgatccgcaacgacgaggagctcgggaagctgctggccggcgtcaccatcgcgcacggcggggtgctgcccaacatcaacccggtgctgctccccaagaagaccggctccgccgcggccaaggaggccaaggagggtaagacccccaagtcgcccaagaaggccaccaccaagtcgccaaagaaggcggcggccgcttagggcacacgcaatgccggcttggtggtggtgtcccccgcttccctctccctcttgtctgaactgaaacgctcctatctgttgtcaatcgtcatcatcatcgtcttcgttgcatgctatatcatttgtcgtgaatcggttcggttgtttgtacgtaatttgtggtgttttctgaatagatggacagtcaagccaatcagtttgtacccgtgtaggttaacaccggtgtagggtcgaggagtgtggtctgggcagagggatgggggaactgtgaattgttagatgctgcctgtaataatattgttaagatttggataatttcgaacaattgatctgtgtttggtagtggatgc

SEQ ID NO: 24322 - DNA, 2836 bp, Oryza sativa
  ref <308>: DATABASE ACCESSION NUMBER: AK099764
  ref <309>: DATABASE ENTRY DATE: 2002-08-28
gggaggctgccgtgccatcctcctcctcatttcctctctcacctctccgcgcgccgcctctcgccgccgcggacgaaaccctagctaaaaccctcctctccctctccctctccctctcaccgagccgcgcggcctcgccaaggaccggcagcgatggggaagagcagcagcaagaagaagaaggacaaggtgatcctgcccccgcagctgccgccggaggtggacgacgacgacgtggtggtctctgacgaggacgtcgagttcttcaggggcaacgagggccacgcccgcgcgctcgccacgctcgacaggaagtccatcgacagctacgtcaccagggtcgcccaccacgacgaggacgaggtcgagcgcctctacgaggagcgcgagcgcaggaggaaggcggtcgaggccctcaggcccaagaaccacgacgacgacgacttcgaggtcgaccgcgtcgacgccctccccgtcaagaccctgcaaggggagctggtctacaacaacgccaagaaagcgagatttgatgacagttctaatagtgttgaatctaaatctgaagacaaagtaggaaattccaaacaaactattcaaaagggagaacggaaggaaaaatccaaaagcaaaaagggagatggtaaattgcaaaatgtgcaagctcaaactgaagcttcaaatggaaaattacaatcaaaagtgctggaggaggtgaaggaggaactttcagctgaggaattatttgagaaaaagaaggcccagctggctgaaatagggatgtctatgcttgaagatcctgaatcacatattagatctctaaatgatatgttaaacatatgcaatgacaaagaccagaaggttgttaaacttagtctgatgtccttgcttgctgtgttcagggacattattcctagttaccgcattaggcagttgacagaaaaagagcttacggtagaggtttcaaaagatgtaaaaaagatgagatattatgaatacacacttcttcgctcctacaaggcatacctgcaaaagttaatctccttggagaagcaaccaaatttttccgctctggctgttcgttgcatgtgtactttactagatactgctccacatttcaacttccgtgaaagtatacttgccagcgtggcaagaaatttaagttctccagatgatgcagtgaggaaaatgtgttgtgaaacgataaggtctctatttgtagatgaaggaaagcatcgtggtgaggcaactgttgaagctgtgagattgattgctgatcatgtgaagctaaacgattgccagcttcatcctgatagcattgaggtcttcctatctttgagatttgatgatgatcttggaaaagatgacacagaggaagaaaagggaaaaccaaagaagaacaaacgacgacaaaaccaggaagtcccaaagcaattgccagtgagtgataataagaaagccaaacaggaattgatctcaaaggctagagaagaggttgatgctgaacttagatctgtttcctttactcttgatccaaaggaaaggagaaggatacagaaagaagcactctctgctctttttgagacttactttcggattttgaagcatagcatgagtatttcaaattccaggggcaaggtcattaatgtctccccagatggctcacacccactacttgctccatgtttggagggtttaggaaaattctcacacttaattgatttggatttcatgggtgaacttgtcgcgtgcctcaagaagctttctgggtataccgaccatcactctggcacagtacatgacaatacactgtctgtatcagaacgtctgcagtgctgcatagttgcatttaaagtctggaggagcaaccttgaagctctgaatgtagacctgcaagacttctttgtgcagctttttaacctcattctggagtatcggcctgacagagatcgtggtgaggtattagctgatgctctgaagacacttctctgggaaggcaaacagcaggatatgataagagcagctgctttcattaaacgcctagcaacctttgctttgtcctttggttctgcagaagccatggcagcattaatcacactgaagcatcttcttcaaaagaatagcaagtgcagaaacatgttggaaaatgattctggtggtggctccctgtcttgcttagttgcgaaatatgacccagaagctaaagatccttatctgagtggggcacttgcctcagtcctatgggagcttagccttctgcagaagcattacgattcctctgtttcctcaatggcctcaaatatcttgagcatggccaatttgaatcctacacagaatcctgttccaatttcaaatgcaagccctctagaagcatatagagacttgtcaatggaacggaaattgtctaaaccagcgaataaattgttgccactaaactgcagaaagaagaggcgtggtaaggagtttgttgccctaagccctgcagcgctcgagggatcagattgcgttgcgggtggagatgaactcaaagagaagttaaaaaatcattttgcggtactaagaggtatctcagagaatgagagattgagagctgagctgaaccacacgttgtcatccatcaacttgtacaaggaatacaagaagcagaagaaaagcaggaaatcaaaggctgttaagaaaaaggtttcaagggcttaagttgtgctgcgtttgggggaaatttttgcacaccagggaccaaatgtgtgcagaatgaacaattttgccatacccactttgtagcttatcgtagcttttgggtgtaacacatttgcagttccaagcatttctttttaagctg

SEQ ID NO: 24323 - DNA, 2858 bp, Oryza sativa
  ref <308>: DATABASE ACCESSION NUMBER: AK099765
  ref <309>: DATABASE ENTRY DATE: 2002-08-28
gtcctttcctccctctcgctctctgctctcgcacaggcgacggcgcgcgcggccggcgacggcggctcccgggtggcggcgcgcgggttcagggcggcgcgcggctacggccatcatcacatctcgacgacgccgccatcagtcgctgccatcggcgatggcggcacgctgcagtgggccatccaaaacttcatccgcgccagtgactacatcacgctgttgcacgtctgcccgccagcgaggttgcgcagcctacgcctcggcggcttccagctcgccctcgccttcagggagctctgcaacggcatcgcggaggcgaaggtggagatagtggttagggaggggaaggtcggggagacggtggtggtgacggtgaaccagctcgccgccaccacgctcgtcgtcggtctccacgacaagattcctcaactgaactgaactatactgtaccgaagctggtcctccaccacgccgtcgtctggcctccgcattctgcaggccaacaaccccggcctcgtgcaccggcatggagggccctaggggcggcgagatcgacgatggccgctgcccacgacgaggtccccttggaggcggtggtggtcgattccattttttcccacatccaggcaggtggcgcggcggaggtggcggcgggatccgccgggaggtcgcggaggtgggacgccgcggacgaatggagcggcggcgcggcgggcgaccaggacgatggccactgcgccacggcgggatccagcggggacgagggggacgacgacaccgacgaggaagagaggatcccgtcgggaggagcgggcgctcgcgcccaactcctcgcccactgtcgttgcctcccatctcttcccccggcggcagccgcccgcgcccagctattccccctttggccaccgcccgtgcccagctcctcggtcgttgtcgccgacgcccatctcttcccccgccgcccatgcgcgcgcggctgtgctcaattgaccaagccttcctccctcggcggccgccgacacgcccgcctcaccggccatcccccgccagccgccggtgcgcggcactcctcccctgtcgctgtgagtgagagagagagagaggaggatgaagagagagagagaggaggggaaagagatagagggcgctgacgtggcatcctgacacgtggggctcacgtgggtcccatgctgactcagccatcacatcggataaatgagtgaacggttttgtaagttgatagatgttatatatctgattttgtggttgggggatgattttgtaattcgatgacaggttgagggaccttgggtgtactttttcctctcccggaatcaactcgccgcccatttcctcgatttaccgccttgtctcatactctcatctcatggggcaggtagggtttactgcccggcgatcatctccgccgccgcctccgtcgccgtcgccggcgaccgaggcgagggcctgcggtagcgacccaacccagccgccgccgccggcgaaacgccggaggacaacacgccgcgtcgtcggcatcgactccctcggcgaggacctcctcctggacatcctcctccgcctccccaccctcgcctcgctcgtccgcgccgcgctcacctgcagggcgtagcgcgccgcggtggcctcctccccgtccttccgccgccgcttcagggacctccacccgccgcccttcctcggcgccttcggcgaccccgacggccacgacggcctcccggtcttcctccccgcgcggcgcacccgcgaccgggaccgcggcggcgacttcctcctcacctgcctccaggaccccgaccacgacgcgcccctccgctggcgcgtcgccgactgccgggacggctacctcctcctcttcaactccgacgcaggattggtcgccaccgccaaccccatggccccgcggatgacggatctcatcaaaacgcccttccggatcaacaattcggccagcaatggcgccatccaagacgaatccttgccaatctccctcgacgtgcacctgatttcctcggaagaggatcccatgtcattccaactggtctggctttgccacgacgagttcagggttcaggtgtccgtcttctcgaacgacacaagggattggtgctttctcccatgggtggacatcgaggagagggtttcttcgccggatgtgccacaagatggcaccaaatactggcttatgtccgggatgcaagccaatggcctcatattctggcccttccagaatgggaagcacatgctggtgctggacactggcaccatggagttctccgtgtatgagttcccaatatactctaagctcgtgcaaggttgtagcttcggtgtcggcgagaccaaagacggcatcccttgcattgcttatgtcaatggagccaccattgttgtgttgatccgcagattcgacaagaagcagggtgttcaggggtggaggtttgtcgacggcgtcaattgcgacgacgaggcggaccaactgggtattaatggtgggcttgatgtggtggccataaaggatggctttgtgtacctggccgcgacagggatgatcctttcgctctgcttagaaacaaggaagcttgagaagctgtttccaatgagtttccagttccctctccatccctacatcatggcgtggcctcctactttggtaggaaactatgggagctttgcagagatccaagatgatattagcaatgtttaactgctagctaggttaaggtggcaaatttaatctttattaattgttgcgggaacattgttttattcaattctctaatcaggggatcaacattttggtgatattatgcaaaaaagaaaaaaatctttcaacttcg

SEQ ID NO: 24324 - DNA, 4054 bp, Oryza sativa
  ref <308>: DATABASE ACCESSION NUMBER: AK099766
  ref <309>: DATABASE ENTRY DATE: 2002-08-28
gacacacacaaacaaacacggagacgcgacgcgacgcgacgcctcgctctcttcctcctcctcttgtctgatccgacgccgtcgccggagcagctgcgggagggatggacgacgacgacagcgggatccaggaggagcctgcaccgcccccgccacccccgcctcccccgccgccgccgccgccgctgcggaggctcctgacggcgacgcggtcgggtggctcgaggtgggtggacggcagcgaggtcggctcgtccgagtccgcgccgtggtcgctcgacggtgaccgctccctccgcctctccgtcgactccgccgcctccgccgtggcgccagcggaggcggaggcggaggcgggccgctctcgcgtgcgtcctccggcgcgttccggcggcgcttcgggaagcagccgaggcgggtcgactccctcgacgtcgaggccatgtccgtccgcggcgcgcacggccacagcagcaaggagatatcaatgctgagcaccgtggcgatggcgttccagaccctcggagtcgtctacggcgacatgggcacgagccctctctatgtcttcagcgatgtgttcagcaaggtgcccataaagtccgaggtcgagattcttggagcgctttctctggtcatgtacaccatcgcgttgatccctttcgcaaagtatgtctttatagttctgaaagctaatgacaacggagaaggtatagctctgtgccattttgacatcagatatgtagagccaatcatgtgaactgcctgtcggtttggtgttctctgaatttgttggcttactgattgtgttgttacatgatttttcaggaggcactttcgcgctgtactcactgatctgcaggtatgcaaaagttagtctgcttccgaatcagcaacgtgtggatgaggatatttctagctttaggcttaagttgcctacccctgagcttgagcgagctctatctgtcaaagaatcccttgaaaagaatccagtcttcaaaaacattcttttgttcttggttctgatgggaacttctatggtaatcggggatggcattctcactccatcgatgtcagttatgtctgctgtcagtggtctgcaaggtcgagttcctggatttgggacaggtttgatgttctgtatgccttgctaaatatcaccgattgaaatttgcttatatgatacatcattaactcattacggaagcatttaactgatgttttatatactttctgaggttacaagacgtgttttttctacgcagatgctgttgtaatcgtttcgatcctgtttcttgtactattgttcagcgtacagaggtttggaactgggaaagttggtttcatgtttgctcctattttggcactgtggtttattaatttgggaaccattggaatttacaacttggctaaatatgatatatctgttgtgagagcattcaatccagtgtatatctatttatttttccagacgaatggtataaaggcatggtcagctcttggtggttgtgtcttgtgcatcacaggtaaatccttactcaagcagcaatattatcagtttaggttgtcttttcatgtttaatgacaaaagtgacaactgccaaattttacatccacactaattgttgtcctcaagagtcagtagtttacaactcagatacttagtagtaccaagactctacaaaggagtatcatgatggatgaaaatatcccttctgaattaatgtacagctatctctgtttatgatttgattttggatgaatgcatcctgaaccatatttcctgtcactcattcaatatttctgaatcgatcctgccagttatgtgtaattactccaaaagtctgaaataccatttttcttgagtgaatcattgaacactaacactgagtgattgtgctgcattccagaaatattttattgcactcatttgccttttttttaattgtaggagctgaagcaatgtttgcagatctggggcatttctctgtgaaatcaatacaggtagcattcacagctgtggtattcccttgtttgcttatcgcttacatgggccaagctgcatatttgatgaaatatccatttgctgtagaaagaatattttatgattctgtaccagaaattcttttctggccagtatttgtgattgctacacttgctgctatgattgccagccaagctatgatatcagcaactttctcttgcataaagcaggccatggctcttggttgctttcctagaattaaaataattcatacatccaagaaagtcatgggccagatttacattcctgttatgaattggtttctcatggtcatgtgcatcatcattgttgccactttcaggagtaccaacgacattgccaatgcttatggtcagtaatttggtctcaggggattattcaatacatatatttttttaattgaatgcagtttatcataagcagtcatcttggcaaatgatccctcccaaaatttccaccctcaaacttgctatattataacatccataatcaatttataaaaagtactgttgcaattgtgaccaacctttggaaatggttacaatgcactgatgaacaacttccattccgttctgcaatgtcaaatacttgtagtgtgttgcaatgctagcatctattattttcctcggcaactgtctcattattgctgatactgattttcaaaatattttcaggtattgctgaagttggagttatgatggttagcactgcactggttacgttggtgatgcttcttatatggcaaaccaatttgttcctcgttatgtgcttccctgttatttttggttctgtggagtttgtttacttaacagccgttctgtcaaagatacaagaaggaggatggttacctctggctttctcatcattgttcctctgcataatgtacacatggaactacggaagtgtgttgaagtaccagagcgagatgcgtgggaagatttccctggactttatccttgacctgggatccacgcttggcacagtaagagttccagggattggtcttgtgtacaatgagctggtccagggaattccgtcgatctttggccatcttttggtcacactcccagcaatgcactctacgattgtcttcgtttgcataaagtatgttcctgtcccatatgtcccatttgaagaaaggttcttgttccgaaggattggccaaaaggactaccatatgttccgttgtgttgcacggtatggttacaaggatgtcaggaaagaggaacatggcttctttgagcagcttttggttgaaaccctggagaaatttttgaggaaggaatcccaggaaatggcacttgaagcaagcgcaatggcagtagagcgtgacgatgtttctgttgtatctgatatcccttcatctcctgttgaggctggggatctacatgttccactgctttctgatcagaggctgggtgatggcacccaaacattcatcaccgaaggcaattcacctgtgcttcccacgagttccatctcagaagaagaccccagcttggagtatgagctggagtcactgagagaagccatagcttctggattcacatacctcttggcacacggtgacgtgagggcgaggaaggaatcgttcttcacgaagaagttcatcatcaattacttctacgcgttcctcaggaggaattgcagggctggaaccgcaaccttgaaggtccctcactcgaacattatgcgtgtcgggatgacatacatggtgtgattggggctttgcaagattatgtgttagtgctgcaagattgttcctttttttttctttctttcttttttaccatgtattggatggaatcgtacaccagctgctagttttaggggctgtactgcagtgatgagcaaaatcactactgctgctggccaactgctcagcattttagtccgcagaattggccttatatgtgctcacttttcagtgaatttgtgccaagttgtttatgtggtattcatggagattgtatttgtagcaagagcaatgcaatctgagttgatctctgccaccctgataagttttataactcc

SEQ ID NO: 24325 - DNA, 1437 bp, Oryza sativa
  ref <308>: DATABASE ACCESSION NUMBER: AK099767
  ref <309>: DATABASE ENTRY DATE: 2002-08-28
ggctgccgccacgctgctcctccccgctccaccgatcggaggaactcaggcagccaccacttcctcccttccttccttgctcagctccgattttatccaacctatccatctatattttatccatccttcctccgtcaccatcagctccccgcgcgcgcgtgcatatccgcagggcgcaggcgatgctctgctcggcccgcatgctggcctgcagcggcctcggcggccccggggggcggctccggccgtcgccgcggccgggggcctacgctgaccggctgcggccgccgctgccggcgcgcaggtggcgggtcgcgtcctccgccgccgcgtcgggcggatcccccgacctgccgtcgtcgtcgtcgtcgtcctcgccgcctccgacgcctgcagcagcgtcgttcggctctggtgatgagcaggccgccggctccccggggttttgtatcattgaagggcctgagacagtccaggattttgaaaagctggacttgcaggagattcaggataatattaggagccgccggaacaagatcttcttgcatatggaggagattcgcaggttgagaatacaacaaagaataaagaatgttgaacttgggatctcagttgatgtgcctgaaggggaacttcctgattttccatcattcattccattcttgcctcccctgagtgcagctaatctcaaaatctactatgctacgtgtttcactttgattgctgggataatggttttcggtggatttcttgcaccaattctggaacttaaactcggtgtgggaggaacatcttatgcagacttcatccgcagtgtccatttgccgatgcaactgagtcaggtagatcctattgtggcatcgttctcaggtggagcagttggagttatctccgctctaatggttgttgagatcaacaatgtcaaacagcaggagcataagcggtgcaaatattgtttaggaactggatacctggcctgtgctcgctgttcaagtaccggaactctggtgcttactgaaccggtttcaacattcagcgatggtgatcagcctttatctacgccaagaacagagaggtgcccaaattgttcaggcgcaggaaaggtgatgtgtccaacatgtctctgcacggggatggcaatggcaagtgagcacgaccctcgaattgatccgtttgattaaaatgcacgtcatagttcagaaattcttgtaccactatataaactgtttgtagataatagtattgacaggcgcgcctggggttccaggcttacgaatagggcaacacttcacatcttagtgatgtgcggagcgaatcgcttgaattgaacagtggacaattcagaggtgtatgttgtcaaagctgtatcactgtatctgtatagtatgtttatggcacccaacactaacagttcaattccacgaattatttatctgc

SEQ ID NO: 24326 - DNA, 880 bp, Oryza sativa
  ref <308>: DATABASE ACCESSION NUMBER: AK099768
  ref <309>: DATABASE ENTRY DATE: 2002-08-28
ctgagtgcaatagcacacgcgagattcggggtagcgctgtccaacggcgcggcgaaggccacctctggcggcggcggcgaggccagccacggcgtggagcagcagccgccgcaggaggggaaggcgcaagcacctgggcttaagctttaccagatcaaggtaaggaacatgttggacaacatgttagagaaaaaccttgaaatagtcaaaactacctgttcgaacttggccgatcctatggaaacagatggagggataaaattatttaaaaaggctccacctggcatcagaatggatgccatggataaataccatgtgcaactgaagagaccaagaattctgcctggaacagatgtcgatgagaaatccaagaagttcaggcatatgcttaagtctgttgctgttgatggcaatgatatacttgtttccgcaaagaaatcatcagaaagatcattggctagattggaagcaagagaagctgcagcgaaggcagcagccaagagggaagaagaaagggtgcgggaactgaagaagactaggggagagaaatggcttccttcaattgctagacaaatgaaggaagaaaaagcttgggagcaacggaagtgatgatgccaccatcatgtcaataggggtacctgtgctaatctctgatgccatcatcggcacttcggcagtgaccttcttcactttctgtctatgacaagggacagtagatagatcatagattaatggatgattttgcgtagctgataattcagttctggatgtcagcattgctctgatccctatatgggccttctttgtagacaattttgtattgtaacattccaggatcttgtgtgatgaaagtagcgtatgtatgcattatttggatatg

SEQ ID NO: 24327 - DNA, 1540 bp, Oryza sativa
  ref <308>: DATABASE ACCESSION NUMBER: AK099769
  ref <309>: DATABASE ENTRY DATE: 2002-08-28
gttcgatcgatctcgatccatttccgtttgcttcttctcctctcctctccaagaagaggcgagctcgcctcctcctcctctcgacgcgagcggcgatgcgtgcgggcgacatgccggggcggggggctcgccgtcgcccggatctcaccctcccgatgccgcagcgcgacgcgccgacgtcgctcgccgtgccgctcccgctcccgccggcggcgacgacgacgacgtccgcgcctcccgcgggaggggcgatgcacccactggcgtcggcgggggccgcgccgccgccgccgctggaggagctggaacgggtgaggcgggtggggagcggggcaggggggacggtgtggatggtgcgccaccgcggcacgggcaaggagtacgcgctcaaggtgctctacggcaaccacgacgacgcggtgcggcgccagatcgcgcgcgagatcgccatcctccgcaccgccgagcacccggcggtggtgcggtgccacgacatgtacgagcgcggcggcgagctgcagaccctgctcgagtacatggacggcgggtccctcgacggccgccgcatcgccgacgagcggttcctcgccgacgtcgcgcgccaggtgctctccgggatcgcctacctccaccgtcgccacatcgtccaccgcgacatcaagccgtccaacctcctcatcgactccgcgcgccgcgtcaagatcgccgacttcggcgtcggccgcatcctcaaccagaccatggatccctgcaactcctccgtcggcaccatcgcctacatgagccccgagcgcatcaacaccgacctcaacgacggcgcctacgatggctacgccggcgacatctggagcttcggcctcagcatcctagagttttacatgggaaaattccccttcggtgagaatcttggcaagcagggtgactgggccgcgctcatgtgcgccatctgctattccgaccctcccgagccgcccgccgccgtctcgccggagttcagaagcttcgtcggctactgccttcagaagaatccggcgaagcggccgtccgccgcgcagctgatgcagcacccgttcgtcgccggaccgcagccacagccactcgccgccccgccgccatcgtcgtgactgccaattccatccggtcatcgtgtcaaactccatttccatctcatcaagttcttcatagccaatccattttcgagtgttcttcaaacaccatgatcgttttcatccattgctgctgccccaactcaaggttcttcctctctactgttctttgatgttgttttattcacaatgatgatcaaatattgagtaaatctggtttgtacaaaggatttttttttctacgagatcaagtacagacataatcccacttgttagccaatttgccataaaattcccttagaaacgaaaatttccactgtacaagtagcagattttttttactccatttccacgatattttgcttgttagtggtaagctgcttaatgatgatagtgtgcaagttgccactcttcaaagtggttctttggattct

SEQ ID NO: 24328 - DNA, 2836 bp, Oryza sativa
  ref <308>: DATABASE ACCESSION NUMBER: AK099770
  ref <309>: DATABASE ENTRY DATE: 2002-08-28
agttttagatttctaaaccgaatcttgttgcgagttcttctcctacccatccgcgtctcggggcttggaatcgaatcctcgccaagttcggatcaacgaactgccctcataagcccgcgtcccctccttcctcgcgtcgacgccgcaccgcaccgcatctccgctcgccgccgccgacgacgacgagatgctttcccggattctgcatggctatggaggacacggcgggagaggcttcgagcagacgtaccggtgctactcggcggcggccttcaacaagccgcagctcgaaggcggagacaaggtgatcatgccggcgtcggcgctccaccgcctcgcctccctccacatcgactacccgatgctgttcgagctctcccaccacggcgacgccgccgcccaccgggtcacccactgcggcgtgctggagttcgtcgccgacgagggcacggtgatcatgccgcggtggatgatgcgcggcatgcgcctcgacgacggcggcctcgtcgtcgtcaggagcgccagcctccccaagggcagctacgccaagctgcagcctcacaccggcgacttcctcgacacggcgaaccccaaggccgtcctggagaagacgctgcgcagcttcacctgcctcaccaccggcgacaccatcatggtggcctacaacaacaaggagttcctcatcgacatcgtcgagacgaagcccgcctcggccgtctgcatcatcgagacggattgcgaggtcgatttcgcacctccactcgattacaaagaacctgaaaaggttcagcagaaaccatctgttccttcaagcaaggcggcttccgaagatcaagatcaaatcaaagatgagccagaattcagagcattcactggttcagggaatcgtttggatggtaaggcctcaaaaccgctagcagcagggatctcttctaatcctgctgctgcaagttctgcaatttcagactcgaacaagaaggtgaatcaggagacagcagcatcaggagttagcaactctacacgtcagaaaaaggggaagcttgtttttggttcaaacaaaagcagcagcagcagcaagaaccagagaaggctcctcctgttaaagttgatgaacttgcaaagaaggaagagcccaagttccaagcattttctgggacgagctactcgttgaaacgttagctgctgctattagggttaaaagttttggaatcaatcatttgtttcttacttggagttcgcctggttactctggcagctgtaaatgattggtagcaatgtgtatctttatcattttcagttctcccttaataattctagttattgtcttgctaattaaaagaattccgtggattacatggaacctgatactatttgcttgaccatatgtggagttttcttgcaatgtcaagcagaacgcattgctaatgtactcaaccaactccctacctagagaagattctaactgaatctaccctcaaccaacctgcttctccatcagttaattatgatcacaaaaatgaggtgatgtacaacatttcttggtcctcctcctctaggatatttctttgctgtgcttatatgagcaggttgatttgcttcagagttcaacatcatcacttccagtttgagaaaatggtgatctcatccaagggcaaagtgtgtgtaactggtgcttcaggcttcgtcgcctcttggctcatcaagaggcttcttgaggcgggctatcatgtgataggaactgtgagagacccaagcaatcgcgataaagtgtcacacctttggagattaccaagtgcaaaggagaggctgcaacttgtgagagctgatctgatggaagaagggagctttgacgatgctgtgatggcttgcgaaggcgtcttccacactgcatcgcctgtccttgccaaatctgattccaattgcaaggaagaaatgcttgttcctgcgataaatggtactctgaatgtgctgaaatcttgcaagaagaatccatttctgaaaagggttgttcttacatcctcatcatccacggtaagaatcagggatgagagtaaacatccagaaatctcactggatgaaacaatatggagctctgtggcactctgtgaaaagctacagctatggtatgccctggcaaagatatctgcagagaaagcggcatgggagtttgccaaggagaacaacattgaccttgtaactgttcttccatcatttgtgattgggcccagtttatcacatgaactgtctgtcactgcttcagacatccttggcttacttcaaggtgacacagatagattcatctcgtatgggagaatgggatatgttcacatcgacgatgtggcgagctgccacattctggtgtacgaagcacctcaggctactgggagatatctctgcaactccgttgttcttgacaacaacgaattagtcgccttgcttgcgaagcaatttccaatttttcccatcccaaggagcttgaggaacccatatgagaaacagtcatatgagctaaacacatccaagatccagcagctgggtttcaagttcaaaggggtgcaagagatgtttggtgattgtgtcgagtcgctgaaagatcagggacacttgctggagtgcccgttgtaacgaaaaaaagggatctttggcacggtaccaacaagctcatggccaagcacacacttgaattgttctgactttgattcgacacttcgcatgccactgcgtttctcttgtaataattcgcatgtcattccctcaccaaacgacaaataaattgtcaatttgttgctcagtcttcacagaccatatgcttaaatgtaatgctctgcttgctttc

SEQ ID NO: 24329 - DNA, 3961 bp, Oryza sativa
  ref <308>: DATABASE ACCESSION NUMBER: AK099771
  ref <309>: DATABASE ENTRY DATE: 2002-08-28
gatggtgtgaacttcagtttcaccaattttttttagttcacctgctagagcattggatttttggacactgattgaccattttatttgtgttttggtttgattttaggctgcgagaggaaattccgaaaagaaagacgcagagaggccacggagagggctggagatcaatttggaggatgataagatggtgcagaggatgccagcggatgaggttgctccaaagaaactcacgctgcaattggatttggagaagcccagccttggtgacgaaaagtccccatcagaacgacggccacagccggcattgcagcaacagaaacctaagaatgagataaagcatgaaaaatctgcaatgcctgctgttacaccacctatgccgatacctgttggaagttggctggggagttttccaccatttggttacctcggtcctgtaccggcactatcagctgctggtcttcatcatcctatggatgtcaagccagggtcttctgctggattacagcatgctgcattgctacctccagtacggccaaagcgctgtgctacgcattgtttcatcgctcagcagatcaggtacaaccagcaagtgacagcaaagatgcagaacttctggacaccggcgacggcagcagcggcagccgccgccgccagtagatcggcggcgccattctttggtccacgaccattcaacatgggtgtggtgccgccagcggaggctgcctcccttcttgtgaatccaatgcaggggagttaccctgtgagggcccacgcccccctgcaagaagccaaggctccttcaatggctacctctcctttccaggggagtctatcaaaggataaagcagcaatgaacaatgctgctgttgctgagtcaagccaaagaaagcaacctccggctcatgaagcacaacaacccggtcccgtgccgaacatgctgcaaggcccggcattcatctttccattcaaccagcaacaagctgcagttgtggctgctgctgcaaatgctgccagccgagtgggtgatgcaaagccttctgtgggcagtaatacaatgccaccatctgctgctgcccacaattcttcagcaaaccctggcgcagcggccatgaacctgagctttgccaacttgccaccagctgatgctcagctttttgccatcttacagaatggcggctacccgttccaggttgctgctcatgctggaggacctcctgctgcctatcgaggcatggcaccaccaggacctgctgttccgttcttcaatgggcatgtttacccttctcacatgttgcacccatcacagcagcaaggggcgtcaccacaaaatcttcagaagaaccccatgtcaaacatgtccgcttcatctcagaagcatcagccacaacaatctcaagggttactgggatatgcaccaaatgctaatgctgctgcagctgccagtaattcccagagctattccagtggcaaccagcgtccagtgctgctgcctggccttgctcaccgccaggacagtgagaaaactgtgcaagatggtccatcgggtgatgacaagtcatctcaccctcagaaaggaggttatgatcataattatgccgttccagttcatcttccaaattttgcattgatgccccctacttccgctgctggtggtggtggtcagagtgacaagaagttaagtgatcaccacccgcatcagctaccaccggcgagtcgagggcagggtgtgagaattgatcttgcttcctctccctcttttgtggttccttttggttctgtgggtgctcctggatctgccccaggtggccttgacttttcttcattggggccgaaccatcaactattccagagccatcaagaagcaggcaggcatggttatcctcagctcaattttgccacagcgcaatctgttcaagctggtcaacacaagccccagcgtcaggtcagtggagaaacaaaatctgtggctggtgattcttcaacgcataacactgttgacagtgagagaaagaaatcagcagctgcaaagtatccaggtgattcacagcagcattcactttccttctccaggcaagataacaagtcttatgtgcctcctttccttagtggaagcactaatgatagctcatcccgcaccttgagccttattgggtcagaaccttcaaatgccttcagtctaggaggcaaatcagcaaatacatcggccccggcagctacatcagcggcagcaccatccccatccagcattcctcagcagcagcagcagcagcagcagcaacaacatttccttcaacttcataagcagcagcaacaattgattcagcatcaccatatgaactctcgccccagatctgctgcaccaagcaatacaggtggatattcagaccgcttgaacatgccaagttttcggggtatgatgtacccatcaagtgctgcccaagtgggtgttcctagtcaatctcctcaattgaagccttcgtcagccagagcaacaggtgcacctgctggtgtggcttcccctggtgcttcaccctctaatttgattgtgatgaagagtggtctccatcagcaacaagctaaggctcctatgcagtctctctctacctcaaaccaccaaccccagagttcatcaaagatgggtcctgtcactaatatgtctactggaggaggggatttgtcaagatcttcaaatgctcccgttgcttctggttcaccatccaattcagtctccaaaagtactggtggcagcccaccggcttctggaagtgcaaagggtgttccaccagctgtccaattgccgtcacctcaacaacaatcagccaagaatccagcatcgacgtctggagccaagtcagctcccacaaatcactatagtagtatgcctatgccatcgatccttggtcaacagccaaatgtgccgcctggttctaattcaggcagtaagcagcagtcgcacatgatgaaacagcagccatttccacaaggaggtcatttcttcatctccaatgcatacacaccacaagcccctggagctgctggaggtgttgctcttggcctttaccagaagcgctcagctgacaagacgcagcagcagcagcagccccatcagcagagcgccatgtcggctgcagccagcaataacatgaagactcatcatcctcccgctggcagttttatgcatcttgccgcagcatctcagtctccgagcggtgtgcctcactctcatatgtcagcggcacaattgacttttggggccccaatgtcaatgtctgtaaaaccatcaagtgatcagaagcctgctgctggcaagtaagatgtcgatgctcggacttcaggacgctactctggacttgcgagctaactgctaattctgaatatgcgcgaacggagctacgcctcttggaccccagaagaagcagatcgcagcaacagccacaggcgcaagagcctgtttgctggctgttaatcgaagaggacggcgcgcccattcctttgctggatcatttgctaactgaagtatttggaatggttgatgggagtgatacttttgtgtagtaggttatcctctcatgatggaaagctggaggtgcatagaatctctttttagcagttttatgcatggatgtcaaaagctggtctctttctccctctcccaactgctttagctttgttctttttgttgttctcttaactgaagcaaaatttaattagaatgcaggacaaggtaacttttgtgatgtggtggtgttcctctttccctctatattcctcaccattctctgcttggattgttttagcaattgggagaagaaacatattatcccatagatgagccatgatttgattgggttggaggggggtggcatggcatggcatgacctgccttttcggttgtgttgtgttgtaattagctttgaaagagaagtgagaaatgaactgatgaaaagaaaaatcaaggttg

SEQ ID NO: 24330 - DNA, 2234 bp, Oryza sativa
  ref <308>: DATABASE ACCESSION NUMBER: AK099772
  ref <309>: DATABASE ENTRY DATE: 2002-08-28
gggtgcagcactgcaaccactgcaagtattcagctcccgggggcagccgtgatctttgcgagcattctttcttccacttaggtgctagcagctagcaaaactgcaagaaaggtgtacaaaaggcagggcaggaggacatacaggaggaggtcgatcgagcgacgatgggcagcttgggagaggtcgtcgagcatggcgtcagcaaggatatgcttccgttcgatggccatcctgatcccgtcgtcgacgagctcaacaggctggagaatctcctcagagagaaggacagagagctaggacatgcatatagcgaaattaaaggcctaaaggtgacggaagccctgaaggacaaggccattgctgagctgaccaaggagctgaagaaacaggatgagaagctgagtagcctggagaagcagctcgagcagaagaacctggacgtgaagaggctaagcaacgagaggaaagaagcgctgtctgcgcaattcgccgccgaggcgacgctcaggcggatccactcgtcgcagaaggacgaggaggtcgtcccgttcgacgccatcatcgcgcccctggagtctgacatcaaagcatacaggcacgagattgcattgctccaggatgacaagaaggcgttggagcggcacctgaagctgaaggaggcggcgctggtggaggcagggaacatcctgcgtagcgcgctcgagagggcgctgatcgtcgaggacgtccagaaccagaacatcgagctcaagaaacagatggagatctaccatgaggagaacaagctgctggagaagagcaacaggcagcaggtgctggacatcgagaggctcacgcacaccatcgccgagctcgaggagtccattctctccaccggagacgttgccaacgctgtccgcttctaccagaatcaggccgccaagctgaacgaagagaagaggacgctcgagagggagctagctcgcgccaaggtctacgtcaaccgtgtcgcgtcgacgaccgcgaacgagtggaaggacgatgctgacaagctgatgcctgtcaagagatggctcgaggaacggaggctcctgcagggagagattcaacggctgcgcgacaagattgccatggccgagaagtctgccaaggcagaagcccagctgaatgacaagctcaggaggaagctcaaggcgttggaagatgacatgagaaatgaatcatccaacacgtctgctagcaataaggacaacgctactagcaagcaagccactccaaagaggtcatcgtctcagccaagacgaccaatcatctcagctgacggcgccgacaagagaaggccggcgtctcagccaagggcatcggtgtcagggaaagttctgaataagcaacctggctctgaaaccgaagctgcagagaagaacaggcatgctgctgctaaacggtttgacagcccgagatcagcaaagagcgttgctgctggtggcagaggagaacgtcctgtgagaagccatctgtgggcgcataggagcaaggtggctgatgatgctggcaaggagaacaaagaacagaacccaaattacaaggcgcatttgggtgattcgcatgcagatggtgactgtggggtgcagtgcagcgaacatgaagaagccatggatttgaggaaattggacgagggaaaggctgatgattctgatgctgtaaaaagtaccaaggacagctgtgaaatttgaaggttgccttttggattgtggataatgcataatagaaaacagatggtacttaccatgtacagatgcatcattgcgacttatttgaaaagcgtgtgagcctctctgaagctttcttcaatattttagttttggagattatttggacaacagaaccggcaatggtcttcgtctttgttatatcttgtacatataaatcatgccataagcttcacaagtgcattttgtgcctgtaaaaaaacagattcaatttgtagtgttttgaggaaaggtttgtttcattaaataaagaaagttgatgcaatgtaacaaaaatgcaaatagaaatataagtgaagggtgtttctcttaattgttttttttttgtttcagatgttccagattttttttttggcaaagaattgttccagaattattgctacaagtcagtaattttcgtgtgttcgcgcaggttaactacaagttgtatgttgtacttttggcatatttaccagaaatgaagtaaataaaataagtgttaggttg

SEQ ID NO: 24331 - DNA, 3472 bp, Oryza sativa
  ref <308>: DATABASE ACCESSION NUMBER: AK099773
  ref <309>: DATABASE ENTRY DATE: 2002-08-28
ggctttggaaccatactacggcttctcccacttcactggagtatccatgccagcaagcgagttgtacaaggcaagcagtggatcatagagatgcaccagtaggtatatttttgcgatttttctactgttctagttttttgcgaattttttttttttaaacaccaccaacaaacccggtgtattttgatttttttttaagttggatcggaatgttgcatcgggtgtgttgatgatgtttcacttttttttcttcaagttcttgtggatctatttaatgtttcaaattatgaaatcttaatgttccctgtgtgagagtgaaatgtttaactatgattaaactgttttctataatatggtgaaacatcgctcatatttttactggtatcctcgattttattagagaacacagccggatgcttgcttgcagaacgtgtgccccgggtaagaggttatctgtatagaaaaatcagtcaattgactcctgctagtggacatactttgagatggacgaccatgattgtgatattggtgaccggggtgaaaagtttttacatgtcatattagatatacggacacacatttgaagtattaaacgtagtctaataacaaaacaaattacatattccgcctgtaaactgtgagacgaatttattaagcctacttaatccttcattagcaaatatttactgtagcaacacattgttaaatcatggcctaattagacttaaaagattcatctcgcgatttacacgcaatctgtataaatttttttatctatatgtaatactccatgcatgtgtcaagcattcgatatgacagcgtgaatagtttttacgtgggaattaaaccgggccaaattgaaaccatctcgttatgtcgacacgagcacggtcgccgtggtggagccgccggcgaacggcgccgacactttccaccactctgtcgtcgttgcttctcctactggcgacgacgacgaccaaattgtgccggagctgcagcgacggcgagcgtcacgccctcctacgccgcatccagccgctcatcggccctgagttctcctccagcggacggttggattgggacgaggccgtggactgctgccgctgggagggcgtcacatgcagcgtcgccggccgacgacgagaagcagcagctggtggccgccgtgtcgtgtcgctgtcgctccctggagtcggcatcgccggcgccgtggatgccgccgtgcttgcgccgttcacggcgcttgagaagctcgacctgtccggcaatcaaatcactagcttttcagctgctaatcgctcagacatggttgtcggtgctgttctcaacaacttaaccgcacttacggagctgcacctagccgggaatgagatcaccaccacaggctggatttccaatttgacgtccctgcaggttattgacatgtccagcaataaagtacatgagctcaacggtatttgtggcctccatcaactaaaatatctaagccttggttttaacatgatacaaggagtaattaatccatgcttggggaaattgcagtacctggtatacttggacatgggatcaaattttctcacaggtgagattggacaatatttactaagcaacttaacccaagtagaagaagtacatcttggggacaacaatcttactggcacatttgacttctcgtctttggctaacaactctgagctccacagcatcgtcctctcgaacaactgcaaactagaaatcgaaacggagcttgtaaggtggacaccgttgttccagctcgaatacttgaatctaagcaatagtattgtcaacaagagaagcaacgggatcatcccaacttttctgtcagcccaagtgagcctctctgggattgatctctccatatgttcactccaggggaggatcccatcttggatgttgttgtataacgtttctttaggtttcctcttgctgcgcggtaatagcatggatttcctcgacactggcaatctcggagccaacgttacgtcatcaatggaggtgcttgatctgtctgacaacaggatatcaatgaaaatgccatacaactttggaagtctatttccatatctaaagtaccttgacatgtcttccaacatgctgaatggcggagttccatcactagcagaagccgcgtcatcgttgcagtttcttgacttgtcatttaacatgctcaatggggagatatcgccggaattaatagggaatgcatccattttgacatcccttctgctctcacacaatgacctaactgggcctatgccacccttccattggagcctagggcagttgactcacctgagcgttgaaaacaaccaactatctggtcgtttgccgcctctacttacgaactgcaccaaccttgagaatctcaatgtgaggaataaccgtttatctggtgtaatcccagtaggcctcctcagctttgagaagcttggtgctctcctccttggaggaaaccagtttcatggtgtcattccttgggatatttgcctcaacaaccatatccacttcatagatctttccaataattggttctctggtgagatacaggttgcttatacagtgttttctggtcagagctgccaatgaactctgaggatgacccatttggcaacatcacacagagaagacagacatatgtcgaattcacgacgaaaggggagagcttgacatacatgggaatgcctttagagctcatgataggcatagatttgtcgatgaatcggctatctggacccatccctagctctgttgggttcttgctgcagctcaaatcgctcaacctatcacacaacaagcttgttggttcgatacctgacacgttcatgtacctgcatgaaatggagagcatggatctctcacacaaccatctcaatgggagtgtcccagtggagctagccaacctctccttcctgagcttcttcagtgttgcatacaacaatctctccggtgagattccctttgaatcacagttttgtacgttgaacggaacggcattcgaagggaatgagaacctctgtggagaaattgttgacaagatttgtccaatgaactcgaactgctcacatgatagcgatgatgagatgcatcagttgttgtcaacggataccatggacacgccgctgatctactggtccttcgttgctgggtccttcgccattggcttttggggcatcattgcattacttatatggaatacagccttcaggagcaggctctgcagcttcatggatggatgcatgtctaagatgggctggtttcttgtgccttgatttaaagccacttgtgccctcaactacaatatcaatcaatttttgctctgtttctattccaatacagtattccgcattaaacagatttttgtaagaggagttgaatttacagaattccttttgatggaaaagctagtaactccttattcactcaacattggaaactggttgttttgaagtcc
